United States Patent Application Publication US 2005/0196754 A1 - sequence listing, part 15

SEQ ID NO: 29404 - DNA, 7153 bp, Homo sapiens
  SIMILAR (3704)..(3615): 761254mologous to Homo sapiens unknown,accession number AF148856,Smith-Waterman Score=121.
atgctggcagtcctcagagccctcgcttgctctccgcacctcccctgcctgggctcccactttggtggcatttcaggagcccttcagcccctccactgcactgtgggagcccctttctgggctggccaaggctggagcccactccctcagcttgcagggaggtgtggagggagaggcgcgagcgggaaccggggctgcgtgcggcgcttgcgggccagctggagttccggagcagccagccagccctgctggctctgggcaaaatgggagacttagcacccgggccaatggctgcagagggtgtactgagtcccccagcagtgctggcccaccggcgctgcactcgatttctcgccgggccttggctgccttcccacggggcagggctcgggacctgcagcccaccatgcctaagcctcccacccactccatgggctcctgtgcggcaagcggagcctcccagacgagcgccgccccctgctccctggcgcccagtcccatcgaccacccaagggctgaggagtgcgtgcgtcacggcgcgggactggcaggcagctccacctgcagccctggtgcgggatccactgggtggaagccacctgggctcctgagtctggtggggacgtggagagtctttatatctagctcagggattgtaaatacaccaatcagcaccctgtgtttagctcaaggtttgtgagtgcaccagtcaacactctgtatctagctgctctggtgagggcgtggagagtctttatgtctagctcaaggattgtaaatacaccaatcagcactctgtgtctagctcaagtaacggtcccaccgcccctgcatactcggtttttcgccctttccccgcgccagccccgttcctttaaaaatggactcttgttccaaactggaaccaccctcaaccccctctcgggctattcttctgattataaggggtttggccgatttcggaaccacccatcaaacaggattttcgcctgctggggcaaaccagcgtggaccgcttgctgcaactctctcagggccaggcggtgaagggcaatcagctgttgcccgtctcactggtgaaaagaaaaaccaccctggcgcccaatacgcaaaccgcctctccccgcgcgttggccgattcattaatgcagctggcacgacaggtttcccgactggaaagcgggcaacataaaggttctccacgtccccaccagactcaggagcccagctggcttcacccagtggatcccgcaccggggctgcaggtggagctgcctgccagtcccgcaccatgcgcctgcactcctcagcccttgggtggtcgatgggactgggcgccgtggagcagggggaggcgctcattggggaggctcgggctgcacaggagcccatggagtgggtgggaggctcaggcatggctggctgtaggtcctgagccctgccccgcgggaaggcagctaaggcttggtgagaaatccagcgcagcgcaggtgggctggcactgctgggggacccagtacaccctccgcagccgctggcccgtgtactaagcccctcattgcctgaggtaatcagttgcaggacctgattgatggtcaaagtgcgtgatgtttggtacagcatgagactgcagttaaactgcccagacatagccttatggcactgaccatttactctggtgttaccagggattggtgttaccatgcaactataatgagaactcgtcttccaaagaacaggcttgaaaaaaggatattgtgtccctcgggcataggcccacggacttaggtgaggacaggcactcttgcctttgtgcccaaacgttgcattttccaagacacccctggcccaccataccccgatcctgtgcgtataaaaacccgaagacccagcactcaggcaggccatccaccggcagaacaatgcggagtttggccagggcagttggagaagagtccagctgctgagaggcccgactccaggggaaaccttcccactccatctcccttctggctccttcatctgctgagagctacttccactcagtaaaacctggcactcattctccaagcccaggtgtgatccgattcttctggtacaccagggcaaaaatcccagatcctcagcaatggttgcagttgaaaaagaaatctctgaattgccagataaattaagaaggtttaatatttctcccattttgtaagttgcctgttcactctgatggtagtttcttttgctgtgcagaagctcttttgctgtgcagaagctctttagtttaattagatcccatttgtcaattttgtcttttgttgccattgcttttggtgttttagacatgaagtccttgcccatgcctatgtcctgaatggcaatgcctaggttttcttctagggtttttatggttttaggtctaacgtttaagtctttagtccatcttgaattgatttttgtataaggtgtaaggaagggatccagtttcagctttctacatatggctagccagttttcccagcaccatttattaaatagggaatcctttccccattgcttgtttttctcaggtttgtcaaagatcagatagttgtacatatgctgcgttatttctgagggctctgttctgttccattgatctatatctctgttttggtaccagtaccatgctgttttggttactgtagccttgtagtatagtttgaagtcaggtagtgtgatgcctccagctttgttcttttggcttaagattgacttggcgatgcgggctcttttttggttccatatgaactttaaagtagttttttccaattctgtgaagaaagtcattggtagcttgatggggatggcattgaatctgtaaattaccttaggcagtatggccattttcacgatattgattcttcctacccatgagcatggaatgttcttccatttgtttgtatcctcttttatttccttgagcagtggtttgtagttctccttgaagaggtccttcacatcccttgtaagttggattcctaggtattttattccctttgaagcaattgtgaatgggagttcactcatgacttggctctctgtttgtctgttgttggtgtataagaatgcttgtgatttttgtacactgattttgtatcctgagactttgctgaagttgcttatcagtgtaaggagattttgggctgaaacgatggggttttctagatatacaatcatgtcatctctgaaaatttgaagggtccttgctgcagccacactcacatcattggcttgttcatcaacagtcaatattctgagaacactgaagggaaagaagatggttctctgtagaccaccccagaatagctcaaattttttcctctggctcagctgaatgacaagagcaaggttagggctgacataggcaagctcacttgctagggtaggaaaccctctaggacagttccagaagttagcggggtttggtggaagggtattttggcaccagcagagagcatgctgggctgctgcaaggagcaggagctggcaatcaacagcgagtttggatgttggcaacctgccaccaacaggccccagtatgtaatgttcccctccctgtatccgtatgttctcattgttcaactcccacttatgagtgagaacatgtggtgtttggttttctgttcttgtgttattttgctgagaatgttggtttccagcttcatccatgtcctgtaggagaagttcatcacatatatttttggccagattatctacaaaagcagttgtttgtactgattcagtaatagatacaacagcaatgctaacagttgccataatgactatggctgagcctgtaaagaccataagtgtaaatgtgaatcctttgtggccgacctgggacagggcactttctaaggtggcaagggcagaagaatcttgccaattgcatgtcaaattggctggtagaagtgcctcagattgtctccttaataccacgacactggaagtttttaaactagacatatcatgaccagtgatacatgaggcaaaccaagcctgtccctgcacccgggtcacaaatgtggcatttccaggtgtaatggaaatgttagttccagactcaggagcccagctggcttcacctagtggatcccacaccggggctgcaggtggagctgcctgccagtcctgcgccgtgcgctcacattcctcagcccttgggtggtcgatgggactgggtgccgtggagcagggggtggtgctcatcggggaggctcgggccgcacaggagcccatggagtggggccagcagggctggctggctgctccgagtgcagggcccaccaagcctacgcccaccggaaccccagctggcccacaagcgccgcacgcagccctggttcccgctcacgcctctccctccacacctccctgcaagctgaaggagtgggctccagccttggccagcccagaaaagggctcccacagtgcagccgcagccgccatggcgatgaactttggggaccatgccagcgggttccgccatgatgatgtgatcaggttcatcaacaatgaagtcctcaggaacggcggcagcccagccttttacacggccttccgctcgcggccgtggaacgaggtagaggaccggcttcgggccattgtggccgacccgcgggtgccccgtgccattaagagggcctgtacctggagcgctttggcgctgagtgtgcaagtggctgcgaggcagcaggaggagctgctgtaccaggtttggtggctgcaagggcatgtggaggagtgccaggcgacctcctgggctctaacttcccagctgcagcagctgcgcctggagcatgaggaggtggcaacacagctgcacctcacgcaggccgccctgcagcaggtgctgaatgagcgtgatgggttatgcgggaggctgctagaagttgagagatccatgcaggtctatccgatgcctcaggattttgtacccggtccagaagccggccagtatgggcctgtggccgggactttaaatgcagaacagagtgaggcggtggccacagaggcacagggaatgccacattcggaagcccaggtagcagccccaacagctgtgtattacatgcctgaaccccagagtggcagggtccagggcatgcaacctcttctgctaatgcaggcacctcatccagtcccattccatatgccttcaccaatgggactgccatactcaacacctctaccacccccagtagtaatggaatcagcagcagcaattgcaccacagatgcctcctgcagggatctatccacctggtctttgggccacagtgggatcccaggaggagacggcccctccgtgggaccagaagtgccatggccaggatggatatcctgagaatttccagggagtatatcacccaggagataacagaagctgcaaccaaaaggaaggttctgagtgtccccaaggaatgacttcccaaggggacagcagcagccacagcctgaagaaagatccagtgatgcaagagggcacagctcccccagagtttagcaggagccacagcctggagaaaaaaccagtgatgcccaaggagatggtccccctaggggacagcaacagccacagcctgaagaaagatccagttgtgcccaaggagattgtccccataggggacagcaacagccacagcctgacgaaaaatccagttgtgcacaaggagatggtctccctgggggacagcaacagccacagcatgaagaaagatccagtgatgccccagaagatggtccccctgggggacagcaacagccacagtctgaagaaagatccaatgatgtgccaggagatggtccccctgggggacagcaacagccatagcctgaagaaagatccagtggtggcccagggcacagctcccctgatgtatagcaggaggcacagccagaagaaagtgccaatgatgcccaaggagatggtccccctgggggaaagccacagccacagcctgaagaaagatctagttgtgcccaaggagttggtccccctgggggacagcaagagtcacaggatgaagaaagatccagtgatgccccagaagatggtccccctgggggacagcagaagccacagcctgaagaaagatccagtgatgccccagaacatgatccccctggaggacagcaacagccacagcctgaagaaagatccagtgatgccccagaacatgatccccctggaggacagcaacagccacagtctgaagaaagatccaatgatgcaccaggagatggtccccctgggggacagcaacagccatagcctgaagaaagatccagtggtgccccagggcacagctcccctgatgtttagcaggagacacagcctgaagaaagtgccagtgatgcccaaggagatggtccccctgggggacagccacagcctgaagaaagatccagtgatgccccagaacatggtccccctggaggacagcaacagccatagcctgaagaaagatccagtggtgccccagggcacagctcccctgacgtttagcaggagacacagcctgaagaaagtgccagtggtgccccaggggacagcctccctggggttcggcagaatccacagcctgaagaaagagttagtgatgcccgaggagatggtccccctgggggacagcaacagccacagcatgaagaaagatctagtgatgcccaaggagatggtccccctaggggacagcaacagtcacagcctgaagaaagatccagtggtgcaccaggaggtggtctccttgggggacagcaacagccacagcctgaagaaacatccagtgattccccagggcacagcctcactgaggtttagcaagagccacagccagaaggaagatcaggagaggccccaggcaacccctctggaggatagcaagagccatggtgtgaaaaatagcccatggaaacaccagcctcaggggcagaaggtcaaggaacaaaaaaggaaaaaggcctcagaatcccagcaacagaagcctgcctcatgctccagcccagtgaattgggcctgcccatggtgtaatgccatgaattttccacggaacaaggtgtgctctaaatgcaagagagtccgtatgccagttgagaatggcagcgttgacccagcgtaa

SEQ ID NO: 29405 - DNA, 2092 bp, Homo sapiens
  SIMILAR (884)..(1225): 951254mologous to Homo sapiens Human secreted protein, SEQ ID NO: 4416,accession number G00335,Smith-Waterman Score=578.
atggagtctgagtatgtcctatgcaactggaaagaccagttgtggccagcaaaagttttgtccagatctgaaacttcatcaaacagtaagaggaaaaaggcattttctctagaagttcaaatactctcactagatgaaaaaattaaattggacagcacagaaacaaagatcctaaataaatctcaaattgaagccattgctgcctcattaggactacagtcagaggacagtgctccacctacagaggaaactgcctatggaagatcactaaaagtggcactgggtattctgaatgagagaacaaatttgagtcaagcaagcacttcagatgaagaggagatcactatgctgtctcaaaatgtaccacaaaaacagtccgattcaccccctcataaaaaataccggaaggatgaaggtgacttaccagggtgtcttgaggaaagggaaaactcagcatgcttgttagcatcttcagagagtgatgattccctgtatgatgataaatcacaagcacccacaatggtcgatactattccaagtgaagtggaaacaaagtcattacaaaactctagctggtgcgagactttcccttcactttcggaagataatgatgaaaaagagaacaagaataagattgatatctcagcagttatgtctgtgcattctgcagtcaaagaggaaagtgcatgtgttaaagatgaaaagtttgctccacctttgtcacctttgtcatcagatatgctcattatgcccaaagctttgaaagaagagagcgaggatacctgcctagagaccctggctgttccctctgaatgctctgctttctcagagaatattgaggatcctggagagggtccctcaaatccatgcttagataccagaccagaatcaaccttccatggaatcagagatgggggctgcagcatgccctgggagttgttcaagggaattcgaggtttcatttagtgcctctaaccctgtcttggattattcacatcttattggtagtgaaagaaattttcagagactggattttgaagaacttgaggaagaaggtcaagcctctgacaagtcattgcttccaagtcgcattaatctttctctattagatgatgatgaggaagacgaagaacttccacgcttcattttacattatgagacacatccgtttgaaacaggaatgatagtctggtttaaatatcagaaatatccattttggccagcagtgataaaaagtatcagacgaaaagagaggaaagcaagtgtgctttttgttgaggcaaacatgaattctgaaaagaagggcattagagtaaattctagaagattaaagaaatttgattgtaaagagaaacaaatgctagtggacaaagccagggaggattatagtgagagtattgactggtgcatctcactaatttgtgactacagagttagaataggttgtggttctttcacgggctctttgcttgagtattatgctgctgatattagttacccagttaggaaagaaacaaaacaggatactttcaggaacaaatttccaaagctgcataatgaagatgccagggaaccgatggctgtaacttcccagaccaagaaaatgtccttccaaaaaattctccctgaccggatgaaggctgctcgggaccgagccaacaagaacctggtggacttcattgtgaatgcaaagggaacagagaaccatcttctggccattgtaaatggcacaaaaggatccagatggctgaaatcatttttgaatgcaaataggttcacaccctgtattgaaacatactttgaggatgaagatcagttggatgaagtggtgaaatatttacaagaagtctgcaatcaaatagatcaaataatgccaacttggataaaagatgataaaattaaatttatcctagaagttcttctgccagaagcaattatttgttcaatttctgctgttgatgggttagattacgaggcagctgaagcaaagtatctaaaaggaccatgtctaggctacagggaaagagaattatttgatgcaaaaataatatatgaaaagagacgaaaagcaccaacaaatgaagctcactaa

SEQ ID NO: 29406 - DNA, 1147 bp, Homo sapiens
  SIMILAR (1042)..(26): 1001254mologous to Homo sapiens CLN3 protein,accession number AF015598,Smith-Waterman Score=1830.
tgcgtcctgaggatcccgagtatcaggagagctggcagaggaagtcatgcagaggcaaagccaggagccccgacagggagatccccagtgtgtcagagatgcaggtggccgccattgcaaactcccggtgttcatcactggtctccagggcgatgttgtggaaggtgttcacgtaggctgcgcctcccaggagcccctcatacagaatgatcaggaagacgaggtagatgcttggcagaaagccgaaccacacgtctgccagcaggaacaccaggttgaggcactgcagcagggccagggcccaggtgaaacggatgcgacagcagcgaagagaagagcgggaggcaaagacgccagcctggtacagcatctggtaccagcggtattgctgagcgtgactcagggaagtgttccagaaaaagaggagttcaaaaagtccctggttaatgaaatactcggcaaagtaaactacgaccaagggaacaatgtaccacagcagacccttgaacactgtccacctttcccgaagggagaggctggagctggagcctggcttcgactccggggcctcggttcttatgaggggctgccgggctgcgctctctgcttcttcttcccctccagggtcctgggcctcaggagatgtgagcaacaagaagtagcacacaggctggtccccacagaatgagaaaaggcaaccaggacgaagcttccagcagcacaaatcccactgacgagaacccgggggagccgtagagacagagttgcagtcaaatcgtgatgagctgttgtgggggatcggcgttgggcctgggtccacatggctctggtttcccgatgtcctcttgtggctaaggatgtcgtgggcggcactcagcatcaccacataagagaagttgttgcaaaggcccagcaaccagaagcccaccgcgttcttccaatgcgcgccctgatggtccaacagagggagccggggctccgggacggtctcctccccctcggaatccgaaaagcgccgccgcgagcctgcacagcctcccatcgcatcaagttcaggtcccccgagggtccagggtcatagagtgtccaaagggggctcccacgggagggatgagggtctgcgacaggtgacaaggatcaactcgag

SEQ ID NO: 29407 - DNA, 1225 bp, Homo sapiens
  SIMILAR (582)..(37): 921254mologous to Homo sapiens CLN3 protein,accession number AF077960,Smith-Waterman Score=897.
tgaatgtgacctgcgtcctgaggatcccgagtatcaggagagctggcagaggaagtcatgcagaggcagagccaggagccccgacagggagatccccagtgtgtcagagatgcaggtggccgccattgcaaactcccggtgctcatcactggtctccagggcgatgttgtggaaggtgttcacgtaggctgcgcctcccaggagcccctcatacagaatgatcaggaagacgaggtagatgcttggcagaaagccgaaccacacgtctgccagcaggaacaccaggttgaggcactgcagcacggccagggcccaggtgaaacggatgcgacagcagcggagagaagagcgggaggcaaagacgccagcctggtacagcatctggtaccagcggtattgctgagcgtgactcagggaagtgttccagaaaaagaggagttcaaaaagtccctggttaatgaaatactcggcaaagtaaactacgaccaagggaacaatgtaccacagcagacccttgaacactgtccacctttcccgaagggagaggcacggagctggagcctggcttcgactccggggcctcggttcttatgaggggctgccgggctgcgctctctgcttcttcttcccctccagggtcctgggcctcaggagatgtgagcaacaagaaatagctggggtagaaggcagtgagggagaggaaggtgacctccccaaggcctgatgagatgctagcgaagaccacaccacacaggctggtccccacagaatgagaaaaggcaaccaggacgaagcttccagcagcacaaatcccactgacgagaacccgggggctgtagggcagcaggtgaaggccaagaggagccaacaatttgatgacgagtgtggggaggatgtccgccaggagcacagcagccgtagagacagagttgcagtcaaatcgtgatgagctgttgtgggggatcggcgttgggcctgggtccacatggctctggtttcccgatgtcctcttgtggctaaggatgtcgtgggcggcactcagcatcaccacataagagaagttgttgcaaaggcccagcagccctcggaatccgaaaagcgccgccgcgagcctgcacagcctcccatcgcatcaagttcaggtcccccgagggtccagggtcatagagtgtccaaagggggctcccacgggagggatgagggtctgcgacaggtgacaaggatc

SEQ ID NO: 29408 - DNA, 1716 bp, Homo sapiens
  SIMILAR (635)..(282): 991254mologous to Homo sapiens Batten disease CLN3 mutant protein in family L61,accession number W13593,Smith-Waterman Score= 618.
ccatggataaaatcggcatttattcagaaggcatgatgccaggaagaaactccccaagtgggagacaatggctggcccccctgcaagggaaacaaggcttcagcccttccctactcccagacctgccgggaaggctgggagcacagttcatggagggtctctggggtgggcctgggtgtctgacctgtccctctgcccacaggtgaatgtgacctgcgtcctgaggatcccgagtatcaggagagctggcagaggaagtcatgcagaggcaaagccaggagccccgacagggagatccccagtgtgtcagagatgcaggtggccgccattgcaaactcccggtgctcatcactggtctccagggcgatgttgtggaaggtgttcacgtaggctgcgcctcccaggagcccctcatacagaatgatcaggaagacgaggtagatgcttggcagaaagccgaaccacacgtctgccagcaggaacaccaggttgaggcactgcagcagggccagggcccaggtgaaacggatgcgacagcagcggagagaagagcgggaggcaaagacgccagcctggtacagcatctggtaccagcggtattgctgagcgtgactcagggaagtggtccagaaaaaagagggagttcaaaaagtccctggttaatgaaatactcggcaaagtaaactacgaccaagggaacaatgtaccacagcagacccccagccatcatccgaaccttgaacactgtccacctttcccgaagggagaggctggagctggagcctggcttcgactccggggcctcggttcttatgaggggctgccgggctgcgctctctgcttcttcttcccctccagggtcctgggcctcaggagatgtgagcaacaagaaatagctggccagcagcagggcagggatacccagcatggacagcagggtctgctgaggggagaggccggcctgggtgaggcccaggtaggacagggcccccagcagcccagctcccccagtccctgaggaccaccaggagatcacggccctggggtagaaggcagtgagggagaggaaggtgacctccccaaggcctgatgagatgctagcgaagaccacaccacacaggctggtccccacagaatgagaaaaggcaaccaggacgaagcttccagcagcacaaatcccactgacgagaacccgggggccagacctgtagggcagcaggtgaaggccaagaggagccaacaatttgatgacgagtgtggggaggatgtccgccaggagcacagcagccgtagagacagagttgcagtcaaatcgtgatgagctgttgtgggggatcggcgttgggcctgggtccacatggctctggtttcccgatgtcctcttgtggctaaggatgtcgtgggcggcactcagcatcaccacataagagaagttgttgcaaaggcccagcagccagaagcccaccgcgttcttccaatgcgcgccctgatggtccaacagagggagccggggctccgggacggtctcctccccctcggaatccgaaaagcgccgccgcgagcctgcacagcctcccatcgcatcaagttcaggtcccccgagggtccagggtcatagagtgtccaaagggggctcccacgggagggatgagggtctgcgacaggtgacaaggatcaacgcccgattgccggtcccagctccggcttgtctagggg

SEQ ID NO: 29409 - DNA, 394 bp, Homo sapiens
  SIMILAR (35)..(394): 1001254mologous to Rattus norvegicus UFD1,accession number AF234601,Smith-Waterman Score=632.
ggagcggagtctgccaggtggtgtccatcatggccgacttaacattacctatcccatgctgttcaaactgaccaataagaattcggaccgcatgacgcattgtggcgtgctggagtttgtggctgatgagggcatctgctacctcccacactggatgatgcagaacttactcttggaagaaggcggcctggtccaggtggagagcgtcaaccttcaagtggccacctactccaaattccaacctcagagccctgacttcctggacatcaccaaccccaaagccgtattagaaaacgcacttaggaactttgcctgtctgaccaccggggatgtgattgccatcaactataatgaaaagatctacgaactgcgtgtgatggagaccaaacccgac

SEQ ID NO: 29410 - DNA, 696 bp, Homo sapiens; identical to SEQ ID NO: 18962
  SIMILAR (334)..(693): 781254mologous to Homo sapiens ubiquitin fusion degradation 1 protein,accession number AJ239058,Smith-Waterman Score=470.

SEQ ID NO: 29411 - DNA, 564 bp, Homo sapiens
  SIMILAR (451)..(558): 441254mologous to Elephantulus edwardii reverse transcriptase,accession number U62039,Smith-Waterman Score=93.
atgacctacagttactcatttttcaggcctgagttgatcgttaatcatcttaattatgttcattctgaagccaacaggagaaccaagaccaaaactttattgtctctgctttcatttcttgatgaaacctctggactaagcacacatcttccttgtttatctctctcaaaggagtgtggagtgcttcatctggacatccacgggaagaaggaagacatgagaatcacccaacagtcttcccagctatacctgtgggacatgggtggttttacaatatttaagaacctgtggatgagcctcatacccagagggaacaaacgctccccaaaaagagttacagaaaccatcctgagagattttaagcagaagcaaagttcaaagatccaagaggagagacgaagagagtctgcaggaccaaacctctcttcattctggtttgtggacttaaagaaagaaaagaaaaccttgccaattgcaacaacatggatgaacctggaggacattatgctaaatgaaataaaccggacacagaaggacaaatactacatgatatcacttacttga

SEQ ID NO: 29412 - DNA, 1377 bp, Homo sapiens
  SIMILAR (1350)..(313): 951254mologous to Homo sapiens N-acetylgalactosamine 4-O- sulfotransferase 2 GalNAc4ST-2,accession number AF239821,Smith- Waterman Score=1763.
tcaaatgagatgcacacaaatcttcatctccatcttaatataaggcatttcctcctgaatcctcgttttctttcctcctttctcaaaaacagtgtcattcctcatcatggaggcagcatatgggccactgatggtatgcaagatgcccttaggtgatacatggaatggattttcccagacgctcagctgtcctggagtggatgaagctgagtgttcagctagaaagtaatgtgtccgattcagtacatcaacaaacccgctttgttctggggcaaaagaagcaaatctaattgtgttgatcatttccagtgagacttgagcattggttctttcatcggaagagtgcctatccttaaagttgggaaatttcagctcctttggagcaccgatcatctgtaaaaagtaattggcatcttcttccaaagtctcaaatttccctacaaaatcatagttgatcaaacacggatagcagagtttgctgaccttttcccagtgaatgtccattcctactggacggtgggaatccagcaagtagtggataaactctttgaacttgactccagatccattaattaatgcttcttcacaggcatttggtcgatatttcttgataattgcctttccgaatactggatggtaataactattggggtgttcaaatttgtccctaaaggctgatactaatctttccatgggatcacgaacaaacacagctttggtgtaagtatttaagcgggtatatatcccttttaggtcaaagctatctagcttcttcaaatgcttcccgtagtggacagcattgtgggagatgttgtatgcagaggaagccaatccatttagtaccatcagaattcttttccaattggaacagccagccttaggtacctcacaatataagattttgtgtttatcttctacatagattctggatactgtatgaaaaagatgtgactgatgatgactcaccccaccgtatttcttgcaaaactcctgaaggaaagaccttcgtttctcttgggtctcctcagttttcttccatttattatctttgactaaacttttgtttaaagggtgaatgtccactggccaattcatgttgctgaacttgttaaaaacagtcttagctccttgacgtttttcaatcaacttctctgttggtgaccctgtggacttacttaaagcttgatcccctccttgtgaatgactggtctttgttaagagcctagtagatctctcagaattgagtagaagattttcctttttttctcgtacatcctcaggcatgtgaaacttggggttcttccagttcagtgttatttcctggtttgcaattctttgaccacttttcactgttacccaggtcttaacagccagcat

SEQ ID NO: 29413 - DNA, 704 bp, Homo sapiens
  SIMILAR (210)..(497): 981254mologous to Rattus norvegicus UFD1,accession number AF234601,Smith-Waterman Score=503.
ttggcgcggcggcagcggcagcggcggctgggagagcggtcggcggggtttcttcgttgcattgcctgagaggagcggagtctgccaggtggtgtccatcatgttctctttcaacatgttcgaccaccctattcccagggtcttccaaaaccgcttctccacacagtaccgctgcttctctgtgtccatgctagcagggcctaatgacagtaattatgccaccctcggccctggaccaactcagccgacttaacattacctatcccatgctgttcaaactgaccaataagaattcggaccgcatgacgcattgtggcgtgctggagtttgtggctgatgagggcatctgctacctcccacactggatgatgcagaacttactcttggaagaaggcggcctggtccaggtggagagcgtcaaccttcaagtggccacctactccaaattccaacctcagagccctgacttcctggacatcaccaaccccaaagccgtgtatctttttcaaataagcggagttcttctagacaaaggagagtgtgctggcgaatgtgtctgcagattagaaaacgcacttaggaactttgcctgtctgaccaccggggatgtgattgccatcaactataatgaaaagatctacgaactgcgtgtgatggagaccaaacccgacaaggcagtgtccatcattgagtgtgacatgaac

SEQ ID NO: 29414 - DNA, 1683 bp, Homo sapiens
  SIMILAR (826)..(1137): 961254mologous to Homo sapiens N-acetylgalactosamine 4-O- sulfotransferase 2 GalNAc4ST-2,accession number AF239821,Smith- Waterman Score=542.
atggacgtagagtgtggaataatagatattggagatgcagaagggacatggctgtcttcagtgaatacattcacattcattttctccgtggctctgccctttctggaattcttctataattttatatacattgacatcagcattcctattaaattttcccatcttctgtgctctgcctctctgttgttttggcctcagagccctgacatcctggacatcactaaccccaaagctgtattagacaacgcacttaggaactttgcctgtctgaccaccgggaatgtgactgccatcaactgtaatgaaaagatctatgaactcgaactgcgtgtgatggaaaccaaacccaacaaggcagtgtccatcactgagtgtgacacaaacgtggactctgatgctcccctgggctacaaagaacccgaaagacaagtccagcacgaggagttgacagaagattccctcaactcgtgtatgtcacctgccaggttcctagaagcatctgagattgtgttcggtgaccaggaggcaattcttccaggtgtcctcctcattctgaaacagttcagggcgggcaactggaaataccttgaagaagacgctgaagagaaaagtgcctggataaaggagcaagagcctagtactttggtcattccaacaatgatgttcagtagagcttcttggtacccaacatatattattttaaactggagagctgaagcaaccaaaggtgggatgatgtcctcattcattctaactagagttgactccggcacatttggctacctcaagtctctcgtacccccgccccccgacgagaaacgcccacagcatttgaagaagctagatagctttgacctaaaagggatatatacccgcttaaatacttacaccaaagctgtgtttgttcgtgatcccatggaaagattagtatcagcctttagggacaaatttgaacaccccaatagttattaccatccagtattcggaaaggcaattatcaagaaatatcgaccaaatgcctgtgaagaagcattaattaatggatctggagtcaagttcaaagagtttatccactacttgctggattcccaccgtccagtaggaatggacattcactgggaaaagctgcttcagctccagctgtggctaaaaggagccaacatagagctcaggctgtcacttcagagggtgcaagcccaaagccttggcagcttccacatggtgttgagcctgtgggtgcacagaaatcaagaattgaggtttgggaacctccgcctagatttcagaggatgtatggaaatgcccagatatccaggcagaagtttgcggcagtggcagacccctcagggagaatgtctgccagggcagtgtgaaaggaaaatgtggggttggatcccttacacagaatccccactggggcactgcctggcggagctaccccagaatggtagatccactgacagcttgcaccatgcacctggaaaagccacagacactcaacatcagcccatgaaagcagctaagagaggagctgtaccctgcaaagccacaatggtggagctgcccaaggccattggagcctacctcttgcatcagcatgacatggatctctgtgcctctgtatgtggccttcttataaggacaccagttgttggatttagagccgatcgtcatctagtatga

SEQ ID NO: 29415 - DNA, 2223 bp, Homo sapiens
  SIMILAR (979)..(1452): 771254mologous to Homo sapiens ubiquitin fusion-degradation 1 like protein,accession number U64444,Smith-Waterman Score=670.
atgacttctgtcatcagagacacaataatgacaagatatggtccaattttacccacacatcagccacatccaattcaacagggagcatgctccagggataagagaatctggtcctgggaacagaaacaggaaactggcagccagctggggtgggaatgtaaattagtacaactactgtggaaaacggtgtggagattccttaaagaactaaaagtagaattaccatttgatccagcaaccccactactgagtatctacccaaaggaaaagaagtcactatatgaaaaagacacacgcacatgcatgtttatagcagcacagttcacaattgcaaaaatatggcatcagcctaagtgcccaccaaccaacaagtggataaagaaaatgtggtatacatacatcaagaaatactactcaaccataaaaaggaatgaaataatgtattttgcagcaacttggatggagctggaggctattattctaagcgagcatccacttgtgctgattcatccacagattttccggccagatgccccattggcaaagccctggagccttcccttcattagttctccgctccagccatccgagaagtcaaggttaaaaacaacacactggggtggcggcggcagcgaggacagcggtcggcagggtgcctttgtcgcattccctgagagaagcggtgtctgtgaggtggtgtccatcatgttctctttcaacatgttcaaccacctaattcccagggtcttccaaaaccgcttctccacacactaccgctgcttctctgtgtccacgctagcagggcctaatgacaagtcagatgtggagaaaggagggaagataattatgctgccctcagccctggaccaactcagccaacttaacattacctatcccatgctgttcaaactgaccagtaagaatttggaccgcatgacgcactgtggcgtgctggagtttgtggctgatgagggcatctgctacctcccacactggatgatgcagaacttgctcttggaagaaggcagcctgcctcagagccctgacatcctggacatcactaaccccaaagctgtattagacaacgcacttaggaactttgcctgtctgaccaccgggaatgtgactgccatcaactgtaatgaaaagatctatgaactcgaactgcgtgtgatggaaaccaaacccaacaaggcagtgtccatcactgagtgtgacacaaacgtggactctgatgctcccctgggctacaaagaacccgaaagacaagtccagcacgaggagttgacagaaggtgaagccgaccacagtggctatgctggagagctgggcttccgtgccttctccggctctggcaacagactggatggaaagaaagaaagcccctccccaatcaagcctggagacattaaaagaggaattcccaatcatgaatttaaacttgattccctcaactcgtgtatgtcacctgccaggttcctagaagcatctgagattgtgttcggtgaccaggaggcaattggctccacattcatggggactcatcccattccagaacttactcttacttttaactggtggagaagagtaagcatccactttcctgagagctccaacaagagagaagagtgtggagtgcttcatctggacatccacgggaagaaggaagacatgagaatcacccaacagtcttcccagctatacctgtgggacatgggtggttttacaatatttaagaacctgtggatgagcctcatacccagagggaacaaacgctccccaaaaagagttacagaaaccatcctgagagattttaagcagaagcaaagttcaaagatccaagaggagagacgaagagagtctgcaggaccaaacctctcttcattctggtttgtgggcagaatctggaaggcagctatagggcaggtgggtggttcttttagatctgagtactgggcattttcagaagagaggcatagagaaggtagaagaaaagggatgctttttagccaaatcctccatatgtttcagatctgcaaaagcccaggaaaattaccctatggaggtgaatctagctatagtacatttcttcggaaaaattactcacccagacgctcagctgtcctggagtggatgaagctgagtgttcagctagaaagtaatgtgtccgattcagtacatcaacaaacccgctttgttctggggcaaaagaagcaaatctaa

SEQ ID NO: 29416 - DNA, 1212 bp, Homo sapiens
  SIMILAR (378)..(569): 561254mologous to Homo sapiens ubiquitin fusion-degradation 1 like protein,accession number U64444,Smith-Waterman Score=148.
gagcggtcggcgaggtttcttcgttgcattgcctgagaggagcggagtctgccaggtggtgtccatcatgttctctttcaacatgttcgaccaccctattcccagggtcttccaaaaccgcttctccacacagtaccgctgcttctctgtgtccatgctagcatggcctaatgacaggtcagatgtggagaaaggagggaagataattatgccaccctcggccctggaccaactcagccgacttaacattacctatcccatgctgttcaaactgaccaataagaattcggaccgcatgacgcattgtggcgtgctggagtttgtggctgatgagggcatctgctacctcccacactggatgatgcagaacttacttcttggaagaaggcggcctggtccaggtggagagcgtcaaccttcaagtggccacctacttccaagagttaagttcttgttacctcccacattgggttgatgcagaacttactcttgggaagaaggcggcctgggtccaggtggagagcgttcaacctttcaagtgggccacttatttcaaatttccaacctcagagccctgacttcctggacatcaccaaccccaaagccgtattagaaaacgcacttaggaactttgcctgtctgaccaccggggatgtgattgccatcaactataatgaaaagatctacgaactgcgttgtgatggagaccaaacccgccaagccagtgtccattcattgagtgtgacatgaacgtggactttgatgcttcccctgggctacaaagaacccgaaagacaagtccagccatgaggagtcgacagaaggtgaagccgaccacagtggctatgctggagagctgggcttccgcgctttctctggatctggcaatagactggatggaaagaagaaaggggtagagcccagcccctccccaatcaagcctggagatattaaaagaggaattcccaattatgaatttaaacttggtaagataactttcatcagaaattcacgtccccttgtcaaaaaggttgaagaggatgaagctggaggcagattcgtcgctttctctggagaaggacagtcattgcgtaaaaagggaagaaagccctaagtgaggactgttggctgattggaaaataataaaagaatcatttgcaacatcttggcttttagttactggcactgacagggacgagcctcatcagagaa

SEQ ID NO: 29417 - DNA, 569 bp, Homo sapiens
  SIMILAR (33)..(404): 921254mologous to Homo sapiens immunoglobulin lambda light chain variable region,accession number AF216776,Smith-Waterman Score=602.
gccgtgcggtgtaattcgaggctgtgtccaccatggcctggactcctctcctcctcctgctcctctctcactgcacaggttccctctcgcagcctgtgctgactcagccagcctccctctcagcatctcctggagcatcagccagattcacctgcaccttgcgcagtgacatcaatgttggtgcttacttcgtaacctggtaccagcagaagccagggggtcttccccggtatctgttgaggtacaaatcagactcagacaagcaacagggctctggagtccccagccgcttctcaggatccaaagatgcttcaatgaatgcaggccttttgctcatctctgggctccagtctgaagatgaggctgactattactgtgccatctggtacagcagcacttctcacagacacaatcccaagacccttattgctgctgcttccagtgcaggagatggtgactggtttagccacagacagactgtgcaggttaccaaaatgagacaaaagaccctggtgtttctccagtcatcagagccgtatcctttctggtgccttcactgggaatccaag

SEQ ID NO: 29418 - DNA, 525 bp, Homo sapiens
  SIMILAR (463)..(260): 421254mologous to Helicoverpa armigera nuclear polyhedrosis virus basic DNA-binding protein BDBP,accession number AF197913,Smith-Waterman Score=102.
tcactcagccatgttaattttatcattaatactgtcttcatcatttttttttccaggtctctctgctcgtatttgcttggtgctccgaaatgcacgggaacagacagctatgggaaagcgaccggagaaatggggaggcggactccaggtctttcgtggactgccaagagccctatagggcgtccagccttcgatcggctcgagtccctcggacagttgcccactcacagcgtgcaaaggggtcgcactccctgtgggttctccgccctcagaagcggcgctgcgcaggaaagtcacctccaccctcacgcctcgcgcgctccccacggtgccctgagccgctggtggctctggctcggcagcccctttgtgtgcgacgcgctggtcccgaggagcgcgcacgggcacagcggaggcctcccagggtcccaccgcttctgtcccagccaggccgtgctctcctccttctccttctccgctcctcctttctccggtccccggcctctggttccgaacagcagccat

SEQ ID NO: 29419 - DNA, 1420 bp, Homo sapiens
  SIMILAR (1157)..(1273): 521254mologous to Xanthomonas campestris pv. phaseoli DNA repair protein RecN,accession number AF146829,Smith-Waterman Score= 90.
tgaattccaagaaagttttatttttaaaaatcaagttttgatataataaatgttggattgaggatagaaatttaagctgagaaatgtttaatttggacctaaaaaagtttattattactattattattgtggaaggaaatacatacaggcacattttagtatctacaacagtatttgggaagctgttatgaaacacaaaacttcatttaaattttattataaagacctttattaggagaaaggacatattttctatggcttacttttattttgtgccttgaaggacttgtgaatgtatagaataattattttttcttactgcttcctctttgcaacccaacctccaccaagtcaatcgtgaaggtaggaagaaagctgtatttctgttacttttaaaaatgataacgagaagaaattaaaacaatggcttaagagaaagaggatgtaaggagtacaaagcaaaacttaacaaagagttagtaaaggaacttgcattgacaattcactcagccatgttaattttatcattaatactgtcttcatcatttttttttccaggtctttctggctctattttgcttggtgctccgaaatgcacgggaacagacagctatgggaaagctgcacagagcagttggcaatcaacatgtcctagaagggtgtgtggagtagcaaaacaagtggaacggatgaagaacttccaagctccttcgcagagttttgggccctagtgtgcagggctgctccctcatgagatggaggaaaatgtcgcccacacctacttggacctctcaccaaggacactgccctcagagataaatctgttggacggcagccaacagaccccaaattgtctcaacctccaggacacggcaagttgcaagtttccgagttggggaggcaaaggcgggaaaacatgtttggcgatttcctcctgccactcaccgaccggagaaatggggaggcggactccaggtctttcgtggactgccaagagccctatagggcgtccagctataaaaagagaagaatcccatgaaggacaacaagcaaactcatatgttatccctttagccggattgtgtgctgatgattgtttccctatttacacttcgaataacccctgtggtcttttgtgagtccccaaggcagcctcagccttcgcaaaccgtccagtggggcacgaatctctggaggggtgcgggctgcaggcggcagagggaagccaaagaggggcggcttttccaggccgtccacccccaggcgagctggtcctcacccttcgatcggctcgagtccctcggacagttgcccactcacagcgtgcaaaggggtcgcactccctgtgggttctccgccctcagaagccgcgctgcgcaggaagtcacctccactacgggccgggagtagggaggggagc

SEQ ID NO: 29420 - DNA, 1076 bp, Homo sapiens; identical to SEQ ID NO: 25242
  SIMILAR (791)..(868): 801254mologous to Escherichia coli peripheral membrane protein,accession number L08399,Smith-Waterman Score=88.

SEQ ID NO: 29421 - DNA, 1131 bp, Homo sapiens
  SIMILAR (1098)..(343): 991254mologous to Escherichia coli PhoQ protein,accession number D90393,Smith-Waterman Score=1269.
ttaccagtcgtcggctggagtatgctgattggcggtctgattctgttgcctttttatgccagacaaggaacaaactttgtcgttaacggcagtttgattctggcgtttttttatttggtggtcattggtacgtccctgacatttagtctgtacgttttctgcattcttattatcttcccgtgccaccaaaatattcacatacggcgaattcttatcttcaataaatacgctgtcgtgcaccggagaaagcccggtctgctgaatgtaagtggtgctgataatcgctacatcaactttgggatcatccagtacgcgcgggagctgcgccccctcgagttccataatccctttgcgttgatacactttgttcagcgctgaggtgagattgtccagcagtggggcgaccggatgcagctcgcggctgagcaatgtcccgccgcgcatactggcacgatgcaggtagtagccaatttgctgtgaaatgcggctgatttgctccagcattaccggctcagcatcactgacgctcatcttttcactacgcagagaacgcagcgtactttgcagcaccgccagtggcgttttcagactatgggtcaggtcggtgagcgtcgtacggtatttgtcgtaacgttcgcgttcactttttaacaatcggttcaggtttcgtaccagactggtcagttctcgcgttgtggctggattgagcaattcgcggttatgttcttccagttcgcggacttcttttgccagggcttcgatggggcgtaaactccaccaggcggcgacccacagcagcgggatcactaacagcagattggctgagagcacatagataaaccagctccagaccatataggaactttttagctccaccggaatggtatccaccaccacaatggttaattttggcatccgcgatgttgccgggtagacgtttactgccaccgagtgggtcatctccgcgtcgtcatcatcttcccgcacttcctgcaactgttgctgtatcgaatgatctccactcagcaagaggctggtatcgttaacatccgcttcaatttcatgaaaaccattcgatttcagccagtcaggggggatccttccagttagagtacgtgaatctgcatacat

SEQ ID NO: 29422 - DNA, 1409 bp, Homo sapiens
  SIMILAR (1)..(1092): 991254mologous to Escherichia coli similar to,accession number D90863,Smith-Waterman Score=1840.
atgaccgtagggttgccgttgccggttatcccgctgtttgttcatcatgaactgggctatggcaataccatggtcggcattgccgtcgggattcagtttctggctacggtgctgacgcgtggttacgccgggcgactggccgatcaatatggtgcaaaacgttcggcgcttcaaggaatgttagcttgtggtctggctggcggcgcgttgctgctggcggcgattttgcctgtctccgcaccgttcaaatttgctctgttggtcgtcgggcgtttgattcttggctttggtgaaagccagttactgacaggcgctctgacctggggactaggcatcgtagggccaaaacactctggcaaagtgatgtcatggaacggaatggcgatttacggtgccctcgctgttggtgctccgcttggcctgttgattcatagccattacggttttgccgcactggcgatcaccacaatggtattacccgtactggcgtgggcctgtaacggcacagtgcgcaaagtaccggccgtggcgggagaacgttcatcgctgtggagcgttgtcgggcttatctggaaaccagggttaggtctggcactacaaggcgttggttttgctgttatcgggactttcgtttcgctctactttgccagcaaaggatgggcgatggcgggctttactcttaccgcgtttggcggcgcatttgtcgtgatgcgcgtcatgtttggctggatgccggaccgttttggcggcgtgaaagtggcgattgtctctctgcttgtagaaacggtgggcttgttgctgctctggcaagccccaggtgcatgggtcgcattagcgggcgcggcgttaaccggagccggatgttcgcttatctttcctgcgctgggcgtggaggtggttaaacgcgtcccctcacaagttcgcggcaccgcactgggcggttacgccgcgtttcaggatatcgccctcggcgtctccgggccgctggcgggaatgctggcgaccacgtttggttactcttcggtatttcttgccggggcgatctctgcggtgctgggtattattgtcacgatactgtcatttcgtcggggtcaggaaacagcgcatcaaccagatcagcagcgcgcagcatacgacctgcagcgtagtaaccgtcgcgttcttccagcatcaccagcatcggcatgtcggtgtagcgacgcacatagtcggtgaaatactggcttgggttgtcgaggtggaattcacgcagcattacgtggcccatcgccagcgccattgccgcatcggtgccctgtttcggtgccagccacagatcgcacagtttggcgatttcagcgtagtctggtgtgacggcaacagttttggtccctttgtaacgcacttcagtaaagaagtgagcatccggg

SEQ ID NO: 29423 - DNA, 825 bp, Homo sapiens
  SIMILAR (1)..(819): 1001254mologous to Escherichia coli proline permease,accession number L01132,Smith-Waterman Score=1404.
atgttggtgacattttgtgtctatatctttggcatgatattgattgggtttatcgcctggcgatcaacgaaaaactttgacgactatattctgggcggtcgtagtcttgggccattcgtgacggcattatcggcgggtgcgtcggatatgagcggctggctgttaatggggttgccgggcgctgtttttctttccgggatttccgaaagctggatcgccattggcctgacattaggcgcgtggattaactggaagctggtggccgggcggttgcgtgtgcataccgaatacaacaataacgccttaacactgccggattatttcaccgggcgctttgaagataaaagccgcattttgcgcattatctctgcgctggttattttgctgttcttcaccatttattgcgcctcgggcattgtggcaggcgcgcgtctgtttgaaagtacctttggcatgagctacgaaacggctctgtgggcgggcgctgcggcgacgatcctttacacctttattggcggtttcctcgcggtgagctggactgacactgtacaggccagcctgatgatttttgccctgatcctgacgccggttatcgtcattatcagtgtcggtggctttggtgactcgctggaagtgatcaaacaaaagagcatcgaaaacgttgatatgctcaaaggtctgaactttgttgccattatctcactgatgggttgggggctgggttacttcgggcagccgcacattctggcgcgttttatggcggcggattctcaccacagcattgtccatgcgcgtcgtattagtatgacctggatgatccccggt

SEQ ID NO: 29424 - DNA, 1542 bp, Homo sapiens
  SIMILAR (959)..(1387): 961254mologous to Escherichia coli peripheral membrane protein,accession number L08399,Smith-Waterman Score=688.
atgcagcaggcaagtgaagacgaatttaatcgcgcgttaaatatcgcttttgataatcgcctgggcttatgcaaggttgagagcgcgcgtcaggtgttcccactgacggggcgttatgcgcgccagtttgcctcgcaccgtctggcgctggtgggcgacgccgcacataccattcacccgctggcggggcagggggtaaatctcggctttatggatgctgcagagctgattgccgaactgaaacggttgcatcgtcaggggaaagacatcgggcagtacatttatctgcgtcgctatgagcgtagccgcaagcacagtgcggcgttgatgctggctgcctggcaggaaggcggcagcatggcgcacttgctgggcaccgatgacgtaggccgtgatgtgctgtcgcgcctgatgtacggtgcgcgcctgtcgctgctggttggctgtctggtagttgtgttatcgctgattatgggcgttattctcggcctgatcgccggttactttggcggcctggtcgataacatcattatgcgcgtggtcgatatcatgctggcgctgccaagtctgctgctggcgctggtgctggtggcaattttcggcccgtcgattggtaacgccgcgctggcactgaccttcgctggcttgccgcactatgtgcgcttaacccgcgccgccgtgctgaactgccttgcgccgctgattgttcaggcgtcgctcggtttctctaacgccattctcgatatggctgctcttggtttcctcggcatgggggcacagccgccaacgcctgagtggggcaccatgctctccgacgtgttgcagttcgcgcaaagcgcctggtgggtcgtgaccttcccgggtctggcgatcctgctgacggtgctggcatttaacctgatgggtgacggtctgcgtgacgcgctcgatcccaaactgaagcagtaagaggttcgagatggcgttattaaatgtagataaattatcggtgcatttcggcgacgaaagcgcgccgttccgcgccgtagaccgcatcagctacagcgtaaaacagggcgaagtggtcgggattgtgggtgagtccggctccggtaagtcggtcagttcactggcgattatggggctgattgattatccgggccgcgtaatggcagaaaaactggagtttaacggccaggatttgcagcgtatctcagaaaaagagcgccgcaacctggtgggtgccgaagtggcgatgatcttccaggacccgatgaccagccttaacccgtgctacacccggggttttcagattatgggagcgattaaggtgcatcaagggcggaacaaaaatacccgccgtcagcgagcggatgacctgctgaatcaggtcggaattcccgacccgcattgcgtttggatgttacccgaattaactttccgaggttgaaccacgggggagatggcatgggatggccgggggcaaactggtgttgcgtagaccgaccccgggctgagggacactaagcggaatattgaatacgtggggctagggaaaaaaaa

SEQ ID NO: 29425 - DNA, 2436 bp, Homo sapiens
  SIMILAR (1318)..(2433): 1001254mologous to Escherichia coli putP proline carrier (AA 1-502),accession number X05653,Smith-Waterman Score=1884.
atgaaactgacaacacatcatctacggacaggggccgcattattgctggccggaattctgctggcaggttgcgaccagagtagcagcgatgcaaaacacattaaagttggcgttataaatggcgcagaacaagatgtcgcggaagtcgctaaaaaggtggcaaaagagaaatatggcctcgatgttgaactggtaggatttagcggttcgttgctaccgaacgatgcgacaaatcatggcgaacttgatgcgaatgttttccagcatcgaacctttcttgaacaagataatcaggcgcatggttataaactggtagcggtggggaatacgtttgtcttccctatggcggattatggaactcgagggggcgcagtcccgcgcgtactggatgatcccaaagttgatgtagcgattatcagcaccacttacattcagcagaccgggctttctccggtgcacgacagcgtatttattgaagataagaattcgccgtatgtgaatattttggtggcacgggaagataataagaatgcagaaaacgtacagactaaatgtcagggacgtaccaatgaccaccaaataaaaaaacgccagaatcaaactgccgttaacgacaaagtttgttccttgtctggcataaaaaggcaacagaatcagaccgccaatcagcatactccagccgacgactggacctgcaggcacattaagtgcctgcaggtcatcattatgcgcgtggtcgatatcatgctggcgctgcaagtctgctgctggcgctggtgctggtggcaattttcggcccgtcgattgataaattatcggtgcatttcggcgacgaaagcgcgccgtttccgcgtcgtagaccgcatcagctacagcgtaaaacagggcgaagtggtcgggattgtgggtgagtccggctccgtcaaccaaacgtcgtcgccagcattcccgccagcgcccgcgagacgccgagggactcatcctgaaacgcggcgtaaccgccagtgcgtgcccgaacttagcagcaacaagcccaccgtttctacaagcagagagacaatcgccactttcacgccgccaaaacggtccggcatccagccaaacatgacgcgcatcacgacaaatgcgccgccaaacgcgataagcccgacaacgctccacagcgatggacgttctcccgccaggccggttactttgcgcactgtgccgttacaggcccacgccagtacgggtaataccattgtggtgatcgccagtcacgtacagaatgatcgaggatcgccagtttcatacatcgcttggatgcctgcaggtccgctggttattttgctgttcttcaccatttattgcgcttcgggcattgtggcaggcgcgcgtctgtttgaaagtacctttggcatgagctacgaaacggctctgtgggcgggcgctgcggcgacgatcctttacacctttattggcggtttcctcgcggtgagctggactgacactgtacaggccagcctgatgatttttgccctgatcctgacgccggttatcgtcattatcagtgtcggtggctttggtgactcgctggaagtgatcaaacaaaagagcatcgaaaacgttgatatgctcaaaggtctgaactttgttgccattatctcactgatgggttgggggctgggttacttcgggcagccgcacattctggcgcgttttatggcggcggattctcaccacagcattgtccatgcgcgtcgtattagtatgacctggatgatcctctgcctggcaggggcggtggctgtcggcttctttgggattgcttactttaacgatcatccggcgttggctggtgcggtaaatcagaacgccgagcgtgtgtttatcgaactggcgcaaattctgtttaacccgtggattgccgggattctgctgtcggcaattctggcggcggtaatgtcaaccttaagttgccagctgctggtgtgctccagtgcgattaccgaagatttgtacaaagcgtttctgcgtaaacatgccagccagaaagagctggtgtgggtagggcgtgtgatggtgctggtggtggcgctggtggcgattgcgctggcggcaaacccggaaaaccgcgtgctgggcttagtgagctacgcgtgggcaggctttggcgcggcgtttggtccagtggtgctgttctcggtgatgtggtcacgcatgacgcgtaacggtgcgctggcggggatgatcatcggtgcgctgacggttatcgtctggaaacagttcggctggctgggactgtacgaaattattccgggctttatcttcggcagtattgggattgtagtgtttagtttgctgggtaaagcgccgtcagcggcgatgcaaaaacgctttgccgaggccgatgcgcactatcattcggctccgccgtcacggttgcaggaaagctaa

SEQ ID NO: 29426 - DNA, 1386 bp, Homo sapiens
  SIMILAR (160)..(366): 321254mologous to Mus musculus SPR2D protein,accession number AJ005562,Smith-Waterman Score=68.
atgattcaattgtctccacctggccccacccttgacatgtggggattattacaactcaagagatgcgaacagcatctgctcagatgtcagatctgctgcggaaaagatgagaaatgggctgcatatgtgggcatcatttttgcacagttccctggtactcaacgcccagagagctggcagcctctcatgcagacccctcctccctatgccaggcctccatctgcaccatccccacccccatggtggaggagaaggagtgacccctgtggcagggagaaggtgaaagtcacctgcccatccctctcccgatgttctcttctgagacctctttatttccctagacctttgcctgttggttctcaaaagcatcatttggaagtaagagaacctcaactcacagctgtccccagtggctttgtggcatttcacaacagttttgactttagaacctctctcaccttggcccccactccagagccaaaggaacccccacatctcaggaatctgtcatctctggaggcctcagaacctggtgtcacattacagggtgaatgccagggacaagctaaagagagcttaggaggaaagaaagaatgcataatggctttctctctttcccagggtcatttccctgtgatgagcccaagaagtccaggttaccaggatgcttatgagaaagccaagggtgaggacgctgtaggaagtcatctgcgaagcggagagtgcacctttaccagacgcggagtctgctggcgccttgatctcggactttgcagcttccagaacctccctgaccttcaggggagggatggtgaggcaggagaggagcatgagctctggtcaaaaggagagctgggagtgagcaagcgaaaggctttgaagtcacagttgacaacaacagtgaccagtattttgttccctaaatcctggtttttgaaaactgaaggaagggagcagtttttgaaagaggaaggtgcaagtggggactgcctttccatctccacagggagccagctctccctggaagcagcagaatattcttcacttgagcaccaggggagagcgggcaatagatcctggctgcgctggtcacctgtgggctccagcagcaaacagagaactgtaagagatcccagaggacatttgacaatttctggagacatttctgttgtcgtaactgggaggtccacagacatacattggatagaagccaggaatgctgctaaatgctatgcagtccacagaacagcccccatcccctcaaccaaaaattatgtggcccaaaatgtcagtagtgtcaaggtggagaaactctcgtctagacctaccctaacagaatttaacaacaagcctggaagggatcaagttgatttgcaagtaacttaa

SEQ ID NO: 29427 - DNA, 518 bp, Homo sapiens
  SIMILAR (1)..(216): 1001254mologous to Homo sapiens dJ90G24.1 (RET finger protein -like 2),accession number AL008723,Smith-Waterman Score=378.
gggatttttctggatatgggcatgcagaacgtttccttttttgatgctgaaagcggttcccatgtctatacattcaggagcgtatctgctgaggagccattgcgcccatttttggctccttcagttccacctaatggtgatcaaggtgtcttgagcatctgtcctttgatgaactcaggcactactgatgctccagtccgtcctggggaggccaaataagccctcactccaaaaaaacaaaaaacagggtaagaaaattacttgggtgggtagacttaggaacgctctacttcgtaaaagcattatacaaagtcacgggagaaaaatatgggacatttcttgattgtacttaatctaatttgattagattatagagtcacatcttgtttcctatagaaatgtcctgtattctgggatcaatttccaaatgctttacttttttatttctgcaagttcaaattaatgtattatagaagttatgagttaaataaagattggaatatcaaaaaaaaaaaaaa

SEQ ID NO: 29428 - DNA, 1941 bp, Homo sapiens
  SIMILAR (1070)..(1870): 911254mologous to Homo sapiens RET finger protein-like 3,accession number AJ010232,Smith-Waterman Score=1271.
aaccatcattctcagcaaactatcacaaggacaaaaaaccaaacatcgttatgttctcactcataggtgggaattgaacaatgagaacacttgtacacaggaagggggacatcacataccagggcctgttgtggctgcacctccaccgctgtcacagaggcccacagcttcctacccaccccaggccaggcagggctgccccccaacgctccgacctgccttcccggcccccaaacttgctgctgctgctgccacaactagcaccgatgctaatacaactactactgctgtcaccctcaacgcacaggcccaccctacaaggctcctaacacctgaccactgcactgcctgtgccctggcggcagccagccgccatcctaccgctctggtgctcttcagttttcattgccgccctcctaccactccagcgctgagtctttagtctccatggccgcccgaggcgagcggtggtgccacaagctccagcctccagcaggcggctcctcctcctggcatgaaacaactgggcaggcaaagccaagaaagcctagaacaggatgcagagagtggtagcgttagagcctcaccttggcatgctggccactggatggcagaggccggtttcagcgaaggcactctccctgccgtacacagtgtagccacgaatagtgcccccaaccagacccctgctgggggcagtaatgccctgatatggcacccaaaccgccccccaactgcgggaagtgcaaccccggatagtgccccaacctgctccccactgggagcagcaacccagggagacgccccaactcactccctgcctccggcagtacagccacagatagcgcacccaacccaccccctgcgcgggcaaggtagcccccgatagcgcacccaacccgccccgccggaaccaatgtggccccaggtagcacacccaccatcctcagaggaggacgggaacagagtgaccaagggggtggccttgggctggcctgtgggtgggcgagcggcaggaggtcagcatcctgttgtgtacctgggagccccctgacctcagtgtatgaagatgtccctggagtgtggatgcaccgtctgcctcaagtgcatcaattcgctgcagaaggagccccatggggaggatctgctttgctgttgctgttccatggtctctcagaggaacaaaatcaggcccaatcggcagctagagaggctggtttcccacatcaaggaactggagcccaagctgaagaagattctacagatgaacccaaggatgcggaagttccaaggtaaggaatctgtataccctgcccccttcccaagaccagaccaggaaaaatcatctgtgcagttggcccgaagtgggctcatcacacagaatcggcaagaccttgccgagagatttgacgtgtccgtttgcatcctgggctcccctcgctttacctgtggccgccactactgggaggtggacgtgggaacaagcacagaatgggacctgggagtctgcagagaatctgttcactgcaaagggaagatccagctgaccacagagcttggattctggactgtgagtttgagggatggaagccgcctctctgccagcacggtgccgctgactttcctcttagtagaccgcaagttacagcgagtggggatttttctggatatgggcatgcagaacgtttccttttttgatgctgaaagtggttcccatgtctatacattcaggagcgtctctgctgaggagccactgcgcccatttttggctccttcaattccacctaatggtgatcaaggtgtcttgagcatctgtcctttgatgaactcaggcactactgatgctccagtccgtcctggggaggccaaataagccgccactgcaaaaaaaaacagggtcagaaaattacttgggtgggtagacttaggaattttctactt

SEQ ID NO: 29429 - DNA, 824 bp, Homo sapiens
  SIMILAR (168)..(563): 991254mologous to Homo sapiens RFPL1L,accession number AJ010228,Smith-Waterman Score=704.
tggatatgacgtcagatattgacacagccaacaatcgactcatcatttctgaagacctgtggagtgtccattgtggatttcttagaaccgcacagagtatgccgagattcaaacaagtcatctgtgtcctgggctcccctcgcttcacctctggacaccattactgggagaagaacaaaatcaggcccagttggcagctagagaggctggcttcccacatcaaggaactggagcccaagctgaagaagattctgcagatgaacccaaggatgcggaagttccaagtggatatgaccttggatgccgacacagccaacaacttcctcctcatttctgacgacctcaggagcgtccgaagtgggtgcatcacacagaatcggcaagaccttgccgagagatttgacgtgtccatttgcatcctgggctcccctcgctttacctgtggccgccactactgggaggtggacgtgggaacaagcacagaatgggacctgggagtctgcagagaatctgttcaccgcaaagggaggatccatctgaccacagagcgtggattctggactcatgagaattgtttgccaaatgaatccgtgaatggtcgtgcagaagaaggtgcgctccaagagggcacaggctatattgttttattcctgtgtctcagcaatatccaaaaagagccaggcacacctccaacgggcttctttgccaccagcctccccatcttcctggccaaagcaatgagccttccagtagagccccaaccagatgcccctcctgcttacgacccgctgaaatccctggataaagtgcaaagccctctctga

SEQ ID NO: 29430 - DNA, 1506 bp, Homo sapiens
  SIMILAR (297)..(1160): 961254mologous to Homo sapiens RFPL1L,accession number AJ010228,Smith-Waterman Score=1471.
gccatgtcactggctcaggctcagctgctgggtcaccaggagaatggacgcttcctccacctcagctcagagcacagtgatgattcgtgactttctttcccaatagaacttcaaatctctgaaggcggggggtggggggatgtgcatgagtgtatgtactcatggtcttgttctagaagtgacaaagctggcacacaatccctttatgcatgaaaaggttgtcacttgtcacaactaacaggctttcacctcacggaaattttcttcccttgagcacttttcccctggcagtggacatggctgcactcttccaagaagcaagcagctgtcccgtctgctcagactatctagagaaaccaatgtccctggagtgtggatgcgctgtctgcttcaagtgcatcaattcactgcagaaggagccccatggggaggatctgctttgctgttactcttccatggtctctcggaagaacaaaatcaggcgcaatcggcagctagagaggctggcttcccacatcaaggaactggagcccaagctgaagaagattctgcagatgaacccaaggatgcggaagttccaagtggatatgaccttggatgccaacacagccaacaacttcctcctcatttctgacgacctcaggagcgtccgaagtgggcgcatcagacagaatcggcaagaccttgccgagagatttgacgtgtccatttgcatcctgggctcccctcgctttacctgtggccgccactactgggaggtggacgtgggaacaagcacagaatgggacctgggagtctgcagagaatctgttcaccgcaaagggaggatccatctgaccacagagcgtggattctggactgtgagtttgagggatggaagccgcctctctgccagcacggtgccgctgactttcctcttcgtagaccgcaagttacagcgagtggggatttttctggatatgggcatgcagaacgtttccttttttgatgctgaaggtggttcccatgtctatacattcaggagtgtctctgctgaggagccactgcacttgttttttgctcctccaagtccacctaatggtgataagagtgtcttgagtatctgtcctgtgataaacccgggcactactgatgctccagtccatcctggggaggccaaataagccctcactccaaaaaaaacaaaaaacagggtaagaaaattacttgggtgggtagacttaggaacactctacttcgtaaaagcattatacaaagtcacgggagaaaaatatgggacatttcttgattatacttaatctaatttgattagtttataaattgagtcctaagtattaattattgccaccatccaactcattgagtcttatggttcacatcttgtttcctatagaaatattctgtattctgggatcaatttccaaatgctttacttttttatttctgcaagttcaaatcaatgtttaaattatagaagttatgaggtaaataaacatttggatatca

SEQ ID NO: 29431 - DNA, 5317 bp, Homo sapiens
  SIMILAR (4540)..(5124): 961254mologous to Homo sapiens RET finger protein-like 3,accession number AJ010232,Smith-Waterman Score=997.
cacgggtaacaatttttatttgagaacacaagtttcacaagaaaatcatcttttttttttaaattgtgacttttatcttaacactgtgtgaagtactcaaggtccaagaagcttaatggtcatttgtcaaaatagtaattatccaattttttcctatgaattatgaaattttttcaaaaccagaaataaaccaatgaaaataaataaaaattccctagaatttcctcaatggaatgcatgcccctattacctttgagtctgatgtatatgaatttaaaccattttgtaaaattgcaaatccaatcatacttaatacttcaggtttccaagcaaagcttgaagcctacaacatattacaggaattatctttactgacaactgatggaaacatctctaaaataagcttttgaagttagtacattaagcctaatttaatataaaggcaatttaatcttatcttcatatgaaagaaaaatacactgtcaggatgaaggatttactaaagttacaattaactggagatatatcaccagtaaaaacctaattccctgttataattaaatcaaagcctcattaggttagagggtgtggaagggcatgacccagtgggaggtgggaatctcaccaataaaacgccctcatgtgccccttccgcacaagacctgagcgcccagtggaagcagctggaggacagaggagcttccagcagaagaggtgagcccatgcctgtgtgtgtgtttttcctccttagatgcctagaaatgggggttatgccttgggggatgaatgagagaaattcgtaattaatgaattcaacaaaggctgtctgagtgctgcctcagagttgaaaaccagtcaccctggatccccagatctccagtctaggagtggtggcagtcaatttggtattcatttccaaggctggagaaggatgtgatttttttttttttttttttggtgagacagggtcttaactctgttgtccaggttggagtgacctggtgtgatctctgctcactgctaatttttctattatttgtagagagggggtcttcctgtgttgcccaggctgatctcaaatccttggctcaagggatcttccagccttggcctcgcaaagtgctgggattacagatgtgagctactgcatccagtccctctctttttttttttttttttttttgagatggtgtctcactctgttgtccaggccggagtgcaatggctggatcttggctcactgcaacctttgcctcccaggttcaaagcaattctcctgcctcagcctcccaagtatctgggattacaggcgtgtgccaccacgcctggctaattcttttgtattttcagtagagatggggtttcacccatcaggctggtctcgaacttttgacgacctcagatgatccactcacgtcagcctcccaaagtgctgggattataggcctgagccaccacgcccggcctcccagcccctaattcttatgttcatcaatcaatctcttgctggggttccccttagggaggagggaaaatgccccaggctcgctggttcctcccatgggtgctcccgtgccctgggttcaaggcccagtggctgggtcaccagtagaatggacccttcctccacctcagttcagagcacagtgatgattcgggactttcttttcccaatagaacttcaaatctttgaagacgggggggtggggggatgtgcttgagtgtttgtactcatggtcttgttctagaagtgacaaagctgggacgcaatacctttatgcatgaaaaggttgtcacttgtcacaactaacaggctttcacctcacggaaattttcttcccttgtgcacttttcccctggcagtggacatggctgcactcttccaagaagcaagcagctgtcccgtctgctcagactatctagagaaaccaatgtccctggagtgtggatgcgctgtctgcttcaagtgcatcaattcactgcagaaggagccccatggggaggatctactttgctgttgctgttccatggtctctcagaagaacaaaatcaggcccagttggcagctagagaggctggcttcccacatcaaggaactggagcccaagctgaagaagattctgcagatgaacccaaggatgcggaagttccaaggtgagggatctgtatacactgcccccttcctacgaccagaccaggaaaaatcatctgtgcaactggcccctcattccatatggggattagctgctgtctggcacctaaaattgagatgcttcttcatcatcagattctcagccctgacaacatacagaatcacctggtgatctccaaaaaaaaggctggctgggcatggtggctcatgcctgtaatgtcagcactttgggaggccgaggcgggtggatcacgaggtcaggagatcgggaccatcctggataacacggtgaaaccctgtctctactaaaaatacaaaaaattagccaggcttggtggtgggtgcctgtagtcccagctacttgggggttgaggcaggagaatggcgttaacctggggggggcggagcttgcagtgagccaagattgcaccactgcactccagcctgggtgacagagtgagactccgtctcaaaaaaaaaaacctgatgtctatgtcatgggttagacaagggattctctaaacttagtgtgctcagattacctggggatcttgttaaaatgcagatgctgaactgggaagtctcaggattgatcccgctggcttggggactttgctgagtagcaaaaacacagagcaacttaatttgaatttctctctagcaaaggttcccaggactctgacatttaaatgggcctggtaattctaatgcacagtgagtattggcacccactgtaccaaacaacctcaccccagggttgggaagagtttggaatggagcacctatggtgtttgtttctgtgagtggggcgagttgcagacgctggtctcctcatcggtgtgccatggacttcaacaggggtcctggctacaggaaatactatcactctccataactctggggaatagggacatttaaatgaagaggttatggtcagcctgggcaaagaattacacctataaatggtggtggcttctgccctgacacccatgatctctactcatccacctacccatacctgactgtgtctctgctgaaatatggaggacagattcaccctgcctaagtcatgtttggaaccctcttcctccttccttgtccatgtccactcatctcatttcattccctaattcaccatcaaacagcaatcagtctcctcaagtcttactgtaatctataaaatctatattggtgatcatcagttttttgacttgaaggatcatatgttctgtagatttttttttcagaatgctctggacaattaattttctttaggccagatcacactgcctcctccatgagaattggcagcttcacctatcaaccacatacccaatgcattaaattattgacctttgtatttactgcccttattctctacgatcagtcagttatgacgaacaactttctttttttttttattttttgagatggagtctcgctctgccgcctaggctggaggtgcagtggcatgatctctgctcattgcaagctccgcctcctgggttcatgccattctcctgcctcagtctaccaagtagctaggactacaggcacccgccaccatgtccggctaatttttttgtatgttttttagtagagacagggtttcactgtgttagccaggatggtctcgatctcctgacctcgtgatccacccgtctcggcctcccaaagtgctgggattacaggtgtgagccaccgcgctcagccaacaaacaactttcaaatacctttctcttcactccaaaatttaccattgttttgcttaaggtttcacctcccatgtaggatggaaaacattctttcatctaaggcccccctcttcctcctggccttggagcctcctaatgtccaggaccggcacctctgtcatcacattgtcagctgcagagataccctacctgctgtcagaaccatgcacaattaatttgcttacaaacatggaaaacaaaggcctggaatcatgctctatatactgagttgagcaatacaagatggaagcagaaacatatttaacatcgaccatttgcattgtcttaattatcatttatttgttcacacatcaaggtggtagaaaggggggcatggtgtctgccttcagagaccctccactctaaatgaagaaaagttcagtgaagcaaacacgtgacgtaaagtaaaataagaattgctactgtgaataagagttggggtaattgccacaaagccataccctatgaagaaatttgaaactagtccagggaagttgccctcatgaaaaagttttgattttggaggaagaaacagaattaaagaaactaaagtcaggagatatttgggcctttgaagtagaagagaggcatggggttggcttctgtccacttgctgagcaacttgttttccttttcacagtggatatgaccttggatgccgacacagccaacaacttcctcctcatttctgacgacctcaggagcgtccgaagtgggctcatcacacagaatcggcaagaccttgccgagagatttgacgtgtccgtttgcatcctgggctcccctcgctttacctgtggccgccactactgggaggtggacgtgggaacaagcacagaatgggacctgggagtctgcagagaatctgttcactgcaaagggaagatccagctgaccacagagcttggattctggactgtgagtttgagggatggaagccgcctctctgcaagcacggtgccgatgactctcctcttagtagaccgcaagttacagcgagtggggatttttctggatatgggcatgcagaacgtttccttttatgatgctgaaagtggttcccatgtctatacattcaggagcgtctctgctgaggagccactgcgcccatttgtggctccttcaattccacctaatggtgatcagggtgtcttgagcatctgtcctgtgatgaactcaggcactactgatgctccagtccgtcctggggaggccaaataagccgccacatttactgtgttccttggggtcaccttggtaacagagaaggggtcctcacttgcccactctttggaatccaccttccattgatcttctgggggaactttaatgcaggaactcaggttccccataagaaagaccagaatctgtgaaaatgacagcaagcatgttcaacctgctatgaactttg

SEQ ID NO: 29432 - DNA, 2404 bp, Homo sapiens
  SIMILAR (944)..(2293): 991254mologous to Homo sapiens dJ55C23.2 (vanin 2),accession number AL032821,Smith-Waterman Score=2406.
tgtattggaccgagttccagatgggccagtatttattgctatgtgttttctagtgagagtaatggatgcagttagctttgctgcagcaatgactgcatcttcttctatcctggcaaaggcttttccaaataacgtggctacggtattgggaagtcttgagactttttctggactggggctaatactaggtcctcctgtaggtggctttttgtatcaatcctttggctatgaagtgccttttattgttctgggatgcgtcgttttgctgatggtaccactcaatatgtatattttacccaattacgagtctgatccaggtgaacactcattctggaaactgatcgctttacccaaagttggccttatagccttcgtcatcaactcactcagctcgtgttttggcttcctcgatcctactctgtctctctttgttttggagaagcctgtaaaactgccccaagcctatctcactttgctgactcctttttcggactcagtctgcctgcacccaggtggaagtgctgcagcccatcctattacccaactccaacctaagaaatctttagaaatttattttcctctttttctgaatcagaaaccctatggttggaatccaagaatctcttttagcaagttctccagtcagctctggctgctggtgctgatattagttgtaagtggcctctctgctggaatgagtataattccaactttcccggaaattctcagttgtgcacatgaaaatgggtttgaagagggattaagtacattgggacttgtatcaggtctttttagtgcaatgtggtcaattggtgcttttatgggaccaacgctgggtggatttctgtatgagaaaattggttttgaatgggcagcagctatacaaggtctatgggctctgataagtttatctgataaaaatgcgaatggcttggtggttcgtgtcttggttgttatttttgccctaataaccctgcaggttggtactcaggacagttttatagctgcagtgtatgaacatgctgtcattttgccaaataaaacagaaacaccagtttctcaggaggatgccttgaatctcatgaacgagaatatagacattctggagacagcgatcaagcaggcagctgagcagggtgctcgaatcattgtgactccagaagatgcactttatggatggaaatttaccagggaaactgttttcccttatctggaggatatcccagaccctcaggtgaactggattccgtgtcaagacccccacagatttggtcacacaccagtacaagcaagactcagctgcctggccaaggacaactctatctatgtcttggcaaatttgggggacaaaaagccatgtaattcccgtgactccacatgtcctcctaatggctactttcaatacaataccaatgtggtgtataatacagaaggaaaactcgtggcacgttaccataagtaccacctgtactctgagcctcagtttaatgtccctgaaaagccggagttggtgactttcaacaccgcatttggaaggtttggcattttcacgtgctttgatatattcttctatgatcctggtgttaccctggtgaaagatttccatgtggacaccatactgtttcccacagcttggatgaacgttttgccccttttgacagctattgaattccattcagcttgggcaatgggaatgggagttaatcttcttgtggccaacacacatcatgtcagcctaaatatgacaggaagtggtatttatgcaccaaatggtcccaaagtgtatcattatgacatgaagacagagttgggaaaacttctcctttcagaggtggattcacatcccctatcctcgcttgcctacccaacagctgttaattggaatgcctacgccaccaccatcaaaccatttccagtacagaaaaacactttcaggggatttatttccagggatgggttcaacttcacagaactttttgaaaatgcaggaaaccttacagtctgtcaaaaggagctttgctgtcatttaagctacagaatgttacaaaaagaagagaatgaagtatacgttctaggagcttttacaggattacatggccgaaggagaagagagtactggcaggtctgcacactgctgaagtgcaaaactactaatttgacaacttgtggacggccagtagaaactgcttctacaagatttgaaatgttctccctcagtggcacatttggaacagagtatgtttttcctgaagtgctacttaccgaaattcatctgtcacctggaaaatttgagagaccttgcagggcatggcccttctgtgaatatgttgtttctagaaacagcagtcataatattgaagatgacaaatgttttacatcagtcatgctcattatggcttcttga

SEQ ID NO: 29433 - DNA, 850 bp, Homo sapiens
  SIMILAR (668)..(847): 771254mologous to Homo sapiens dJ579F20.1 (high-mobility group (nonhistone chromosomal) protein 1-like 1),accession number AL160176,Smith-Waterman Score=225.
tgtattggaccgagttccagatgggccagtatttattgctatgtgttttctagtgagagtaatggatgcagttagctttgctgcagcaatgactgcatcttcttctatcctggcaaaggcttttccaaataacgtggctacggtattgaattccctgaatgggcagtttgacagaatgagttccctgggcctcggtgggccacgcctccgcaaagaaggacaacgcgaagctgcccgcgtagtgcctgttgcactcgccaaggaccggcctggcagagatagaaaactcgcagtacgtttgcctcagaaccgcctcaatccggaaacagaaactccccaggcccggcactgcgggagccacctctttcgaggaggttgtgaagactgccctcatccacgatggcctagcacgtgtaattcgcgaagctgccaaagccttagacaagtacgtgtatcagtctcaatactgtgggttcttgcaaccggaacaaaactgccacccaagggaagaaggcatggagttcatggtgttagcgcaaaagttctgaatggcatccgtcctaccggaaacctaggaaaagccattctcagggaccttaacgacttcaatgtccttaaggctcgtaacatggctttactattgccagtttttaaagtatgtctgcacaaacacaatcaggaaaagaaggctgtgaacctgaagaaaaaatatgaaaaggatattgctccacaacaagctaaaggaaaacctgaggcagttaaagagggagttgccaaggctgagaaaggtaagaaaaaggaagaggaggaaaatgaggaagatgaagaggatgaggaggaggaagattaa

SEQ ID NO: 29434 - DNA, 949 bp, Homo sapiens
  SIMILAR (634)..(521): 761254mologous to Mus musculus Similar to ribosomal protein S12,accession number BC002079,Smith-Waterman Score=135.
ttttttttttttttttgggagccaaagatttatttcttcatttcttgcatttgaaatactcttcaatgacatccttggcctgagactccttgccatagtccttaaaaaaaacaaaacacgcatgcaatttcttgttaatatttaggaatttcaccaagctattagtatcaattataggggagcttcaacaattagctatgtcttataaaaatgtttcccatcactaagatttgttatagccattctcagggaccttaacgacttcaatgtcccttaaggctcgtaacatgggctttactattgccagtttttaaagtatgtctgcacaaacacaatcaggtaagcagattcattggctggcttgtaaattacagcttttatttttttcctgaaatgcagaaaatgctttaaacctgttgaatcagttttttccttttataagatcctcaacttatttcaatacaaggttttatatgattacccagcataaccttcatccctagaataaacggtgacttaccttaactactacacaactgcaaccaaccacttaacacgggtttcccgtcatcagtcaattgctacaaaggcctacccattctcctagtttcttgttgtcatcaaccttaattagggttgatttggtgttcagcacaaagggcctccaccaacttgacatacataggctcatcacagttggatgcaagcacacaaagatgggcttggcgcttgtctaaggctttggcagcttcgcgaattccacgtgctaggccatcgtggatgagggcagtcttcagaacctcttgtaaagcagtattaacgtccattacacctccagcagcaatgccttcctcggccatggcggtgggttacgggtgaagctgaatcttgaacgcacccaagcctccgcctccgcgcgactcggctcgtgccgaattcctgcagcgcg

SEQ ID NO: 29435 - DNA, 646 bp, Homo sapiens
  SIMILAR (363)..(491): 1001254mologous to Mus musculus Similar to ribosomal protein S12,accession number BC002079,Smith-Waterman Score=230.
gccgtcgacgccgccgagtcgcgcggaggcggaggcttgggtgcgttcaagattctacttcacccgtatcccaccgccatggccgaggaaggcattgctgctggaggagtaatggacgttaatactgctttacaagaggttctgaagactgccctcatccacgatggcctagcacgtggaattcgcgaagctgccaaagccttagacaagtgcgtgtatcagactcaatactgtgggttcttgcaaccggaacaaaactgccacccaagggaggaaggcatggagctcatggtgttaagcgcaaaagttcttgaatggcatccgtcctacccggaaccttaggaaaaggcgccaagcccattctttgtgtgcttgcatccaactgtgatgagcctatgtatgtcaagttggtggaggccctttgtgctgaacaccaaatcaacctaattaaggttgatgacaacaagaaactaggagaatgggtaggccttttgtaaaattgacagagaggggaaaccccgtaaagtggttggttgcagttgtgtagtagttaaggactatggcaaggagtctcaggccaaggatgtcattgaagagtatttcaaatgcaagaaatgaagaaataaatctttggctcacaaaaaaa

SEQ ID NO: 29436 - DNA, 406 bp, Homo sapiens
  SIMILAR (43)..(240): 1001254mologous to Homo sapiens ataxin 2-binding protein,accession number AF107203,Smith-Waterman Score=350.
  misc_feature (1)...(406): n = a,t,c or g
cgtcttcgttgcagcagatgaaatttcttgtaacacctctgcagttacggacgagtttatgctgccgacccctaccaccacgcacttgctccagcccccacctacggcgttggtgccatgaatgcttttgcacctttgactgatgccaagactaggagccatgctgatgatgtgggtctcgttctttcttcattgcaggctagtatataccgagggggatacaaccgttttgctccatactaaatgacaaaaccataaaaaccttccaatgtggggagaaaggaagctttccgaggcctgagtattgcaatacatgcagtagtacatcattttagcaactctnnnnnnnnnnnnnnntcccattnnnnnnnnnnnnnggggggggccgttttaaagaacccaactt

SEQ ID NO: 29437 - DNA, 481 bp, Homo sapiens
  SIMILAR (1)..(270): 881254mologous to Mus musculus ataxin 2-binding protein,accession number AF107204,Smith-Waterman Score=417.
gcggccgcctaccgaggggcgcacctgcgaggccgcggtcgcaccgtgtacaacaccttcagggccgcggcgcccccgcccccgatcccggcctacggcggtgttgtttaccaggatggattttatggtgcagacatttatggtggttatgctgcataccgctacgcccagcctacccctgccactgccgctgcctacagtgacagttacggacgagtttatgacattttcccccctgtcaccactcacgtgctccagcccccacctacggcgttggtgccatgaatgcttttgcacctttgactgatgccaagactaggagccatgctgatgatgtgggtctcgttctttcttcattgcaggctagtatataccgagggggatacaaccgttttgctccatactaaatgacaaaaccataaaaaccttccaatgtggggagaaaggaagctttccgaggcctgagtattgcaatacatgc

SEQ ID NO: 29438 - DNA, 2118 bp, Homo sapiens
  SIMILAR (568)..(720): 881254mologous to Homo sapiens Human ataxin-2 binding protein (A2BP),accession number Y81462,Smith-Waterman Score=247.
atggatattgatcattctcatgctgaaggatatgtttttatcaactcaggaccaagtatcaccattgataaacaggggccaggaatgatcccctgcatgccgtatggagactactgctcagcagaaagggttccgatgccccatctgagaccttggcactggcttactcccttcctcactggaggattcaaaatcctgctggagagtggctgtgggacatcttgccaggttgtggggatgccgatgatcccggcactcagaattgaggaggtatctcaggattccaccattatttgccgctgtaaaattccaccttgcaaggatgaacccagtgcccttcgctttaaatcaggaggaggcaagtcattgctgcaatgcagccgcagtttgcaggatgagctaggcagcctttctggctggaaggcagagagctttagggaagaaagcgggaatacagaagccgaagattctctcatccagtgtccagtgtgggtccaggatgttggagacacagtagggaccaacatagagtcctcaggacatccctatagagagatgtataaggaagttgaaatcaactcagtgccaggcttcccgtatccagcagccaccgccgcggccgcctaccgaggggcgcacctgcgaggccgcggtcgcaccgtgtacaacaccttcagggccgcggcgcccccgcccccgatcccggcctacggcggtctctggaatctggtagaccttcctgaatattttgctttgtctgatgatgactttaacatattgctgctggtgtgcatccgtgtgtatactggacagcaggaaactagcctgtgccactgcccagctcagcagcagaacaagagagatttgcaactaaaaatgtttgtcgatgcccagtgcccctttcagcttggtgggccagtcccaaggcttggtgaaggtggttatgctgcataccgctacgcccagcctacccctgccactgccgctgcctacagtgacagactgtcactgatgtatggagatggctctgaaatagtgaggaagggaagaaatcagttcgtcttcgttgcagcagatgaaatttcttgtaacacctctgcaggttgctacccaagttaccaattagaagcaagttcaggggtacaaggaggtgtcaccagcgcctttcatttttctatccccacttctcaacctacacatgctgccagctacattaaaactttagacagtggggatgcaatggcagacaaaatagacactgccccagcctccatggagttctcgttccaggagggtgaaagttacggacgagtttatgctgccgacccctaccaccacgcacttgctccagcccccacctacggcgttggtgccatggatagacagtacagttccttgtgtgtatccgtttgcactggtggagaccccacaatgggaattcgctgtccccaaactgtgcctaaactggcatggccattgatggatgaaaaagctgtacagggagcatggctgtggaggaaacttactatcatagcagaaggcaaacaggaagtaggcatgtcctccatgagcagggctggaatttccagggcaagaacaagagaaggaacaatagagcagcacacgtcctttaggtaccatttgactcctggaacagttctcatcaggtcaatggtgtctttggagtatgggattgtgggtgatggggagaaacttgtagttgtaatggttaggagatggttccagttttttatgcctctggctcaagatcctcagcaaacccatcctgataactgtcctgacagtgctttagacagctttcaagcttcttacggtcatgtctacaaggcctctccaagatatttgcgtagtatttctggggaaggaaggtgtccatcaacagtggactggatcaagaaaacacagtccatgcatggcatggaatactatgcagccgtaagaacagaacaaaatcatgtcctttgcaacaacatggatgcaactagcggccattatcttaagggaattaatgcaacaacagaaaaccaaataccgcatgttctcattgataagtgggacctgaacattgaatacttatggaaatatagacggcaataa

SEQ ID NO: 29439 - DNA, 432 bp, Homo sapiens
  SIMILAR (1)..(159): 831254mologous to Homo sapiens metabotropic glutamate receptor 8c,accession number AJ236922,Smith-Waterman Score=221.
tttttctctcgagtggttccgcctgtactcctaccaagcccaagcctggtggacatcgtgacagcactgggatggaattatgttttgacactggcttctgaggggaactatggtgagagcggtgtggaggccttcacccagatctcgagggagattggttatccatccctgtttgggattcagggctgccttcatgaatgttttgctatactatgtcaagttgtttaccaatttctgcttctaatgcagctgtcagatgctcaaactgtctattagtcgaagaggctctctactgaccacctttctcaagtttcttcttcttacatacaatgtttttgacaagactaagcatatcaaaccatcttttaacaattgtaaagcctaatattggccagcatacaattcaattcattaaacattgtagcactgaaa

SEQ ID NO: 29440 - DNA, 408 bp, Homo sapiens
  SIMILAR (4)..(252): 981254mologous to Homo sapiens metabotropic glutamate receptor 8b,accession number AJ236921,Smith-Waterman Score=408.
atgcagatgtacatccagacaacaacacttactgtctccatgagtttaagtgcttcagtatctctgggcatgctctatatgcccaaggtttatattataatttttcatccagaacagaatgttcaaaaacgcaagaggagcttcaaggctgtggtgacagctgccaccatgcaaagcaaactgatccaaaaaggaaatgacagaccaaatggcgaggtgaaaagtgaactctgtgagagtcttgaaaccaacatcttggggattgtgctacatgtttccaggggcatgatggtactcacataccgtgacaccatcacatttaaaaccattcgaagcaaatggtctcaagatgagcggctgttctacagagtacaaacttgctcacaaaatctcttttacaaagcatga

SEQ ID NO: 29441 - DNA, 585 bp, Homo sapiens
  SIMILAR (13)..(558): 801254mologous to Homo sapiens metabotropic glutamate receptor 8b,accession number AJ236921,Smith-Waterman Score=767.
atgtgcttttataaagtaggtggtgtttgcattgctcagtcacagaaaatcccacgtgaaccaagacctggagaatttgaaaaaattatcaaacgcctgctagaaacacctaatgctcgagcagtgattatgtttgccaatgaggatgacatcaggaggatattggaagcagcaaaaaaactaaaccaaagtgggcattttctctggattggctcagatagttggggatccaaaatagcacctgtctatcagcaagaggagattgcagaaggggctgtgacaattttgcccaaacgagcatcaattgatggatttgatcgatactttagaagccgaactcttgccaataatcgaagaaatgtgtggtttgcagaattctgggaggagaattttggctgcaagttaggatcacatgggaaaaggaacagtcatataaagaaatgcacagaaatagcggtaatggaaaaagcaacgcacaaatatgtttcttcccacaaacaagcaatcctgtcagtgaaccaaatagcagcctcaataattagctccctggaagacctgtcagtttattttctggtgctagattaa

SEQ ID NO: 29442 - DNA, 3940 bp, Homo sapiens
  SIMILAR (2058)..(3425): 1001254mologous to Homo sapiens metabotropic glutamate receptor 8,accession number U92459,Smith-Waterman Score=2413.
atggccgcgggcggaggatcgggaggcgccgggcgcagaccaatcgcggccgccggtgggagtatttgttattcacatggaagagacttggcgcctgctaggccagctcagccccctcagcccagagatcagccacaagtgcggccgctgtgctcgcctcacgcggcggcggcggcggcggcggcggcgctgacatggagctgcgggcccccggcgggcttcctcaccgcgccctctgcggggagcagggtaagactcgccgcccggcagcagaaagcggctccgaggaaagcaagtgccgaaccacgggacaaaaagcccctggcccccaaacttccccaaaacgccctgcttgttggaaaaggagaatccccccgttttattcccctttccgttttcttctctaaaacctttcagcggacagccaggattttaaagcgctctgcctcggatcgtctgccctgggtgacctcccggacctgccctggtggaatccggacttgccccgccgagatgacgaggtaccttcgtttcgcgaacctaacaggagggatttctgaagttagcggcttccgggatgagtcgggaataaactttgggtcttggattgcaataccacctgtggagaaaatggtatgcgagggaaagcgatcagcctcttgcccttgtttcttcctcttgaccgccaagttctactggatcctcacaatgatgcaaagaactcacagccaggagtatgcccattccatacgggtggatggggacattattttggggggtctcttccctgtccacgcaaagggagagagaggggtgccttgtggggagctgaagaaggaaaaggggattcacagactggaggccatgctttatgcaattgaccagattaacaaggaccctgatctcctttccaacatcactctgggtgtccgcatcctcgacacgtgctctagggacacctatgctttggagcagtctctaacattcgtgcaggcattaatagagaaagatgcttcggatgtgaagtgtgctaatggagatccacccattttcaccaagcccgacaagatttctggcgtcataggtgctgcagcaagctccgtgtccatcatggttgctaacattttaagactttttaagatacctcaaatcagctatgcatccacagccccagagctaagtgataacaccaggtatgactttttctctcgagtggttccgcctgactcctaccaagcccaagccatggtggacatcgtgacagcactgggatggaattatgtttcgacactggcttctgaggggaactatggtgagagcggtgtggaggccttcacccagatctcgagggagattggtggtgtttgcattgcccagtcacagaaaatcccacgtgaaccaagacctggagaatttgaaaaaattatcaaacgcctgctagaaacacctaatgctcgagcagtgattatgtttgccaatgaggatgacatcaggaggatattggaagcagcaaaaaaactaaaccaaagtgggcattttctctggattggctcagatagttggggatccaaaatagcacctgtctatcagcaagaggagattgcagaaggggctgtgacaattttgcccaaacgagcatcaattgatggatttgatcgatactttagaagccgaactcttgccaataatcgaagaaatgtgtggtttgcagaattctgggaggagaattttggctgcaagttaggatcacatgggaaaaggaacagtcatataaagaaatgcacagggctggagcgaattgctcgggattcatcttatgaacaggaaggaaaggtccaatttgtaattgatgctgtatattccatggcttacgccctgcacaatatgcacaaagatctctgccctggatacattggcctttgtccacgaatgagtaccattgatgggaaagagctacttggttatattcgggctgtaaattttaatggttgccgaagagggatccagatgtctctaccctggccaactctttttactccttcattttccagtagttgggcagtgctggcactcctgtcacttttaatgaaaacggagatgctcctggacgttatgatatcttccagtatcaaataaccaacaaaagcacagagtacaaagtcatcggccactggaccaatcagcttcatctaaaagtggaagacatgcagtgggctcatagagaacatactcacccggcgtctgtctgcagcctgccgtgtaagccaggggagaggaagaaaacggtgaaaggggtcccttgctgctggcactgtgaacgctgtgaaggttacaactaccaggtggatgagctgtcctgtgaactttgccctctggatcagagacccaacatgaaccgcacaggctgccagcttatccccatcatcaaattggagtggcattctccctgggctgtggtgcctgtgtttgttgcaatattgggaatcatcgccaccacctttgtgatcgtgacctttgtccgctataatgacacacctatcgtgagggcttcaggacgcgaacttagttacgtgctcctaacggggatttttctctgttattcaatcacgtttttaatgattgcagcaccagatacaatcatatgctccttccgacgggtcttcctaggacttggcatgtgtttcagctatgcagcccttctgaccaaaacaaaccgtatccaccgaatatttgagcaggggaagaaatctgtcacagcgcccaagttcattagtccagcatctcagctggtgatcaccttcagcctcatctccgtccagctccttggagtgtttgtctggtttgttgtggatcccccccacatcatcattgactatggagagcagcggacactagatccagagaaggccaggggagtgctcaagtgtgacatttctgatctctcactcatttgttcacttggatacagtatcctcttgatggtcacttgtactgtttatgccaataaaacgagaggtgtcccagagactttcaatgaagccaaacctattggatttaccatgtataccacctgcatcatttggttagctttcatccccatcttttttggtacagcccagtcagcagaaaagatgtacatccagacaacaacacttactgtctccatgagtttaagtgcttcagtatctctgggcatgctctatatgcccaaggtttatattataatttttcatccagaacagaatgttcaaaaacgcaagaggagcttcaaggctgtggtgacagctgccaccatgcaaagcaaactgatccaaaaaggaaatgacagaccaaatggcgaggtgaaaagtgaactctgtgagagtcttgaaaccaacacttcctctaccaagacaacatatatcagttacagcaatcattcaatctgaaacagggaaatggcacaatctgaagagacgtggtatatgatcttaaatgatgaacatgagaccgcaaaaattcactcctggagatctccgtagactacaatcaatcaaatcaatagtcagtcttgtaaggaacaaaaattagccatgagccaaaagtatcaataaacggggagtgaagaaacccgttttatacaataaaaccaatgagtgtcaagctaaagtattgcttattcatgagcagttaaaacaaatcacaaaaggaaaactaatgttagctcgtgaaaaaaatgctgttgaaataaataatgtctgatgttattcttgtatttttctgtgattgtgagaactcccgttcctgtcccacattgtttaacttgtataagacaatgagtctgtttcttgtaatggctgaccagattgaagccctgggttgtgctaaaaataaatgcaatgattgatgcatgcaattttttatacaaataatttatttctaataataaaggaatgttttg

SEQ ID NO: 29443 - DNA, 3280 bp, Homo sapiens
  SIMILAR (16)..(2739): 1001254mologous to Homo sapiens metabotropic glutamate receptor 8b,accession number AJ236921,Smith-Waterman Score=4769.
ccacctgtggagaaaatggtatgcgagggaaagcgatcagcctcttgcccttgtttcttcctcttgaccgccaagttctactggatcctcacaatgatgcaaagaactcacagccaggagtatgcccattccatacgggtggatggggacattattttggggggtctcttccctgtccacgcaaagggagagagaggggtgccttgtggggagctgaagaaggaaaaggggattcacagactggaggccatgctttatgcaattgaccagattaacaaggaccctgatctcctttccaacatcactctgggtgtccgcatcctcgacacgtgctctagggacacctatgctttggagcagtctctaacattcgtgcaggcattaatagagaaagatgcttcggatgtgaagtgtgctaatggagatccacccattttcaccaagcccgacaagatttctggcgtcataggtgctgcagcaagctccgtgtccatcatggttgctaacattttaagactttttaagatacctcaaatcagctatgcatccacagccccagagctaagtgataacaccaggtatgactttttctctcgagtggttccgcctgactcctaccaagcccaagccatggtggacatcgtgacagcactgggatggaattatgtttcgacactggcttctgaggggaactatggtgagagcggtgtggaggccttcacccagatctcgagggagattggtggtgtttgcattgcccagtcacagaaaatcccacgtgaaccaagacctggagaatttgaaaaaattatcaaacgcctgctagaaacacctaatgctcgagcagtgattatgtttgccaatgaggatgacatcaggaggatattggaagcagcaaaaaaactaaaccaaagtgggcattttctctggattggctcagatagttggggatccaaaatagcacctgtctatcagcaagaggagattgcagaaggggctgtgacaattttgcccaaacgagcatcaattgatggatttgatcgatactttagaagccgaactcttgccaataatcgaagaaatgtgtggtttgcagaattctgggaggagaattttggctgcaagttaggatcacatgggaaaaggaacagtcatataaagaaatgcacagggctggagcgaattgctcgggattcatcttatgaacaggaaggaaaggtccaatttgtaattgatgctgtatattccatggcttacgccctgcacaatatgcacaaagatctctgccctggatacattggcctttgtccacgaatgagtaccattgatgggaaagagctacttggttatattcgggctgtaaattttaatggcagtgctggcactcctgtcacttttaatgaaaacggagatgctcctggacgttatgatatcttccagtatcaaataaccaacaaaagcacagagtacaaagtcatcggccactggaccaatcagcttcatctaaaagtggaagacatgcagtgggctcatagagaacatactcacccggcgtctgtctgcagcctgccgtgtaagccaggggagaggaagaaaacggtgaagggggtcccttgctgctggcactgtgaacgctgtgaaggttacaactaccaggtggatgagctgtcctgtgaactttgccctctggatcagagacccaacatgaaccgcacaggctgccagcttatccccatcatcaaattggagtggcattctccctgggctgtggtgcctgtgtttgttgcaatattgggaatcatcgccaccacctttgtgatcgtgacctttgtccgctataatgacacacctatcgtgagggcttcaggacgcgaacttagttacgtgctcctaacggggatttttctctgttattcaatcacgtttttaatgattgcagcaccagatacaatcatatgctccttccgacgggtcttcctaggacttggcatgtgtttcagctatgcagcccttctgaccaaaacaaaccgtatccaccgaatatttgagcaggggaagaaatctgtcacagcgcccaagttcattagtccagcatctcagctggtgatcaccttcagcctcatctccgtccagctccttggagtgtttgtctggtttgttgtggatcccccccacatcatcattgactatggagagcagcggacactagatccagagaaggccaggggagtgctcaagtgtgacatttctgatctctcactcatttgttcacttggatacagtatcctcttgatggtcacttgtactgtttatgccattaaaacgagaggtgtcccagagactttcaatgaagccaaacctattggatttaccatgtataccacctgcatcatttggttagctttcatccccatcttttttggtacagcccagtcagcagaaaagatgtacatccagacaacaacacttactgtctccatgagtttaagtgcttcagtatctctgggcatgctctatatgcccaaggtttatattataatttttcatccagaacagaatgttcaaaaacgcaagaggagcttcaaggctgtggtgacagctgccaccatgcaaagcaaactgatccaaaaaggaaatgacagaccaaatggcgaggtgaaaagtgaactctgtgagagtcttgaaaccaacagtaagtcatctgtagagtttccgatggtcaagagcgggagcacttcctaatagatcttcctctaccaagacaacatatatcagttacagcaatcattcaatctgaaacagggaaatggcacaatctgaagagatgtggtatatgatcttaaatgatgaacatgagaccgcaaaaattcactcctggagatctccgtagactacaatcaatcaaatcaatagtcagtcttgtaaggaacaaaaattagccatgagccaaaagtatcaataaacggggagtgaagaaacccgttttatacaataaaaccaatgagtgtcaagctaaagtattgcttattcatgagcagttaaaacaaatcacaaaaggaaaactaatgttagctcgtgaaaaaaaatgctgttgaaataaataatgtctgatgttattcttgtatttttctgtgattgtgagaactcccgttcctgtcccacattgtttaacttgtataagacaatgagtctgtttcttgtaatggctgaccagattgaagccctgggttgtgctaaaaataaatgcaatgattgatgcatgcaaaaaaaaaaaaaaaaa

SEQ ID NO: 29444 - DNA, 1617 bp, Homo sapiens
  SIMILAR (331)..(1614): 1001254mologous to Homo sapiens KIAA1157 protein,accession number AB032983,Smith-Waterman Score=2231.
atgccccgcgtgcgccttgcccggcccccgcagcctcctgctcgcaccgctgcagccgggcgccggagtaatatgctcactcgagtgacatctgccgtggccaatttcatgggcggcatcatggctggcagctcaggctccgagcacggcggcggcagctgcggaggctcggacctgcccctgcgtttcccctacgggcggccagagttcctggggctgtctcaggacgaggtggagtgcagcgccgaccacatcgcccgccccatcctcatcctcaaggagactcggcggctgccctgggccactggctacgcagaggttatcaatgccgggaagagcacacacaatgaagaccaagccagctgtgaggtgctcactgtgaagaagaaggcaggggccgtgacctcaaccccaaacaggaactcatccaagagacggtcctcccttcccaatggggaagggctgcagctgaaggagaactcggaatccgagggtgtttcctgccactattggtcgctgtttgacgggcacgcggggtccggggccgcggtggtggcgtcacgcctgctgcagcaccacatcacggagcagctgcaggacatcgtggacatcctgaagaactccgccgtcctgccccctacctgcctgggggaggagcctgagaacacgcccgccaacagccggactctgacccgggcagcctccctgcgcggaggggtgggggccccgggctcccccagcacgccccccacacgcttctttaccgagaagaagattccccatgagtgcctggtcatcggagcgcttgaaagtgcattcaaggaaatggacctacagatagaacgagagaggagttcatataatatatctggtggctgcacggccctcattgtgatttgccttttggggaagctgtatgttgcaaatgctggggatagcagggccataatcatcagaaatggagaaattatccccatgtcttcagaatttacccccgagacggagcgccagcgacttcagtacctggcattcatgcagcctcacttgctgggaaatgagttcacacatttggagtttccaaggagagtacagagaaaggagcttggaaagaagatgctctacagggactttaatatgacaggctgggcatacaaaaccattgaggatgaggacttgaagttcccccttatatatggagaaggcaagaaggcccgggtaatggcaactattggagtgaccaggggacttggggaccatgacctgaaggtgcatgactccaacatctacattaaaccattcctgtcttcagctccagaggtaagaatctacgatctttcaaaatatgatcatggatcagatgatgtgctgatcttggccactgatggactctgggacgttttatcaaatgaagaagtagcagaagcaatcactcagtttcttcctaactgtgatccagatgatcctcacaggtacacactggcagctcaggacctggtgatgcgtgcccggggtgtgctgaaggacagaggatggcggatatctaatgaccgactgggctcaggagacgacatttctgtatatgtcattcctttaatacatggaaacaagctgtcatga

SEQ ID NO: 29445 - DNA, 3018 bp, Homo sapiens
  SIMILAR (118)..(417): 331254mologous to Saccharomyces cerevisiae Yhr217cp,accession number U00029,Smith-Waterman Score=116.
aataaaatggctcacaaacctcacggaaacacatttactatttgattataaggatattccaaaggatatagatgaagagatgcctagcacgagaccacggggccacacaagttgcacctgcacagccacagacctgcaactcacgcacacacagtactgcacacacacgcaaagtcacacatccaccctgggacacgcagccccaaccacacagtcaccggttgtccacatccgcacacacaacgcggctcgtccaggacacacacatccactccgagcgcgcacagtcacaagcgcccacttgatcacccagagtcagcaccacgcagccacagtcacagaccacgaagacccacggcaaccatggcaatcacacacgcaaactcctctcctcagccctccacacacaaaaggaccggagccggattcctcaccctcagctttctccagttccgctcggggccagcctggccaagttactccggactccaaggcgcggcagcagctaattgggcacagcgaaagaatctgccacctggctaagaggaagccgaaatctcgcgagacgtggtattggcctgcagaatcctccgggaaatgtagtccagagcccgactgctcccctactaaaaatacaaaaattagccgggcctggagtgattgtgaaatagtggcaatgtattacatcactattgaagttaccgtctctcatagatgggcttctcactatgttgcagagattggacttgaattcctgggctcaactgatcctccaaccttggcctcccaaaatgttgcagttagagaccttcacaaactcaaactggaaccaccggaaaaacgactgacaaccggccacaagacccagggagagacgcggggagaggcctcgactctgacgcactatcacacatggctcctactttgccaagtctcagggacctatttctgggcaacagtggcggacactgttaccaaagtggtggctcagtcgtcgagcatgctcactggagaggccgactccgcccttgctccggagagtcaggctgcggaccctttaaaaaatggctgcaacacagctgactgcggcgactggggtggcggtacagtccgaggcggcaagtgggaagggaccttcttgatccatcttctgcttcagttcctggtggaggaggagcttcagggtgccgctgggctctccggactcctcctcgaatctgattatggatccgaaccgggactggattctaagacaaccatggaaatcaatgtgatgggagaatcagctagagcctcgcggatacgcatttgctgggccgactcgcgttgcgctcctggaaggcaggctgtggcctctttaaacaatggcgactgcacagtggcagggggaatcctgctgcagccgcggcgatggcgggatgcaggttccaagcagtcgcctgtcccacttgtaaaagctctggggcccttgcaagctgacacctcttttcaggacacatgcaaacagggacaagggcgattccgaagtggagtcaattccaacatgcgtggcactggcgtatcccagagcagatggccctttgtgactcttggcatccagagacgttcctgtcgaccccgtggagagtgtggtcatcttgatcctaaaaatgaggccgctcaggatgaggatgagatttcaattgctccgggaccaacgcatctcctcacgcggtcgaagccttcacacagccaaagtggtaccagggacacgtgcaaacaaagacagaggcgattccgaggtgaggccaatgcgatcaagcggtggcactggcgtatcccaagagcagatggtgtgaatgtgtgtcaccggaggcatatggggcgatggcaaaaccaacaatggtgtccaggcatgtgtctggtggaagggcagatcaagtgacctttccatcgatgccaaggaaaatcaaagaacaactgggaaccaggagggggcctgtgcctgagtccaagccacattttgaaatgcctgccagaggattaaagaggtttctgcaaaattcaccccacccccaaccctccacggcccagaagaatggctcctttgtatggggaggtgatttgtacacctgtgagtctcaaccatccccccaactcaccgtggactcaggaaccacggaaaaacaaagaacatgcagccccataggccaagcagagccacacagacaggagaaggaggagtttgaagactgtgaggtgagctctggagactggtcttctgactccattcccaaaagaggctgtgtgcatgaattgggtctcctggggatgggaataaagtctggcctcacaggggctcctgcttctcagcacagctctctgggaaaggcagaaaccacgacaaaggcaagtccaagaaatgtggcgtttttgcaaagggaggtgattttgaccccagcggttgtcagccattcttccaattcactgtggattcaggaaccatggaaaaatgaagaacatggagaccctcagcccaagcagagccacagagacaggccaccagaaggtggggtgacaaaaaacagtgctgcagtcctgctggaggaggaggcacttggagactgtgatgtggatgctggaaactgttcctcttattccattcccgaaagaggctgtgtgcaagaattgggtcccatggggaagggaatacagtctgctgagatgttaaggggtgtccaggtcctgactcagagtgaagaacatgaggcccttgctgcctcaggtgaggaacataaagggatgtcaaataaactcagtaatcaagatgtagactggagcagtctaaaagtaaaatctgaaggtaaaatagaaaccacaggaacttctaccagtaactgcacatttgtaattgatatcaactctcccatggaacacaacaacaaaattttctttgagacactaagtgttaacaaagccatgggaaattgcaaagcccagatccaagagatgagcttgacattgagcatcactttttag

SEQ ID NO: 29446 - DNA, 577 bp, Homo sapiens
  SIMILAR (2)..(577): 931254mologous to Escherichia coli D-alanine:D-alanine ligase A,accession number M58467,Smith-Waterman Score=907.
ccaaaacgttcacccttttcgaccggtggatgtctttttcccgattgtccacggttcgatgggcaaagatggttcctgccagggaatgctgcgggtcgccaatttaccgtttgtaggttctgatgttctggcttcagcagcctgtatggacaaagatgtcaccaaacgtctgctacgcgatgccgggctgaacattgcgccatttattaccctgacgcgcgccaatcgtcacaacattagttttgccgaagtggagtctaaactggggttaccactgtttgtaaaaccggctaatcagggctcttctgttggtgtcagcaaagtaaccagtgaagaacagtacgcaattgccgtcgatctggcgttcgagttcgatcataaagtgatcgttgagcaagggatcaaaggtcgtgagatcgaatgcgcagttttgggcaacgacaatccgcaagccagcacctgtggagagatcgtactcaccagcgatttctatgcctaccacaccaagtccattgacgaagatggcgcgaaagtggtagttccggcagccattgcgccagaaatcaacgataagatc

SEQ ID NO: 29447 - DNA, 2172 bp, Homo sapiens
  SIMILAR (1)..(795): 921254mologous to Escherichia coli K12 putative enzyme,accession number AE000362,Smith-Waterman Score=1279.
atggaacacgatgtctgtgaagtgatcgccgatgttccctggggctatcgccgtcgcgcgcgtttaagtgtgaagtacttaccgagagcacagcaacttcagatggggtttcgcaaagcgggctccagtgacattgtcgacgtcaaacgatgccccatgttagcgccccaacttgaagcattggtgcccaaagtcagggcatgtgtgggcagcttacaaggtatgcgccatcttggtcatgttgaactggtacaggcaaccagcggcacgctgatgattttgcgccataccgcaccgctaagttcggcagatcgcgaaaaactggaacgcttttcgcattctgaaggcctggatctgtatctcgcccccgatagtgagatactcgaaaccgtctctggtgagatgccctggtatgactcaaacgggttgcgcttaacttttagcccgcgcgattttattcaggtcaatgcgggtgtgaaccaaaaaatggtagcgcgtgcgttggaatggctggatgtgcaacctgaagatcgcgtactggatctgttctgcggtatgggcaactttacactgccattggcgacacaagctgccagtgtggtcggtgtagaaggtgttccggcgctggtggaaaaaggccagcagaatgcgcgtcttaatggcttacagaatgtgacgttttatcacgaaaatcttgaagaagatgtcacaaagcagccgtgggcgaaaaacggcttcgataaagtgttgctggacccggcgcgggagcacgggatcaacgttctgaattctatggccatttcgggcaacgacaatccgcaagccagcacctgtggagagatcgtactcaccagcgatgtctatgcctacgacaccaagtacattgacgaagatggcgcgaaagtggtagttccggcagccattgcgccagaaatcaacgataagatccgggcgattgccgttcaggcttatcaaacgttgggatgcgcaggcatggcgcgtgtagacgtgtttttaaccccagagaacgaagtggtgatcaacgagatcaacaccctgcctggcttcactaatatcagtatgtatccgaagctgtggcaagccagcggtctgggttacaccgatctgatcacacgtttgattgaactggcgctggagcgtcacgctgcggataacgcattgaaaaccacaatcggaaaatatcgcaatgcctcttcaacgcctggcaacattgcctatgcgttgtttgtgctgttttgcttttgggctggggcgcaattgctgaacctgttagtgcatgcgcccggcgtctatgagcgtttaatgcaggtccaggaaacaggtcgcccacgggtggaaattggtttaggtgtcggcaccattttcgggctgatcccgtttttatggtggcgctatggctgcactggcgacatcgccgccactgatttcgaattattgtgggaattagctacccatgccgggcaaatcatggaccgcgatgcattgctgaaaaatttacgcggcgtcagttatgacggactggatcgtagcgtggacgtggctatttcgcggttaagaaaaaaactgctcgataacgccgcagaaccttatcgcattaaaactttttacctgttattgtttgtctgcttccttgtgatgtctctgctggttgggctggtgtacaaatttaccgccgaacgcgcgggcaaacagtcgctggatgatttgatgaacagttcgctgtatctgatgcgcagcgaattgcgtgagatccccccacacgactggggtaaaactctgaaagagatggatttaaatctctctttcgatctgcgtgtcgagccactgagtaaataccatcttgatgatatttccatgcaccgactgcgtggcggcgaaattgtcgccctggacgatcagtacacgttaatgcagcgtatcccgcgcagccactacgtgctggcagttggtcctgttccttatctttattatctccatcagatgcgattgctggatatcgccctgatcgcttatattgctatttccctcgccttaccggtgtatatctggatgcgtccgcactggcaggatatgttaaaactggaagcagcggcgcaacgatttggagaagggcctctcaatgaagtatcccttgatgaggttccactttga

SEQ ID NO: 29448 - DNA, 1619 bp, Homo sapiens
  SIMILAR (1)..(1617): 971254mologous to Escherichia coli ostA/imp,accession number AB013134,Smith-Waterman Score=2879.
aaagggccgaaaggctgggcgaatctgaacaccaaagataccaacgtctgggaaggtgattaccagatggtgggtcgccagggtcgcggtaaagcggacctgatgaaacaacgtggcgaaaaccgctataccattctggataacggtagctttacctcctgtctgccgggttctgacacctggagcgtggtaggtagcgaaattattcatgaccgcgaagaacaagttgcggagatctggaacgcccgctttaaggtgggtccggtaccgatcttttatagcccctatttgcagttgccggtgggtgacaaacgtcgctctggtttcttgatcccgaacgccaagtacaccaccaccaactactttgagttctacctgccatattactggaacatcgcgccaaatatggatgccaccatcacgccgcattatatgcatcgtcgtggcaacatcatgtgggagaacgaattccgctacctctcccaggcgggcgctggcttgatggaactggactatctgccttcagataaagtctatgaagatgaacacccgaacgatgacagttcacgtcgttggttattctactggaaccactccggggtcatggatcaggtgtggcgtttcaacgtcgactacaccaaggtcagcgatcctagctacttcaatgatttcgataacaagtacggttccagtactgacggctacgcaacgcaaaaattcagcgttggctatgcggtgcaaaacttcaatgccaccgtttcaaccaagcagttccaggttttcagcgaacagaacaccagtagctacttcgcagagccgcagttagacgttaattactaccagaatgatgttgtgcactttgtaaccaccagagacgacatgcctgaagcaacccgtgttcacctggaaccgaccatcaatttgccgctctctaataactggggcagcatcaataccgaagcgaagttgctggcaacccattatcagcaaaccaatcttgactggtataactccagaaacacgaccaagctggacgaatccgttaaccgcgtaatgccgcaattcaaagttgacggcagaatggtctttgaacgcgatatggaaatgctggctccgggttatacccaaacgctggaaccgcgcgcgcagtatttgtacgtgccgtatcgcgatcagagcgacatctataactacgactcgtctctgctgcaatctgactactctggcctgttccgggaccggacttacggcggtcttgaccgtattgcctccgctaaccaggtgacgaccggtgtcacatctcgcatatatgatgatgctgccgttgaacgttttaatatttccgttggtcaaatctactatttcacggagtctcgcactggcgatgacaacataacatgggagaatgacgacaaaacgggttcactggtgtgggcaggcgatacttactggcgtatctccgagcgttggggattgcgtggcgggattcagtacgatacacgtctggataacgtagcgaccagtaactccagcattgaataccgtcgggatgaagaccgactggtacagctgaattaccgttacgccagcccggaatatattcaggctacgctgcctaa

SEQ ID NO: 29449 - DNA, 2015 bp, Homo sapiens
  SIMILAR (2014)..(5): 931254mologous to Homo sapiens putative p150,accession number U93563,Smith-Waterman Score=3254.
tcatgtagattctggatattagccctttgtcagatgagtagattgcaaaaattttctcccattctgtaggttgcctgttcactctgatggtagtttcttttgctgtgcagaagctatttagtttaattagatcccatttgtcaattttggcttttgttgccattgcttttggtgttttagacataaagtccttgcccatgcctatgtcctgaatggtaatgcctaggttttcttctagggtttttatggttttaggtctaaagtttaagtctttaatccatcttgaattaatttttgtataaggtgtagggaagggatccattttcagctttccatatatggctagccagttttcccagcaccatttattaaatagggaatcctttccccattgcttgtttttctcaggtttgtcgaagatcagatagttgtagatatgtggcgttatttctaaggggtctcttccattccattgatctatatctccattttggtaccagtaccgtgctgttttggttactgtagccttgtagaatagtttgaagtcaggtagcgtgatgcctccagctttgttcttttggcttaggattgacttggcaatgcgggctcttttttggttccatatgaactttaaagtagttttttccagtactgtgaagaaagtcattggtagcttgatggggatggcattgaatctataaattcccttgggcagtatggccattttcacgatattgattcttcctacccataagcatggaatgaaaatgttcttccatttgtttgtatcctcttttattttgttgagcagtggtttgtagctctccttgaagatgtccttcacgtcccttgtaagttggattcctaggtattttattctctttgaagcaattgtgaatgggagttcactcatgatttggctctctgtttgtctgttattggtgtataagactgcttgtgatttttgtacattgattttgtatcctgagagtttaccaaagttgcttatcagcttaaggagattttgggctgagacaatggggttttctagatatacaatcatgtcatctgcaaacagggacaatttgacttcctcttttcctaattggataccctttatttccttctcctgcctcattgccctggccagaacttccaacactatgttgaataggagcggtgagagagggcatccctgtcttgtgccagttttcaaagggaacgcttccagtttttgcccattcagtatgatattggctgtgggtttgtcatagatagctctcattattttgagatacgtcccatcaatgccgaatttattgagagtttttagcatgaagcgttgttgaattttgtcaaaggccttttctgcatctattgagatcatcatgtggtttttgtctttggctctgttaatatgctggattacatttattgatttgcgtatattgaaccagccttgcatcccagggatgaagcccacttgatcatggtggataagcttttcgatgtgctgctggattcgttttgccagtattttattgaggatttttgcatcaatgttcatcaaggatattggtctaaaattctcttttttggttgtgtctctgcctggctttggtatcagaatgatgctggcctcataaaatgagttagggaggattccctctttttctattgattggaatagtttcagacggaatggtaccagttcctccttgtacctctggtagaattcggctgtgaatccatctggtcctggactctttttggttggtaagctattgattattgccacaatttcagctcctgttattggtctattcagagattcaacttcttcctggtttagtcttgggagagtgtatgtgtccaggaatttatccatttcttctagattttctagtttatttgcgtagaggtgtttgtagtattctctgatggtagtttgtatttctgtgggatcagtggtgatatcccctttatcattttttattgcgtctatttgattcttc

SEQ ID NO: 29450 - DNA, 1987 bp, Homo sapiens
  SIMILAR (1406)..(1984): 991254mologous to Escherichia coli D-alanine:D-alanine ligase A,accession number M58467,Smith-Waterman Score=973.
  misc_feature (1)...(1987): n = a,t,c or g
ttaaaacatagcaatcactacatcatcatcatcctcatcctcagcatcatcatcatcaccataatcagtggatcctctagagtcaccagcagcatcaagctgcactccgtctaagtctcccgccgagaaaggtccaacccgggggataattgttgcagcccggtggaaccggttcccggaagggtcttggagctcagtccaggatttgagtgccaaggagggctgctctgggcattgaaattgaacctctcttagagacttagggacgagctcattctgagttgactccaagatcttctcccagggaccgagcagtatctgatctaaagcctggtggccgtttgacagaaagacatgagctttttgtgaagtcaacatttcgttgctgaaatctatgggatctgcgacaagccatttcgacttgctcggcctcagtttttcgtcaaccaaaaagagtgcaggaccaatggattcacagccgaattctaccagagtacaggaggaactgtaccattgattggataagagcgggttccgagtgacaaaagtggcggcaggagaaacacaggtcttgtccgcgtggaaccaccttttctgtcctgcactggaagtagggctctctaggaggactagaaggacttggtgtagtcgacgttgaaacgccacactgatccatgaccccggagtggttccagtagaataaccaacgacgtgaatgtcatcgttcgggtgttcatcttcatagactttatctgaaggcagatatccagttccatcaagccagcgcccgcctgggagaggtagcggaattcgtctcccacatgatgttgccacgacgatgcatataatgcggcgtgatggtggcatccatatttggcgcgatgttccagtaatatggcaggtagaactcaaagtagttggtggtggtgtacttggcgttcgggatcaagaaaccagagcgacgtttgtcacccaccggcaactgcaaataggggctataaaagatcggtaccggacccaccttaaagcgggcgttccagatctccgcaacttgttcttcgcggtcatgaataatttcgctacctaccacgctccaggtgtcagaacccggcagacaggaggtccgctttaccgcgaccctggcgacccaccatctggtaatcaccttcccagacgttggtatctttggtgttcagattcgcccagcctttcggcccctttgagatcaccctggtatcgtcgtaatggacattaccgagcgcatcaacgtgaatccggtgaagtggtggatatggccgcttatgaggcatggcaacaggaaaatcatccggacatccagcagcagatgcagcgtcgtgaagagggggataaccatttcaggacgatttccttcagcaatttcatagccgaagtggagtctaaactggggttaccactgtttgtaaaaccggctaatcagggctcttctgttggtgtcagcaaagtaaccagtgaagaacagtacgcaattgccgtcgatctggcgttcgagttcgatcataaagtgatcgttgagcaagggatcaaaggtcgtgagatcgaatgcgcagttctgggcaacgacaatccgcaagccagcacctgtggagagatcgtactcaccagcgatttctatgcctacgacaccaagtacattgacgaagatggcgcgaaagtggtagttccggcagccattgcgccagaaatcaacgataagatccgggcgattgccgttcaggcttatcaaacgttgggatgcgcaggcatggcgcgtgtagacgtgtttttaaccccagagaacgaagtgntgatcaacgagatcaacaccctgcctggcttcactaatatcagtatgtatccgaagctgtggcaagccagcggtctgggttacaccgatctgatcacacgtttgattgaactggcgctggagcgtcacgctgcggataacgcattgaaaaccacaatgtaa

SEQ ID NO: 29451 - DNA, 2214 bp, Homo sapiens; identical to SEQ ID NO: 7869
  SIMILAR (769)..(1758): 941254mologous to Homo sapiens putative p150,accession number U93569,Smith-Waterman Score=1618.

SEQ ID NO: 29452 - DNA, 621 bp, Homo sapiens
  SIMILAR (218)..(168): 761254mologous to Homo sapiens Human secreted protein encoded by gene No. 13,accession number Y27579,Smith-Waterman Score=65.
gcacgaggcgccattttttggggtgagtgttttttggttcctgcgttgggattccgtgtacaatccatagacatctgacctcggcacttagcatcatcacagcaaacctaactgtagcctttctctctttccctgtagaaaacctctgccgcccatgaaaagcccaagtggaggaaagaaagcgaatgcgcgaggctgaaagcgcaaaagaagaaagatgttgcagaggtcccaagtaaaccgctagcttgtttgcaccgcgtgaggccccacaggagcacgaaacatggaatgcccagacgctgggggatgcttggtacaagttgtgggactgcatgctactgtcttagagcttgtctcaatgggatctagaacttcatccgccctctggattcgccgattcaccttttgaggacccacctttgctcataaccaaaactgcccatgttgggtcctcttgccctgaacctgtggacattctgggactatttccgtgtttaatttgtgggccgagttgttaacaaccatattaattaaatcacctctttccgctgtttttagcttgaagaattaaatcaaaacctaaaacaaaaaaaaaaaaaaaaaaaaaaagtcagcagc

SEQ ID NO: 29453 - DNA, 1677 bp, Homo sapiens
  SIMILAR (1410)..(262): 971254mologous to Escherichia coli sn-glycerol-3-phosphate acyltransferase,accession number K00127,Smith-Waterman Score=1886.
ttatttatgacggtatttcagcgcgccgctcgggcacgtatcaatcactttaaccacagtggcgacgtcgacttcatccggcatgatccacggctttcgtttgagattaaataacttgccgttgccacgtacgcaattgccagaatgctgacatatcgcagtgttgaaatagacatcgatcttttcgccggtataacagcgataacccccgtccagtagcgcctgatccatgaccttccctctctcatcagtatgattatcgccttcgccctgcgtcgcactctcaatcgtcaaacgcacgtctgatgtaatcaactccgccagcaactgataaaccttcatcgtttctgccggttcggcatcgccgctatcgctgatatacccttcatcacgcagtgtcagcaccagagaactgaacaccgccttgtcgaagaactccggcgcgttgatgccgtgcagcacggagagacgttgcgcgacggtgcggctctctttctccagcgtaccgcggttgatcgacgggttggcactcaacaaccagaaggtgatggcataacgttgcagcgtttcgcgcgcgcctgcggccagcagctgtagcgtgcgagaatgcgccgggttgatatgcaactcatcatcttgcagggtaatcagcccctgacgttgcatctcatttgccagcgcatcaataacgtccggcaactcgtcgcgatcccagcgcaggaacagctccgctttcagcattgggtaaagcacattgacgtgctccatcaatacgtcgcgggagatgtggcgatgctgggtgacgattgccgccatcagcgaaggcagcaccaacatatgcgcaatgttgttgcgatagtaggtcatcagcaccgcttgctcgcgcggcagaatgatgatgtcgccgattgtgtctttctcgacttcaaacttgttcatttgcagcgcgtgatcgataagctcgctggcgctggctgaaggaacggtagagtccgtggagtagggcacgttgcgcatcagatccaggtagcagttgagttgctcggttaactgctcgcgggtgagtgagcgctgacgtgatgccagtagcgcagtacagcacaggttcatggcgtttgccgcgcctgcgttgttaatgcgtaccatcagatcggcagcaatattattgaccgtcggcgttaaccatgccggacgcaccgcttcgatgggatcgatagattcacgccagtcaggtacatgctggttaaggtaggtcatcaacggcattggttcaccgaagttgacgtaaccctgaccgagattacgcagcttgcttaaaccgcgcagcatctgcggcaggctctctttctctttcgtcgcgccgggcaattctgttgttcgtacgtacccactttcatgtacgtgcgcatatgccgttacgaatgcggcacccacgcgatgtccttacgtcgtagccccttctccctctatcctcctgcgcggtctacctaatggagttcgccgtttttctgtcctgtttctatatttgcgctcgtctcgcgcgctatcacctcttgctgactgtgcgcgcgggtatcttgagtcgcacggatgttctgcagaccttagccgtttacgttcactatgactcgctgtgtcctccttcgatctgtttcttctgccgcgagtgcgaacgtc

SEQ ID NO: 29454 - DNA, 1027 bp, Homo sapiens
  SIMILAR (449)..(826): 1001254mologous to Escherichia coli Trp repressor binding protein,accession number D90737,Smith-Waterman Score=657.
atggagctgagtggggcaaagggggcccgaaggcagcttcgacagcagtggggtgtacgtcgctgtagtgccactatcacgtttgcctggcaaaatggaaataaaaataataagaaaaagtgtctgaccctcactgactcccttgcagaattggctgtgcggtatacaaagatgttcttaacagaaaccttgtacagacagctgagtaggtttagtctaaagaaggttttttggaaaaatcctaaaggcctgccggacacgttcaccggtcaaccggaatacgacccccacgtccaccctttgaagggtaatctgttttacgcaatgccagcatgtcgtattcggtaccaacgttacggcagcgccgggaagctgaaggttaacaatgccagcatgaacggcgtaagattaacacgggctttaccgctggtacggcagacaccactaactggccgattacgacgccattatttttggtacacctacccgctttggcaacatgtccggtcaaatgcgtaccttcctcgaccagacgggcggcctgtgggcttccggcgcactatacggaaaactggcgagcgtctttagttccaccggtactggcggcggtcaggaacaaaccatcacatccacctggacgacccttgcgcatcacggcatggtaattgtccctattggctacgcagcgcaggaattatttgacgtttcacaggttcgcggcggtacgccgtacggcgcaaccaccatcgcaggcggtgacggttcacgccagcccagccaggaagaactgtctattgctcgttatcaaggggaatatgtcgcaggaggatacgcatgccaactcaagaagcgaaagctcatcacgtcggtgaatgggcatctctgcgcaatacgtcgccgggaaatagccgaggccattttcgaagtcgccgggtacgacgaaaaaatggcggaaaagattcgggacgaaggtcgtgatgaagtgttagtcaaagcctttgctaagaccgataaagattcgctttga

SEQ ID NO: 29455 - DNA, 1355 bp, Homo sapiens
  SIMILAR (1007)..(1135): 971254mologous to Escherichia coli ORF_o179,accession number U18997,Smith-Waterman Score=209.
tcaaacttgttcatttgcagcgcgtgatcgatagctcgctggcgctggctgaaggaacggtagagtccgtggagtagggcacttgcgcatcagatccaggtagcagttgagttgctcggttaactgctcgcggtgagtgagcgctgacgtgatgccagtagcgcagtacagcacaggttctggcgtttgccgcgcttgtgtgaaggctaggatggggaccgaaagagctatgtgctcaagacctggcacacagatgcactcaatggccatgtctgttcctgctgtgtgggtgcccgtagtgataatcaagccgtagtgagtcaagtagcagtggtgtgtcacgtagggataacgagccgtagtgcagacgtagtcgtggtggtcacgtagggaatacaagtcgtagtggccagtagcgagtgtcacgtatgataacagcatagtactcagtagcgtgttgtcacgtagaaacagtcgtagtacttcttcccaaatcttttccgccatttttcgtcgtacccggcgacttcgaaaatggcctcggctatttccggcacgtattgcgcagagatgcccattcaccgacgtgatgagctttcgcttctgagttggcatgcgtatcctccatgccgtgatgcgcaagggtcgtccaggggatgtgatggtttgttcctgaccgccgccagtaccggtggaactaaagcgctcgccagttttccgtatagtgcgccggaagcccacaggccgcccgttggtcgaggaaggtacgcatttgaccggacatgttgccaaagcgggtagtgtaccaaaaataatggcgtcgtaatcggccagttgtagggaaatgagcgcataacggataactgtcagaagtgtatcgacggggataaggacaacacaggtgtgagagagtagacgcagacacacggcatcattcaggatcaacaccgggccgcggatttctgtgtcgtccaacgtgcgcagcgaatattcatccgccgcttcccacgccgctgtttctcgtgtgcagggcggcaagctgaaagcaaaggtggagatccgcgtcgctaccgtgtttcgcaacgcgccggaaccgtttttgcgcatgatcgtggtgcacgagctggcgcacctactctgcggtagaacacctgtcggtgagcgcgtcggcgatacctgttatgaagccgcgctggtggtagatcacgctgcccgcagagctccaggacgagtttcccaggattcactcgatctggtataacgcgtctctggaagccaggcaattgcgccctctcgtctacgcctcccaggcgcgcccgccggtaaacgaggtcgccagctcgtgccacctgcat

SEQ ID NO: 29456 - DNA, 1689 bp, Homo sapiens
  SIMILAR (1038)..(1079): 711254mologous to Escherichia coli K12 putative resistance proteins,accession number AE000367,Smith-Waterman Score=49.
atggcacaccaagtacctcatcgcgatgtagtgggcaagaaacaaacgtctatgtcaaatgagtattcgagtgtccaatcaatgcaagtcgcgcaatacggcatcagaataagatacaagaacggagggcaaatatgttttagacgcaaggcgctagtttatatagtcaacaaacagcatgaagtgcatgcctctatgaactggcaggatgttagcggtaaatctgccgtacctgtgaagtggcttgcgcagtgtcgcatcatgagaatcaggattgcgctgcgttgtcaccagacgagtttatttcccctgtatgctggcttgcccgtttggtgcgatggaggtgtttcttcgcgcaaaaagccagatgaagtccaggccactgcgattaagagcgatgccagcaaaggcgaggcactggtgcttttcaccacagatcacgaactgacgcgcgataagttgcaacagtatgcccgcgagcacggcgtgccggagcttgctgtaccgcgcgatattcgctatctgatacagatgccattacttggcagcggccaacctgactttgtcacgttgaaaagctgggggatgaaagcggttatcgtggcgcagtttctctctgcgtttggcgataatgccctactgtttgccactctggcgttactgaaagcgcagttctatccggagtggagccagcccatcctgcaaatggtgtttgtaggtgcttacattctttttgcgccgtttgtcgggcaggtggcggatagcttcgccaaaggccgggtgatgatgtttgccaacggcctgaagctgctgggcgcagccagtatctgctttggtatcaatccgtttctcggctatacgctggtgggtgttggtgctgcagcctattcaccggcgaaatacggtattctcggcgaattaaccacgggtagtaagttagtgaaagctaacggtttaatggaagcttctaccatagcggcgattttgctcggttccgtagccggtggtgtgctggcttactggcatgtcctcgtcgcctggccgcatgcgcactggcctacggtgagtcgacaacagcagcagctgatggcatccaccttaccatttacaagcccgctggcgcagatattcccgtggcgagcgataacccagcgcactatgcggatgccattcgttatagatgctcgagacgccctcctgcaaggtgtctttgctgccgttaacccgtctgcgcatctcaacgacagcaggcaccgccgcataaacaaaaatgtcatcgaacccggcatctcctgtcagcgcccgcagcatctggacaggatcgctcatccctttggtattcacatacaccagctcaatgcctttactggccgccagttccaccggcagcagcttctgtacctgcgccagacgtttgtcgtcgatatcgaccaccaccacccgcgacggttgtatgccgccgttaatggcgtaatcgatagcgccaatgcccatcggacctgcacacgccagcagtgcaatattgccgccaggtttgacgcccatgcgatgctcataaacatattgcgtggtgtgataattggcatgataagcaccaataatgcagcacataggctctgccagcgacgccgcagcaaaataaggagccgtgatacgggtaatacgcagcccaaattaatgcagatttag

SEQ ID NO: 29457 - DNA, 1632 bp, Homo sapiens
  SIMILAR (885)..(427): 1001254mologous to Escherichia coli o417,accession number U00039,Smith-Waterman Score=825.
tcagcagccgcagaaaactaatacatcatttattttgaaaaactgttccaaacagtaaaagtggtctcggtccgaggcggggatagacgaactctgctcggtaatcgtgtcatcattgaccactgctggaccacggcggtagcctgtcatcagtgtgaagatgcaccgtgcgcgaatgtctgccctgttgacgcgataagccgcgaacatgggcatattttcgttgaacaaacacgttgcattggctgtaaaagctgtatgctggcttgcccgtttggtgcgatggaggtcgtttcttcgcgcaaaaaggcgagggcgattaagtgcgatctgtgctggcatcgggagacgggaccggcctgtgttgaagcctgcccgacaaaggcgttgcagtgcatggatgtcgagaaagtgcagcggcatcggccccgcctcaattttctccggctctggtacgtagttcatgcgcatacattgatgcgtatgcggccacggtttatccagccctgggaagaagttgtgccccggcaccatcagcacgccgcgtgctttcaggcgctgatagagctgcttggtcgtaatgggcaaatccttaaaccatagccagaggaaaatggctccttccggtttatgaatcaggcagcgattttccggtaaatagcggcgaatgatggcgatagtttcctgaacacgctggtagtaaaacggtttgatgactgtttcagacaggcgcagcagatcgttacgcttaatcatttcacacatcatcgccggaccaataccgccaggtgccaggctgataatgccgttcatattggtgatggcggtgatgattttttcattggcgatgataatgccgcagcgggagccaggtagacccagcttctcatagcaacgtccgttggcataaacctgatagtggggtaaaaggtctggggccccgatcttccctgtcttctcttgggtgtgcgaagtgaccacctgacccattatcaccactctgtttctgctggctgtggtaggatgtgtcagaagaacccacacatatttccttaggatcattaatttctttgagaagaatgcaaggctggagtccacctgggggcggagctgctggtagaagacatctcccgccgccgagagctggaagagcaccaggcctgggtgtgggtggccgctgagggcaagggcgggacgacggcagccagacctggtgacgggaatgacaatgacctccaggcctgccaggtgcagcagctgcagctgcccaccctggcctccgaggagcaggggctgcacgcagctgggccggggcggaggcagcagtcgggccagcaggagcggggaggggaggccatggttccacttcagcatcggcaccaggggaaggcgctcgtccacttctgagccgccctccgaggctggctctgcctgcttgctgtttctcacaagaggaaacgcaggctcagagaggcccggcgcactgcccacccccttgcaagctccgggtggcgccgggactcgaacgcgcgccccagagctgctgacaccgccctctccccgcaggccgaggaggcgggcgcgcccggcggcccccggcagccccgagcagaccgctgcccgccagcacat

SEQ ID NO: 29458 - DNA, 812 bp, Homo sapiens
  SIMILAR (1)..(339): 1001254mologous to Escherichia coli CG Site No. 385,accession number U00039,Smith-Waterman Score=560.
atcatggcggtcgcgctggcgttaggtatcggtacgatgattggctggcgccgtgtggcaacgactatcggtgagaaaatcggtaagaaaggcatgacctacgctcaggggatgtctgcccagatgacggcggcagtgtctatcggcctggcgagttataccgggatgccggtttccactactcacgtactctcctcttctgtcgcggggacgatggtggtagatggtggcggcttacagcgtaaaaccgtgaccagcattctgatggcctgggtgtttacccttccggctgcggtactgctttccggcgggctgtactggctctccttgcagttcctgtaatcgtacgcaccaaaacgagcgggtcagctggcccgcttcagattgtgacatagtgcgctttgttcatgccggatgcggcgtgaacgccttatccggcctacaaaaacatgcaaattcaatagattgcagagattatgtaggcctgataagcggagcgcatcaggcaattttgcggttgtaatcaggctcgagcgggtcagtttactggccccgtttttttatggcgtattattgctgaaatgcttaatgcccaagcgtcaatgcaatgaggctgaccaccaccagacccacacatgcgctgggcaaaaaaaaatggcgacgcacccgcttccaggggagaataaattcattatcggggaggatcgggaataccgttgggctttgatgttcccaaacgagaacgcccctgtttgttgggttggccatgtgaggtaaaaaagccccctccatcaacatattgatagagcaat

SEQ ID NO: 29459 - DNA, 1231 bp, Homo sapiens
  SIMILAR (604)..(1050): 611254mologous to Escherichia coli 4Fe-4S iron-sulfer protein, putative,accession number D14422,Smith-Waterman Score=518.
ctatatttcgcgcgctgttgaagagattgtttcaccgctggtgcgtttttcggtggtttccctatttccctgaggcctccttgggaccacgttgtccgcgttcgttttatcttccccaatcttcgtcggacaccatccattcgttcgaagccacgcctccggtaatagcccgatgatgatgctctgccgcgcaaatggccaaaaaacgttaaacgcccgtactggcctacggttcgaatttgcacgaaatcgtagggcagataaggcgttcacgccgcatctggcaacgaacgccttgcctgacataaaagtgccggagaatatctccggcatttttattccacagccaaactcataatatattccggcaatatttatcatttcattaacaactgaaaccaacattcgcacacattttaagtattgctgatagaaaccattctcattatcattgtgttgttgattatttaatctctcctttgttggcaaatcatctggtctcatgtcgctggctcctcttttaatgtggtgcgcgtcgctccactcggcgaccccattcatatcgaaacctgtctctcgctgttttagtgccaaggagtgatcatgaaccggtttattattgcggatgcgacgaaatgtatcggttgccgtacctgtcaagtggcttgcgcagtgtcgcatcatgagaatcaggattgcgctgcgttgtcaccagacgagtttatttcccgtattcgtgtcattaaagaccactgctggaccacggcagtagcctgtcatcagtgtgaagatgcaccgtgcgcgaatgtctgccctgttgacgcgataagccgcgaacatgggcatattttcgttgaacaaacacgttgcattggctgtaaaagctgtatgctggcttgcccgtttggtgcgatggaggtcgtttcttcgcgcaaaaaggcgagggcgattaagtgcgatctgtgctggcatcgggagacgggaccggcctgtgttgaagcctgcccgacaaaggcgttgcagtgcatggatgtcgagaaagtgcagcggcatcggctacggcagcagcctgtttgaaacgttttccggcgtttctcaacgccggaacagtgcgctttgtttatgccagatgcggcgtaaacgccttatccggcctacaaattcttccaaattcaatatattgcagaaatcatgtaggcctgataagcgtagcgcatcaggcaatttttag

SEQ ID NO: 29460 - DNA, 438 bp, Homo sapiens
  SIMILAR (43)..(435): 871254mologous to Escherichia coli UmuD protein,accession number M10107,Smith-Waterman Score=554.
gccagatttattaggttggttaaccaagccttcgggatctcccgggaaattggaactttttccgctattacgccgatctttgtcaagtgtggctttccttcaccggcaacaaattccgttgaccagcgcatcgatctgaatcaactgttgatccagcatcccagcgcgacttatttcgtcaaagcaagtggtgattttatgattgatggtggaattagtgccggtgatttactgattgtcgatagcgctattcccgccagccatggtaatattgtcatcgctgctgttgacggcgagtttacggtgaaaaaattgcaactacgcccgacggtacagcttattcccatgaacagcgcgtactcgcccattaccatcagtagtgaagatacgctggatgtctttggtgtggtgatccacgtcgttaaggcgatgcgctga

SEQ ID NO: 29461 - DNA, 662 bp, Homo sapiens
  SIMILAR (24)..(659): 991254mologous to Escherichia coli K12 orf, hypothetical protein,accession number AE000269,Smith-Waterman Score=1118.
accactaacgtaaatcacccgagttgccgataaccatccacggttacctgaacgataacaatgaaaagaacgggccgggagcgagtatggaatactttgatatgcgtaaaatgtcggtgaatctgtggcgaaatgctgccggtgaaacgcgcgaaatttgcacgttcccaccggcaaaacgtgatttttactggcgtgccagcattgcatccatcgcggcgaatggggagttttctttgtttcccggcatggaaaggatagtgacgttgctggaaggcggcgagatgctccttgaaagcgcagaccgctttaaccataccttaaaaccgttccagccttttgcctttgcagcggaccaggtggtaaaagcgaaactgacggcagggcagatgtcgatggatttcaacatcatgacacgcctggatgtctgtaaggcgaaagtcagaattgccgaacgtacgtttactacctttggctcacgcggcggggtggtgtttgtgattaacggggcgtggcaactgggcgataaattgttcactaccgaccagggcgcgtgctggttcgatggcaggcacaccctgcggcttttacaaccgcaaggtaaactgttgttcagtgaaatcaactggctcgctggtcattcgccggatcaagttcagtaa

SEQ ID NO: 29462 - DNA, 867 bp, Homo sapiens
  SIMILAR (774)..(685): 1001254mologous to Homo sapiens dJ860F19.1 (novel protein similar to olfactory neuronal transcription factors (COE1, COE2, COE3, EBF3, OLF1)),accession number AL035460,Smith-Waterman Score= 164.
tcacactggcaggtcatcgacaggcgggacaaagcggagtttggcccaggctatcaggggagagccggggctggcgagtggtccaacttcaggggaagaccatctcccttctggctctcccattggctgagagctacttccactcaatgaaaccttgcactcattctccaagcccacacgtgatccgattcttccagaacaccaaggcaagaacccgggatacagaaagctccatgtctttcccattggtgtgggaaacagagagtcacctgtctggaggataacaatgtgtgcttgacataataaaggcttaatgtatgtcatccagtcttttccaaatataactgaatgagaaaccccaacttctttttggtaacactcattagcatcttccagaactagtgctccatggaatgtacttggagaatgatgcctgcccttgaactctcgctccactttaacattcaaagccaagaggacagccactcggctctgagtcacactgagagcttcctggggtgggctccggccagcccttgcacgatcaagtggctctgtgtagtggcctgaggggtggatttctcccagacagggccagttctgacaggtggccctgcctacaagggcagccagcacacgggtaggatttgatgacgaactgatactccaaggaggttcaccaagctttggcaaacgctcagggtcaccagggtgccgaggaatgaccttctgtaacctctggaaaccataatcgatggtgggttcgttgagcgctccttccgttttgggagagctgagcctttccttaagaattttctgtggctgacagggtggtggctgtgtgctccccacaggaacacccgccat

SEQ ID NO: 29463 - DNA, 1557 bp, Homo sapiens
  SIMILAR (1078)..(1554): 1001254mologous to Escherichia coli hydrogenase-2 operon protein HybD,accession number U28377,Smith-Waterman Score=790.
atgaggaaaaaccagcacaaaatcctgaacattccaaaaaccagaacgcctcttctcgtccaaaggatcacaactcctcaccagcaaaggaaccaaacgggacaaaggatgagtgatgaattgacagaagtgacagaagcagtcttcagaagtgatggggagaatggaaccaaattggaaaacatacttcaagatattatccaggagaacttccccaacctcacaagacaggccaacattcaaattcaggaaatacagagaacaccacaaagatactccttgagaagagcaaccccaagacacataatcgaaagattcaccgaagttgaaataaagggaaaaatgttaagggcagccagagacaaagatcgggttacctacaaagggaagcccatcagactaacagcagatctctcgcagaaaccctacaaggcagaactgggaaatgtattgccaacgtcacgatacgccagcaggtgggatgctgatgggggtgagccgttacgctgcttccgagttttcgttcctgctggcggtgccgatgatgatgggcgcaacggcgctcgatctctacaaaagctggggcttcctgacaagcggcgatatcccgatgtttgccgttggccggataaggcgtttacgccgcatccggcaaatgcccatactcattcaggctttggttcgttgttcggtgcaacaacaataaccggcatatcggcatcaattagcgccagcggaccgtgtttcagttcgccagcagctgcactgatcaccaatatcggcaaaggcgatcacaccacctttgtgaagccgaacattccggcaacgggtgaattcaaaggtgttggcttcctcgaagcgccgcgcggtatgctctctcactggatggttattaaagacggtatcatcagcaactaccaggcggttgttccatcaacctggaactctggtccgcgtaacttcaatgatgacgtcggtccttacgagcagtccctggtgggtacaccggttgccgatccgaataaaccgctggaagtgctgcgtaccattcactcctttgacccgtgcatggccttcttaggggtcggcaatattttgctgaccgatgaagccatcggtgtgcggattgtcgaagcgttagagcaacgatacattctgccggattatgttgagatcctcgatggcggcacggcgggaatggagctgcttggcgacatggcaaatcgcgatcatttgattattgcggatgccattgtctcgaaaaagaacgcgccgggaacgatgatgatcctgcgggatgaagaagttccggcgttgtttaccaacaaaatctctccgcatcagcttggcctggccgacgtcttgtcggccctgcgcttcaccggcgagtttccgaaaaagctgaccctggtcggcgtgatcccggaatcgctggagccacacatcggcttaacgccgacggttgaagcaatgattgaacctgcgcttgagcaggttctggctgcgctgcgtgaatctggcgtggaagccatcccacgggaggcgattcatgactga

SEQ ID NO: 29464 - DNA, 1008 bp, Homo sapiens
  SIMILAR (735)..(676): 801254mologous to Homo sapiens Human secreted protein, SEQ ID NO: 7452,accession number G03371,Smith-Waterman Score=91.
gtggtttagtaacactttatttcctcagtttgaaaatagttgtctttcttggggaggctggtttcagcagatgaaaacgagagtcatgatgaaaattacccagcagtggttagtgtgaccataggaacattgtcatcaggtcagcagaaaacatatcagcaaatttttctcatactggcagtgtgtaggggtggatgtttacagttccctgaagccccagtggtcgtgtggtcttttagttttgccatttataggcaacttgtggtaactagctcaattagacacattccttatcacaaggacagagggctttctgtatcctagggttcttgccttggcattccagaagaatcaggtcacacgtgggcttggagaatgagtgcaaggttttattgagtggaagaagctctcagcagatgggggagccataagggagatgattttccccataagttgggccgcttgggggccgagcgctcctccaactgccccagccaaactctgtgttgttttgcccgtcagtggcctgctggtgcctgctggtgagttccactcaacgtctagccgcttgtgtgttcctctgccaatgtgctcctctccacgtccagctgcttctgtctctgccttgctagggtctcgggtttttataggcacaggatgggggcctgggtggttttttgtgtaagtttgaaggaaggggtccagtttcaattttctgcacatggctagccagttcgtgggattcatattctggccaccacttcttctgagcaggtgcagactacttcttcgcttcttctgtttcatctcttcctcttgttcttcttcattcacttcactcctttttctaacactgaataccaacttcaggcgcatgaggcttgtctggtctggtctggccgactgagcaaggaaaccctgtccttgaatgaggacttcctcagcttcagtgactaaatgtttgttctcaaaagtaaaatgtcccaatggaaggcggacagcggccat

SEQ ID NO: 29465 - DNA, 1425 bp, Homo sapiens; identical to SEQ ID NO: 18257
  SIMILAR (190)..(984): 981254mologous to Escherichia coli CG Site No. 29739,accession number U28379,Smith-Waterman Score=1317.

SEQ ID NO: 29466 - DNA, 921 bp, Homo sapiens
  SIMILAR (250)..(768): 1001254mologous to Escherichia coli GLUTATHIONE S-TRANSFERASE 1 (EC 2.5.1.18) (SR8) (CLASS-THETA),accession number D90861,Smith- Waterman Score=899.
atgaggcgcacggccctgggcctcttcatccaggccgtcggcatcaaccccgtcgccgctcggctggccggcgtgcgcacgggatcaatagtgttcttcgtctacgtctactgcagcctagtcgcgggcctggccgggctgatgatcgcgtccaacatcaagagcgccgacgccaacaacgccggcctgctgctggagctggacgccatcctcgccgtcacgctcggcggcggccagctcggcggcggcagcggtgaacatttgcagccgacgtggcaaggttacggtcagacacgccgtgtgccgttattacaaatcgatgattttgagttgagtgaatcttctgccattgcggagtatctggaagatcgatttgcgccaccgacctgggaacgtatttatccgcttgatttagaaaatcgtgcgcgtgcacgacagattcaggcctggctgcgcagcgatctgatgcccatccgcgaagagcgtccgacggatgttgtctttgcgggggcgaaaaaagcgccactaacggccgagggaaaagccagtgcagagaaactgttcgcgatggcagaacatttgttagtactgggtcagccgaatttatttggtgaatggtgcattgctgatactgatctggcgctaatgattaaccgcctggtactacatggcgatgaggtgccagaacgcctggtggattatgcaacattccagtggcagcgagcgtctgtccagcgttttattgcactttcggcgaagcaatctggctgatagcaacgacagaatccagtatcatagcttacgttttttcgacgaggagtgagtgatgaaactgatgtttgcatcggacattcatgggtcgttaccggcgacggaacgtgttctggagttgtttgcccaaagcggtgcccagtggctggt

SEQ ID NO: 29467 - DNA, 888 bp, Homo sapiens
  SIMILAR (199)..(552): 1001254mologous to Escherichia coli Ribokinase (EC 2.7.1.15),accession number D90848,Smith-Waterman Score=601.
atgcttgaaacagatcttcagagggatggcgccgagagtgaatggagggaagacacagaagctgggcagaaggaggagaaagacaggaacactgaaaacactaacatgcactgggactcatttttgagccacaacagctccagggaagcagagagcttcagcagggcggctcctacagacatacatcaggctgcatatgcattactggcgcggatcatggcctgtcgacctttagtgtcgctcaatcgtcaagaggctgagattgccgccgaacgttttgctttatccgcagagataacaacacttggcaagcaatggcaggagaaatttgccgcgccgttgatcgttcgtctcgataaagaaggcgcatggtatttcagcaacgacgcttctggctgcattccggcatttccaacgcaagttgtcgacaccattggggcgggcgacagtcatgccggtggcgtacttgccgggctggcctctggtctgccactggcggatgccgtattactgggcaatgcagtggcgtcgtgggttgtcgggcatcggggcgcatatttccagtacagggaaagaagtccattcagtaagagaaaatcagaccaaaacaaagagaagcataccgccaagaaacagaactgccatgagaaccagatccagcaaagcctgaagcctctcctactcactctgaacctcaccgggttggcgcttctacgagaatctagtgctgtggtggatctgacagaaggcacagctcaggcagtaatgcctgctcacccacctgctgccactcacatcctgcgagaccacagaacggtaccggtccatggcctgggggctggggatccctggcttaggccctttactgttgttactcgctctgcctga

SEQ ID NO: 29468 - DNA, 1419 bp, Homo sapiens
  SIMILAR (583)..(1059): 961254mologous to Escherichia coli Probable oxidoreductase OrdL (EC 1.-.-.-),accession number D90768,Smith-Waterman Score=811.
atggtgagtgttacagctcttaaggcggcgtttctggagttgttcattcctcccagtgggctcgtggtctcactggcttcaggagtgaagctgcagaccttcgcggtgagtgttacagctcataaaggcagtgtggacccaaagagtgaccagcatgggctcgtggtctcactggcttcaggagtgaagctgcagaccttcgcgcgccgggccgagtttccagcaagtcagcaacagcgggaagttccacggcacgatggcggcaatcacgccgaccggttcacgcacgatcatcgccagctcatggctactggtggtcgccacttcgccatacactttgtcgatcgcttcggcgtaccagcgaatggcgcgcgccgcgccgggaatatcatcacgcagactgtgacgaatcggtttgccggtgtcgagagtttccagcagtgccagctcttcggcatatatgcagtttgtgaacgtcagggcgcagagatccccgggccgtatgcccgtttatttctggcgacattctttatatacacttcatccttcaagccgcctctgccttggctgcgttcgctcccccgaaacaccacgccagccgttgtgcgaactgccaaaggtcaggtgacggcgaagtatgtgattgtcgccgggaatgcgtatctgggcgataaagtagagccggaactggcgaaacgcagcatgccgtgcggcacgcaggtgatcaccaccgaacggctgtcggaagatttagcccgttcgctgatcccgaaaaactactgtgtggaagactgtaactatctgcttgattactaccgtcttaccgccgacaaccgcctgctgtacggcggcggcgtggtctacggcgcgcgcgacccggatgacgttgagcgccttgtggtgccgaaactgctgaaaaccttcccgcagctgaagggcgtgaaaattgattaccgctggacgggcaacttacagctgaccctgtcgcgtatgccgcagtttggtcgccaagataccaacatctattacatgcagggctacagcggccacggcgtgactgggggatcctctagagtcggcctcatggcaggcagtcaaatcagccgggtgagcgtggcattaacccttgataccaccggttcaacctccactggcgatacgttgctgacgcaatctctgctgatggagctttccgcactgtgtcgggtggaggtggaagaaggtctggcgctggtcgcgttgattggcaatgacctgtcaaaagcctgcggcgttggcaaagaggtattcggcgtactggaaccgttcaacattcgcatgatttgttatggcgcatccagccataacctgtgcttcctggtgcccggcgaagatgccgagcaggtggtgcaaaaactgcatagtaatttgtttgagtaa

SEQ ID NO: 29469 - DNA, 1590 bp, Homo sapiens
  SIMILAR (378)..(4): 961254mologous to synthetic construct peptid PDI,accession number A22413,Smith-Waterman Score=600.
ttattttttctcggacagatatttcactgtatcagcatactgctgaacaaaaacatccatattgctggtatccataccctgcggattcagctgatatttaccgttaacaaacatcgccggaacgccacgcaattgcacgtcagctgcagctttttcctgctgagcgaccagagatttcaccacgaagctgttccacgccgcgtcgtactcttcacctttaatacctgcgttgataaatacatcgcggatatcagaagcagaacgaatggtctggggtttctgtacgccttcaaacagcggaacagtcactttgtcttcaacgcccagcgccatcgccacagcgcatgcctgaggtagatctttgcccaggtcacacccatggagttgacgtgcctgacatgaccagataaagcggtatgcagcccgcttaacagctatgaaaaccgtgtctatcaatttcaggacgaagatcgtcgacgttttgtcgtcaaattttatcgccctgaacgttggacagccgatcaaatcctcgaagaacatcaatttgcgttgcagctggtaaatgatgaagttccggtcgcagcacctgtggccctgattacccatctgaattaagtcgtcctgattaatgacgacctgcggctcatcaggtttttccggctcggaaaagaattccgagagtgacagaccatacaccttcagcagcttttgcagcgtactgatggcagggctgactttatcttgttctatcgtactgatagcactgtgagtcagcccggagagttcggcggcacgacgtttgtgaaagcccctgctgctggcggatttccgacaagcgttttcctggcgccagtccctcatcacaagagttggtacattcgggtaaaacgcagagaggtatccccccttttcaaactggatttcatgcgggggggcatatttgtgtacagtatcgcctgcaggtgcgatataatacctgctgacaactaaaccaacgataaaccagactttagccattggttgatgcacgggtaacgttaggctcaaataattaaacaacacgttacaggacaacaggatgcaaaatcggctgaccatcaaagatatcgcgcgcttaagcggcgtggggaaatctacagtttcccgggtgccgcgagcgtgttgaagcagtgatgaatcagcatggattttccccttcccgctctggcgcgcttcggtatccgtaatgatttgatacagctcttcatcgctctgggctgcgcgtaaacggcggcagatggttttgtccgccagacgtttcgccaccagcgacagagtatgcaggtgcgttttagtttggtctgccggcaccagcagggcaaaaagtaagtccaccggttggttgtcgatggcatcgaaagctataggcgtttcgagctgaacgaaaacgccaacggcgcgcagagtatcttcttccagtttgccatgcggaatggcaataccattgccgataccggtactgcccattttttcccgcgtcaggatagcttcaaaaaccacctgaggcagctcgctaagttgtttcgccgcccgctcgctgatgacttccat

SEQ ID NO: 29470 - DNA, 5402 bp, Homo sapiens
  SIMILAR (1777)..(2931): 371254mologous to Mus musculus Nedd-4,accession number U96635,Smith-Waterman Score=583.
gccggttcccaggccgggtggagaccaactctggggtctcttggtgggagagtggggagcccgtcttctgctgagtgctgccgccccttcccaggacagcggaggtggaacttcgtcgcgctgcaacccccggctcgggatcctggggcgtcctttggcagttgattgcaccctgcactagagagaagtccaggaatgatatattcttgggctgtatttctctaccctggagttcatccagttcatcccagaaacactgacctgattactgtgacaaagtctgatggatagaccctttctgttgaccttgtggcgtttttctttcatgtggaagttggaagacaaggtgaaaggggccaaaagttacctgctttggtgaataggagtgctctacttggttctcagaacatgggccctcgtttaaagctgcagctgtgatcctcggctgtctgttggcattgacgggacctgatgttttacgttattggtggaatcacagtgtctgtggttgcattcttcttcacaattaagttcctctttgagcttgccgcacgtgtagtcagcttcctccagaatgaggaccgcgagcgccgaggggaccggactatttatgactacgtgcggggaaattacctggatccccggtcttgcaaagtctcctgggattggaaggacccctatgaggtgggccacagcatggccttccgagtgcatttattctataagaacgggcagcctttccctgcacatcggcctgtgggactaagagttcacatctctcatgtcgagctagcagtggaaattccagtgacccaggaagtccttcaggagcccaattccaacgtagtaaaagtggccttcactgtgcgcaaggctgggcgttatgaaatcacagtgaagcttggtggattaaatgtggcatatagtccctactacaaaatttttcaacctggaatggtggttccttctaagaccaaaattgtgtgccacttttctactcttgtattgacctgtgggcagccgcacacccttcaaatagtaccccgagatgagtatgataatcccaccaacaattccatgtccttgagagatgagcacaattacaccttgtccattcatgagctcggccctcaagaagaagagagtactggtgtctcatttgagaaatcagtaacatccaacaggcagactttccaggtgttcttgcgactcaccctgcattctcgaggctgcttccatgcttgcatttcataccaaaatcagccaatcaataatggtgaatttgacattattgtcctaagtgaggatgagaagaatatcgtcgaacgcaatgtgtccacttcaggcgtgagcatttactttgaggcttatctttataatgctaccaactgtagcagcactccatggcacctgccacccatgcacatgacctcttcccagcgccggccatccactgctgttgacgaggaagatgaagactcgccctctgagtgccacacccctgagaaggtgaagaaaccgaagaaggtgtactgctatgtgtcaccaaagcaattctcagtgaaggagttctacctgaagatcatcccctggcgcctttacaccttccgagtgtgtccaggaacaaaattttcataccttggtcctgaccctgtccataagctgctcacactggtggtggatgatggcattcaacctcctgtggagctcagctgtaaggagaggaacattctagcagccacttttatccgctccctgcataagaacataggaggctctgagacctttcaggacaaggtgaactttttccagcgagagcttcggcaggtacatatgaaaagaccacattccaaagtcaccctgaaggtcagcagacatgccttgttggaatcgtctctgaaagccactcggaatttctccatctcagattggagcaagaactttgaggttgttttccaggatgaagaagctctggactggggagggcctcgccgggaatggtttgagctaatctgcaaagcactatttgataccaccaatcagctcttcacccggttcagtgacaacaaccaagcattagtgcatcccaaccctaatcgccccgctcatctgcgcctgaaaatgtatgagtttgcgggacggctcgtgggcaagtgtctctatgagtcctctctaggaggagcctacaagcagttggtccgagctcgcttcacccgctctttcctggcccaaatcataggactgcgtatgcattacaagtactttgaaacagatgacccagaattctacaaatctaaagtttgttttatcctcaacaatgacatgagtgagatggagctggtctttgcagaagagaaatataataaatcaggtcaattggataaggttgtagaactcatgacaggtggagctcaaactccagtcaccaatgcgaataaaatcttctatttaaatttgctggcccaatatcggctggccagtcaagtgaaagaggaggtggaacatttcctaaaaggcctgaatgaattggtccctgagaaccttttggctatttttgatgagaatgagcttgagctgctgatgtgtgggactggagacatcagtgtgtctgacttcaaagcccatgcagtagttgttggtggctcatggcatttcagagaaaaggtcatgaggtggttttggactgtggtttccagtctgacccaggaggagttggctcggctacttcagttcacaacaggctcctctcagctaccacctggaggctttgccgccctctgtccctcatttcagattattgccgctccgacccatagcacgctgcctactgcacacacatgttttaaccagctgtgcctccctacatatgactcctatgaagaggtgcacaggatgctgcagctggccatcagcgagggttgcgagggctttggcatgctctgaccactctcctgtcatccagttggctcccatgctctctggagcttctgggcgcaagttacagacatcataaccactgatcctaacacacataaccatcagccagaagatgccgcatgctcccctgtgtctggaggattttgtcacctacaagccttgtctttacctcacctgctccctgcccatatctaccacaggccactttggcatggtatgtaagctgagctcttcattctgtcatgagaagaggaccatgctgctatcatttatttggtcctttgaagatctcagtagctgagggagatggcacacggggctcagccctgttgggaaactggtgtggagacccttaaatccacactgtgctccaaaactccctctgctgatactccttggagacaccctctttggccctcactacttgaccagactggtacttgagtccttctcatgggtggggtgattgcctcttctcatcaggagccaggagagagggggacagataggaggtggcccataggagcagtcccgctgcacaatggtaggcataggccatggcactggactgcctctaaggactgctaaaaagaatatttttttgtggtgtcagaactggaaaaagcactttcccttcgggcatttctggaaatgattattaatcacaaagaagaactctgtaagctttttcttgaattgtagccagtgagaaaagcagatagactgaagaatatgaaggatagctgagctgtagcctccagagtggggcatgcctaggcatatggctggcttggagactactgatgcttttccctgagtttgttattggcactgaagtatggccggcttgggccactgacttccccattatgtagtctgctaaaagctggggatcctttagcattctactgaagaaaattttgtagcaaaagattagaacagtaagaatagtatgccagcaatccctgattctctctctgcttggtgttctctggcagcactaagacaaaggaacagggactaggagtttacgtgcttatcacaggtccttggcgtcaggacactagggatgaacatggaggtgatatgttacacagtaaacacctgccaacccctgtactcccctttgctccatcagttatcaggaaggagaactaaggagggaggaagcttattaggttcactgttgaatgatgattgaagagtacctgctgctgtatcttggaagatgacaacatcctttttcattactgtttgattgaaaataatttcaagattcaaaatctcattgacttcccaaatttgtgtttttaagaaggctttgctgcaagctaccattcccaatggggcagtcaactctgagaatattacaagccatctttattgccaaaaccagcaagtacacagagtcctgaaacaaggcaggactttggcaatgccttggcctcctggaagcatgtctgagccctcctgttcgcagggatcatgaggaacaagccctcctgagctgctacagttcctgcctgacctcagtctttcgcagtcatcatttgtcctttcttggcacatgggtgctgacctcactcatccttggggtccgggatccagcatcagggtctctataccccaggatcctccatgccacatggtcactgctctcctcagggaccaggacaaggtgctgctgcttgcccaaatgttttcccatgggatatgtaccggaaggtttatcaccaccctgggaaacataatgctgccccttgggcccagaaaggggtttccagctgggggcacgtggactggttctgctgtttttggcagtcgcttttctgaattctcccctccggcagccttccagagactgatcctggagattgagttgattgtcttggctagacctgtcattttaagctctagtcatagcactttttcagagcatcttaggcaccattgcaacccaaccagggaagctgcatccctgtggtggtccttaggcaccagtctttgttaaacaaaaccctttggcactattgtggttttctattctctgtctgaactctattcaaaagtatctttgctctcttgggccttttcttttactgttttgttttttttttctaatcctgctttcatactagccagtgtggggaaaaggtacaatatgtcaaagagatgagagagtgttatttcttgggcaattttctattagtgtttcttattttggccagttcttttatttatgtccttgtgacccaggtacttggggggccagctacccttctggccttttagcgtctttgaaggagaccagacatgagtgaatacctaggagagtgtcagcatgtttctggaaaattggcagagaccaagccctgctgcagattcgtcaggccaggtgaaagggccaggcagttgcagctgatgatgtaaatattttgtacagtagataaataaatgtttaaaag

SEQ ID NO: 29471 - DNA, 1164 bp, Homo sapiens
  SIMILAR (508)..(1158): 951254mologous to Escherichia coli alternate gene name yhhI,accession number U00039,Smith-Waterman Score=1095.
atgaaaaacaaattaccgccatttatcgagatttaccgcgctctgattgccacaccttcaataagcgccacggaagaggcactcgatcaaagcaatgcagatttaatcactctgctggcggactggtttaaagatttgggcttcaatgtggaagtgcagcctgttccaggaactcgcaacaaattcaatatgctggcaacacgccgacatgaaggtcgctatattacatgcatgcagccgctgccaataatagcagaacaagagcaagagccagaaatgacggtcagatattatatcagttctgctgatttaaccgcagaaaagttcgccacagcaatccgaaaccactggcacgtggagaataagctgcactggcgtctggacgtggtaatgaatgaagacgactgcaaaataagaagaggaaacgccgcagaattattttcagggatacggcacatcgctattaatattttaacgaatgataaggtattcaaggcagggttaagacaaggttgggaagatatagaggattttggggaaacacatctcgattttttgaagcaatatggtgattttgaaaatggtattcctgttcacgataccattgccagagttgtatcctgtatcagtcctgcaaaatttcacgagtgctttattaactggatgcgtgactgccattcttcagatgataaagacgtcattgcaattgatggaaaaacgctccggcactcttatgataagagtacagccgcaggggagcgattcatgatcaataatgcgttctcaacaatgcacagtctggtcatcggacagatcaagacggatgagaaatctaatgagattacagctatcccagaacttcttaacatgctggatattaaaggaaaaatcatcacaactgatgcgatgggttgccagaaagatattgcagagaagatacaaaaacagggaggtgattatttattcgcggtaaaaggaacccaggggcggctaaataaagcctttgaggaaaaatttccgctgaaagaattaaataatccagagcatgacagttacgcaatcagtgaaaagagtcacggcagagaagaaatccgtcttcatattgtttgcgatgtccctgatgaacttattgatttcacgtttgaatggaaagggctgatgtaa

SEQ ID NO: 29472 - DNA, 1799 bp, Homo sapiens
  SIMILAR (32)..(625): 941254mologous to Escherichia coli K12 putative DNA ligase,accession number AE000174,Smith-Waterman Score=984.
aaatacttcttacataattaaggagaacaaaatggaacttaaaaaattgatggaacatatttctattatccccgattacagacaagcctggaaagtggaacataaattatcggatattctactgttgactatttgtgccgttatttctggtgcagaaggctgggaagatatagaggattttggggaaacacatcccgattttttgaagcaatatggtgattttgaaaatggtattcctgttcacgataccattgccagagttgtatcctgtatctgtcctgcgaaatttcatgagagctttattaactggatgcttgactaccattcttcagatgataaagacgtcatcgcaattgatggaaaaatacaccggcattcttatgacaagagtcgccgtaagggagcgattcatgtcattagtgcgttctcaacaatgcacagtctggtcatcggacagatcaagacggataagaaatcccatgagatcacagctttccctgaacttcttaacctgctggatattaaaggaaaaatcatcaaaaccgatgcgatgggttgccagaaagatattgcagagaagatacaaaaacagggagaggatgagaagaatatcgtcgaacgcaatgtgtccacttcaggcgtgagcatttactttgaggcttatctttataatgctaccaactgtagcagcactccatggcacctgccacccatgcacatgacctcttcccagcgccggccatccactgctgttgacgaggaagatgaagactcgccctctgagtgccacacccctgagaaggtgaagaaaccgaagaaggtgtactgctatgtgtcaccaaagacatcggcgtaccggtgtttttctgcaccaacagcagcgcggcaacggcctgttcaacaacatagagtaagtttcgcagtagcgaaatatccggtccgcttttaccttgagccgccgcctgccactctttttccgccagcattccggcatccgagtgcagcctcgtttaagggaaatcccaattttgagttattaaggcactggcgcacagtaaaacgcctgtcggaaatccgccaacagcaggggctttcacaacgtggtcccgccgaactctccgggctgactcacagtgctatcagtccgatagaacaagataaagtcagccctgccatcagtacgctgcaaaagctgctaaaggtgtatggtctgtcactctcggaattcttttccgagccggaaaaacctgatgagccgcaggtcgtcattaatcaggacgacttaattgagatgggtagtcagggtgtgtcaatgaagctggttcataacggtaacccgaatcgcacgctggcgatgatctttgaaacgtaccagccgggcacaaccactggggaaagaattaagcatcagggtgaggaaataggcactgtactggaaggtgaaattgttctgacgattaatggtcaggattaccacctcgtcgcggggcaaagttatgccattaataccggcatcccgcacagtttcagtaatacgtcggcaggtatttgccgaattatcagcgcccatacgcccaccacgttttaatctttttgttctgtaagccgggtaagcgcaatgcgcccggcaatctatacacaaaatcattcaagttgcatcaaggcggcaagtgagcgaatcccgatgagcttactcaggtaagtgattcgggggagcgaacgcagccaaggcagaggcggcttgaaggatgaagtgtatataaagaatgtcgccagaaataaaagggcatacggcccgg

SEQ ID NO: 29473 - DNA, 815 bp, Homo sapiens
  SIMILAR (254)..(664): 1001254mologous to Escherichia coli putative,accession number M94104,Smith-Waterman Score=705.
ccttgctaaaaaaacatcatcaatacgtcgcactgtggcggctatcgcactttaacgtttcgtccggccccctcagtctatgcaataggccataaactgcaaaaaaaagtccgctgataaggcttgaaaagttcatttccagacccatttttacatcgtagccgatgaggacgcgcctgatgggtgttcgggctacctgacctgtccattgtggaaggtcttacattctcgctgatttcaggagctattgattatgcgtaactttgatttatccccgctttaccgttctgctattggatttgaccgtttgtttaaccacttagaaaacaaccagagccagagtaatggcggctaccctccgtataacgttgaactggtagacgaaaaccattaccgcattgctatcgctgtggctggttttgctgagagcgaactggaaattaccgcccaggataatctgctggtggtgaaaggtgctcacgccgacgaacaaaaagagcgcacctatctgtaccagggcatcgctgaacgcaactttgaacgcaaattccagttagctgagaacattcatgttcgtggtgctaacctggtaaatggtttgctgtatatcgatctcgaacgcgtgattccggaagcgaaaaaaccgcgccgtatcgaaatcaactaattccctaaggccgcctggcgcggcctgacatctccatgctcgccgtcagggagcatatgcgaatcttcggatttgcaggtacttactcgcttcttagaaggagaaatgactatgcgtaacttcgatttatccccactgatgcgtcaat

SEQ ID NO: 29474 - DNA, 1956 bp, Homo sapiens
  SIMILAR (1018)..(1950): 971254mologous to Escherichia coli treF,accession number U00039,Smith-Waterman Score=1646.
atgaacgacgcgcactttgtcaacaatctgacgttagcatcagaagtgggtgtttacgctcatataccacgtctgccagcaaacagtaccgatattgcaccgccagatattccggctggcttcgtggctgttttcaacagtgatgagtcatcgtggcatctcgttgaagatcatcggggtaaaacggtttatgacgtggcttccggcaacgcgttatttatttctgaactcggtccgttaccggaaaatgttacctggttatcgccggaaggggagtttcagaagtggaacggcacagcctgggtgaaggatacggaagcagaaaaactgttccggatccgggaggcggaagaaacaaaaaacaacctgatgcaggtagccagtgagcatattgcgccgcttcaggatgctgcagatctggaaattgcaacggaggaagaaatctcgttgctggaagcatggaaaaagtatcgggtattgctgaaccggatattgaatggcgggtaccgaagctacgaaattcgtaatcatgtcaatagctttcctccgtatgaacagggcgaaattgttatcaacggcgagaaaatcacgcgccccgattacggcgacatgctgaaacgcggcattggctatacgccagaaaaccgcaaagaagcggggatcattccctggttgggcgttgacgaaaatacagtgctgaccaatcggcaaaaaatcagcgccaacggtgtgctgcaatggtccaccatccgccgcctgaccgaagaggtgatgcagcggatgacggtcaaggccgccagtagcgaaacacccatcggcacgctttctggtggcaatcagcaaaaagtggtgatcggtcgttgggtctatgctgccagccagattttgttgctcgacgagccaacgcgcggcgtcgatatcgaagccaaacagcagatttaccgtattgtccgtgagctggctgccgaaggaaaaagcgtggtgtttatctccagtgaagtggaggagttgccgctgaaaattcaaaaccctaatccagacgaactgatgatcgaagtcgatctctgctatgagctggacccgtatgaattaaaactggatgagatgatcgaggcagaaccggaacccgagatgattgaagggctgcctgcctctgatgcgctgacgcctggcgatcgctatctcgaactgttcgagcatgttcagtcggcgaaaattttccccgacagtaaaacctttcccgactgcgcacctaaaatggacccgctggatatcttaatccgctaccgtaaagtgcgccgtcatcgtgattttgacttgcgcaagtttgttgaaaaccacttctggctgccggaggtctactccagcgagtatgtatcggacccgcaaaattccctgaaagagcatatcgaccagctgtggccggtgctaacccgcgaaccacaggatcacattccgtggtcttctctgctggcgctgccgcagtcatatattgtcccgggcggccgttttagcgaaacctactattgggattcctatttcaccatgctggggctggcggaaagtggtcgggaagatttgctgaaatgcatggccgataacttcgcctggatgatcgaaaactacggtcacatccccaacggcaaccgcacctattatttgagccgctcgcaaccaccggtttttgcgctgatggtggagttgtttgaagaagatggtgtacgcggtgcgcgccgctatctcgaccaccttaaaatggaatatgccttctggatggacggtgcagaatcgttaatccctaatcaggcctatcgccatgttgtgcggatgccggacggatcgctgctcaaccgttactgggacgatcgcgacacgccgcgtgacgaatcctggcttgaggacgttgaaaccgcgaaacatgaaggtcacaatcgaaaacacagaacgttatgctga

SEQ ID NO: 29475 - DNA, 2862 bp, Homo sapiens
  SIMILAR (1891)..(2820): 1001254mologous to Escherichia coli K12 putative ATP-binding component of a transport system,accession number AE000350,Smith- Waterman Score=1568.
atgggggggcccttcccttgcaatggaaagactttatcggatcgctggacgagatcgaaagagcgtaaccgtcgacgaaccactgcaactgatgaagatgttatctacttatatcaatacatggtcccaccaacgtgcaacccggcactggcggctctgttggataaatcactgcaaaaagagtgggctaacgatctcgatcagctgatcaatctggaaaaattcgctgatgatgcgaaattccgtcagcaatatcgcgagatcaagcaggcgaataaagtccgtctggcggagtttgtgaaagttcgtaccggtattgagatcaatccacaggcgattttcgatattcagatcaaacgtttgcatgagtacaaacgccagcacctgaatctgctgcatattctggcgttgtacaaagaaattcgtgaaaacccgcaggctgatcgcgtaccgcgcgtcttcctcttcggcgcgaaagcggcaccgggctactacctggcgaagaatattatctttgcgatcaacaaagtggctgacgtgatcaacaacgatccgctggttggcgataagttgaaggtggtgttcctgccggattattgcgggccactgctcggtacgctggaatatggtctgccacataaaaacctgattgaaggtattgccgctgcaatgcacttccgcagtgaagatgatccgcaggctcaggaactggcagcactgatcgctgacaaaggtccgcaggcggcgctggcacagatttccggtcttgatgccaacagcgaggttgtatccgaggcggcaacaatggaacaaacccaggcctttgaaaaccgtgtgcttgagcgtctgaatgctggcaaaaccgtgcgaagctttctgatcaccgccgtcgagctcctgaccgaggcggtaaatcttctggtgcttcaggtattccgcaaagacgattacgcggtgaagtatgctgtagaaccgttactcgacggcgatggtccgctgggcgatctttctgtgcgtttaaaactcatttacgggttgggcgtcattaaccgccaggaatacgaagatgcggaactgctgatggcattgcgtgaagagctaaatcacgacggcaacgagtacgcctttaccgacgacgcaatccttggaccctttggtgaactgcactgcgtggcggcgttaccaccgccgccacagtttgaaccagcagactccactgccctccaaaccgggacttgtgtggggacacagacactgttcccagcactgggcctgatacaacgtggcacccaagaaaactccagtatgactgatgcagcacattacctgcgctcagatcgtttcagccgacgctgccctatcggtactatcgctgagtcaaccgcgagaccgactatctcctgggaaaccaatgtacgcgataccaccagctatgcgggcccagtcttaatgggccaaacggtacttaaacgctcggtcgggctgctgacctacttccacactgggccgaagagctgcatccgcaggttacgccctgaagtcagctcagatcctgggccaggcactgcatgggagacaggcatgagcaggacctctttctgccttcgaggaaaacacgggggcatctggggctcacttggcactcatccaccttgtgctgtacctggggacctccgggtgggtggctgtcatagaattcggctccaaaccaggatgcttttgggaattgagggagagccctggcttccacgtggaccacacgggcgagctgcggggaatccggtggaccagcaatttgcggcgggagacctcggactattaacggacgctgatgcccacctggagggctggggcccggagaaaacggtgcccggggtaaccgaagagggaggcggtacgctgacagtcaacgataatggcaaagcgacagatatcgtccagaacagcggtgccgctctccagacgagcacggctaacggtattgaaatcagcggtactcatcagtacggtactttttccatttccggcaatttagcgaccaatatgttgctggaaaatggcggtaatttattggtattagcaggtaccgaagctcgcgactccacggttggcaagggtggggcaatgcaaaacctgggtcaggactccgccacaaaggttaactctggcgggcaatatacccttgggcggtcaaaagatgagtttcaggctctggcccgggcagaagatctccaggtcgctggcggtacggcaatcgtctacgcaggtacgctggcggatgcatcggtcagtggcgcgacaggaagcctgtcgttaatgacgccacgggataatgttacgccagttaaactcgaaggggcggtccggattaccgatagcgcgacattgactctgggaaatggcgtcgataccacgcttgccgacctgacggctgccagccggggcagtgtctggcttaacagcaataattcctgtgcaggtaccagcaactgcgaatatagagtaaacagtttgctactcaacgacggtgatgtttatttgtcagcacaaacagcagcgcctgccacaactaacggtatctacaatacgctgacaaccaatgaactttccggtagcggtaatttctacctgcataccaacgttgcaggctcccggggcgatcaactggtcgtcaacaacaacgccactggtaattttaaaatctttgttcaggataccggcgtcagcccacagtctgacgacgcgatgacgctggtgaaaacagggggaggggatgcttcgtttacgctgggcaataccggcggtttcgttgatcttgggaggaggccgcggcaggacattcgcttgagtccaggagtttga

SEQ ID NO: 29476 - DNA, 2400 bp, Homo sapiens
  SIMILAR (1882)..(2397): 1001254mologous to Escherichia coli DNA replication protein DnaC,accession number D90774,Smith-Waterman Score=885.
atgcatgaggtcactctagaagatccctcatcggcacagatactgattactgtaatcaccggtcatggtgagatcattacgctcaaaagaagtagtcgcaggcagaacgatatccgcatgtattgccgccgccgtccagaagcattcagagatcaccaccagctccggtttttgccaggcacggatcaggcgattggtatcctgatgatgagtaaagttggcaccgcccgcccaccagataaaacgaatatccgggaaatgtcggttcataccgttgtgttgatatgcgccaccagggttttccagtgcttcaacaatgcgggcaacagggattttatccaccgcatcgcagccacccggcaagctgccctgcatggaagagagcaccgcagaacgccgcgtggggttaccaccattggcaaaatggtaagaaagaccaaaaccgccgccggttgggaacatgaaagtggtttctatctggacggtgtcgtgaagctgaaccgttttaaaagtaacgtagcaggtaaaatgagcagcggtggagccgccaatggcagttaccacagcaacgggctgggcggtcacattgaaaccgggatgcgatttaccgatggtaactggaacctgacgccgtatgcatcgttaacggggttcaccgctgataaccccgaatatcatttatccaatggcatgaaatcgaaatcagtcgatacccgcagtatatatcgtgaactgggcgcaacgctgagttacaacatgcgtctggggaacggtatggaagttgagccgtggctgaaggcggctgtgcgcaaagaatttgtcgatgataaccgggtgaaagtgaatagtgacggtaatttcgtcaattatttgtcgggcagacgtggaatataccaggcaggtaaagatttagatcgcttcaaaaatctggtcctggtgcacgccgcacgttatgccgccgacttaagctatttgccactgatgcaggaactggaaaaacgctacgaaggaaaactgcgcattcagacggtggtcagtcgggaaacggcagcggggtcgctcaccggacggataccggcattaattgaaagtggggaactggaaagcacgattggcctgccgatgaataaagaaaccagccatgtgatgctgtgcggcaatccacagatgacaaggaggctgatccccgccagcgttgaggtttatcacgacagcctgtgcccgaaaaatctggcacggctgggagcaacatattaccgcccgctatctggtcggtgcgatggcgcaaactcgatggtgcggcgacatctctacccggatcatcaaatccgtaaatatgtcgctatccagcagtggttcgcggagaaacatccggtgccgttctactcctgcatctttgataattcgataactaactgttattcatggagtatcagcaaagacggttattttatcttctgcggtgcctatccaatgaaagacggtcagacgcgtttcacgacgctgaaagagaaaatgagcgcctttcagttccagtttggtaagacggtgaaaagcgaaaaatgcacggtgctgtttccctcgcgctggcaggattttgtctgcggtaaggacaacgcctttctgattggtgaagcggcgggatttatcagcgccagctcgctggaggggattagctatgcgctggatagcacagacattctgcgttcggcattgcgaaaaccgattcgaacggagcagggcgctaacggggcgatacgggagctggaaaaattccgccagcagggtttttcacctgagcaggtgattcgacacagcatcgccaatgaataccagggcttgttcgcgccgaaaggtgttcgacctgagacgttactccgacaggtgcagaacgaagggcagcgatacgcgttgagtcaggcgaaatccatcgctgatgaactgatgaccgggtgtacaaattttgcgttcagcggaaaacctggtaccgggaagaaccacttagcggcagctatcgggaatcgcctgctgaaagacggtcagacagtgattgtggttaccgtggctgatgttatgagtgccctgcacgccagctatgacgatgggcagtcaggcgaaaaatttttgcgggaactgtgcgaagtggatctgctggttcttgatgaaattggcattcagcgcgagacgaaaaacgagcaggtggtactgcaccagattgttgatcgccggacagcgtcgatgcgcagcgtggggatgctgacaaacctgaactatgaggccatgaaaacattgctcggcgagcggattatggatcgcatgaccatgaacggcgggcgatgggtgaattttaactgggagagctggcgtccgaatgtcgtccagccaggaattgcgaaataa

SEQ ID NO: 29477 - DNA, 1992 bp, Homo sapiens; identical to SEQ ID NO: 8817
  SIMILAR (895)..(1584): 991254mologous to Escherichia coli GALACTOSIDE TRANSPORT ATP- BINDING PROTEIN MGLA,accession number D90884,Smith-Waterman Score= 1137.

SEQ ID NO: 29478 - DNA, 525 bp, Homo sapiens
  SIMILAR (525)..(304): 1001254mologous to Escherichia coli CHROMOSOMAL REPLICATION INITIATOR PROTEIN DNAA,accession number D90878,Smith-Waterman Score =363.
  misc_feature (1)...(525): n = a,t,c or g
tttataaagaactgaacctggctgacagttcgcttagcgaagaggcgctgattcaggcaatggtggatatcccaaagctgatgaagcgcccgaaggtggtcgcgaatggcaaagcgcggattggtcgtccaccggagcaggtactgggaaatcgtgggttaagatgtgctccttcgctagttgaaggcacattgccggatgcgacgcttgccacgtcttatccggcctacgaatactatggattaacttcgcgtagtnnnnnnnnnnnnnnnnnnnnnnnnnnnnnnataaacaccttatctacaacttcagaatttctttcacaaacggaatggtcagcttacgttgcgcggtaatcgacgcacgatccaactgatccaacgtcataaatagcgtgcgcatttctctgtcgagccgcttcagcaagaaacgccccacatcttccggcagttcaaaaccacgcaaacgcgcgcgtaactgtagcgcctgcaacttatcttcatcagaaagtggctgcaatttgta

SEQ ID NO: 29479 - DNA, 1558 bp, Homo sapiens
  SIMILAR (1339)..(698): 1001254mologous to Escherichia coli aspartase,accession number X02307,Smith-Waterman Score=1104.
cgctcatgaagtcacggggctgattcgtgaaggcgcgacggtgtgcggtgttcgtgtacgtaaccatctcaccggcgaaactcaggcccttcatgcacctgtcgtggttaatgccgctgggatctgggggaatgtcagtggtctgccctccgatcgcacctctatgatccaccggaaaaatttgcagggcgatgatggccggttttgccgccagcactttacgcatttcagcaatcgagttcacccgatcgcggttgacgccaatgatcacatcgtctttttgcaagccagcctgagcagctgggcttcctttgacaacttcatcgattttaatacctttgccgccatcttttagctgaccatcgctcaacgttgcaccttccagcgctggcgtgatcatttcagcgctggccgacgaagaggtgctggtatcgagcgtcacttctacttccagtggtttgccgttacgcagcaggccaagcttcactttcgtgcccggctcggtggtcgcgatacgagagcgcaactcagcaaagctattcagcggtttgccgttgaggctggtaataatatcgcccgctttgacgcccgcttttgccgagccagaacctggcaacacttcgctgacaaacgcgccacgctgcacgtcaaggttgaaggctttggcgatatcggcactcatctcggtgcctttgatgccggtttcggcacagattttacccacgatgtcaccgttgtggtgaccgatgaacgggttcaggtaagtaacgataccgatagagttgtaaacgtaaccttcgcacacttctttgttagcagtgatgccgttaatgcatttttccagcaggttgtagcaagcgttggtcagaatgtgaacggattcgaacatggcctggccaatgaccggctccataacgttcaactgcagctgacctgcttctgctgccatggtaacagtggtgtcgttaccgatgactttgaagcatacctggttaaccacttccggaacaaccgggtttactttagctggcatgatggaagagcccgcctgcagttccggcaggttgatctcgttcaggccggcacgtgggcctgaagagagcaagcgcaggtcgttacagattttggacatcttcacagccaggcgtttcagcgcgccgtgaaccataacataagcgccgcagtcagaggtcgcttcgatcaggtcttcagccggtacgcatgggaagccagtaacttcagccagttttttcactgccagcggagagtactctttcggcgtgttcagaccagtaccgattgctgttgcaccaaggttaacttccagcagcagttcagcgtacgttaagttttggcaggtaccgagctgattgttgtaattcttatccatacctccaacaagctgcagttgacccaaggagaggaggccagtccatctcccatgggtcccatacacaccccgctgctcatcaccagacagcgaacccctggcttgggcccacagcacagaccttccatcctgatctgactgcactaagcaattgctgacctgcatcat

SEQ ID NO: 29480 - DNA, 999 bp, Homo sapiens
  SIMILAR (304)..(603): 991254mologous to Escherichia coli K12 putative oxidoreductase,accession number AE000336,Smith-Waterman Score=486.
atgagtgccgatatcgccaaagccttcaaccttgacgtgcagcgtggcgcgtttgtcagcgaagtgttgccaggttctggctcggcaaaagcgggcgtcaaagcgggcgatattattaccagcctcaacggcaaaccgctgaatagctttgctgagttgcgctctcgtatcggcgacaacgagccgggcacgaaagcggaagccgcgctaaataaccgcgatcaggagctggctgcgcgagcagaaggttatgcgctcgccggacgactcgatcaggccatttcgctgttgagtagcgccagttcgcagagccgggaaacgctgaacctgctgaaagaaaacggcgtggagccagaagtggtgctctaccttgagacacccgccgatgcggcaacgctgcgcgatttgctgaaaatactggggatgaatagcgcccgtgaattgatgcgccagaaagaggatctttataaagaactgaacctggctgacagttcgcttagcgaagaggcgctgattcaggcaatggtggataatccgaagctgatggagcgcccgattgtggtcgcgaatggcaaagcgcggattggtcgtccaccggagcagtacactgtggtcaaacccactcaccggggttttggtagtcgcatacctcgattctttgaaataccgacggaaggggaccgtatcctccaaccaacgcacggacacgataagctccgtttacgtgccttcgggatttcccgtcgttggctttacgaaataagtcaatataacgtcgacaagtacggaatccgtttactggcatatcgtactcgtcgcatctgcctccgtatgagagaacttaacgggctcaggatatccttcgcagctcgcgacgacgtcgcgacgtccgccaatagaacgacgtgccgcccgtactataacaagatacgatgcccccagtctcgaccagcgtcacgacatgttagccgtcacctttgggccagtgaacgtcgctag

SEQ ID NO: 29481 - DNA, 558 bp, Homo sapiens
  SIMILAR (557)..(270): 1001254mologous to Escherichia coli PHOSPHOENOLPYRUVATE- PROTEIN PHOSPHOTRANSFERASE PTSA (EC 2.7.3.9) (PHOSPHOTRANSFERASE SYSTEM, ENZYME I) (ENZYME I-ANI),accession number D90868,Smith- Waterman Score=469.
tgttcaatggaagagaagaccaactagactcttgttatcacgggaataggcagctgcgcggcagcctgcgcctgttgtttttggcgtttatccgccagcgtctgcgcgacctgataataaccgctcaccgcgtcattcgggttaatcgccagcacgccgcactgggcgtcaagcactgcaggttgcccggcataacgggcaatcgcatccagcggcaagccactcagtaccgggatcgccgaggcacgggccagaatcagtgtatgcgaggtgatatgcagcaactgttcgctgatatcgcgaatgtcgctaacacgttcgcgcagataatcgctggcagaggcagaaagtttggcgcaaacctgctccatattgctgatgatcgccgcccccagcccctgatgctgttctgtcatcaggcgacggatattgcctgcaaattcatcatcctgaatcagcgacaaatgggcgctgaggatagttttgctttcgccgtcacgctcacgcaattgctggttcagttgctcggcaagcgttgccaggctgtgctccagccgg

SEQ ID NO: 29482 - DNA, 1608 bp, Homo sapiens
  SIMILAR (631)..(975): 1001254mologous to Escherichia coli K12 putative phosphatase,accession number AE000457,Smith-Waterman Score=598.
  misc_feature (1)...(1608): n = a,t,c or g
atggcggcgattcaacgtgcgattgacagtgtttctcattatctggtgctgaaaacagccatcagcatcatcaccggcctggtcgcctgggcgatgctcgccgcactcgatgttcgcttcgcttttgtctggggattgctggcctttgcgcttaattacatcccgaatattggttcagtcctcgcggcatcccccctatcgctcaggcataccagcaatcggactcttcggatcatcctgcgccgccgggttaaccgtatcgttagcaccaatcaccagtacggtatcggtatcagcaaagtcaacgagtgtcgaagtttccccgggggttttccccgcgcgcccccccccccttcccggtggggaatggaacagaccttcgggagcaatttttcgtcagaacacggcgctcaagagccaccgaaatcacgggtattagcgataatctgttttacgccaccggaagaaccgatacgctggcttgcttctgcaaacacagagaaagcactcatcgataaggtcgcggcgacaacagttgcgacggtggtacgcataactttcataatgtctcctgggaggattcataaagcattgtttgttggctacgagaagcaaaataggacaaacagttcgattgaacaagcgatgctcgacgccgggctgagtgccgaagaagccagtgcaggcgcacacgcagcaatgatcaactttgccaaatggcgcagccgaatcgacgtcccgcagcaaactcacgacaccttaaaacagctggcgaagaaatggccgctggtggcgatcaccaacggtaacgcccagccggagctgtttggtttgggggattattttgagtttgtgctgcgcgctggcccgcacgggcgctcaaaaccgttcagcgatatgtactttttggctgcggaaaaactcaacgtgccgatcggcgagatcttacatgttggggacgatctcaccactgaccggaatgcaggcttgttggatcagaccggaaaatggcgatctgatgcaaacctgggacagccgtttactgccgcatctggaaatttcccggttggcatctctgacctcgctgatataatcagcaaatctgtatatatacccagctttttggcggagggcgttgcgcttctccgcccaacctatttttacgcggcggtgccaatggacgtttcttacctgctcgacagccttaatgacaaacagcgcgaagcggtggccgcgccacgcagcaaccttcnntgtggtaagacgcgcgtactggtgcatcgtatcgcctggttgatgagcgtggaaaactgctcgccatactcgattatggcggtgacgtttaccaacaaagcggcggcggagatgcgtcatcgtatcgggcaactgatgggcacgagccagggcggtatgtgggtcggcaccttccacgggctggcgcaccgtttgctgcgtgcgcaccatatggacgccaatctgccgcaggatttccagatcctcgacagtgaagaccagctacgcctgcttaagcgtctgatcaaagccatgaacctcgacgagaagcagtggccgccgcggcaggcaatgtgtacatcacagatcctctag

SEQ ID NO: 29483 - DNA, 2571 bp, Homo sapiens; identical to SEQ ID NO: 10743
  SIMILAR (577)..(1200): 991254mologous to Escherichia coli ferrous iron transport protein B,accession number X71063,Smith-Waterman Score=1069.

SEQ ID NO: 29484 - DNA, 2976 bp, Homo sapiens; identical to SEQ ID NO: 23994
  SIMILAR (1441)..(2100): 961254mologous to Escherichia coli PHOSPHOENOLPYRUVATE- PROTEIN PHOSPHOTRANSFERASE PTSA (EC 2.7.3.9) (PHOSPHOTRANSFERASE SYSTEM, ENZYME I) (ENZYME I-ANI),accession number D90868,Smith- Waterman Score=1052.

SEQ ID NO: 29485 - DNA, 1271 bp, Homo sapiens
  SIMILAR (843)..(1268): 941254mologous to Escherichia coli coding sequence uvrD protein,accession number X00225,Smith-Waterman Score=736.
cccccagcccctgatgctgttctgtcatcaggcgacggatattgcctgcaaattcatcatcctgaatcagcgacaaatgggcgctgaggatagttttgctttcgccgtcacgctcacgcaattgctggttcagttgctcggcaagcgttgccaggctgtgctccagccgggtggaatcttgcgcactggcggggattgcccgataactgtcgaggctgtcgctttgtaacagggtcagcgtacccacgccgacgccgcttgccagcacattgccgtacagtaaatccgggttaaggcggcttaatgaacgcggcagcggatgcgccgtcagttctgcctgcataaaagttgctgcatctgcaaaatgtcgcggcaatcggcaatcgaaaagacatggtgaaccgtgccgtcggtccaacaccgttaccagtcaaaagtctgacctgaacacgacaattgagtttgttagtccgaatgacgttgtaagcattcgtgagaaagcgaagaagcagtctcgcgtgaaagccgctctggagctggctgagcagcgtgaaaagccaacctggctggaagttgatgctggcaagatggaagagtttctaaaaccgcgcctggttgatatcgagcaagtgagttcgacgcacgccaaggtgacccttgagcctttagagcgtggctttggccatactctgggtaacgcactgcgccgtattctgctctcatcgatgccgggttgcgcggtgaccgaggttgagattgatggtgtactacatgagtacagcaccaaagaaggcgttcaggaagatatcctggaaatcctgctcaacctgaaagggctggcggatttcaagatcctcgacagtgaagacccagtacgcctgattaagcgtctgataaaagccatgaacctcgacgagaagcagtggccgccgcggcaggcaatgtggtacatcaacagccagaaagatgaaggcctgcgtccgcatcatattcaaagctacggtaatccggtggagcagacctggcagaaggtgtatcaggcgtatcatgaagcgtgtgaccgcgcgggcctggtggacttcgccgagctgctgctgcgcgctcacgagttgtggcttaacaagccgcatatcctgcaacactaccgcgaacgttttaccaatatcctggtggacgaattccaggataccaacaacattcagtacgcgtggaatcgcctgctggcgggcgacaccggcaaagtgatgatgatcggtgatgacgaccagtaa

SEQ ID NO: 29486 - DNA, 600 bp, Homo sapiens
  SIMILAR (117)..(497): 1001254mologous to Escherichia coli ORF_f128,accession number U18997,Smith-Waterman Score=635.
ttcgatattaaagatgcgatcaaccaggttgctgaccgcctgaacatctccaaacacactgtctatctctacatccgccagttcaagagcggtgatttccaggggcaagataagtaatgcgttttgccatcgtggtgaccgggccagcatacggtacgcaacaggcgagtagtgcttttcagtttgcgcaggcgctgatagcagatggccatgagttaagcagcgtctttttctatcgggaaggggtctataacgctaaccaattgacctctccggcaagtgacgaatttgacctcgtacgggcctggcaacaactgaatgcgcaacatggtgtggcgctgaatatctgcgtagcggcagcattacgccgtggcgttgttgatgaaacggaggccggaagactggggctggcttcgtcaaaccttcagcagggatttaccttaagcggacttggggcgctggcggaagcctcgctgacctgtgacagggtggtacaggtctgatgaaacgaattgcgtttgttttttttactgcccctcatggtacacccggaggcccggaaaggttaaatgctttaatgggcacttcccgattatctgc

SEQ ID NO: 29487 - DNA, 1248 bp, Homo sapiens
  SIMILAR (640)..(1185): 991254mologous to Escherichia coli K12 putative outer membrane protein,accession number AE000395,Smith-Waterman Score= 946.
atggcgggcaacaggtcgcttttaaccaacgaaaccagtgagttggatttactggatcaacgtcctttcgaccagaccgattttgatattctgaaatcctacgaagcggtggtggacggattaagcacctttgtgccgccagaaaccccggatgtcggttcaagcgtcaactttgcctcttctgttgaagatctggttacccaaacgctggagttcactggaaggaccgatcgcaatgtttctaataacgccaaaaatcgtcagatcgtgctgaatctctacgagaaagggatcttcgatattaaagatgcgatcaaccaggttgctgaccgcctgaacatctccaaacacactgtctatctcacatccgccagttcaagagcgaagcgaggcgaaacgctgcgaaatgcgctggctaataacgggaaatttaccctggtttccgcccagcaactgtcgatggcgaagcaacagttaggtttgtcgccgcaggacagtttaggcacccgtagtaaagccataggcattgcccgcaatgtcggcgctcattacgtgctgtactccagcgcctctggcaacgttaacgctccgaccctacaaatgcagctgatgctggtgcagacgggcgaaattatctggtcagctgctgaatttgatttcaatcatcagcaacttaatttgagcattccccaaattgcactgtaccgtgatgcaagaggttacgtctccccttctcgttgggacgatggtataccaacgctgtttaccaactactcgtttacaggttctgataaccgttaccgccagggcaatcgtagccaacgacagtacctgaatatgcaaaatggtgctaattttggcccctggcgattacgcaactattccacatggacacgcaacgatcagacatcaagctggaataccatcagtagttatttacaacgtgatatcaaggcgttgaagtctcagttgcttctgggagaaagcgccaccagcggcagtattttttccagctacacctttactggcgtgcaactcgcttccgacgataatatgttgccaaacagccagcgcggatttgccccaacggtacgcggtatcgcaaacagtagtgcaatcgtgactatcaggcaaaatggttatgtgatctatcaaagcaacgtgtcagcgggtgcctttgaaatatttctttacattcgaatgttacatgttgtagatttgatgataaaaaagacaccttcgatataa

SEQ ID NO: 29488 - DNA, 1170 bp, Homo sapiens; identical to SEQ ID NO: 21573
  SIMILAR (534)..(554): 1001254mologous to Escherichia coli K12 putative regulator,accession number AE000420,Smith-Waterman Score=41.

SEQ ID NO: 29489 - DNA, 1572 bp, Homo sapiens
  SIMILAR (130)..(89): 711254mologous to Escherichia coli K12 putative thiosulfate sulfur transferase,accession number AE000270,Smith-Waterman Score= 54.
ctacccctttaaacgctcgggtccaccgccttccgtcagtaaccgcgggaaactgtccttattctcggtgtcacgccatacagaatgacgtggtgtcatggcgaatgccgtgtttgccagcatcgcttttagtggttcatcagaaactttgttccacagcggttcactttccacttcgttggtatcgatgtagtcagcgccgggaatatggctgataaggtaaagcttaggagcgccccaggccgcttcaatgactttccagtcaccggcaggtttcgccgtaacctctttaccttgttgcaggtcgtgcagccattgcggataaaccagctgctcaaaatgcggcagtttttgcagacgggaaggttcgcttagcgcgtcactcaggatggagatatgcgttaaacctgctttttgcagtcgcgttttgacggcgtcgacatctttgtcattaccgtacagcgccaccggagcatcggttttcaggttatgttgcttgatccacgcgttgagctgttcggtgctcattttgtcaagccagctggcagagaggtttaaggccgcaagttcatgaccagaagggccatttaaggtttgtggccagccgttataaaacgcgctggggcgagtatctatcgctttgccattttgttgttgaagttccggcacgctttgttcaggaaacgcttccggcaccacgcgtacccgacgccgcgagcgggcgtatatgacccaaccgccaatgccaatagccactactggcagcacccacagcagcacggtcagcggcgttaacggcggatcgtaagtgacgaagttgccgtaacgcgccaccatataatcgacaatctcttttttacttttaccttcctgcatcagttcatacactttctgacgcaggtcggtggcaatcatcgagttggaatcggcaatgctgttgttctggcatttcgggcagcgcagttcttcagtgagctgacggaactgttgttcctgtgcttcatctttaaaagcggcttgatctcttgtgcgcctttgttgatgcccgttcctgccgctggaagacgctgactgagccgacgacgcggcctgtccggctgacgtgctggctgcgcgtgctgagtccgcagcatcagccgcatgggttgccgcctcacgggctgatgtgctggcatcactggctgacttcttcgcggctgccgtgttctgtgccaccgcggacgcgttacgcgccacctcttccaccatcagttcaaaacggcgcagtgcctccggacgggcatcatcctccgtcatggcaccgagaaaatcattcagcgtaccgggttgagaatcttcatacacggtaatggtcccggcatgtgacggcgggaatccttccaccaacagaataacgctgtactgaccgtactcaacgtccatgctgtaacgcccggcttcatccggattttctgaggccagcgtgttcaccaccaccgtggtgctgttacgttttgctttcagctggattgtgcagttctgtaccggttttcctgtgccgtctttcagtacacctgaaatctttactgccat

SEQ ID NO: 29490 - DNA, 563 bp, Homo sapiens
  SIMILAR (410)..(51): 981254mologous to Escherichia coli yjeB,accession number U14003,Smith-Waterman Score=596.
ttgtgccatctcggttcctccgttgtcatctctgatgaagattttcgtcactccaccagcaataatttataaagcggttgattctcttcaaccaaatcggcaagcgtgtagttatccagttccgtaagaaaactttgcacggccttagaaagtgcctgtttcaacctacaggcaggtgtaatgtggcaaaactcactgctgcaattcaccagcgataagggctccacgtcgcgcaccacatcaccaatacgtatcgcactcgccggtttacccaggcgaatgccgccattttttccacgaacagcagtcacgtagccggcacgactaagttgattgattattttgaccatatgattacgggagacgccgtagacgtcagtcacttcagaaatactggtcatccgcccttccaggcgaatgccgccattttttccacgaacagcagtcacgtagccggcacgactaagttgattgattattttgaccatatgattacgggagacgccgtagacgtcagtcacttcagaaatactggtcatccgcccttctggcaatgacgccat

SEQ ID NO: 29491 - DNA, 1194 bp, Homo sapiens
  SIMILAR (406)..(732): 701254mologous to Escherichia coli ORF_o162,accession number U18997,Smith-Waterman Score=383.
atggcgtcattgccagaagggcggatgaccagtatttctgaagtgactgacgtctacggcgtctcccgtaatcatatggtcaaaataatcaatcaacttagtcgtgccggctacgtgactgctgttcgtggaaaaaatggcggcattcgcctgggtaaaccggcgagtgcgatacgtattggtgatgtggtgcgcgagctggagcccttatcgctggtgaattgcagcatacttcttcgaagatcgctgttgaaatggaatatgggaataaatgggagcctgttcttccggcttcgcatggcgacgaaaaatatgcgcgacatgccagctatccttgcggttaagtacatacggcagatggtaacgggtggtgcttttgccgaagccaataaaggcgcagttgatgaccatgatttcgtcctttttaaggagcgactcgccgatcgtcccggcatcaagcaactcgtcgcctgtattgatggagacgtcgtgggccatctcaccattgacgtgcaacagcgcccacgccgcagtcatgttgccgattttggtatctgtgtcgactctcgttggaagaaccgcggcgtcgccagcgccctgatgcgagagatgattgaaatgtgcgaccactggttgcggattaaacgaacatatctcggcacgcttaccttccggcacgctttgttcaggaaacgcttccggcaccacgcgtacccgacgccgcgagcgggcgtatatgacccaaccgccaatgccaatagccactactggcagcacccacatttggtgttgtatgggtgtggaggtttggcatgcgtgtttgttacgtttcgttgtcagtttgtgtttgttggtgtaattcctctattaccgggcgaacatgcgtgtattcgcaaaatctgtgatcgcccttcggtagagtaccccgtcccgtcagtgttcggggaccggtcctggaatcaagatccccacatccagcgcaaccgtgtgaccccacatcgcccgatgaatcacaacgttttcaactcggcgcgtaccgcggagtctcccagtgagatccgccctgtttcgtggtgcaaagagatgcaaatagtactggtcgcttttccgcatgccagcgccacgcagctaccgccaaattgtgaacgccagttgttcggtggcgtttctggttctccatcgcgccagatataa

SEQ ID NO: 29492 - DNA, 837 bp, Homo sapiens; identical to SEQ ID NO: 17655
  SIMILAR (409)..(660): 981254mologous to Escherichia coli K12 putative periplasmic protein,accession number AE000396,Smith-Waterman Score=407.
  misc_feature (1)...(837): n = a,t,c or g

SEQ ID NO: 29493 - DNA, 4526 bp, Homo sapiens
  SIMILAR (3930)..(4511): 981254mologous to Escherichia coli K12 putative invasion protein,accession number AE000369,Smith-Waterman Score=978.
tgattgctccgttagcaagcctgcccgccgaatatagaggatctgacaatgcctgatttttttaccccatttttggacaggcacgctatcgccgttttgcgctttatggcggcgcggaagcctgcgcgacccgcactgaacaacacacattattacagactgcccgcttgtggctcgcgcgtcataatgggagttttgatactgcggattgccggtttgatgtggcaaccttcaccgataatgagggtgagtggattaacgatgcctttaatgaccactcataattaaggtttaaggattaccgcgcaagaaagaattaaagcttgcttcactgaaagcattcaaactcaaattgcggcggcagaggcgcttccggacgccatctcccgtgcagccatgacgctggttcagtctctgctcaatggcaacaaaatcctctgttgtggtaatggaacttccgctgccaatgcacagcatttttgctgccagcatgatcaaccgtttcgaaacggagcggcccagcttacctgccattgcactaaatactgataatgttgtcttaacggcgattgccaacgatcgcttacatgatgaagtgtatgcaaaacaggtgcgggcgctgggtcatgcgggagatgtattgttagccatttccacccgtggcaacagccgcgatattgttaaagcagttggaagcccgccattaccccgtgatatgaccattgggggaattgacccggcttatgaaggtgggcgaaactttgcggtttttgttagggccacaggatgtggagatccgcattccttcgcatcgtagtgctcgcattcaggaaatgcatatgctgacgagtagggtgaagaatcatggaggcagttttggaatagcgtttgcaatctttgaagcaccttgtgtctgtcactttccagcactgggaactcaggggcttaattggacttacagttccatgtggctggggaagcctcacaaacatgatggaaggcaaggaccttcgcggttgattttcgctttaatgttacgcggagcaggagacgcccataccgaccgggcaggatgcgccgtgacgtggcaggcgaatcacgcggatgtcgtgagcgaagtatttaccaccaaactgcgcacccagaccaagattttgcgcttcgatcagcaattctttttccagttccacatcgcggaacgcctgaccgtgctcattcccttccgttggcagttcatcatagtatttcgcggaaggacgaagcgagcggaagtattatggtattacgtgcccctgtatcacgttattatagctgatcgaatctgcagccaaaaagaagaagaaggaggcaggaagagaaggaagagaggaggaggaggaggaggaggaggaggaggaggaggaggaagaagaggaggagagaagaagcaagcaagaggagaaaaacagggctgctttccctgtgatgcggccggctgggtcacctacctgcatcagattctgtacggagaaaatatcgtcaagttccgcttcagtcaacagaccgcgttccagaacgacttcacgtacactcttaccggtttcggcacagattttacccacgatgtcaccgttgtggtgaccgatgaacgggttcagattatggattactacgattccagtctggaaaccgccatcgatcatgataattaccttgagtttcaacaggttttatctgacatcggcgaggcgctggaagcgcgctttgtgctggaagataagctgattctgctgaccaatgcggtactgccgctgcgtctggaaaatgacgagttaattgtcggcagtgaagatggtattgacccggtttcgctggcggccctgacgcgtaaagtcggacgcaaagtgcgttacgtcattgttctgcggggacaaattgtcacagggttacgtcactggtatgcacgccgacgcggtcacgatccgcgggcaatgttgtacaatgcggttcagcatcagtggctcacggaacagcaggccggtgaaatctggcggcaatatgtgccgcatcagttcctgttcgccgaaatactgaccacgctcggtcatattaatcgttcagcaattaacgtgtgttattgcgccatgaacgcagttctctgccgctcggcaagttttggtcaccgaaggcgttatcagccaggaaacgttggatcgcgtcctgacaattcaacgcgaattacaagtttcgatgcaatcactattactcaaagcaggttgcgcaactggagtccgaaaatgaaggagaataaccttaatcgcgtcatcggatggtctggtttactgctgacgtctttattggagtaccagcgcactcgcagacaatattcggaccagcgcagaagagctggggctgagcgattatcccattttgttatttatccccgtctcgataaagcgctgaaggcacagaaaaataacgacgaagcaaccgccatccgcgaatttgaatatatacaccagcaggtgccggataatattccgctgactttataccttgcggaagcctatcgccattttggtcatgatgaccgggcgcggctgttgcttgaggatcaactgaaacgtcacccaggagatgcccgacttgagcgcagtctggcggctattccggttgaagtgaaaagcgttacgacagttgaagaactgcttgcccagcaaaagcgtgcgatgctgcgccgaccctgcgttgtcgcaagcgcaactgaacgatgcgacgtttgctgcatcgccggaaggaaaaacgctgcgaaccgatctgctgcaacgggcatctacctgaaacaatggtatggcacttcggtttttgaaggcatccgttgctacgactcgcacaaaggaccggttgtattccgccatcgtgagcatatgcagcgtctgcatgactccgccaaaatctatcgcttcccggtttcgcagagcattgatgagctgatggaagcttgtcgtgacgtgatccgcaaaaacaatctcaccagcgcctatatccgtccgctgatcttcgtcggtgatgttggccgggcagctccctggtatcttccgtgttcttcatgctgctgccggaacaggtttacgtttacgctggcagaaatcgcgattcagtccgctgattccgctgcggccttcggtatcgaaccgcgcgttgctatgctctcctactccaccggtacttctggtgcaggtagcgacgtagaaaaagttcgcgaagcaactcgtctggcgcaggaaaaacgtcctgacctgatgatcgacggtccgctgcagtacgacgctgcgcagaaaaaagcatcagacagtggttttattcagcagcaaaccaaagataatcagacacgcgacggtgagccagattggcgcaggcagaccgaaccagttggcgtaaccaagggcaaagaagctttcatcttcgataccgaccgtttaccgtctgaaatgatgtacgccagacctcgaacaatctctgaaagcggccggattcccggaaaaacaaatttatcagttaaacattggctgatcgtcggtatgaacgacagcaccgtgctgggcggcgtacgcgcgacggaaggtcagggctttaaagcggccgatatcatcggcattggcattaacggtgtggatgcggtgagcgaactgtctaaagcacaggcaaccggcttctacggttccctgctgccaagcccggacgtacatggctataaatccagcgaaatgctttacaactgggtagcaaaagacgttgaaccgccaaaatttaccgaagttaccgacgtggtactgatcacgcgtgacaactttaaagaagaactgggagaaaaaaggtttaggcgggggcgagtgatatacgttgaccacgcgactgatcgtcgcgtcgatttttcaccttcgtgtctgggattaacgctcacggaagatggaattcttactcaaggaaatgagcaagtttatattccacagaaagagttaggtgtattaatagtattacttgaatccgctggtcatgttgtactgaaagatatgatcatcgaatcagtatggaaaaatattattgttagtgacgagtccctgacaagatgtatctattctttgcgctgcatttttgaaaaaattggctatgatcgttgcatagaaacaatctaccggaaaggttatcgtttcagcgggcaggttttcaaaactaaaattaatgaagataatacttcagactattccatagctatattccctttcactacttcattgaatacactggatccattaatacttaatcaggaattagtgcaaatcatttcaaataaaaaaatcgatggtctctatacctatccgatggctgcgacaaattttggtaatgatcacatatctcaaaattcattcttgagcagattcaagccagattatttcgttacaggaagaataaaccagaataatgcagtgaacactttatacattgagttgatcgacgctaaaaaaactttttcctcatcgcagtaa

SEQ ID NO: 29494 - DNA, 1202 bp, Homo sapiens
  SIMILAR (227)..(763): 981254mologous to Escherichia coli K12 putative periplasmic protein,accession number AE000396,Smith-Waterman Score=858.
atgacgctggttcagtctctgctcaatggcaacaaaatcctctttgtggtaatggaacttccgctgccaatgcacagcattttgctgccagctgatcaaccgtttcgaaacggagcggcccagcttacctgccattgcactaatactgataatgttgtcttaacggcgattgccaacgatcgcttacatgtgaagtgtatgcaaaacaggatgttaaggagaatacatgaaggcattatcgccaatcgcagtccttatttccgcgctgctgttgcaaggttgtgttgccgctgccgtagtgggtaccgctgctgtgggtaccaaagccgcaactgacccacgcagtgtcggcacccaggtggacgatggtaccctggaagtgcgcgtgaacagcgcattgtcgaaagacgaacagattaagaaagaagcgcgcattaatgtaacggcctatcagggcaaagtgctgctggttgggcagtcaccaaatgctgaactttcggctcgcgccaaacagattgctatgggcgtagacggtgccaacgaagtgtataacgagattcgtcagggccagccgattggtctgggcgaagcatctaacgatacgtggatcaccaccaaagtgcgttcgcagctcttaaccagcgacctggtgaaatcgtccaacgtgaaagtgaccaccgaaaacggtgaagtgttcctgatggggctggtgactgaacgtgaagcgaaagcggcggcagatattgccagccggaccacaggcggtccgagctctctcttctctctttcactctcttctcatgtctgctctgtctctcttgtgctccctctcctcatcttcctctccatctcatgctcatcgatgcctctgctttcttttatacacaggaacaaactctctggatgcgggaaatggagaggacacgagttcccccccgagcggtttacacccttttgtaccaccgctcgtggcccccgggttctcgcttagtcgccgtagcggaacccgtgccgagaggggaacccccgaaaccccgttctccccggcccccaatttcgcccgcccctcgcaattggtcgacaaccctttgcgcatccccattgcgggccacattcccctgggccaatccccaaaacccgtttccctaaggttttcacctgcgcagcatcaaactgtaagcctgaaaagcttccgctcctga

SEQ ID NO: 29495 - DNA, 723 bp, Homo sapiens
  SIMILAR (273)..(722): 981254mologous to synthetic construct cysE,accession number A31758,Smith-Waterman Score=758.
gtagttctgaaaaacatgtccgacttaagcctggaaacgacgctgtttaatgagaaattgtcgatgccggtgggctggctccggtgggtttgtgtggcatgtatgcgcgtcgtggcgaagttcaggcagccaaagcggcggacgcgcatggtattccgtttactctctcgacggtttccgtttgcccgattgaagaagtcgcgccagcatgcaagcgcccaatgtggttccagctttatgtactgcgcgatcgcggctttatgcgtaacgcgctgaagggttttcatgccttgcaggcctatcgcatcggtcactggttgtggaatcaggggcgtcgcgcactggcaatctttctgcaaaaccaggtttctgtgacgttccaggtcgatattcacccggcagcaaaaattggtcgcggtatcatgcttgaccacgcgacaggcatcgtcgttggtgaaacggcggtgattgaaaccgacgtatcgattctgcaatctgtgacgcttggcggtacgggtaaatctggtggtgaccgtcacccgaaaattcgtgaaggtgtgatgattggcgcgggcgcgaaaatcctcggcaatattcaagttgggcgcggcgcgaagattggcgcaggttccgtggtgctgcaaccggtgccgccgcataccaccgccgctggcgttccggctcgtattgtcggtaaaccagacagcgataacccatcaatgt

SEQ ID NO: 29496 - DNA, 2232 bp, Homo sapiens; identical to SEQ ID NO: 9312
  SIMILAR (952)..(1410): 991254mologous to Escherichia coli alternate gene name yibK,accession number U00039,Smith-Waterman Score=808.

SEQ ID NO: 29497 - DNA, 1344 bp, Homo sapiens
  SIMILAR (1322)..(783): 981254mologous to Escherichia coli K12 putative oxidoreductase,accession number AE000389,Smith-Waterman Score=874.
cagccaggcagttgaaatgcgatgcgatcgcctgattcaatacccttcgctaacatccagtttgccagacagctcgcggcgtgatcgagcgcgctataggtgtacgatgcaccatgattatcgaccacggcaattttgtctggcatcgcacgagcggtctgctgccagtaatcggccagcgaagcatcgccccataacccttgctgacgatacgccgcacgacgttgttcgttaaacgttaatgtcactttcatgttggactgcgcaggattgagatcaaaccgtccggtgtagaccagatccgccatctgcagcagtttgtctgactgccagttcgccagcgaattgcggtattcccattggctaatgaatgctggcagagattctggcttaacgcggaagaagttaacatcgacattattaacgttgagcgccattaccggcagcccttcaacgactttgccaggcagcagcgaaccacggctggcaaaaccgacgctgggttggatgtcgcgggtagttatagttttttcgtaatctttactgaaggttgcgttgttgagtgctttgacctccttgccaatagtaacgatcaaatcacgtttcggttcgaggtggcgtaaacgtaactctttaagattatctgacagctcccaggcaccatccactttgccgctttttttatcgacgacatgaataacgcgtgagaaatcctgatccgggtcgagagggatggagaacgtcagcaccagcgtggctgccaggcatgcaaacttcgcggacgctttcggtagaccaaaatacgccgccatgcagtggaatacctgcaccgatcggccggtaaatttcaactctttgctgctgacgaagacgttaatcagcaccgaggagacggaatacagtacgccgataaaaatcccggcgaggatgatcactttaacgaacgatttcgaaccgcctttgacgtcgttaacgtacacagcgacggactccgcgccacctgcggccataaagatccaggtggtaacgccgaggaacgcccagttgaagttcgggatcatcgcgtcaacggtgatggcgtcagcaggctgtacgccgccaaccagcgccgtacctgccagtaaaatgtaggagagcgttaacagcagcatcagcgttgaagtgacggaggtaattggccccaacattttcgccccgttggtggaaacccaggtggagaaggcgaacagcaccatactgataatggtggtggcaaccggcgtcataatatattcgtatccgaggaaggcatacgaagcataagcaataacgcgcggcaacagtaaggaaagggaagcgctttca

SEQ ID NO: 29498 - DNA, 1275 bp, Homo sapiens
  SIMILAR (288)..(746): 981254mologous to Escherichia coli alternate gene name yibK,accession number U00039,Smith-Waterman Score=797.
agcgaaattacgcaagattcgctggtgcaggggctgtttaaagagttgcctgcggcactggctcccatggcgaaagggaatgcggcatagtcgtttgcgccccctcaccctaaccctctccctcagggagaggggaccgttcggcgctgtatgtactccctcactctgaaacgacaccgcactctttttttctccctcgcccctccggggagagggccggggtgaggggaaaaggccgcactgctcaccaattttctgctatcctgcccccgcactaagggggcagtatgctaaacatcgtactttacgaaccagaaattccgccaaatactggcaacatcatccgtctttgcgctaataccggctttcgtctgcatatcatcgaaccgatgggatttgcctgggacgataagcggctgcgccgcgcggggctggactatcacgagtttaccgccgttacgcgtcatcatgactatcgcgcgttcctcgaaccacaaaatccccagcgcctgttcgccctcaccacgaaaggtacacctgctcacagcgccgtaagctatcaggatggcgattatctgatgttcggcccggaaacacgcggcctgccagcgagcattcttgatgccctgcccgctgaaccaaaaattcgcattccgatggtgccggacagccgcagcatgaatctgtccaatgcggtctcggtagtggtgtatgaagcctggcggcagttggggtatccgggagcgcaccacggaacctgcgccaatcttcgcgccgcgcccaacttcaatattgccgaggattttcgcgcccgcgccaatcatcacaccttcacgaattttcgggtgacggtcaccaccagatttacccgtaccgccaagcgtcacagattgcagaatcgatacgtcgttttcaatcaccgccgtttcaccaacgacgatgggaggatcaccacgctggctactgcgccagggcgttttgcagaagctcatgccagccgtggttcgctgctgcctggcaaagtcgttgaagggctgccggtaatggcgctcaacgttaataatgtcgatgttaacttcttccgcgttaagccagaatctctgccagcattcattagccaatgggaataccgcaattcgctggcgaactggcagtcagacaaactgctgcagatggcggatctggtctacaccggacggtttgtcgcaccacctcacgcgtctgtgtccagctctcccagtcgcttgggcgaacggcacgcgacattttcgacca

SEQ ID NO: 29499 - DNA, 1054 bp, Homo sapiens
  SIMILAR (695)..(1051): 991254mologous to Escherichia coli K12 orf, hypothetical protein,accession number AE000233,Smith-Waterman Score=591.
agtcccagctgtgctgctgctccacttgggaaggcaaacctggacaagctccgccattcaggaaagcttcaggcctacattgttctcgtggagctcgtgtgtaataggaaacgctgtggcgtccagatccactcttctcagcagctcagtgcatcttcgctgctgtcatctgcttcttcagagggagaggggagtgtgtggaaaaccatgctgcccaacagtccccggtctcttttcaacgctcttgaaccgttggcctctgatgacacagcgagtcctgaacatggagctcactttaccccaagaagaaggaagaacctcatcatttccccaaatggagcctcccacttcctcacctacaaatggatttggcagaactcctgtgtttgtttggcgttggaattaacgcactggctgctggggtgcgttttattcataaagcaaggctgtatgagcgagaaattaaagatagtctatcgcccattacaagaattgtcaccgtatgcgcacaacgccaggacgcacagtactgagcaggtggcacaactggtagaaagtattaagcaattcggctggactaatccagcgctgattgacgaaaagggcgaaattattgcgggtcacggtcgtgttatggcggctgaaatgctcaaaatggattctgttccggtcattgttctgtctggcctgacggatgagcagaagcagcgattacgatcagtatcgctcccgtaatgcattaatccgtcgccacattgagaaaatggatgccagtttgcacgtcggaacgaaggagtttgatatttcaaaggtttccgaggtggattctgttgatgatttactcattgataatgccgctcgttatctgctgaaagactggaaaggggttggtgaactggttaatggtgttgaggttgcactggaatatacggcagaacgagggatcgcgctgcttaagcagaatccagagttgtactggcagatccttgcagaagcagccagcatcgcccagggtaaagagcagcagaagcaggatacgataaaaaagccatag

SEQ ID NO: 29500 - DNA, 563 bp, Homo sapiens
  SIMILAR (154)..(513): 981254mologous to Escherichia coli yjeB,accession number U14003,Smith-Waterman Score=596.
atggcgtcattgccagaagggcggatgaccagtatttctgaagtgactgacgtctacggcgtctcccgtaatcatatggtcaaaataatcaatcaacttagtcgtgccggctacgtgactgctgttcgtggaaaaaatggcggcattcgcctggaagggcggatgaccagtatttctgaagtgactgacgtctacggcgtctcccgtaatcatatggtcaaaataatcaatcaacttagtcgtgccggctacgtgactgctgttcgtggaaaaaatggcggcattcgcctgggtaaaccggcgagtgcgatacgtattggtgatgtggtgcgcgacgtggagcccttatcgctggtgaattgcagcagtgagttttgccacattacacctgcctgtaggttgaaacaggcactttctaaggccgtgcaaagttttcttacggaactggataactacacgcttgccgatttggttgaagagaatcaaccgctttataaattattgctggtggagtgacgaaaatcttcatcagagatgacaacggaggaaccgagatggcacaa

SEQ ID NO: 29501 - DNA, 306 bp, Homo sapiens
  SIMILAR (199)..(249): 701254mologous to Escherichia coli glycerophosphate dehydrogenase,accession number M55989,Smith-Waterman Score=66.
ctgacgataaaaggcgttgaactttgcgttttggcgcaaattcagtgttaaaaccggaaattaagcgcggattcgaatattctgactgttgggtagacgacgcccgtctggtactcgccaacgcccagatggtggtgcgtaaaggcggcgaagtgcttactcggactcgcgccacctctgctcgccgcgaaaacggccggcaaaaaatatagctggcaagcgcgcggcttggaatcgctgagtcaaccggtagaacgactatcgccgtgatcgcacgagtcggcatcaacaggttcacgggcacac

SEQ ID NO: 29502 - DNA, 1944 bp, Homo sapiens
  SIMILAR (1899)..(1925): 1001254mologous to Escherichia coli Orf48,accession number L13279,Smith-Waterman Score=43.
atggattatgcggttgataaaaaagcgatcgatacagctacgcgtcagacactgctcggcaatagcctggtcgttgtagcaccgaaagccagcgtgcagaaagatttcaccatcgacagcaaaaccaactggacttcactgctgaatggcggtcgcctggcggttggcgatccggaacatgttcccgctggcatttatgcaaaagaagcactgcaaaaactgggcgcatgggatacgctctctccgaaactggccccagcggaagatgttcgtggggcgctggcgctggtcgaacgtaacgaagcgcctctgggcattgtctacggttctgacgcagttgccagcaaaggggtaaaagtggttgccaccttcccggaagattcacataaaaaagtggaatatccggttgctgttgtggaagggcataacaatgcgacagtgaaagcattttatgattatctgaagggaccgcaggcagcggaaatctttaaacgttacggatttacaatcaacctgccgtttgggatcttttttgcctggttactggtgcgttgcacgtttccgggcaaagctctgctcgacagcgtactgcatctaccgctggtgttaccgcccgtggtcgtcggttacttattattagtttcgatgggacggcgcggatttatcggtgaacgtctgtatgactggtttggtattaccttcgcctttagtggcgcggcgcggttctcgtgccgccgtcatgtcgtttccgctgatggtttgatcaatgagagacttcagcaggagataatgtggcatggaaagaaggaaatctcgacttatcctgcggacgatttggaccgggatggcgatccatttacccgttggggcggccagctcctgcaactgttcggcgtccatgctgaagagtggggttactttaaaattatccatctggaaggatcgccattaacccgcatcgacgggatgatgatcctcggtatgtttggcggctgctttgccgcagcgctgtgggccaacaatgtcaaactgcgaatgccgcgcagccgtatccgcattatgcaggccatcattggcggcattatcgccggttttggcgcgcgtctggcaatgggctgtaacctggcggcgttctttaccggtattcctcagttctcgctgcatgcctggttctttgccatcgccactgccattggttcatggtttggcgcgcgctttaccctgctgcccatcttccgtattcccgtgaaaatgcagaaagtttctgccgcctcaccgctgacgcaaaaaccggatcaggcgcggcgtcgttttcgtctcgggatgctggtctttttcggcatgctgggctgggcgctgctcacagcgatgaaccaacccaaactggggctggcaatgctgtttggcgtcggctttggtttactgattgaacgtgcgcaaatctgctttacttcagcgttccgcgatatgtggatcaccggacgtacccatatggcgaaagcaatcattatcggtatggcggtgagtgccatcgggatcttcagttacgtacagttaggcgttgaacccaaaatcatgtgggcgggaccaaacgcggtaattggtggtttactgtttggttttggcatcgtgctggctggcggctgcgaaaccggctggatgtaccgcgcggtagaaggccaggtgcactactggtgggtcggtctgggcaatgtgatcggctcaacgattctggcgtattactgggatgatttcgctccggcgctggccaccgactgggacaaaatcaacctgctgaaaacctttggtccgatgggtggcctgctggtgacatatttgctgttgtttgctgcgctgatgttgattatcggctgggaaaaacgcttcttccgccgtgcgcaccgcagactgctaaggagatcgcatgaaaaatatcgttcctga

SEQ ID NO: 29503 - DNA, 4107 bp, Homo sapiens; identical to SEQ ID NO: 26162
  SIMILAR (2770)..(3492): 991254mologous to Escherichia coli yjdB,accession number U14003,Smith-Waterman Score=1293.

SEQ ID NO: 29504 - DNA, 1374 bp, Homo sapiens; identical to SEQ ID NO: 4650
  SIMILAR (166)..(1041): 881254mologous to Escherichia coli FdrA protein,accession number D42020,Smith-Waterman Score=1272.

SEQ ID NO: 29505 - DNA, 2283 bp, Homo sapiens; identical to SEQ ID NO: 24935
  SIMILAR (508)..(1581): 791254mologous to Escherichia coli K12 putative endoglucanase,accession number AE000380,Smith-Waterman Score=1425.

SEQ ID NO: 29506 - DNA, 2130 bp, Homo sapiens
  SIMILAR (1162)..(1851): 951254mologous to Escherichia coli xylose isomerase,accession number K01996,Smith-Waterman Score=1155.
atggcgcggcgtgcagcgctggcgcgtgcgattgcgctggagccggatctcatcatgtttgatgaaccttttgttgggcaagatcccatcaccatgggcgtactggtgaagctgatttctgagctgaacagcgcgctgggcgtgacttgtgtggtggtttctcacgatgtgccggaagtgttaagtattgcggatcacgcctggatcctggcggacaaaaaaattgtcgctcatggcagtgcccaggcgttgcaggcgaatcctgatccgcgcgtacgtcagtttctggacgggatagctgacgggcctgttccgttccgctatcctgccggcgattatcacgctgatcttttaccagggaccgctgacttagatactgccagcaagctaacccgaactgaccgcccgcgcagcgttgagcatgaatgtccgaacgttgtgctggtgaaagataaaaaaacattctgttcatctgcgaccgcgacatctaaccaggaacaactggcccccagctcacgtgcacaacctaaaattgcgggcattcctctgaccgttcggctttatgcagatgactggacatggaacgatgtgtggtacgcatttttactgggcggcatgagtggaactgtcgttggcctgctctgctattacctgatgagcgtacgtatgcgccccggcagagaaatcatgaccgccatcaagcgcgaaccaattttacgtggcgtatcaaccggtggtggatacacaagcagtcgctgcgtgattccacgccggatcgaccgcgcaaagcggatgaataaacggatgcatatccgaggtgttcatatcgtctttttcgtaccaggtggcgagtggggcggtgaaagccagttcgtacacgtatctgcgaaagcgggtaccggtatcgatgaactgctggacgctatcctgctgcaggcggaagttctggagctgaaagcggtacgtaaaggcttgttcgatggcctgcacaaaatgcgggttatctggcagatcatcaccgaaaacttcacgcagggaaagcagggcggttacgcgttgttcactgctgctgcccgcaacaagttcgcgaattttatcgctaagcggatcgcgaacatcaatggcatttccggcatcatcaacgccgctgacaggatcccggcgacgaacccagatcctgaagtcttcagctgggcggcaacgcaagttgttacagcgatggaagcaacccataaattgggcggtgaaaactatgtcctgtggggcggtcgtgaaggttacgaaacgctgttaaataccgacttgcgtcaggagcgtgaacaactgggccgctttatgcagatggtggttgagcataaacataaaatcggtttccagggcacgttgcttatcgaaccgaaaccgcaagaaccgaccaaacatcaatatgattacgatgccgcgacggtctatggcttcctgaaacagtttggtctggaaaaagagattaaactgaacattgaagctaaccacgcgacgctggcaggtcactctttccatcatgaaatagccaccgccattgcgcttggcctgttcggttctgtcgacgccaaccgtggcgatgcgcaactgggctgggacaccgaccagttcccgaacagtgtggaagagaatgcgctggtgatgtatgaaattctcaaagcaggcggtttcaccaccggtggtctgaacttcgatgccaaagtacgtcgtcaaagtactgataaatatgatctgtcctacggtcatatcggcgcgatggataccacggcactggcgccgaaactcgcagcgcgcatgaccgaagatggcgagctgcgactaacgcatcgcgcaccgcccaaaggaagatcgtcctgggtcatgacaaccgcggacgcctggcacaagcctaaatgctcacgcccagaaacgcaacttaagcgcaccatgcagcgcgatgatgtaactcgcgagcatgtcgaacaaatccttgctgctcaggcaacgcgcgaagcccgccttgccgtggcagatgacgtcattgataataacggcgcaccggatgctatcgcatcggatgttgtatatacccataatggcaacgtgcaaattcagacatattttctctga

SEQ ID NO: 29507 - DNA, 2530 bp, Homo sapiens
  SIMILAR (265)..(741): 1001254mologous to Escherichia coli glycerophosphate dehydrogenase,accession number M55989,Smith-Waterman Score=820.
ggggcgcagtacggcctctttttcctgcaacttttggtgcgcgcgggcaacgttaatgctttcgaactgatccatgcgtctctctttctttacaaacaagtgggcaaatttaccgcacagtttacgtcgaagcggcagataaacgccataatgttatacatatcactctaaaatgttttttcaatgttacctaaagcgcgattctttgctaatatgttcgataacgaacatttatgagctttaacgaaagtgaatgagggcagcatggaaaccaaagatctgattgtgatagggggcggcatcaatggtgctggtatcgcggcagacgccgctggacgcggtttatccgtgctgatgctggaggcgcaggatctcgcttgcgcgacctcttccgccagttcaaaactcattcacggtggcctgcgctaccttgagcactatgaattccgcctggtcagcgaggcgctggctgaacgtgaagtgctgctgaaaatggccccgcatatcgccttcccgatgcgttttcgcctgccacatcgtccgcatctgcgcccggcgtggatgattcgcattggtctgtttatgtacgatcatctgggtaaacgcaccagcttgccgggatcaactggtttgcgttttggcgcaaattcagtgttaaaaccggaaattaagcgcggattcgaatattctgactgttgggtagacgacgcccgtctggtactcgccaacgcccagatggtggcgttggaaaagtgtaattcaatcgtcgcctttgtggtttgccacacgtcagatgagccgtgcaattgtttgccacaggtgtacggttctgatgagaacgcgtcgctaacagcgtactggtattctggtggtgttcagggcgtgtgcgcgctcctgccgggtcatcatcgcgtgcccgggcttctgtatgccggttcagccgcagcggtttcgggcctcctgcgccagtttggtatccgcctggacgttcaggttcgccttataccgatcctcgctcagttcgccggtatctctgtgctgctgggtgtgtgggcgtttagtcgtccgtggcaccagcctggtaaggcactggcgttggcgaagcgtaaagcagatgtcgcatttgagtttttccacaagttacatgtgccattttattgcttccacgatgtggatgtttcccatgagagcgcgtcgttaaaagagtacatcaataattttgcgcaaatggttaatgtcctggcaggcaagcaagaagagagcggcgtgaaagtgctgtgtggaacggtcaactgctttacaaaccctcgctacggcgcgggttacaaaacgctgttaaataccgacttgcgtcaggagcgtgaacatctgggccgctttatgcagatggtggttgagcataaacataaaatcggtttccagggcacgttgcttatcgaaccgaatccgcaagacccgaccaaacatcaatatgattgcgatgccgcaacggtctatggcttcctgaaacagtttggtctggaaaaagagattaaactgaacattcaagctatccacgcgacgctggcaggtctctctttccatcagggtaccaagctcgagcctttaaaaaaagggtggctcaactgtggaaaaggacgatcgttgcggtccttttggttattacgcaacgtggcaaaaggggtatgtgtgcaaaggcgattaagttggcaattcaaacacgcctggttgattaaattctgggcccccatccctgcggtcatcgcgtcgggtattctctctacctactattttggcataactggcaccttttggactgtcacgggtgaatttacccgttgggggcggccagctcctgcaactgttcggcgtccatgctgaagagtggggttactttaaaattatccatctggaaggatcgccattaagccgcatcgacgggatgatgatcctcggtatgtttggcggctgctttgccgcagcgctgtgggccaacaatgtcaaactgcgaatgccgcgcacccgtacccgcattatgcaggccatcattggcggcattatcgccggttttggcgcgcgtctggcaatgggctgtagcctggcggcgttctttaccggtattcctgggtaccgagctcgaaattcgaatcccggtaaagaattctgccaggttacagcccattgccagacgcgcgtcaaagctggcgataatgccgccaatgatggcttgcataattcggatacggctgctcggcattcacagtttgacattgttggcccacagctattcggcaaaccagccgccaatcatcgcgaggatcatcatcccgtcgatgcggtaaccccactcttcagcatggacgccgatcagttgcaggagctggccgccccaacgggtaaattcacccgtgacagccccaaaggtgccagtaatgccaaaatagtaagtatagagaatacccgccgctatgaccgcagggatgggggcccagaatttaatcaaccaggcgtgtttgaaatgctgccatga

SEQ ID NO: 29508 - DNA, 398 bp, Homo sapiens
  SIMILAR (3)..(116): 971254mologous to Escherichia coli periplasmic putrescine binding protein,accession number M93239,Smith-Waterman Score=195.
ctgtgcgcccggatgtagtagcgcatatttccgaccatgtgttctatgccaacgccaataaagcagccacgccgctggtgagtgcggaagtccgtgagaacccaggtatttatccgctgcggatgttcgtgcgaagctgttcactctgaaagtgcaggatccgaaaatcgaccgtgcaaatcctacgatggtcaacatgcggtggatgatgtcagcctgaccatctacagactctagagatccccggtaccggctcggttcggacctagctcgaatctggagctcactcataggtgggaattgaccaatgagaacacctggacacaggaaggggacctcacacactcgggcctgttgtggggttgggggaggggacgggatagcattaggagatatac

SEQ ID NO: 29509 - DNA, 723 bp, Homo sapiens
  SIMILAR (648)..(544): 971254mologous to Escherichia coli nucleotide binding protein,accession number M93239,Smith-Waterman Score=185.
ggttcgaggctgcatcctggcttgcagctttttatccgagcgcgcccatcggctcatcgagcagtaatagtttcggggcgttcgcaaggcttcgtgccagggccacacgttgtcgctgaccaccggaaagctgatgcggtttgcgtttggcgaactcctgcatatgcaccaggccgagcatctcattgacccggctggcaatttccgctttcggtagtttgtcctgtttcaggccaaaagcgatgttctgttccacggtcatatgcggaaacagcgcgtaagactgaaacatcatattgatggggcgcaggtaaggcggaacctgtgacaaatcgacgccatcaagcattatctgtccggcagaaggttgttcgaaacctgccagcatacgcagcagcgtggacttgccacagccggatgcgcccagcagcgcgaagatttctcctttgtagatggtcaggctgacatcatccaccgcatgttgtccatcgtaggatttggtcaggttgcggatttctaatagcggcgtcagcgcattacgggttttcgctgcgggcgagggatagcgtcattcacggctgctctccggcattgaatgtgtgcaagcgcaccataatggtgcgaattgccggcgggtgtggtgcgccctccggcatctacgactgcggattattttccgctcttcactttggtccacggcgggtgcgcacacggtcgattttc

SEQ ID NO: 29510 - DNA, 441 bp, Homo sapiens
  SIMILAR (202)..(423): 951254mologous to Escherichia coli CG Site No. 553,accession number U00039,Smith-Waterman Score=363.
atgatgggcgtacccagcgtgctggcccctaccgttgaggcgatcgtcgccgtaccaatgttgataatcaccgaagttcgcacgcccgccagaatcaccggagccgccagcgcgccagtttatattcatcgcgataacaaagtaccagcgcctggagcatccactattgtggcagagacttggaattctgccataaagcctcattgtctgaccggattctacaaacccaccggcggcaccattttactgcgcgatcagcacctggaaggtttaccggggcagcaaattgcccgcatgggcgtggtgcgcaccttccagcatgtgcgtctgttccgtgaaatgacggtaattgaaaacctgctggtggcgcagcatcagcaactgaaaaccgggctgttctctggcctgttgaaaaagcagtctgcagtcgactctcgatga

SEQ ID NO: 29511 - DNA, 1425 bp, Homo sapiens; identical to SEQ ID NO: 17591
  SIMILAR (415)..(1155): 961254mologous to Escherichia coli CG Site No. 553,accession number U00039,Smith-Waterman Score=1206.

SEQ ID NO: 29512 - DNA, 2859 bp, Homo sapiens
  SIMILAR (1546)..(2835): 961254mologous to Escherichia coli Sensor kinase CitA,accession number D90702,Smith-Waterman Score=2114.
atgagtcaggaaacgcccgcttcgacgactgaagcgcagattaaaaataaacgccgtatctcacctttctggctgctgccgttcatcgcgctaatgattgccagttggctgatttgggacagttatcaggaccggggtaataccgtcaccatcgactttatgtcggcggatggtattgttccaggccgtacgcctgttcgttatcagggcgttgaagtcggaacagtgcaggatatcagcctcagcgacgatcttcgtaagattgaagtcaaggtcagcatcaagtccgatatgaaagatgcgctgcgcgaagagactcagttctggctggtgacgccaaaagcatcgttggcaggtgtctccgggctggacgcctcgtcgacggcgcagcacatcattgaccgaggtcgactgccagcggtcgatatcctgacgggtcacaacggtggttggtgcaagcacacgtctgcgcggctgttcaaaacggttagcagtaacgacgagagtatccgggctggtatcctgtgcccaagcggaaaatgccgtgacggaacacgccgtcagcagcgaagcttttttaatcattgtaaagcatccacaatagaagaaggatgccgcaggtttcatcaatattacgcgatgatgagaaccagatgcgacgttggccggcaggtcttcgggcttggaggggtatctaagatactaagagatgatgacttcccaccgaatggcagtgtccgcataacgcaatcatcgcacctttccttaccgctgcgcgtcacgtccagattcgcactggattccctattaactcacaggaccggcaagtggatgctacaggttgtaacaagatacatcatgacccccgaacaccttccaacagaacagtatgaagcgcagttagccgaaaaagtggtacgtttgcaaagtatgatggcaccgttttctgacctggttccggaagtgtttcgctcgccggtcagtcattaccggatgcgcgcggagttccgcatctggcacgatggcgatgacctgtatcacatcattttcgatcaacaaaccaaaagccgcatccgcgtggatagcttcccccgctgcagtgtacttatgcaccagttgatgacggcgatgattgcggaaaccggtattaaagtcgtctacgatgttttcgactctaacgaagtactggaaggcaaattaatggccgggagtaccggctttgatctggtggttccatctgccagctttctggagcgccagttgactgcgggagttttccagccgctggacaaaagcaaattgccggagtggaagaatctcgacccggaactgctgaagctggtcgccaaacacgatcccgacaataaatttgctatgccctatatgtgggcgacgaccgggattggctataacgttgataaagttaaagcggtgctgggcgaaaacgcgcccgtcgatagctgggacttgatcctcaaacctgaaaatctggaaaaactgaaaagctgcggtgtctctttcctggatgcgccagaagaagtttttgctaccatcccaacagcactaaagcggatggtgattggggaccggcactcgatccgcctttaccatcctaatccggagaaaattggttatcctatgcagttcaccaaacagggcgcgctggagaaaggggagagctacttcattaccgggaaagggtcaatggggatggcgatgcgcgccaaaacgccaatctttgatgacgatggaaaagtcatcggcgtggtgtcgattggctacctggtgagtaaaatcgatagctggcgggctgagtttttattaccgatggcaggtgtgtttgtcgtgctgttagggattctgatgttgctgtcgtggttcctggccgcgcatatccgtcggcagatgatgggcatggagccaaagcaaatcgcacgcgtggtccgtcagcaagaggcgctgtttagttcggtttatgaagggctgattgcggtggatccgcatggttacattaccgccatcaatcgtaacgcaagaaagatgctggggctgagttcccccggacggcaatggttgggtaaacccattgttgaagtggtcaggcccgccgatttctttaccgaacagattgatgaaaaacgtcaggatgtggtggcgaactttaacggtctgagcgttattgccaaccgggaagctattcgttcaggtgatgatttgctgggggccattatcagctttcgtagtaaagacgaaatttccaccctcaatgcgcaactgacgcaaataaaacaatacgttgagagccttcgtacattgcgacacgagcatctcaattggatgtcgacgctcaatggtctgttgcagatgaaagagtatgatcgcgtgctggcgatggtgcagggggagtctcaggcccagcaacagcttattgacagcctgcgcgaggcgtttgccgatcgccaggtggcggggctgctttttggtaaagtgcagcgcgcccgggaactggggctaaaaatgatcattgtccccggtagccagctttcgcaactgccgccaggactggatagcaccgagtttgcagccattgtgggcaatttacttgataacgccttcgaagccagcctgcgtacgcatgaaggggacaagatcgttgaattattcctcagcgatgaaggcgatgatgtggtgattgaagtcgccgatcagggctgcggcgttccagagtctctacgagacaaaatatttgagcagggggtcagtacgcgtgctgacgagcccggtgaacatggcattgggttgtacttgattgccagctacgtaacgcgctgcggatggtgttatcactctcgaagataa

SEQ ID NO: 29513 - DNA, 1407 bp, Homo sapiens
  SIMILAR (1353)..(616): 901254mologous to Escherichia coli O157:H7 O2-independent coproporphyrinogen III oxidase,accession number AE005617,Smith- Waterman Score=1146.
tcagaaggcaggggctgtgcaagtgttgttgtctttgtggtcatcattgtctgctgctgctgctggcacctcgttgctcaaggagccacagtggagccagcgcattgaagcactgggggacactgggaagattactgaacaaggcttatccaacacagctattttctccataaggcacaccatggccttcttgcactcaggatcactagacagaccttcagcactacattcggggactattttaagcggcaaaatcacctctgacatctgctgtccacatttctgatcccctggaaggccttgttcaaagcaacactgggctgaaatgttggtgcaccatgtgtgtttgccgtgtcggtgcacataagcagacagacgcgtcagggtgttgcggccccagccgagtagccgcgccgcttcctgtttatgcccctgcgtatgtcgcaacgcggtcgtcagtaacgtccgctccagctctggctgcgcttcggaaagcagattttgatgaccggaacgcagcgctctgtctgcccactgcgcaagaagcgtcgcccagctgtccggttgcatttgcgaagtactctccgcaaccgttgattcaaacagttcgccgggcaaatcctgaatcaacacttcctgcccggcggccatcaccgttagccagcggcaggtgttttccagctggcgcacgttgcgggcgagcagcttgagatcttccgcaaagtaatcagcgaagtgcaaatcccactgtttctcaataggggcgtaatccagacggaagttgcagatgagcgacttaatcacatcgcggcgaatacagtcatcacgcgttagcgcaataccacgccacagcgcattgccttgttcatccacttgctgatagtactgcttcaactctttctggttctgcgcgtagcagtcgccaatcatgctgatggcggaaacgcccatccccagcagatcggtatcgccctgagtggtgtagccctggaagttacgatgcagcacgccttcacgctgggccaccgccagctcgtcatccggacgggcaaagtgatccataccgataaactgatagcccgattgcgtcaggaaggcgatggtttcctgcaggatatcgagtttttgctgcggactcggcaggtcagcatctttgattttgcgctgagcagcaaaaatggtcggcagatgcgcgtagttaaagacactcagacgatcggggttcagctccgccacacgtttcagggtaaaggcgaaactctccggcgtctgtttcggcaggccgtaaatcaggtcgatgttggtggaggtaaaaccaatctcacgcgcatggttaagcagtgcaaagatgaaggggatccacagtagcccctgcccagccagacatccttttaccagaggcaccat

SEQ ID NO: 29514 - DNA, 1494 bp, Homo sapiens
  SIMILAR (1482)..(784): 981254mologous to Escherichia coli livF,accession number U00039,Smith-Waterman Score=1162.
ctaccgcgcacgaataaaactgccatccggctggcgggtgaacaggacctgttgattattccccgtatcaatggttaagcccgtcaccacgccgctggcgttctggcggattttcaccatctgcccgttttgcaaattactcagcggcttacccgcgccttctacctgcgccattgcatagacatcggtagcgggcagtccgtggtcgcggaacagctgcgccatcgttttaccgggttcgacacggtaagagcgccattgattatcaattccgctatctggctggaatggttgcgtttgggtagtttgcggctgctcttctggctggccttcctgtataggttctggagcgaccggagccacctgatcaggatcattttgtggggtaactaattgcgcccgcagctgttcttctgtcggcggttgtgattgcgactgaatatctaactgcgcttcacgcgtcaccaccggcgcgttgggcgtatcattctgccagccataacggggtgtcgaagaccagttcagcaaggttatcttcacttccccgcttaacgccgtaccggtgacgaccagcccggcaccttttacggtaaatgcgcggtcaatcgcgaggcggaaactatgttggctggcgtgctcgcgttccggcaactgaagcagatgctcgcgcagggcatccattccccgaccttcggttgctgcggtgataaacagttttgcctggggatccttagagtcgtcttttgggggagataacatctccagccataattttctctccgacgcttcattcgccagcagcgcatcaccagtatcggaaagcactacatggccgttttccagcacgtagccgcgatccgccagctttagcgcctggttggcgttctgctcgacgagaaagatagtcatcccctgctcgcgcagctgctcgatggtgtcgaaaatttgctggatgataatcggcgcaagaccgagcgatggctcatcaagcagtagcaaacgcgggttgctcatcagcgcacgaccaatcgccagcatctgctgttcaccgccggacatggtgcccgcccgctgaatacggcgctcatgcagacgtggaaacagctcatacacccactttatgcgctcctggaactggtcgcgttcagcaaaaaaaccgcccatcgccaggttctcttccaccgtcatccgcgagaagacgcgacgcccttccgggacaatcgccaccgcttcgcgcatgattttcgctgtctgccagtcggtaatgtctttatcatcaaacacaattcgcccgctggtggcacgcggatcgccgcataacgtgccgagcaagggggttttccccgacccgttcgggccaataagcgtgacaatctcgccctgattgatatgcaggctcacctcatgcagcgcctggattttgccgtagtgggcgctgactttgtcaaaggacaacatgactttttccatcttatgcctcacctaaataggcac

SEQ ID NO: 29515 - DNA, 496 bp, Homo sapiens
  SIMILAR (496)..(263): 831254mologous to Rattus norvegicus alpha-soluble NSF attachment protein,accession number X89968,Smith-Waterman Score= 301.
ttttttcatgcaaaagtgttgttttttattttctttcttgggccagctgcagcttccaaccaagaaaacctcaaagcattagggaaggagcaggtgtggggctggggtggggagaatcccctaagctccagggcccagggtctaacctgagaggtcggggctgcaggaagctggtctcagcggactacatgtgctttagagcttggctctctctgagcagatgggacaggaagacgggcactggggggctgggtggggcttagcgcaggtcctcctcatcgccctggatggtcttcttgatgcgcaaggcattgggtgggtgagccactggtccagccgggagatgggagtcgtattccttcaccgactcggtgtagctgtccacattctgctcctcgtgggcctctagcaattttttcatcaacttgcattcccgggaatcagagaaagctgggaacagctcctcatacttttggacagccagcttggcgttgag

SEQ ID NO: 29516 - DNA, 732 bp, Homo sapiens
  SIMILAR (488)..(423): 1001254mologous to Rattus norvegicus alpha-soluble NSF attachment protein,accession number X89968,Smith-Waterman Score= 113.
agagtgggctgggggacaaaagtgggagagagagagaaaccggcctcatgactcagctggtcaggagatagggggccagatgctgacccccaaatccccggcagcacccctagcaaataggtctgttatcaaaagattctgttacagctggtttttgggggtgaaggggcacctatggggggcttaaataaatggaacaaggggcaaaggatgtagcgagaacagagggtgacttgtccggccagccagcctgggcctctggcgcccctgcatgctgaccccccggtgccaccctgcccactgtggcccgcgggactccccagatgggaaaggagggaagctctccagcaaagtctctggccccgcctctctgtgaacagatgggacaggaagacgggcactggggggctgggtggggcttagcgcaggtcctcctcatcgccctggatggtcttcttgatgcgcagcagcatggtggtgagccactgggtccagccgggagatggagtcgtattccttcaccgactcggtgtagctgtccacattctgctcctcgtgggcctctagcaattttttcatcaacttgcattcccgggaatcagagaaagctgggaacagctcctcatacttttggacagccagcttggcgttgagcatgtcgatgcagaagtggcagagggccgccttgaagaagtagtctttggcgctgtactgaggagggggctgtccatg

SEQ ID NO: 29517 - DNA, 4437 bp, Homo sapiens
  SIMILAR (425)..(1204): 931254mologous to Escherichia coli L-fuculose isomerase,accession number U29581,Smith-Waterman Score=1239.
atgtcgcgtatccgctgtttttctgcgcgagccatcagataccaggcgataaatccgacaattccgaccgcgccgaggatcaatgttgccagggcgttgatttccggattcacccccatccgcacgctggaaaagaccagcatcggtaacgtggtggctcccggcccggaaacaaagctggcgatcaccagatcatcaagcgacaaagtaaaagccagtaaccagccagaaatgatcgcgggcatgatcatcggtagcgtaatgacgaaaaacactttcagcggcgtcgcaccgagatccatcgctgcttcttctatcgagcgatccagttcccgcaatcttgaagaaataacgaccgccacataagccgtacaaaaacatcgttccaacgccgtttaagaacctatacaaaataacaggacgacacgctaacaaagtccaccgcagccgatcttcattaggtcatgacgttcacgatgccgatgacacatcgattcctgccgatgttgaagaaaaactgctgcgctttgcccgcgccggtttggccgtcgccagcatgaaaggtaaaagctatctgtcgctgggcggcgtttcgatgggtatcgccggttccattgttgatcacaacttctttgaatcctggctgggaatgaaagtccaggcggtggatatgaccgaactgcgtcgccgtatcgatcagaagatttacgacgaaagccgaattggaaatgggcactgggcctgggctgataaaaacttccgctatggcgaagatgaaaataacaaacagtatcaacgtaatgccgagcaaagccgcgcagttctgcgcgaaagtttactgatggcgatgtgtatccgcgacatgatgcaaggcaacagcaaactggccgatattggtcgcgtggaagaatcacttggctacaacgccatcgctgcgggcttccaggggcaacgtcactggaccgatcaatatcccaatggtgacaccgccgaagcgatcctcaacagttcatttgactggaatggcgtgcgcgaaccctttgtcgtggcgaccgaaaacgacagtcttaacggcgtggcaatgctaatgggtcaccagctcaccggcaccgctcaggtatttgccgatgtgcgtacctactggtcaccagaagcaattgagcgtgtaacggggcataaactggatggactggcagaacacggcaatgctgcgatcccaaatttcctggcagatgcgccgagtcgttccacgctcaaactggaagaggcatttcatgtgtttattcctgcggatgagtgggatgaacgcctggcgaacgggatgtgggcggtggatttaggcgcttgccctggcggctggacctaccaactggtgaagcgcaacatgtgggtttattccgtcgacaacggcccgatggcgcaaagtctgatggataccggacaggtgacgtggctgcgggaagacggtttcaaattccgtccgacgcgcagcaatatctcctggatggtatgcgatatggttgaaaaaccggcgaaagttgcggcattgatggcgcagtggctggttaatggctggtgccgtgaaaccattttcaacctcaaactgccgatgaaaaaacgctacgaagaagtgtcacacaatctggcgtatattcaggcacagcttgatgaacatggcataaatgctcagattcaggcgcggcagttgtatcacgatcgcgaagaagtgacggtgcacgtccgccgcatctgggctgcgagcacaagacaaaagagacaaagcacacgaagagatgataacacgataacacaagaggagacagaaaagagaagaacagaagagaaagaagaacacggaaaagcacgaatcacctggaaggtttaccggggcagcgaaattgcccgcatgggcgtggtgcgcaccttccagcatgtgcgtctgttccgtgaaatgacggtaattgaaaacctgctggtggcgcagcatcagcaactgaaaaccggactgttctctggcctgttgaatacgccatccttccgtcgcgcccagagcgaagcgctcgaccgcgccgcgacatggcttgagcgcattggtttactggaacacgccaaccgtcaggcgagtaacctggcctatggtgaccagcgccgtcttgagattgcccggctgcatggtgacgcagccggagattttaatgctcgacgaacctgcggcaggcataagatggaaaaagtcatgttgtcctttgacaaagtcagcgcccactacggcaaaatccaggcgctgcatgaagtgagcctgccttatccatcagggcgagattgtatgctgattggttacgaactcgaattcgtacctggtatagctgttcctgggggaattgtaacaggtccattccccgtactagagcggaacctaagtgtaccggaggctaagatgggaacccgtattggtgggaaggcgttcaggaacccgtggccggataagaggacccggacaacaagccagtgccagcaggcccaggtggcagctgcagatctcactgctcactgcggagcagcagcctttgccgcctcagcccacagggtgccagccccaataacaggggttccccagttgtgcaacagccccccgttgtcaaccacgcggcaaccggccaccaaggccggcgatagtttggacgcgcggagcagaaatcgtccatcgtgcacccgctgttcgccgggcgtcacgtcagccaattgcactggggcggcggaacgccgacgtatctgaataaagcgcaaatcagccgcctgatgaagctgctgcgcgaaaacttccagttcaatgccgatgcggagatttcgatcgaagtcgatccgcgggaaatcgaactggatgtactcgatcatttacgcgccgaaggctttaatcgcctgagcatgggcgtgcaggacttcaacaaagaagtgcaacgtctggttaaccgcgagcaggatgaagagttcatctttgcactgcttaaccatgcgcgtgagattggttttacctccaccaacatcgacctgatttacggcctgccgaaacagacgccggagagtttcgcctttaccctgaaacgtgtggcggagctgaaccccgatcgtctgagtgtctttaactacgcgcatctgccgaccatttttgctgctcagcgcaaaatcaaagatgctgacctgccgagtccgcagcaaaaactcgatatcctgcaggaaaccatcgccttcctgacgcaatcgggctatcagtttatcggtatggatcactttgcccgtccggatgacgagctggcggtggccagcgtgaaggcgtgctgcatcgtaacttccagggctacaacactcagggcgataccgatctggacgcgggactgttctcgtgggggctatatgtgggcgacgaccgggattggctataacgttgataaagttaaagcggtgctgggcgaaaacgcgcccgtcgatagctgggacttgatcctcaaacctgaaaatctggaaaaactgaaaagctgcggtgtctctttcctggatgcgccagaagaagtttttgctaccgtgttgaattatctcggcaaagatcccaacagcactaaagcggatgattacaccggaccggcaacagatctgctgttaaagctgcgcccgaacattcgttatttccattcatctcaatacattaacgacctggcaaacggcgatatttgcgtcgctatcggctgggcaggtgatgtctggcaggcgtcaaaccgcgcgaaggaagcgaagaatggcgtgaatgtctcgttctcgattccaaaagaaggggcgatggcgttctttgatgtattcgccatgcctgcggatgccaaaaacaaagacgaagcctatcagttcctgaattacctgctgcgcccggatgtagtagcgcatatttccgaccatgtgttctatgccaacgccaataaagcagccacgccgctggtgagtgcggaagtccgtgagaacccaggtatttatccgcctgcggatgttcgtgcgaagctgttcactctgaaagtgcaggatccgaaaatcgaccgtgtgcgcacccgcgcgtggaccaaagcgaaaacccgtaaggcgctgacgccgctattagaaatccgcaacctgaccaaatcctacgatggtcaacatgcggtggatgatgtcagcctgaccatctacaaaggtgaaatcttcgcgctgctgggcgcatccggctgtggcaagtccacgctgctgcgtatgctggcaggtttcgaacaaccttctgccggacagataatgcttgatggcgtcgacttgtcacgggtgaaggaatacgactccatctcccggctggaccagtggctcaccaccatgctgctgcgcatcaagaagaccatccagggcgatgaggaggacctgcgctaa

SEQ ID NO: 29518 - DNA, 1293 bp, Homo sapiens
  SIMILAR (1226)..(750): 1001254mologous to Homo sapiens alpha SNAP,accession number U39412,Smith-Waterman Score=815.
gggttttttttttttttttttgcaaaagtgttgttttttattttctttcttgggccagctgcagcttccaaccaagaaaacctcaaagcattagggaaggagcaggtgtggggctggggtggggagaatccctcaagctccagggcccagggtctaacctgagaggtcggggctgcaggaagctgggggaggctcccggggctgggggaagaggagcctgcccccagcagaaacagcaggtctcagcggctacatgtgctttagagcttggctctctctgagcagatgggacagcgaagacgggcactggggggctgggtggggcttagcgcaggtcctcctcatcgccctgggatggtcttcttgatgcgcaagcaatgggtggttgagccactggttccagccggggagattgaagtcgtattcccttcaccgactcggtgtagctggtccacattctgctccccgtggggcctttagcaatttttttcataaaccttgcattcccgggaatcagagaaagctgggaacagctcctcatacttttggaaaagccagttgggcttgaagcatgtccatgcaaaagtggcaaagggcggccttgaaagaagtaatctttggcgctgtacttgaggaggggggtgtccatggcattggtccccacctgttcgtagatgtcaatggccttctgatactgctccagcagcgcagcgtaaccagccaccttcagcagacacttgttggctgaggctgttggactcctcgcctttgtagtagtctgcagactgctcgtagtgggcaatggccttctcgatgtccaccaactctgtctcatagatctcagcaatggagatgtggtgcttggccgcaatcgtgaatcggcccatgtctgtgtagatctcgattgctcgcatcaaacagttaatggcctcttgggggtcggctttcttgaatgcgttgccagcgtccacaaagcaggtggctgcgtcgtgcttgctctggagctgcaggtgcagctgtgcagcctggcagaacgcgtttccagcagcactccagtttttggccattttgaacatgtttgctgctctggcgtagatttcgcatgcttcctctattttggatgagcctccaaagaggccagagaagaaggactgcgagttcttcactttgcgctccgcctcggccaacagcgccatcgcctccgcttccttcccggaattgtccatggcggccacaaagggactcagcaaagcgcctgaccctgaccctgggaagactcagccgccgggccgc

SEQ ID NO: 29519 - DNA, 756 bp, Homo sapiens
  SIMILAR (1)..(735): 881254mologous to Escherichia coli K12 putative aldolase,accession number AE000464,Smith-Waterman Score=1126.
atgctggcgctcgatcagcgcgaagccatgcgcatgatctttcccgccggctggggcacccgctccggccctctcgccttatgcctccggcgaattctggtagatcaacaattctgctaccgccaggtggttgagcaaaacgcgattgccaaaagttgcgccatgattgtcgccgccgatgagttcattcctggcaacggtattccggtcgatagcgtggttattgaccgcaaaatcaatccgctacagatcaaacaagacggtggcaaagccttaaaactgctggtgctgtggcgtagtgatgaagatgcgcagcaacgtctggatatggtgaaagagttcaacgaactgtgccactcacacggtctggtaagcatcattgagccagtcgtccgcccaccgcgtcgtggcgataaattcgatcgcgaacaagcgatcatcgatgccgccaaagagctgggcgacagtggcgctgacctctacaaagttgaaatgccgctttatggcaaaggtccgcaacaagagcttctctgtgcttcacaacgtctgaatgaccatatcaatatgccatgggtgatcctctcttccggtgtcgacgaaaaactgttcccgcgtgccgtacgcgtggcaatgacggcgggcgcatcgggattcctggcaggccgtgcagtctgggcatcggtcgtcggtttaccagacaacgagctgatgctgcgtgacgtttgcgcaccgaaatcgggagaaccaatcctatag

SEQ ID NO: 29520 - DNA, 837 bp, Homo sapiens
  SIMILAR (1)..(570): 991254mologous to Escherichia coli K12 putative 2-component sensor protein,accession number AE000301,Smith-Waterman Score=931.
atgaccgcgttaagttgcatgatctcgaccatcgttgaaggattactcggtggcctggtacacagcatcctgatccgccgcgggcgcactgataaagtctttaaccccattaccgccggtgccgtcacgttcgtcgctgaaatggtgcaaatgctgatcatccttgcgatcgcccgaccttatgaagatgcggtgcgtctggtgagtaatattgctgcgccaatgatggtcaccaataccgtcggcgcggcgctgtttatgcgtatattgctcgataaacgcgcgatgtttgaaaaatacacttcggctttttctgccactgcgctgaaagtggcagcctcgacggaaggcattttgcgccaggggtttaacgaagtgaacagcatgaaagtggctcaggtgctgtatcaggaactggatattggtgcagtcgcgattaccgatcgagagaaattgatggcctttaccggaattggtgacgaccaccatttacccggcaaaccgatttcttcaacttatactttaaaagcgattgaaaccggtgaagtggtctacgctgatggcaacgaacgcacaccaggtggcgctcatgcccgaaacgtcgccagcggaacagacggtgatgaaaaccgtaataatgcatcagacgaccagcaagcaaaacgatgccgcaaatatcaggtagatcaacagcaaaatattgtatattacaaaatagctagaaaagaggcttatgaatgttgtaagcgtgattttagcgcagcgggcggcagctcgtcggtaaagagcgcagtgacctgtgccacgttaccaatttcaaccgccgccgaagcatga

SEQ ID NO: 29521 - DNA, 2106 bp, Homo sapiens
  SIMILAR (874)..(1392): 981254mologous to Escherichia coli K12 putative heat shock protein,accession number AE000297,Smith-Waterman Score=897.
atggcattcgctacacttttaggaatgttgcaagattacgctaaccgattaattgcacgctatagcaacccggcgttacgtcatcgaacctggcagattgcgatggatggtagccagaaattgccacagcggatgttggattctgttcgctggcatctggcgcatgacagcaagttcgatctgctggcgctgggcgtcgcgggttggatgcgttatgtcggtggtgttgatgaacagggaaatccgatagaaatcagtgacccactgttacctgttattcagaaggctgtacaaagtagtgccgaagggaaagcgcgcgtccagtcattgctggcgattaaggcgatctttggtgatgatttgccagacaatagtttgtttactgcaagagtgacggaaacttcatgccgagacgaatcacgtccagtggtgccactttctcttcacaaccttcaacaactacggtttttccgcggcggatttgctcagcggtcagaccttcagtatcaatcgacaggatcttgcagtgtgaccggtgccgctaaccataacacggctgcacatgttgatttccgtaacggtacgatccagtcagtctcctccaaacagaaagtcaccggtttggacttcattcctgggctccaccccatcctgaccttatccaagatggaccagacactggcagtctaccaacaggtcctcaccagtatgccttccagaaacgtgatccaaatatccaacgacctggagaacctccgggatcttcttcactcatacggcggctgccagttcagggtatacatcgcatctccttattcatccgctttcagcataaacgttattcagacgctgcgcttaactttcatattccggttgtcgcgacggcaacatttcgctaaagtcacgccccttcttcaccggcatggggattatttcgtgtttattggttttgattacggtacagcaaactgttcagtggcggtcatgcgtgacggtaaaccgcatttgctaaaaatggaaaacgacagcacgctgctgccttcaatgctttgcgcgccaacgcgtgaagcggtaagcgaatggctgtaccgccatcatgatgttccggcagacgacgatgaaacgcaggcgctgttacgtcgggcgattcgttataaccgcgaagaagatatcgatgttacggcgaaaagcgtgcagttcggtctttcctcactggcacagtacattgatgatccagaagaagtgtggtttgtgaaatcaccaaaatcgttcctcggtgccagcggcttaaaaccgcagcaggtagcgctgtttgaggatctggtctgcgcaatgatgttgcacattcgccagcaggcgcaggcacagctgccagaagcgattacatcagcgcccaactacattccggggctgattgcggtggtcgggtgtgatggcaccggtaaatccacactgaccaccgacctggtgaaatcgctgcaacaacactggcaaaccgagcggcgctatctggggctgctctccggcgaagacggcgacaaaatcaaacgattgccgttggttggcgtctggctggaacggctcatgcctgtaatatcatctctatccgaggctatggcagtgatgaagatgcgcaaacgtctggatatggtgaaagagttcaacgaactgtgccactcacacggtcttgtaagcatcattgagccagtcgtccgcccaccgcgtcgtggcgataaattcgatcgcgaacaagcgatcatcgatgccgccaaagagctgggcgacagtggcgctgacctctacaaagttgaaatgccgctttatggcaaaggtccgcaacaagagcttctctgtgcttcacaacgtctgaatgaccatatcaatatgccatgggtgatcctctcttccggtgtcgacgaaaaactgttcccgcgtgccgtacgcgtggcaatgacggcgggcgcatcgggattcctggcaggccgtgcagtctgggcatcggtcgtcggtttaccagacaacgagctgatgctgcgtgacgtttgcgcaccgaaattacaacaacttggcgatatcgtcgacgaaatgatggctaaacgccgctaa

SEQ ID NO: 29522 - DNA, 1101 bp, Homo sapiens
  SIMILAR (438)..(25): 891254mologous to Escherichia coli K12 tRNA processing exoribonuclease BN,accession number AE000464,Smith-Waterman Score= 619.
ttatgtgtcacctgtaatgagtgccgttaggataatggcacctaatctattgacggaatcgatatcgatagcccattgcttggatagcaaataggaactgatcgccagactggcccctgccagcagcggccccagcgttaaaatcatccagtacacggcgaacgagtaaatttttggtcgcgctcgtttactgcgccagatggtattcaacgcgctatcgatggagtacatcaacaataacgcggtgacgatcagcccgcacgccccaacggcggtcatcttgttggaattggcaacaaattgttcgatataccgctgaataacatcgccagtagcaggcagaaagttggcaaaaataaagtgacgtaactgaatgctgacgtcggaaaacatgggaaaagcggcgaaaagcgcaaaaacaacggcaaccagcggcacgcgccacgctttatagcggttaatcagaccattggtcgagctatcgtggctgctgatttctttatcatctttcagctctggcagaatacggttcgccagctgtttacccagttccacgccccactggtcgaaggtgaagatgttcaggatcacgccctgagtaaagattttgtgctcatacagcgcaatcaacgcacccaggctgaacggagtgatttcacgcagcaggatggagttggtcgggccgttaccttcgaatactttgaacggcaccacgtagtcaagcgttgccggatctttacccttgacacgatattcctgctcaaccacttcgcggaatttaccaaacgccagcgcttccggctggtttttagcgatatccaggttgatgtttttcagggcatggaatttgccgtagtagaagttcaaattacgaaccccggcccaggccaattgctgccattccgcaaacgggctcatcgcaaacttaaagatcgtcaccggcaggttggcgatcggctgcatcatgtccgtgctccagaactggttggagagcgcggtaaacagcagcggcgcggtttcaccagcaatacgggcaatcgccagcaggataccggtcataatcccggacaccgacgctcttagcgtaatcgcagagatcat

SEQ ID NO: 29523 - DNA, 2061 bp, Homo sapiens; identical to SEQ ID NO: 8840
  SIMILAR (2037)..(1687): 961254mologous to Escherichia coli Hypothetical protein 126: PIR:Q3ECTC,accession number D10483,Smith-Waterman Score=581.

SEQ ID NO: 29524 - DNA, 2388 bp, Homo sapiens; identical to SEQ ID NO: 17771
  SIMILAR (1)..(1056): 991254mologous to Escherichia coli PUTATIVE MALATE OXIDOREDUCTASE (NAD) (EC 1.1.1.38) (MALIC ENZYME),accession number D90874,Smith-Waterman Score=1767.

SEQ ID NO: 29525 - DNA, 3131 bp, Homo sapiens
  SIMILAR (1229)..(1176): 631254mologous to Plasmid R100 transposase of Tn10,accession number AP000342,Smith-Waterman Score=51.
ttagacatggcgttgagctagagaaacgctgacacgcgtaccgtgcagacaggaaatgtgaaatgccccacccagcgccgtaacgcgctcgcgcattccggtgagcccaaaaccttgttgcccggaacccggcggcaaaccgctgccatcgtcttcaataaccagcatcaaccgttcatcctgctgccagccttgcagggtgaccgcgctggcatcagcatgtttcacaatgttgttcagcccttcctggcagacacgaaacagcgtcacgcgctggttttcgcttaacgctgattcatcgattcgccattcgagatggctgacaataccgcgcccttccagctccatttcccgcatcagtgagcggatggcctgctccagggtgagatcatccaactggcgcggacgtaaccgacccaacaaacggcgcaccgcgtcgtaaacgcccagcgatagttgttcgatgagctgcccgctctgcttcacgctggcgttatctgccgccagccgctgaacaatgcccgcctgagtacgaatagcagtgatggtctgaccgatatcatcatgcagctcacgcgccacatcacggcgcacgctctcttcggtttccagcaaccgttcagccagatgctgattgcgcgccagttccttttgcagcgactggttaagttcacgcaaccgcctgtcagactttgcaccagcagcgagagcaataaatccaccggatgatcgcgccaggtttgactggcgatcagcgcgatggcgttcccgtgctaactcatctcgctgttggtaattttcccccgtaagttgatttcctccccggaaaagaagtccccaaagggtgaacccctccttcccccggattttgaagcctggccaccctcttcccgttgatacccgcaaggatcccgcatcacaccctgtgcgaacagggaccgggacggacatagacacctcaatccgtgggaaccgtacaaacgcgggattatgatcggctttgattccagcatggattacgcatggatatatcgttcgatactggaaagcgtggcgctgacgtttgcgaagcatgtgatcattactggcggcggttcgaacagcgatctgtttatgccagatttttgccgacgtgttcaaccttccggcacgagaacgccataacggttgtgcaagccatgtgagaaagattgggataagcgggtccaacccacgagtgagtcttcccgtggttatggtgtagccagaatgccgcaaacttgccatgcctaagcgaactgttgagagtacgtttcgatttctgactgtgttagcctggaagtgcttgtcccaaccttgtttctgagcatgaacgcccgcaagccaacatgttagttgaagcatcagggcgattagcagcatgatatcaaaacgctctgagctgctcgttcggctatggcgtaggcctagtccgtaggcaggacttttcaagtctcggaaggtttcttcaatctgcattcgcttcgaatagatattaacaagttgtttgggtgttcgaatttcaacaggtaagttagttgctagaatccatggctcctttgccgacgctgagtagattttaggtgacgggtggtgacaatgagtccgtgtcgagcgctgattttttcggcctttagagcgagatttatacaatagaatttggcatgagattggattgcttttagtcagcctcttatagcctaaagtctttgagtgactagatgacatatcatgtaagttgctgataggtttccagttttccgctcctaggtctgcatattgtacttttcctcttactcgacttaaccagtaccaacccagcttctcaacggatttataccatggcactttaaagccagcatcactgacaatgagcggtgtggtgttactcggtagaatgctcgcaaggtcggctagaaattggtcatgagctttaatcgcgtcgcggttaggtacgcggatggtaggaacaatgctgtacagcaaccagaaggagatccacgacaacagcaacggaaaaatacgcagcacgttgtcgatgacagtattgagatcgctcgcccagcgcagggagagcaaataggaactgatcgccagactggcccctgccagcagcggccccagcgttaaaatcatccagtacacggcgaacgagtaaatttttggtcgcgctcgtttactgcgccagatggtattcaacgcgctatcgatggagtacatcaacaataacgcggtgacgatcagcccgcacgccccaacggcggtcatcttgttggaattggcaacaaattgttcgatataccgctgaataacatcgccagtagcaggcagaaagttggcaaaaataaagtgacgtaactgaatgctgacgtcggaaaacatgggaaaagcggcgaaaagcgcaaaaacaacggcaaccagcggcactaatgagagcaacgacacataggcaaggttacctgccagggttgtcatgttgtcctcatcaatgcgttgccagagtagttttagccaggcccatagtggacgggtacggtgcctggctttgtcctgaatggtttttagcataacaccttcgcgaaatagtccgggatggtggttttatctttcaccagaatactggtaatgcccagctgattggctccttctatattgctttgtccccgcggaatacctccagccaacctggccaagccctggcccaggtgaaaaagggcgctccaagatcgggccattcccttgcccggcacgcgagcgcataaccactgttccgtaacagcatgtttgtctttttgcccagcgaagctgacttcacgggcatgaattttcaggaatttcgccagtgcatccgccacaaaacgggtattgcagccgtttttgaggattctaaccagaatatgctcaccttcaccatcaggctcaaagccgggatcgcagtgccatgtttggattgatgttctcacggccatcaaggtcacataccagaagaaggctgtttccattcctattgatttcagcgacaacgctacgtactccgccgaaccaccaaatatagcattagcgaccgcatatgacagaccaacgcctaatgcgcgaacctgtgccgggaacat

SEQ ID NO: 29526 - DNA, 2358 bp, Homo sapiens
  SIMILAR (445)..(1056): 931254mologous to Escherichia coli coproporphyrinogen oxidase,accession number X75413,Smith-Waterman Score=1060.
atgttcatgattttcaaagaagatgaacttatcggcgttatctcgtttaatcgtattgaaccactgaataaaaccgctgaaataggctactggctggacgaatctcatcagggacaggggatcatttctcaggcgctgcaggcattgattcatcattacgcccagtctggtgaacttagacgcttcgtgatcaaatgtcgggtggacaatccgcaaagcaaccaggtcgctttgcgcaatggttttatccttgaaggttgcctgaaacaggctgagttcctgaatgatgcctatgatgatgtgaacttatacgcgcgaatgccattttctggtttccatccttcccctgagaagcccctgtgtccctctgcacctgagcaccacacccttacgcctagcaatggacctgactggcttgagcggattcccaattcccttgagccaatcagcatagtgttggcccagcaactggtattgggtaaggttggccacgcgaatgtgcggttttttattgccgaaaaaccgggtgccgatcccgtctggtggtttggcggtggcttcgacttaaccccattctatggttttgaagaagatgctattcattggcatcgcaccgcccgtgacctgtgcatgccatttggcgaagacgtttatccccgttacaaaaagtggtgcgacgaatacttctacctcaaacatcgcaacgaacagcgcggtattggcgggctgttctttgatgacctgaacacgccagatttcgaccgctgttttgcctttatgcaggcggtaggcaaaggctacaccgacgcttatttaccaattgtcgagcgacggaaagcgatggcctacggcgagcgcgagcgcaatttccagttatatcgtcgcggtcgttatgtcgagttcaatctggtctgggatcgcggcacgctgtttggcctgcaaactggcgggcgcaccgagtctatcctgatgtcaatgccgccactggtacgctgggaatatgattatcagccaaaagatggcagcccagaagcggcgttaagtgagtttattaagagaggaccacgtctctcgggtatacctttttctgacattccgatcgtgatggtgacggcaaaaatcgaagagaagggcagcactgcatgcagctgcatgcattatgtcgactctagaggatcccagcagatagatgacaactggccagatgtaactgaaatcaggaacagtgcatataacgagtttgtgggcactgggggtgttgccgtggtttccgtcggccacagggatatcggcgtgctgcgcagacgtgataaggcgctcgtcggtgacgacccgtccgcccgacaaatgggttcgccaatggcgagcaatttattgcagcaagggcatcaacttcgcgtctttgatgtgaacgccgaagctgtgcggcatctggtagacaaaggtgcgactcccgccgccaacccggcgcaggccgctaaagatgccgaatttatcattaccatgttgccgaatggcgatctggtgcgcaacgtgttgttcggtgaaaacggcgtttgcgaaggcttatctaccgatgcgctggtcattgatatgtccaccatccatccgctgcaaaccgataaattgattgccgatatgcaagccaaaggcttcagcatgatggatgttccggtaggccgtacttctgcaaatgccattaccggtactctgttactgctggctggcggcaccgctgaacaagttgaacgtgccacaccgatcctgatggcgatgggcagtgagttgatcaacgctggcggtccgggcatggggatccgcgttaagctcatcaacaactacatgagcatcgcgctcaatgcgctttcggcagaagccgccgttttgtgcgaagccctgaatcttcccttcgatgttgccgtcaaagtgatgagcggtaccgccgccgacagtgtccggcatttggtagtcaaaagcgcgactcccgcagccagccaggagcagaccgctaaagatgctgacttgatctatgccatgtccccgaatgtcgatctagtgcgcaccgtgttgttcggtgaaatcggcgtttgcaaaggcttgtcgcgtaatccgttgttctttgatatgtccaccatccttccgatgccaaccgataaattgattgcctatatgctagccaaaggtttcagctcgatgcatgttccgctagcccgtatttttgcgaatgccaacattggccgtgtgcaggtgctggctgacgccatcgttgtacaagttgagcatgccaatccgatcatcctgggagtgcaatgtgagtatatcaacgttggcgctcagcgctttaccaaccccgtatag

SEQ ID NO: 29527 - DNA, 2976 bp, Homo sapiens
  SIMILAR (2104)..(2973): 991254mologous to Escherichia coli K12 putative aldolase,accession number AE000464,Smith-Waterman Score=1472.
  misc_feature (1)...(2976): n = a,t,c or g
gggccttcagcggcgtccttgtggctgattttcgtgctgattatcggtaccaagcgttggggcgattaagagcgatggcgcggtgatggagtttgatgtaaacgaagctaacgtggtaaaaccgaaaatggcgcacgcgagaaatattgtggctggtcgccggtcacactaagtatcatccttgggcggcggttgaaattggtaacgtggcccaggtcattgcgctctttaccgacgagctgccggcccgctgcgctaaaatcacgcttacaagacagccaaattgaaatcattcttccccaggaagacgcgtagatttttgtgaccgttaacctggcttcataccttgccacatagccaaacccatcctttcccgctacagttaatttcttgtggcgcgaaaggaggcaaaaatgctctatatctttgatttaggtaatgtgattgtcgatatcgactttaaccgtgtgctgggagcctggagcgatttaacgcgtattccgctggcatcgcttaagaagagttttcatatgggggaggcgtttcatcagcatgagcgtggggaaattagcgacgaagcgttcgcagaggcgctgtgtcatgagatggctctaccgttaagctacgagcaagttctctcacgggctggcagccgtgtgtttgtcgcgctgcgcccgaaagtgatcgccatcatgcataacctgcgtgagcaggggcatcgcgtggtggtgctttccaataccaaccgcctgcataccaccttctggccggaagaatacccggaaattcgtgatgctgctgaccatatctatctgtcgcaagatctggggatgcgcaaacctgaagcacgaatttaccagcatgttttgcaggcggaaggtttttcacccagcgatacggtctttttcgacgataacgccgataatatagaagggagcaaatcagttgggcattaccagtatcttggtgaaagataaaaccaccatcccggactatttcgcgaaggacaaagccaggcaccgtacccgtccactatgggcctggctaaaactactctggcaacgcattgatgaggacaacatgacaaccctggcaggtaaccttgcctatgtgtcgttgctctcattagtgccgctggttgccgttgtttttgcgcttttcgccgcttttcccatgttttccgacgtcagcattcagttacgtcactttatttttgccaactttctgcctgctactggcgatgttattcagcggtatatcgaacaatttgttgccaattccaacaagatgaccgccgtggggccttttcttgatgtgancgcagaagctgtgcggcatctggtagacaaaggtgcgactcccgccgccaaccgcgcgcaggccgctaaagatgccgatgttatcattaccatgttgcagaatggcgatctggtgcgcaacgtgttgttcggtgacagcggcgtttgcgaaggcttatctaccgatgcgctggtcattgatatgtccaccatccatccgctgcaaaccgataaattgattgccgatatgcaagccaaaggcttcagcatgatggatgttccggtaggccgtacttctgcaaatgccattaccggtactctgttactgctggctggcggcaccgctgaacaagttgaacgtgccacaccgatcctgatggcgatgggcagtgagttgatcaacgctggcggtccgggcatggggatccgcgttaagctcatcaacaactacatgagcatcgcgctcaatgcgctttcggcagaagccgccgttttgtgcgaagccctgaatcttcccttcgatgttgccgtcaaagtgatgagcggtaccgccgccggtaaaggtcacttcaccacttcctggccaaacaaagtcctcagcggagatctttctcccgccttcatgatcgatcttgcccataaggatcttggcatcgcccttgatgtcgccaaccagctgcatgtgccaatgccgctgggggccgcctcacgggaggtttatagccaggcgcgcgcagcgggtcgcggtcgccaggactggtccgccattctggaacaggtccgtgtcagtgccgggatgactgccaaatacaccatcaacgacattacgcgcgcatcgggcggttttgccatgctggcggtcgatcagcgcgaagccatgcgcatgatgtttgccgcggctggggcacccgctccggtagccgatagcgttttaactgatttcaaagttaacgctgcaaaggccctctcgccttatgcctcggcgattctggtagatcaacaattctgctaccgccaggtggttgagcaaaacgcgattgccaaaagttgcgccatgattgtcgccgccgatgagttcattcctggcaacggtattccggtcgatagcgtggttattgaccgcaaaatcaatccgctacagatcaaacaagacggtggcaaacccttaaaactgctggtgctgtggcgtagtgatgaagatgcgcagcaacgtctggatatggtgaaagagttcaacgaactgtgccactcacacggtctggtaagcatcattgagccagtcgtccgcccaccgcgtcgtggcgataaattcgatcgcgaacaagcgatcatcgatgccgccaaagagctgggcgacagtggcgctgacctctacaaagttgaaatgccgctttatggcaaaggtccgcaacaagagcttctctgtgcttcacaacgtctgaatgaccatatcaatatgccatgggtgatcctctcttccggtgtcgacgaaaaactgttcccgcgtgccgtacgcgtggcaatgacggcgggcgcatcgggattcctggcaggccgtgcagtctgggcatcggtcgtcggtttaccagacaacgagctgatgctgcgtgacgtttgcgcaccgaaattacaacaacttggcgatatcgtcgacgaaatgatggctaaacgccgctaa

SEQ ID NO: 29528 - DNA, 2662 bp, Homo sapiens
  SIMILAR (1348)..(2217): 1001254mologous to Escherichia coli K12 putative aldolase,accession number AE000464,Smith-Waterman Score=1477.
atggtggaagtcatcgagccgttttaccccaaggctggtaatggccggcgaccttatccgctggaaaccatgctacgcattcactgcatgcagcattggtacaacctgagcgatggcgcgatggaagatgctctgtacgaaatcgcctccatgcgtctgtttgcccggttatccctggatagcgccttgccggaccgcaccaccatcatgaatttccgccacctgctggagcagcatcaactggcccgccaattgttcaagaccatcaatcgctggctggccgaagcaggcgtcatgatgactcaaggcaccttggtcgatgccaccatcattgaggcacccagctcgaccaagaacaaagagcagcaacgcgatccggagatgcatcagaccaagaaaggcaatcagtggcactttggcatgaaggcccacattggtgtcgatgccaagagtggcctgacccacagcctggtcaccaccgcggccaacgagcatgacctcaatcagctgggtaatctgctgcatggagaggagcaatttgtctcagccgatgccggctaccaaggggcgccacagcgcgaggagctggccgaggtggatgtggactggctgatcgccgagcgccccggcaaggtaagaaccttgaaacagcatccacgcaagaacaaaacggccatcaacatcgaatacatgaaagccagcatccgggccagggtggagcacccatttcgcatcatcaagcgacagttcggcttcgtgaaagccagatacaaggggttgctgaaaaacgataaccaactggcgatgttattcacgctggccaacctgtttcgggcggaccaaatgatacaccactcgcatctcgccataacgactgcgtttgcgaatgagcctgtgccccagaaagataaagccgtcattaacatgggggattttagtcttatccatgttcagcctgagtttcagactgccttcgagcacaccccgacactcctccctgatggcttccacctgtgctttggtgcctttgacgatgaggacaaaatcatcggcatagcggcagtacgccaccgcgggtttccactgccagttttctctgaccgccgtacttcggccccgttggatactgttattccagtaccaccgatcttttctggctttcccgctcaggtagcgctcatgcaggatcttggcatcgcccttgatgtcgccaaccagctgcatgtgccaatgccgctgggggccgcctcacgggaggtttatagccaggcgcgcgcagcgggtcgcggtcgccaggactggtccgccattctggaacaggtccgtgtcagtgccgggatgactgccaaatacaccatcaacgacattacgcgcgcatcgggcggttttgccatgctggcggtcgatcagcgcgaagccatgcgcatgatgtttgccgcggctggggcacccgctccggtagccgatagcgttttaactgatttcaaagttaacgctgcaaaggccctctcgccttatgcctcggcgattctggtagatcaacaattctgctaccgccaggtggttgagcaaaacgcgattgccaaaagttgcgccatgattgtcgccgccgatgagttcattcctggcaacggtattccggtcgatagcgtggttattgaccgcaaaatcaatccgctacagatcaaacaagacggtggcaaagccttaaaactgctggtgctgtggcgtagtgatgaagatgcgcagcaacgtctggatatggtgaaagagttcaacgaactgtgccactcacacggtctggtaagcatcattgagccagtcgtccgcccaccgcgtcgtggcgataaattcgatcgcgaacaagcgatcatcgatgccgccaaagagctgggcgacagtggcgctgacctctacaaagttgaaatgccgctttatggcaaaggtccgcaacaagagcttctctgtgcttcacaacgtctgaatgaccatatcaatatgccatgggtgatcctctcttccggtgtcgacgaaaaactgttcccgcgtgccgtacgcgtggcaatgacggcgggcgcatcgggattcctggcaggccgtgcagtctgggcatcggtcgtcggtttaccagacaacgagctgatgctgcgtgacgtttgcgcaccgaaattacaacaacttggcgatatcgtcgacgaaatgatggctaaacgccgctaagatgaggataaaaggaatgaaatggtttaacaccctaagccacaaccgttggctggaacaggaaaccgaccgcatctttgattttggtaaaaattccgtagtgccgactggttttggctggttaggcaataaagggcaaatcaaagaagagatgggcacccatctgtggatcaccgctccagctgactacggcggcccgcgcggctcactccccgcagttcgtcccgtgcgcgaccggagcctggagtttgcaaaacagagcgatgagcacattctggacttagtgcacgacttggcgagcaatgatgaatgcaagacaatctgcgcgcgacatatgactgcgtgtcgcccctggaagcgtgttaagtataaaatggataacaattacgaccacgatcaacataacatggtggatgatgaagagctggctgaaaacatctga

SEQ ID NO: 29529 - DNA, 432 bp, Homo sapiens
  SIMILAR (413)..(120): 331254mologous to Human herpesvirus 6 H87,accession number U92288,Smith-Waterman Score=105.
ggaggagtgcaaggcgctgctgacgggctcaacaagacgactgcgtgctaccaccacctggtgctgaccgtggtggctcggcggactcgcagaacctgcggcaggagctgcaaaagacgcccagaaggcgcaggagctggcggtgtccacctgcgcccggctgactgcttgctgcgcgaccggggcctggccgccgacgagcgcgccgagttcgagcgctctgggtggccttctcgggctgcctggacctgctggaagcggacatgcacgctcgctggagctgggcgccgcgttcccgctgcacgcgccgcggcggcgctggtgcgcacaggagcgcggggggggttgcgaccccaggaagccctggccgccatccttttcggcgccgtgctgctggcggctgtggccctgccgtgtgcgtggcgaagctga

SEQ ID NO: 29530 - DNA, 876 bp, Homo sapiens
  SIMILAR (369)..(202): 471254mologous to Escherichia coli fixC,accession number X71977,Smith-Waterman Score=98.
atggagttaccccatcagcaaggatcaccgttttcgcttcaatcacatcgccatcggttctacaccgacgactttgccatcgcgctgtacgaggttatcgacgcggtcccggtaattaactgcgcgcccgcttcttcggcctgctccatcagccagcatcaaatttactgcgcaaaacggagtaagaacgctgggatggcgaggaataatgtgttccagactgtgggcatagagacgcccgccgggacgttcttggcacctgcggaattgccacgctcgataactaacacttgccaccttcgcgggcgagcaccagtgcggcaaccgaaccggcaagccctgcccgacgatgatggcgtcaaagatatcttcggacataagagctccctgtcgcggcagggccaaaatgcagccctgccagagtggatcaacgcgctaaagtgcggtcagcgccggaaggatcttcacggcgtcgccaacaatgccgcctacactagcgacggaggacgcaaaattattgaggagttggcgttggacgcccacaacgcgttgattgataatcgtacgcgcgctagaggtattaccttttacaccactcacacaggaccctatctcggggacacacataagtccattggggctattaatcaaggggacatcacgatagccccgaaccaagggcgaacagacccccatccagtcaaattctttgcacagatatggtacctaccaaccatagtgctgggcgctattgagtattttgttctcgctttatctggcgacgctggttctcgctggcggattaaacgtcgattacgccgtacttcgcggcatactttgcttattctccttcgcctaaaggaactttatggataa

SEQ ID NO: 29531 - DNA, 3126 bp, Homo sapiens
  SIMILAR (2437)..(3111): 1001254mologous to Escherichia coli RhsB core protein with unique extension,accession number U00039,Smith-Waterman Score=1222.
atgcgcaactgcctcaaccagctgataacggaaccgagcgtcgcctccgcgatgtttgaataccgttttggtggcaatggcgaactttccggtcataatctcggaaacttgatgttaaaggcgctggatcaccttagcgtgcggcctctggaagccatcaatttaattcgtaatctgctgaaagtggatacgcatttgattccaatgtcagagcatcctgttgatctgatggcgattgacgatcaggggcatgaagtttacggcgaggtcaatatcgaccagttaactacgccgattcaagagttattgttaacgcctaatgtacccgcaacgcgtgaggcggttcacgctatcaatgaagcggatctcatcattattgggcctggcagtttttataccagcctgatgccaattctgctgctgaaggaaatcgcccaggcattacgccgcacgccagcgccgatggtttatatcggcaatctggggcgtgagttgagtttacctgcggctaatttgaagctggaaagcaagctggcaattatggagcagtatgttggtaaaaaggtcattgatgcggtcatcgtcgggccaaaagtggatgtctcggcggtgaaagagcggattgtgatccaggaggtactggaggccagcgatattccgtatcgtcatgaccgccagttgttacataacgcgctggaaaaggcgttacaggctttagtcttcttcgctatcctgttacgatgccgcgataaacagctcacgcagctgatgcaactggtcacgaatttgcgccgcgttcttcgaactccagattctgcgcgtgttgcatcatcaacccttccagctcatggattgttcgtgctgccgacgctgtatgtcttcccccggctaaatattccgtatgccctgccgcctgctattaagcggaatcggtggtcaccgcggacttacatcgttctatgccgggtaactgatccagaaaatggcgaaagtgggcgtgaaaacccgctgttcctgctcgatgagatcgacaaaatgtcttctgacatgcgtggcgatccggcctctgcactgcttgaagtgctggatccagagcagaacgtagcgttcagcgaccactacctggaagtggattacgatctcagcgacgtgatgtttgtcgcgacgtcgaactccatgaacattccggcaccgctgctggatcgtatggaagtgattcgcctctccggttataccgaagatgaaaaactgaacatcgccaaacgtcacctgctgccgaagcagattgaacgtaatgcactgaaaaaaggtgagctgaccgtcgacgatagcgccattatcggcattattcgttactacacccgtgaggcgggccggttaagcacgttactgctcgataagtcattaaaacatatcgaaattaacggcgataacctgcatgactatctcggtgttcagcgtttcgactatggtcgcgcggataacgaaaaccgtgtcgggtataaacgtgtgatggatcgttgtgcgctcgagctagatgtgtggcgtcgtgtccttgcttatgttgatctgaattattatcacgatccccattcgacggaaattgaagaggatgtcagcactatcagtgacgattcggtgaagctacggggtgaaataaaagtgggagtcacgggcaatatcagtcagcgagtgtccctgcgcggcagcgtggcgtggcagaaagggagtgatgattttgcccagacggcagggtttttgtcgatgacgatggctgaagaggctctggggacgagtttcaagaggttatgtgcgcattatagccggatgcgatgctggcgcatcttatccggcctacggggagccaggccgaataaaatcgtatgccggataaggcgtttacgccgcatccggcctattttaaggctgcgttttccccggcattcgcgggtcgtctttatattcggcggtggcaatccacgccgcgcaaaacagcgtcaaacgggcgaagaagtagaaaaatgccatcagccccagcacggaaccaaatgctgcgccagagggggatttcatcaacgatggcagggtgtaggtcatcacgattttaatcacttcaaaaccaatagcagccagaaatgttccgcgaatcagggcttttttgcgcggacggtggcgcggcaaccgccagaagatccagaagaaaagcagatagttggcgaagatggaaatcgccaggccaatcaatcgccacgtcggtttcagccactcaatgctgttcaggtgcagggcgctaataatcatttgctgcgccgaaccggcaaccgaggtgatcgaaagcgtcacaatcagcgcaatcaacaaaccaatcagcgaaataaatctcgcagatattttacccagacttgggatctcctcgtcttgtctcctcggcgtatgacggaagcactgctctggcagcatgagaccagacatgcgtacaacgcgcaggggctggcgaaccgctgtataccggacagcctgcccgccgtggaatggctgacctacggcagcggttacctggcaggcatgaaactcggcgacacaccgctggtggagtacacccgcgaccgcctgcaccgggaaacgctgcgcagcttcggccgttatgaactcaccaccgcttatacccctgccgggcagttacagagccagcacctgaacagcctgctgtctgaccgcgattacacctggaacgacaacggcgaactcatccgcatcagcagcccgcgccagacccggagttacagctacagcaccaccggcaggctgaccggcgttcacaccaccgcagcgaatctggatatccgcatcccgtatgccacagacccggcaggtaaccgcctgcccgacccggagctgcacccggacagcaccctcagcatgtggccggataaccgtatcgcccgtgacgcgcactatctttaccggtatgaccgtcacggcaggctgacagagaaaaccgacctcatcccggaaggggttatccgcacggatgatgagcggactcaccggtaccattacgacagtcagcaccggctggtgcactacacgcggacacaatatgaagagccgtctaggtcgaagtaa

SEQ ID NO: 29532 - DNA, 850 bp, Homo sapiens
  SIMILAR (241)..(699): 301254mologous to Leishmania major L8453.1,accession number AC008054,Smith-Waterman Score=81.
cggtagcgccgagcgagtcacggaccatgaagagcgttcgtgccgcgcggcccaaggccgggatgggggttagccacatcctgccgcgctgagggggaggctaacgggcgcgggcggccgggcccagccggagcccaccgcgatggcgagggaggagtgcaaggcgctgctggacgggctcaacaagacgactgcgtgctaccaccacctggtgctgaccgtcggtggctcggcggactcgcagaacctgcggcaggagctgcaaaagacgcgccagaaggcgcaggagctggcggtgtccacctgcgcccggctgactgctgtgctgcgcgaccggggcctggccgccgacgagcgcgccgagttcgagcggctctgggtggccttctcgggctgcctggacctgctggaagcggacatgcgacgcgcgctggagctgggcgccgcgttcccgctgcacgcgccgcggcggccgctggtgcgcacaggtgtggctggcgcctcctccggcgtggcggcgcgcgcgctgagcacccgcagcctgcggctcgaggcggagggcgacttcgacgtcgcggacctgcgggagctggagcgcgaggtccttcaggtgggcgagatgatcgacaacatggagatgaaggtcaacgtgccccgctggaccgtgcaagcccggcaggcggcgggcgccgagctcctgtccacggtcagcgccggcccctcctcggtcgtgtccttgcaggagcgcggggggggttgcgaccccaggaaggccctggccgccatccttttcggcgccgtgctgctggcggctgtggccctagccgtgtgcgtggcgaagctgagctga

SEQ ID NO: 29533 - DNA, 1315 bp, Homo sapiens
  SIMILAR (248)..(1126): 1001254mologous to Escherichia coli K12 flavoprotein; electron transport,accession number AE000114,Smith-Waterman Score= 1477.
ccagtgccaaagccttgcatgcctccagttcgactctaaaggatttcagccacatggtgggcgttaaccggctccgcaaaccattttcgcccatcaataaagataaaaatgcgccgatcttccagtacgcggattacggcattgttggcgacgccgtgaagatccttccggcgctgaccgcagctttagcgcgttgatccactctggcagggctgcattttggccctgccgctgacagggagctcttatgtccgaagatatctttgacgccatcatcgtcggtgcagggcttgccggttcggttgccgcactggtgctcgcccgcgaaggtgcgcaagtgttagttatcgagcgtggcaattccgcaggtgccaagaacgtcaccggcgggcgtctctatgcccacagtctggaacacattattcctggtttcgccgactccgcccccgtagaacgcctgatcacccatgaaaaactcgcgtttatgacggaaaagtcagcgatgactatggactactgcaatggtgacgaaacctcgccatcccagcgttcttactccgttttgcgcagtaaatttgatgcctggctgatggagcaggccgaagaagcgggcgcgcagttaattaccgggatccgcgtcgataacctcgtacagcgcgatggcaaagtcgtcggtgtagaagccgatggcgatgtgattgaagcgaaaacggtgatccttgctgatggggtgaactccatccttgccgaaaaattggggatggcaaaacgcgtcaaaccgacggatgtggcggttggcgtgaaggaactgatcgagttaccgaagtcggttattgaagaccgttttcagttgcagggtaatcagggggcggcttgcctgtttgcgggatcacccaccgatggcctgatgggcggcggcttcctttataccaatgaaaacaccctgtcgctggggctggtttgtggtttgcatcatctgcatgacgcgaaaaaatcggtgccgcaaatgctggaagatttcaaacagcatccggccgttgcaccgctgatcgcgggcggcaagctggtggaatattccgctcacgtagtgccggaagcaggcatcaacatgctgccggagttggtacaaatcccgtgcattgaacgtaatgccattaatgccgtgaaagcagtaaacgccgcgcggatggcgatgcgccgcacctcggcaccgcgtgtttcactcgataaagtgatcgagacgatgtatgaaaccggcaaagatatgaacgataaataccgcgaaacatcacgcggaggactggccattaaagtg

SEQ ID NO: 29534 - DNA, 2791 bp, Homo sapiens
  SIMILAR (18)..(194): 431254mologous to Trypanoplasma borreli ribosomal protein S12,accession number U14183,Smith-Waterman Score=95.
ctagtgttgcgtgtgctttctgcttgttgttcgtcttttgctgctacgtgcgtcttcctcccgcgttccttttctcttgtccttgcttcgtgagctctcgccgtattggatgtttgttattgtgcttcttgttttggttgttgtgttgcagtctgtggttttggattgtttgttttcgtgtcgtgttgtatggtgcagactccagatctgggctgctggacacaggaacatcgttaagcaaatcccggccgtcgtggaactgacagccttgagccatgggaggaaagcagccagtgagacaggcggggtcgtggggtgaataccgtggaactttggcggaagccaggtccgatgggatctggagtaccagcttgacttcagagcgctctcttctggctttgagctttctttcaagcccttcagactcctcagaccacgtgtctgatgagtaaggaggccttttctttcctcccccaaagggaatgttggcaaaacagctttctttgggaacgcgccgttcacgacgaccagccatctcctggggaactccggtggctggctggcggttcctgcggctgttgaataagtcgctgttaggagctggcacggcaggtcccgtttccgcattccaggcacccacagcgggcctctctctgctgctccaggtcaccatccttagcctcatattcataaaatggttgctctacctccagcctgatatccttgtgatgggcaggcagaaccagggctcttgttagaggaactgttacgaatacttttcataagccaactcagtgaatcttccagtggcccttcttcccctggtccacactgttcaagaccctggcaatcatgaccaactatagcttcattcagggctaggttcccagtgtccctatcgccaggtttgtcatatttttcatactcctctccagactcatcctgtttcattatctcatgggattctgttcttgctgtaaacctgcaggaagtgaagtgctcggcctgtatgtcacctgtgtgatgaatgggtcatggccatgagtgtgctgggattgtgaggcaaactgaaggtcatcgtcccttcccaggtggtagaaagtggggcctgggataagcagggtactggctggattcccggatctgtagccctccttgctgccgtttccacggccctttggcatcttcctctctcctgcatgagggcatgcgctggcccctgggggtaagcacttgactggcatcctctcctttcatccaagaacagccctcagagggggaaacgctctgcaaatccaatgattcatttataggaaacacagagatagagaataagttaaacactgcaacagggatatgatcggtcagatccaggcctgatcatatacaggacaaatgacatggcctttctgaacatataaacgtcagtagcgttgaccatgaagagtaaccgagtcttagcctcaggtatgcgagagaccagctcagttccaggggagatgttgttcaccttgtgaacccggccgcccttggcagccctaaggcggagcgcgcggctctgcagcctgcttgccccggagttggcaccacggaggatggggaccgcaccctcagcttcgcagggagccaccgtggggccagggcggtgcagagacacgacgtgtgactcggagtgcgccgcgatggcggggaggagtgcaaggcgctgctggacgggctcaacaaggacgactgcgtctaccaccacctggtgctgaccgtcggtggctcggcggactcgcagaactgcggcaggaggtgctgctatttcgtgaatctccgcgtccgtgtcctgtacaccagtttctcgtgttttctcgtccctttgtggctggacccgctttcgtgctctaactccaatgcgtggtgctatcgccacttctctgtagtccttcttcgcgggcgagcaccagtgcggcaacgaaccggcaagccctgcaccgacgatgatggcgtcaaagatatcttcgacataagagctccctgtcagcggcagggccaaaatgcagccatcggttctatgccgggtaaactgatccagaaatggcgaaagtgggcgtgaaaaacccgctgttcctgctcgatgagatcgcaaaatgtcttctgacatgcgtggcgatccggcctctgcactgcttgaatgctggatccagagcagaacgtagcgttcagcgaccactactatatgtaaacgccagtacaccagggacgcaagcccattccggcaaagctttagttcggcgggtcgccaggcgggtttcagcaaatcctgtaagtctttggtggtcaggcaaggcgcgcgcagcgccccattgtgcatgttcgcgcacatttgtaggtataatcgcccgttttcactttcgtattgtctcgtccggggcagccgggtcgtgtgctttttagccacaagcatgcagaaggctgtgtagaggcgatagtggtagctcacgccaagaaagtcccccaagtccggacaaggccagcagtagtgggcatcgcgcagggcgtcgccgtcacaagtccgcgggccacacacggtcacaattaccgggggggtgggcccccccccccccatatcatacgccagcgcacgagggtaagcaatacagtacaacacatcgcgaaccgtacaaccgtatgcggcaaagcgtagatcggcggcaggcaagcccggtatacccaaatcctgaatgaggttaggccttggggttggttgcgtgtccaaggtgtcgcccttcgcatagtcccccat

SEQ ID NO: 29535 - DNA, 762 bp, Homo sapiens
  SIMILAR (3)..(761): 911254mologous to Escherichia coli Nodulation protein V (EC 2.7.3.-),accession number D90844,Smith-Waterman Score=1146.
ttcgcccgcaaccgaaaaaagtgattcgtgattcgttgcaatcccgctcgccctttaaactggaatttcgccttaccgtaaaagccggtattcgccaaacccgcgccctcgccaaccgggtactgaataaagaaggcgaagtcgaacgtctcctcggcatcaatatggatatgaccgaagtgaaacagcttaacgaggcattgtttcaggaaaaagagcgcctgcacattacgcttgattccatcggtgaagccgtggtctgtattgatatggcgatgaaaattacctttatgaatccagtggcggagaagatgagcggctggacgcaggaagaagcgttaggtgttccgctcctgacggtgttgcatattacttttggcgacaacggaccattaatggagaacatttacagtgccgacacctcacgttccgcgatcgagcaagatgtggtgttgcactgtcggagcggcggcagttacgacgtgcattacagtattacgccgttaagtactctggacggcagcaatattggttcggttctggtgattcaggacgttaccgaatcacgcaaaatgctgcgccagctgagctacagcgcctcccatgatgcagtgacgcatctcgccaaccgcgccagttttgagaaacaactgcgtatcctgctgcaaacggtaaacagtacacataagcgacatgccctggtgttaatcgatcttgatccccgggtgccgagctgggttagtaatcgggtcagccacgccc

SEQ ID NO: 29536 - DNA, 834 bp, Homo sapiens
  SIMILAR (134)..(817): 961254mologous to Escherichia coli NADH dehydrogenase,accession number L25055,Smith-Waterman Score=1148.
catttaaggccgctttcgctgttccaactgctcctgggactgtgataaagggccaaacatgatgatcgatgaggacactcacgcgcatctgacccgggaagcgatccctgaactgctggagcggtataaatgaaaaacattatccgtactcccgaaacgcatccgcttgacttggcgtctgcgcgatgacaaacagccagtgtggctggacgaataccgcagcaaaaacggttacgaaggcgcgcgtaaggcgctgaccgggctgtctccggacgaaatcgttaatcaggtaaaagacgctggtctgaaagggcgcggcggcgcgggcttctcgactggcctgaaatggagcctgatgccgaaagacgaatccatgaacatccgttacctgctgtgtaatgccgatgaaatggagccgggcacctataaagaccgcctgttgatggagcaactgccgcacctgctggtggaaggtatgctcatctccgcgtttgcgctgaaagcttaccgtggctacatcttcctgcgtggcgaatatatcgaagcggcagttaatctgcgccgtgccattgccgaagccaccgaagcgggtctgcttggcaaaaacattatgggaacaggtttcgatttcgaactgttcgtccataccggggcagggcgctacatctgcggggaagaaacagcgttaatcaactccctggaaggacgtcgtgctaacccacgctcgaagccacccttcccggcaacctccggcgcatggggtaaaccgacctgtgtcaacaacgtcgaaaccctgtgtaacgttccggcgatcctctagagtcgagctccggc

SEQ ID NO: 29537 - DNA, 550 bp, Homo sapiens
  SIMILAR (1)..(357): 1001254mologous to Escherichia coli K12 putative transport protein,accession number AE000174,Smith-Waterman Score=611.
atgcgtgccctgctgattctctatctcaccaatcaactaaaatacaacgatactcacgcctacgagttatttagcgcctactgttcgctggtgtatgtcacgccaatcctcggtggctttttggcggataaagttctcggcaatcgcatggcggtgatgctgggggcgttgttgatggcgatcggtcatgtggtgctgggtgccagtgagatccatccgtcattcctctatctgtccctggcgattatcgtctgcggctatggcctgtttaaatctaacgtaagctgtctgctcggcgagctgtatgagccaaccgatccgcgtcgtgatggcggtttctcgctgatgtatgcggcggcggctcgagatattgcttatctgatgtatctggagaacgccttgcgagctgaaggcgctggcgggaatccgaatctatcgcggatggcgatgccgcctatcaacctctaccagaatcagagaggaggagtggcttgcaaccccctcacccccatcttatacattttcccgaggactccttggattgcttcgc

SEQ ID NO: 29538 - DNA, 605 bp, Homo sapiens
  SIMILAR (1)..(489): 981254mologous to Escherichia coli phosphatidylserine decarboxylase,accession number J03916,Smith-Waterman Score=828.
atgaaagaggcgcaaaagccggacaccgccagctaccgcacctttaacgaattctttgtccgtccgctgcgtgacgaagtacgcccaatcgataccgatccgaatgtactggtcatgcctgccgatggcgttatcagccagttgggtaaaatcgaagaagataaaatcctgcaagccaaaggccacaactacagcctcgaagccctgctggcaggcaactatctgatggcggacctgttccgcaacggtacgtttgtgaccacttacctctccccgcgtgactaccaccgcgtacacatgccgtgcaacggtattctgcgtgagatgatctacgtgccgggcgatctcttctccgttaaccatctcacggctcagaacgtgccgaatctgtttgcccgtaacgaacgcgtgatttgcctttctgataccgaatttggcccaatggcgcagattctggtcggagcgacgaatggtggcagcattgagacggaaaatgttgtcgaaaagcgtgtaagaggtgcgcaatgcgtaagcagtggctcgggatctgcatcgcggcaggaatgctcgcggcatgtacaagcgatgatggtcagcaacagacg

SEQ ID NO: 29539 - DNA, 1653 bp, Homo sapiens
  SIMILAR (1)..(483): 991254mologous to Escherichia coli K12 putative carboxylase,accession number AE000174,Smith-Waterman Score=843.
atgtatacctctgtgcaggatgggggtcgtcacggttttcgccagtcgggtatcagccactgcggcgcactggatatgcccgcgttacgcattgctaacctactggtgggtaatgacgccaatgcccccgcgctggagatcacgctcggtcagttaactgttgagttcgaaactgatgggtggtttgctctgacgggtgccggttgcgaagcgcggctggatgataatgccgtctggaccggctggcgattgccgatgaaagcaggccagcgtttaacgcttaaacgcccgcagcacgggatgcgcagttatctggcggtcgcgggtggtattgatgttccgccggtaatgggctcatgcagcaccgatctcaaagtggggattggcgggctggaaggccgtttactgaaggatggtgaccgactcccgattggcaaatcgaagcgtgattctatggaagcgcagggcgttaaacagctgctaaaacacaagcacgccgcgcaactattacgtgacgttgccgtcaattgtggaattattatgaataaacacgcatcacagccgcgcgctatttactatgtcgttgcgctgcaaatctgggaatattttagcttttacggcatgcgtgccctgctgattctctatctcaccaatcaactaaaatacaacgatactcacgcctacgagttatttagcgcctactgttcgctggtgtatgtcacgccaatcctcggtggctttttggcggataaagttctcggcaatcgcatggcggtgatgctgggggcgttgttgatggcgatcggtcatgtggtgctgggtgccagtgagatccatccgtcattcctctatctgtccctggcgattatcgtctgcggctatggcctgtttaaatctaacagcttcaaagagcctctgtgccccttctgctccataatcacccttccaatattagaatgcagctgccatgtttctgttatccttcttcacaaagaatattggggaccagggcatgggagcatggtccagattgagtccaagctaaagttcatagccagagcgagcctgtttatgcaggacaacaatcagcaaggcaaaggcgtctctttgtcaaaagcgatcaacatcattgagaacggactgcggctatatggtcaggcgcttgctgcaagccaatttacgcaacgatgtctccgcagtcgaagaagtggaagcattaatgcgcaatattgccgatgcctggaaagagtcgttactctccccttctttgattcaggacccagtctgatgaaccatgcaccgcatttatatttcgcctggcaacaactcgtcgaaaaaagccagctcatgttacgcctggcaacggaagaacaatgggacgaactcatcgccagcgaaatggcgtatgtgaatgcggtgcaggagattgcacatttgactgaagaggttgacccgtccaccacgatgcaggagcagctccgcccgatgctgcgcctgattctcgacaacgaaagcaaggtaaagcagttattacagattcggatggatgaactggcgaaactggtcggtcagtcatcggtgcaaaaatcggtgttaagtgcctatggcgatcagggcggctttgtgctggctccgcaggataacctcttttga

SEQ ID NO: 29540 - DNA, 1020 bp, Homo sapiens
  SIMILAR (735)..(196): 1001254mologous to Escherichia coli K12 putative transport protein,accession number AE000174,Smith-Waterman Score=937.
ccgccagccaaacgctcgatcgcgctggcgttgtggtcgatgacggtgattgtcgcgccaatttgcggcccgatcctcggcggttatatcagcgataattaccactggggctggatattcttcatcaacgtgccgattggcgtggcggtggtgttgatgacactgcaaatcatgagctttctttgaacattgctccgcgatcatgccaaccgccgccaggccaaagcccatcgcccagctgtactcttcctgggcgtaaccacaggcgataggtgcgataatagaccccacgttacccgccgcatacatcagcgagaaaccgccatcacgacgcggatcggttggctcatacagctcgccgagcagacagcttacgttagatttaaacaggccatagccgcagacgataatcgccagggacagatagaggaatgacggatggatctcactggcacccagcaccacatgaccgatcgccatcaacaacgcccccagcatcaccgccatgcgattgccgagaactttatccgccaaaaagccaccgaggattggcgtgacatacaccagcgaacagtaggcgctaaataactcgtaggcgtgagtatcgttgtattttagttgattggtgagatagagaatcagcagggcacgcatgccgtaaaagctaaaatattcccagatttgcagcgcaacgacatagtaaatagcgcgcggctgtgatgcgtgtttattcataataattccacaattgacggcaacgtcacgtaatagttgcgcggcgtgcttgtgtttctgagccgttattactccgcgagcctgaacgtttactggcaacattacgtagtcgttgtcggttacattaccttgcgccgccgccggaacagtacgccgtgacctggctttcacgcgaagtgacaatgtcacaggatgcattacttgccgcattgcgcttaagcgccggttcgcctggcgcggcactggcgttgtttcagggagataactggcaggctcgtgaaacat

SEQ ID NO: 29541 - DNA, 3264 bp, Homo sapiens; identical to SEQ ID NO: 24987
  SIMILAR (1765)..(2415): 951254mologous to Escherichia coli analogue of ATP-dependent protease regulatory subunit,accession number X57620,Smith-Waterman Score=1033.

SEQ ID NO: 29542 - DNA, 2054 bp, Homo sapiens
  SIMILAR (444)..(1658): 761254mologous to Escherichia coli Aconitate hydratase, mitochondrial precursor (EC 4.2.1.3) (Citrate hydro-lyase) (Aconitase),accession number D90715,Smith-Waterman Score=1501.
tcccaggctttgcccgcctgatggcggcgcatcgtcatgaaatcgcggcggtgatcattgagccgattgtccagggcgcaggcgggatgcgcatgtaccatccggaatggttaaaacgaatccgcaaaatatgcgatcgcgaaggtatcttgctgattgccgacgagatcgccactggatttggtcgtaccgggaaactgtttgcctgtgaacatgcagaaatcgcgccggacattttgtgcctcggtaaagccttaaccggcggcacaatgaccctttccgccacactcaccacgcgcgaggttgcagaaaccatcagtaacggtgaagccggttgctttatgcatgggccaacttttatgggcaatccgctggcctgcgcggcagcaaacgccagcctggcgattctcgaatctggcgactggcagcaacaggtggcggatattgaagtacagctgcgcgagcaacttgcccccgcccgtgatgccgaaatggttgccgatgtgcgcgtactgggggccattggcgtggtcgaaaccactcatccgatgaatatggcggcgctgcaaaaattctttgtcgaacagggtgtctggatccggcctttgacaactgatttacctgatgccgccctatattattctcccgcaacagtccataactggctggcgctgcacggtcgcggccaggattactgccagcttaaccctcaaccgatggcgtactacgatggctgcatcagcgttgatttaagcgccatcaaaccaatgattgcgctgccgttccacccgagcaacgtgtatgaaatcgacacactgaaccagaacctgaccgacattctgcgtgagattgaaattgagtccgaacgcgtggcgcacggtaaagccaaactctcgctgctggataaagtggaaaatggtcgcctgaaagtgcagcaggggattatcgcgggctgttctggcggtaactacgaaaacgtcatcgcggcggcgaatgcactgcgcggtcaatcctgtggcaatgacaccttctcgctggcagtttacccgtcatcacagccggtgtttatggatctcgccaaaaaaggtgtggtagcagatttgattggcgcaggcgcaatcatcagaaccgcgttctgcggcccatgctttggcgcgggcgatacgccaatcaacaacggtttgagtattcgccacaccacgcgtaacttcccgaaccgcgaaggcttcttaagccagctaatggggcagatgttcagcggtggcgtttgatgggacgctcgttctatcgctgcgactgcsgcaaacggtggctatttaacctctgccagcgaacttgattgctgggacaacgtgccggagtacgccttcgatgtaacgccgtataaaaaccgtgtttatcagggctttgtgaaaggggcaactcagcaaccgctgatttacgggccgaacattaaagactggccggaattgggtgcgctgactgacaatatcgtcctgaaagtgtgctcgaagatcctcgacgaagtgaccaccaccgacgaactgattccttccgagaaacctcttttatcgttcaatcgattgtctgccgagtttccctgtctcgcgcgatcctgcagagtaagcgactctaagaaccgggcgaatttccgccacctgatccatcgtctccagagcagagatggccggtttgttatccaccgaaataatcagatcgttgacctgaatacccgcattcgccgccgggccgtcaggaatcgcaaagccgataccttccggcgtttcgccatcgttactcttatcaaacgacagcgtattaatgcccatcagttcgcccagcgagttcaccagcgcgccgccagagttaccgtggttaatggaagcatcggtttggaggaagttttgccgcccggtcgggttcagaccgattcgacccgtggcactaataatcccctgggtaatggtctgcccgaggttgtacgggttaccgatcgccagtactacgtcgccaatgtgcggtacgcgacgtgcattaattggaatggtatgtaa

SEQ ID NO: 29543 - DNA, 7222 bp, Homo sapiens
  SIMILAR (5080)..(5703): 1001254mologous to Escherichia coli similar to,accession number D90854,Smith-Waterman Score=1065.
tttgattcggtgataaacccgtttttgtaacgctattgtcgccaactgcttcagaacggaataagcgccattgccctgaatattcaggtcaatacagcttgcagtaagagctgccattaatcggactccataaaatatattttaatcaattgtaatggtggagcgattaagtgatgagaggcgatatgtcggtaaacaatgacaatttgagacagagtgaaaggtcagatttgcggagtaatgcacataatggttatttaaataaaccacatgaatcattaatgggttattcattatttttgtgatttactcacaatgtatcagggaaatataacttaccgggagatgtaatatgtttaatttttcaaatcgaaatttaaaatattgtgccggaggcatctctggcacattgggcaattacggcaggtaaaacacttcttgcagctcgctactcaccgggctgttatccgggttagcgggcataacatcggtcatatatttccaccaacgttggcaaacatcagtgctggcaaccgcattccagcgttcttcagattcaatctctaccatggcaaacagcagattacgcgctttgtcgagatagatggcgtagttatgcgcaccgtgagatttcagcactgcttccagttctggccagatgggattatgccgacgctgatactcttcgtgggcgtcggggtttacctgcatgacaaaggctttgcggatcatgtttgctccttacagcgccagcgcactggcgagtgcgtaacgccgaaacgcttgccgagcgctatcaactcttcacggctgatggtttcatccagcgtcggtccgctcaagcagacgccgtggaagggccacaacaccagcgaatgtttttgcatctcttgtgcggacctgcaggcgcataatctgggatacgctgaccatgagcaaaatgacgtccgccagacctcaaacgatggcagttttaccgacgccgggttcaccaatcagtaccgggttatttttagtacgacgttgcagcacctgaatggtacggcgaatttcttcatcacgaccaatcaccggatcgagtttgccctgttcggctcgttcgaacgctttaacgatcggctgggtaaccagtttggtgcggctatcacctatttctcatttttgtcgatgataccaattttgatggtgtcgtttgccgcagggggctttgtgctggcctcccatccgatgttgctacaggatatcttcgacaaaattctgcaaaacatcagcgatccgacgctagccgccacgttgaaaaacaccatcaacaccgccgttcagcagcgtacgactgtagggcttgtcggcctggcggtggcactttattccggcatcaactggatgggtaacctgcgtgaagcgattcgtgcccagtcgcgcgatgtctgggaacgctcgccgcaagatcaggagaagttctggcaaatgattattagcgccctgcacctgaacagcattgagtggctgaaaccgacgtggcgattgattggcctggcgatttccatcttcgccaactatctgcttttcttctggatcttgactctagagatccccgatgtgcgaaaccgcctcttcttcccgctcagcaacgcgaaccggtggaatacgcacctcatcacccgcttcgagtttatattcaggcttaatacgttttttgttcacccgcacttcgcctttacgcaaaatacggtaaatcatactttttggtacgcctttcaattggagatccccggtaccgagctggaattcagcgcgctttctaccgatttccgtaacagcgttgacgtgatgaccactgaaacgacctgtttaagctctgtctggcaaaccgatgaagaagtccataacctgctggcgctgcacggtcgcggccaggattactgccagcttaaccctcaaccgatggcgtactacgatggctgcatcagcgttgatttaagcgccatcaaaccaatgattgcgctgccgttccacccgagcaacgtgtatgaaatcgacacactgaaccagaacctgaccgacattctgcgtgagattgaaattgagtccgaacgcgtggcgcacggtaaagccaaactctcgctgctggataaagtggaaaatggtcgcctgaaagtgcagcaggggattatcgcgggctgttctggcggtaactacgaaaacgtcagcgcggcggcgaatgcactgcgcggtcaatcctgtggcaatgacaccttctcgctggcagtttacccgtcatcacagccggtgtttatggatctaacgaaaaaaaggtgtgaagcgtaccggagtacccggattatgaaaatactggtctacggcattaactactcgccggagttaaccggcatcggcaaatacaccggcgagatggtggaatggctggcggcacaaggtgggcgagaactattccgcctggcgctacaaacgagaagagggggccgcacggtgtggcgctgcccgctgtatgtgccaaaacagccgagcaccctgaaacgcctgttgcatctgggcagttttgccgtcagcagtttctttccgctgatggcgcaacgtcgctggaagccggatcgcattattggcgtggtgccaacgctgttttgcgcgccgggaatggccctgctggcgaaactctctggtgcgcgtaccgtgctgcatattcaggattacgaagtggacgccatgctggggctgggccttgccggaaaaggcaaaggcggcaaagtggcacagctggcaacggcgttcgaacgccagtccacctttggcgggaaaactgcaactacctggggctataacggcaatctgctggggccggcggtgaaattacagcgcggcaaagcggtaacggttgatatctacaaccaactgacggaagagacaacgttgcactggcacgggctggaagtaccgggaattatcacgacgccgctgaacgactggctgatctggcatgaatgtcggtcataacgcctgagaaacgccgttgactgtaccgggtgcaactgaagtcgctaacaacgtgctggcgctgtacatgcaggatcgttatctcggcaagatgaaccgtgtcgctgacgatattaccgtcgcaccggaatatctggaggagagcaacaaccaggcatgggcacgcggcggtgcgggtgaccgtctgctgatgtacgcacagctgaaggaatgggcagagaaaaactttgatatcaagaaatggtatccagatggcactcctctgccagagttttacagcgagcgtgaagggatgaaaggctggaacctgttccagttgatgcatcgtaaagcacgcggcgatgaggtcagcaatgacaagtttggcggcaagaattactgtgctgaatccaacgcgcgcgaccacgccgaataaccgcgtcgcggatgaccagggctttttacgccagtggagcaaggtggcgaaagaacgcaaactgcaacggttttatatcggcgaaccgagcgccgaagccgttgccgcgcaaatgccggatctgattttaattagcgcaaccggcggggattcggcgctggcactgtatgatcagctttccaccatcgccccgacattaatcatcaattacgacgacaaaagctggcacccccgactgagcttcaataaggcagatgaaattactaccgtcttttgtggttcgaaaaagagtctggcaaatggcatcccgatggcaaacattctgttccccacatcggtgatcgctacccagcaaacgcagcatttccgcttcgtcgatgacttcaatgcccagttcctgcgcttcgccagtttagatcctgcagcttcacccgctatcaccatatcgggaaaggcgactctagagatccccggtaccgagctagtattctatgcggcgctcgagaaaaagctgaacatcaaaccagggcaaacgacatttgatggccgctttacgctgctgccaacttgctgcctggggaactgtgataaagggccaaacatgatgatcgatgaggacactcacgcgcatctgaccccggaagcgatccctgaactgctggagcgcaaaaacggttacgaaggccgcgcgtaaggcgctgaccgggctgtctccggacgaaatcgttaatcaggtaaaagacgctggtctgaaagggcgcggcggcgcgggcttctcgactggcctgaaatggagcctgatgccgaaagacgaatccatgaacatccgttacctgctgtgtaatgccgatgaaatggagccgggcacctataaagaccgcctgttgatggagcaactgccgcacctgctggtggaaggtatgctcatctccgcgtttgcgctgaaagcttaccgtggctacatcttcctgcgtggcgaatatatcgaagcggcagttaatctgcgccgtgccattgccgaagccgactctagagatccccgcgtgaacaaattccaggacgaagtgggcggcaaactgcgctttggcgatccgggcgtgcgtctgtttgaaaccagcgaaaatggtctggattacttcaccagcgtaccggcacgcttccagccgcaggacgggaaatcgcgtatcgcgccgtattaccacctgtttggcagcgatgaattgtcacagcgtgctccggtcttccagagccgtatgccgcagccgtacatcaaactcaacccagcggatgccgcgaagttgggtgtgaacgcaggtacacgcgtctcctttagttacgatggcaacacggtcacgctgccggttgaaatcgccgaaggactgacggcagggcagtgccgacacctcacgttccgcgatcgagcaagatgtggtgttgcactgtcggagcggcggcagttacgacgtgcattacagtattacgccgttaagtactctggacggcagcaatattggttcggttctggtgattcaggacgttaccgaatcacgcaaaatgtgcgccagctgagctacagcgcctcccatgatgcactgacgcatctcgccaaccgcgccagttttgagaaacaactgcgtatcctgctgcaaacgtcaattgatgctatttccagcggcactatcgacatcagcgatggtacggttttgcgcctgaccgggcaggatacttccgtcgcccttaatgcctcactatttaacggcgatgggacgctggtgaatgccaccgatggtgtgacgttgacaggtgagcttaataccaaccttgaaactgacagcctgacttatctttccaacgtgacggttaatggcaatctgaccaatacgtccggtgcggttagcctgcaaaatggcgtcgctggcgatacgctgacggtaaacggtgattataccggcggcggtacgctactgctcgatagcgaattaaacggcgatgactcggtaagcgatcaattggtgatgaacggtaatactgctggcaacacaactgtggtggttaactccattacagggattggtgagccgacatcgacaggcattaaagtggttgatttcgcagctgatcccacgcagtttcaaaacaatgcgcagttcagtctggcaggcagcggctacgtcaatatgggagcgtatgactacacgctggtggaagataacaacgactggtatctgcgatcgcaagaagtaacgccgccatcgccacctgatccagacccgacttttgcggaaagaattccaaaaacaggtacgacatacatgaatcagaatctgctggtgacaaagcgcgacggtagcacagagcgcatcaatctcgacaaaatccatcgcgttctggattgggcggcagaaggactgcataacgtttcgatttcccaggttgaaaagcctacggccagtttgatgccgcctgcgctgtacgaccacgtggtgaaaatggtcgagatgggcaaatacgataatcatctgctggaagactacacggaagaagagttcaagcagatggacacctttatcgatcacgaccgtgatatgaccttctcttatgctgccgaaaagcagctggaaggcaaatatctggtacagaaccgcgtgaccggcgaaatctatgacctgcaggcactgctgcaaaaaggaaaaaccagaattgctggtagtgacttttgcaaaggatttgccgtcagcggggcagcggttctttgctccagtacggtggccgattatctgctgcaattcgcccgccaccttatctacagcaccagtatgccgccgctcaggcgcaggcattacgtgcgtcgctggcggtcattcgcagtgatgagggtgatgcacggcgcgaaaaactggcggcactcattacgcgttttcgtgccggagatatcgaccgtctgctggaggtgctgcatggcaacggttaataaacaagccattgcagcggcatttggtcgggcagccgcacactatgagcaacatgcagatctacagcgccagagatgtgacgccttactggcaatgcttccacagcgtaaatacacccacgtactggacgcgggttgtggactctagaggaatccccggcagacgccgcatcggctttgctgttgcccaccatccgctgtttgtaatagtcggtttgcagccagatctacctgcgcctattccacgaggccagttgcataacaaactctttataggcttcgtcccgacactgcaggcgggggccgtcgcgaaaagtgtaattcacgcgcacgtcagcgtttcccctgatggattagacctggtcttttttgtcgtcaaccaatgggctggcgtcgtgttctgcttcgatctcttcagcaggaagcggggcaggttcagcgtctggcgtaacaaaggtttcggtagatactgccagcggctggccaattttcgtgacagacaggctttccagttgctcaaccagattcactttacccggtgcaaacaggttgataacggtggaaccgagtttaaagcgacccatttcctggcctttcagcagtgccacagaaccgtcgttttccccggcaggccaggtccagcgcttgatgataccttcgcgcggcggcgtaatggtgcccgcccagaccgtctcaatgctgccaacaatcgtcgctccgaccagaatctgcgccattgggccaaattcggtatcgaaaaggcaaatcacgcgttcgttacgggcaaacagattctgcatgttctgagccgtgagatgggtaag

SEQ ID NO: 29544 - DNA, 556 bp, Homo sapiens; identical to SEQ ID NO: 24494
  SIMILAR (177)..(554): 1001254mologous to Escherichia coli topoisomerase IV subunit,accession number M58409,Smith-Waterman Score=653.

SEQ ID NO: 29545 - DNA, 1929 bp, Homo sapiens; identical to SEQ ID NO: 24496
  SIMILAR (1)..(558): 981254mologous to Escherichia coli similar to attaching and effacing protein,accession number U73857,Smith-Waterman Score=1000.

SEQ ID NO: 29546 - DNA, 1446 bp, Homo sapiens
  SIMILAR (484)..(1017): 911254mologous to Escherichia coli phosphate-binding protein,accession number K01992,Smith-Waterman Score=845.
atgttgatggcagaatactttgccatccagatgtgtcgggaaatcaagctgcctctgttcccggggtttacggagcgcgccagagaaacattgctgaattatcgttggccgggaaatattcgtgaattgaaaaacgtggtggaacgttcagtgtatcgccacggcaccagcgattatccgcttgatgacatcattattgatccctttaacagcgtccgcctgaagatgtatcgccgtttcagaaaccacctcgcttccaacactgccgctggatttaccgcatcggcggcgcagtatgaagatggtaaacagtacactaccctggaaaaaccggtagctggcgcgccgcaagtgctggagtttttctctttcttctgcccgcactgctatcagtttgaagaagttctgcatatttctgataatgtgaagaaaattcttccggagggggtcaagatgtttgatcaggcaggcgccgatagcaagaaactgccttcacaatacattgctggagtacgccgtgcagatggctccgggacttccttcgtcttcaccagctacctggcgaaagtgaacgaagagtggaaaaacaacgttggtactggctctaccgtaaaatggccgatcggtctgggcggtaaaggtaacgacggtatcgccgcgttcgttcagcgtctgccgggtgcaattggttatgttgaatatgcttacgcgaagcagaacaacctggcgtacaccaaactgatctccgctgatggtaaaccggttagtccgaccgaagaaaacttcgctaatgcagcaaaaggtgcagactggagcaaaaccttcgctcaggatctgaccaaccagaaaggcgaagatgcatggcctattacctctaccacgttcattctgatccacaaagatcagaagaaaccagaacaaggcacagaagtgctgaaattcttcgactgggcgtacaaaaccggcaacgatcgtaaagtcatgcagattgacccgctggaagcgccggatttgatctggctgctgcaacagacgggagatgaagtgctggattaccgccaggcggtggcgtactacgcttcttgccgccagactgtcatagaaggcggcaaccacgcattcacgggcttcgaagattatttcaacccgatcgtcgattttcttgaagtcattgataacagtgtggatgaagcactggcgggtcacgcaaaacgcgtggacgttattttacatgctgaccagtcgttagaagttattgacgatgggcgcgggatgccggtggatattcacccggaagagacctgcaggcatgcaagagctgaaaacgatcctggtgaccaatcccacgctgcaattcgatgcgatattcgccagcacatcaacggaaaaactcatctttgcctcactgtcaatttgactatagatattgtcatatcgaccatttga

SEQ ID NO: 29547 - DNA, 817 bp, Homo sapiens
  SIMILAR (654)..(815): 611254mologous to Bacteriophage N15 gp5,accession number AF064539,Smith-Waterman Score=137.
atggcctttaatgagccgctgatgcttgaacccgcctatgcgcgggttttcttttgcgcgctggctggccagttgggcatcacccggctgacagataccgtctctggcatcacgcttgatgccggacaaatagccgaaccgctggcgctgtttggtgaggatgatgacatggatccccgtccatcacgcagctatcaggtggcaaatggtatcgcggtcttgccggtttccggcacgctggtcagtaaaacccgtgcgcttcagccttattccgggatgacgggttacaacgggatcattgctcgcctgcagcaggcaatcagtgaccccggcgttgacggcattcttctggatatggatacgccgggtggaatggtgtccggggcgtttgactgcgccgacattattgcccgtatgcgcgatatcaaacccatctgggcgctggccaatgacatgaactgcagtgcaggtcagcttattgccagttcggcatcgcgacggctggtcacacaaacggccagaaccggctccattggggtcatgatggcgcacagtaactatggcgctgcgctcaaaactaacggcgttgaggtcacgctgatttacagcggcgatcgcaaggtgcgacggcaacccttacgaaaagcttccgtaaagatgtgcgtgctgatttccagacgcgtatcgatgccactcgtttccgcttataccggcatgtctgttcaggacgtgctgacaccgaagcggcagtattctccggccaagaatcttgggataacgggctggcggagtaactggtacacaccgattggctggg

SEQ ID NO: 29548 - DNA, 280 bp, Homo sapiens
  SIMILAR (76)..(279): 981254mologous to Escherichia coli anaerobic class I fumarase (EC 4.2.1.2),accession number M27058,Smith-Waterman Score=348.
atgaattcatttttcatcaaaaaagagatcaaccactggtgtgaagaagcagatgttgcattcatgagacagcaactctatgaaaccaaagccctgctgactcccggcaaactgaaaaacttcctcgtcgagaaaatgcgtaccctcggtactgcagcctgcccgccgtaccatatcgcgtttgtgattggcggtacgtctgcggaaaccaacctgaaaaccgtcaagttagcaagcgctcactattacgatgaactgccgacggaagggaacgaacatg

SEQ ID NO: 29549 - DNA, 871 bp, Homo sapiens
  SIMILAR (6)..(221): 391254mologous to Escherichia coli Outer membrane usher protein PmfC precursor,accession number D90710,Smith-Waterman Score =111.
catttatcccgtggaaagtggcgtggatacccccccacaaaattaaggggttttggcacaacccaaagcccccgggtccgcttccagtcaatcaggccggggtccttttacaaaaaaaaattccccccaggggcccttttattatgaagccctcaaaccagtctgttcaggccccgtgggatgtcaaagtgccgggaaaaagatggtgggttaaccaatttccaggtttgggaagcattgcggccctttcctgactcgccagggacaggttcgctataaatgggccgcgggtcagcccgggccttccatgtcacatcaaactgaaaatgaaaccttttttagcaatgaagtttcctgggggatgctctcaaacacctcgctgtacggcggcctgctgatttttgatgatgactaccattctgccgcaatgggtatcgggcaaaatatgctgtggcttggcgcactgtcctttgatgtcacctgggccagtagccattttgatactcagcaggacgagcggggcttaagctaccgttttaattacagcaaacaagtggatgccaccaacagcacgatttcgctcgccgcttatcgcttctcagatcgtcattttcacagctacgccaactatctggatcacaaatacaacgacagcgatgcgcaggacgaaaaacagacgatcagcttatccgtgggccaaccgattaccccactaaacctcaatctttacgccaacctgctacatcaaacctggtggaatgcagacgcctccacgaccgccaacatcacagcaggttttaatgttgatattggtgactggagagatatctcgatttcgacgtcattcaatacgacccactacgaagataaa

SEQ ID NO: 29550 - DNA, 2990 bp, Homo sapiens
  SIMILAR (460)..(1023): 961254mologous to Bacteriophage N15 gp5,accession number AF064539,Smith-Waterman Score=928.
atggctgccacggcaatgtccaccgtgtcgatgtccatcgttggtgcatacatgaccatgctggaaccgaaatacgtcgttgctgcgctggtactgaacatgttcagcacctttatcgtgctgtcgctgatcaatccttaccgtgttgatgccagtgaagaaaacatccagatgtccacctgcacgagctgggagatatcaccttgcattggtccgctagacgttatcgcagatcagcgacatcgtccaatcacgatggacatctcagaagttttgagacgggcatccagaccggcgaaatacagcgtaacggtggcccagaatagtgggcgcaacacacagcaggttggtttccgcagacgtaccgccaatcacaaacgcgatatggtacggcgggcaggctgcagtaccgagggtcgctgggttgaagctcgggagagcgatcagcaggcggcaaaacgctgctatcaggtggcaaatggtatcgcggtcttgccggtttccggcacgctggtcagtaaaacccgtgcgcttcagccttattccgggatgacgggttacaacgggatcattgctcgcctgcagcaggcaatcagtgaccccggcgttgacggcattcttctggatatggatacgccgggtggaatggtgtccggggcgtttgactgcgccgacattattgcccgtatgcgcgatatcaaacccatctgggcgctggccaatgacatgaactgcagtgcaggtcagcttattgccagttcggcatcgcgacggctggtcacacaaacggccagaaccggctccattggggtcatgatggcgcacagtaactatggcgctgcgctcaaaactaacggcgttgaggtcacgctgatttacagcggcgatcgcaaggtcgacggcaacccttacgaaaagcttccgaaagatgtgcgtgctgatttccagacgcgtatcgatgccactcgtcagatgtttgccgaaaaggtttccgcttataccggcatgtctgttcaggacatatatttgcttaaagctttggcagccagaagcctgcaggtccgcccgctgcacttgaaccgcgatattgatatcaatgtgcggattatttctgccactcaccgtgatctgccaaaagcgatggcgcgcggggaattccgcgaagatctctattaccgcctcaacgttgtcagcctgaaaattccggcactggcggagcgcacagaagacattccgctactggcaaatcacctgttgcgccaggcggcagagcgacataaaccgtttgtccgcgcgttctctaccgatgcgatgaaacgcctgatgaccgcgagctggccgggtaatgtgcgccagttggtcaacgtgattgaacagtgcgtggcgctgacctcatctccggtgattagtgatgcgctggtggagcaggcgctggagggtgaaaatacggcgctgccaacctttgttgaggcacgtaatcagtttgaactcaactatttgcgtaagctgctgcaaatcaccaaaggcaacgtcacccacgcggcgagaatggcggggcgcaaccggacagaattttataaactgctttcccgacacgagctggatgatggcataacagaggaaagaaaatgtcactcttccgcagaaatgaaatatggtatccagctccttacgctgtataccacgccggtggtgtatctctttttcgaccgtcagcggatgtacgtaactctcgctggtggagctttccggtcatgcgttaacaagatggatctccgggaactggctcgaccgcgtttgacgcaactgatggataccaccgggctgttatgtcacctggggattattgataacggcagcgcttattacattttgaaagtggagtcatcagccactatcagcgtgcgttcccatgaaggaaaaagcctttcgctttatcgctccggaataggtaaatgcctgcttgcctggcaacctgcagcggtacagcaaagtattatcgaagggctggtctgggagcaggcgacacccacaacgattactcatccacagcaacttcacgaagaactggcgcgtattcgccgtcagggctggagctatgacaacggcgaagattacgccgatgtccgttgtgtcgctgcgccggtgtttaacgccaataacgagcttaccgctgcgatctcggtgcaaacaagtggatgccaccaacagcacgatttcgctcgccgcttatcgcttctcagatcgtcattttcacagctacgccaactatctggatccacaaaatacaacggacagcgatgcgcaggacgaaaaacagacgatcagcttatccgtgggccaaccgattacccctactaaacctcaatctttacgccaacctgctacatcaaacctggtggaatgcagacgcctccacgaccgccaacatcacagcaggttttaatgttgatattggtgactggagagatatctcgatttcgacgtcattcaatacgacccactacgaagataaagatcgcgacaaccagatttatctgtcgatttcgctccccttcggtaacggtggtcgggttggctatgacatgcaaaacagtagccacagcaccatacaccgcatgtcgtggaacgatacgctggatgaacgtaatagctggggcatgtctgccggactgcaatccgatcgtccggacaatggagcccagttgatgtctgaagttactgctcatgcaattctcttagtaaaccagtaccgcacgacggtttttggagtatgccgcttcgtcatgacccagtactgcaggtttttctttaccgtaagaaacgatggagatctggcaacgggagttcagacaaagcaaataattttagaggataagccatgccacgttctctcaagaaaggtccttttattgatgttctataaaatgccggtcgctaacgcgctggcctcggtggtttatggtttcttctacgggttgtggtcatga

SEQ ID NO: 29551 - DNA, 301 bp, Homo sapiens
  SIMILAR (78)..(116): 841254mologous to Escherichia coli rtn,accession number U83404,Smith-Waterman Score=64.
ttgacgcggtgctgacgctggcgaacgcctcaatatgctgacggttgctgaaggggtcgaaacgccggaacagcgcgatggcgctggacgattttgttcgctggctaaagaaaccgttacgccgcagtggtaaggtgtgcttacgtcccttattattcatagtgaagcatgccggattgcggctaatgatgagtaaaaggaaatccgttgcagatattgtgcgcatactgctgctgtttatcgctctgttcacctttggtgtgcggcgcaggctatcaaggaaagctatgcctttgccgtg

SEQ ID NO: 29552 - DNA, 290 bp, Homo sapiens; identical to SEQ ID NO: 23125
  SIMILAR (166)..(279): 391254mologous to Homo sapiens Protein sequence encoded by clone p199-7 (PL mutet.rsT4),accession number P93374,Smith-Waterman Score=68.

SEQ ID NO: 29553 - DNA, 588 bp, Homo sapiens
  SIMILAR (4)..(399): 971254mologous to Escherichia coli transmembrane protein,accession number L08399,Smith-Waterman Score=633.
tggcctgccattgggctgggtattattccgctggcggtcattgtgcgtatgacacgctcctcgatgctgaaagtgctgggcgaggattacatccgcaccgcgcgcgccaaagggctaacccgcatgcgggtgattatcgtccatgcgctgcgtaacgcgatgctgccggtggtgaccgttatcggcctgcaggtgggaacattgctggcgggggcgattctgaccgaaaccatcttctcgtggcccggtctgggacgctggttgattgacgcactgcaacgccgcgactatccggtagtgcagggcggcgtattgctggtggcgacgatgattatcctcgtcaacttgctggtcgatctgctgtacggcgtggtgaacccgcgtattcgtcataagaagtaaggggacatcatgtcacaggttactgaaaataaagtgattagcgcaccggtgccgatgaccccgttacaggagttctggcactattttaaacgcaacaaaggcgcggtcgtcgggctggtttacgtcgtcatcgtgctgttcatcgcgatccgcgggtaccgagctagattttgtactcgaggtcac

SEQ ID NO: 29554 - DNA, 743 bp, Homo sapiens
  SIMILAR (1)..(450): 1001254mologous to Escherichia coli dedA,accession number M68935,Smith-Waterman Score=769.
tcactggaaaccaacgatctcaacgtccatatgatggtggtgctgatgctgatcgccgcgattgtgggtgacgcggtcaattacactatcgggcggttgttcggtgaaaagttgttcagtaatcccaattcgaaaattttccgtcgcagttatctcgacaaaacccatcagttttatgagaaacatggcggcaaaacgattattctcgcccgttttgtgccgatcgtcagaacgttcgccccgtttgttgcgggaatgggccacatgtcgtaccgtcatttcgccgcttataacgtgatcggcgcactgttgtgggtactgctttttacctacgcaggctatttcttcggtacaatcccgatggttcaggataaccttaagctgctgatcgtcgggattattgtggtttctattttgccgggcgtcatcgaaataatccgtcacaaacgcgacttcactgttgtggacccaccccccggacccagcccggctcggcccagagccccccagcggttctgctcggcaaggatcgcccgccaagttcacgcgtcgggcaataataagggcacgcgcctgactgacgacagttttgacacggatgtactcaaagcggacggggcgatcctcgtcgatttctgggcagagtggtgcggtccgtgcaaaatgatcgccccgattctggatgaaatcgctgacgaatatcagggcaaactgaccgttgcaaaactgaacatcgatcaaaa

SEQ ID NO: 29555 - DNA, 954 bp, Homo sapiens
  SIMILAR (1)..(429): 981254mologous to Escherichia coli rhsA,accession number X78541,Smith-Waterman Score=744.
atgacgcagtatggcggtagcattgttcagggttcagccggggtacgtattggtgcccccaccggcgtggcctgttcggtgtgccccggcggagtgacgtccggccatccggtcaatcccctgctcggtgcaaaggtccttcccggtgaaaccgacatcgccctgcccggcccgctgccgttcatcctctcccgcacctacagcagttaccggacaaaaacgcccgcgccggtggggagcctcggccccggctggaaaatgcctgcggatatccgcttacagctgcgcgataacacactgatactcagtgataacggcggcagaagcctgtattttgagcacctgtttcccggtgaggacggttacagccgcagcgagtcactgtggctggtgcgcggcggcgtggcgaaactggatgaaggtttgcgtaccgtctaccccgacacaggtcgactgaccgaaaccgtaatccgtggtctgtttaaccgcttcatagaaagcggacccacgggcttacacggcacgcagatgcacattatcgccgctgtcttttcgccagatgcgtaccgcgccctggtcttcagcaaatccactggcggcctagtccgtaggcagacaattcagtctggtaacattgaacgtactatgaagctgactattccggaagtagaactgccgaacgcagaactgctaggcaaacgccgtctggaaaaattcgccgctaaagtacagcagcagctggaaagcagcgatctggatcaataccgcgcactgctgagcaaaattcacggcttcacagacgatccgcgatttttacaggccaccgaagccgtggtcctgacgcgagtcgatgattacccaatgcaacaactgctgcgtgccgttgtagataaacacgccctgctcgcccatcaacaacgggtagtgagtggggaacaggaaccgagttattaa

SEQ ID NO: 29556 - DNA, 1590 bp, Homo sapiens
  SIMILAR (259)..(705): 501254mologous to Escherichia coli Altronate dehydratase,accession number D13328,Smith-Waterman Score=296.
atggggtccccaacaggctacaccccagccccagaggcctcccagtctggagaggactccctgccctctctcatcttggagcagtgttcacgttcacgcccacaatacgcgcacgaactgagcgatctggatcagtatcgctatcaacctgattttcaggatctgctgcgcaagcggcagatcgtgaagtgcagatctatcgtcgcgctaacggcatgtcggggtgcagcagttgctgatggaccattgccgcgacgaagcacgtttgaaaaactggtcaccatggtcaacgacttcaaacagtactttatgcccatgatcagccgatctatgaaaacccatcgccggggaacaaagcggcggtatcaccacgctggaagacaaatcacttggctgtacccagaaagcggttccagcgtcgtggttgacgtgctgcgttacggcgagcggctgaacttgttaagtgcgccgggtaacgatgccgtagcgaccacgccctggcgggtgcgggctgccatatggtgctgttcagtactggtcgtgcacgccgtatggtggatttgtgccgacggtgaaaatcgccaccaacaggaactggcggcgaagaaaaaacactggatcgactttgacgcggtgatccacggtaaagcgatgccgcagttgctggaacgaatttatcgacacatcgttgagtttgccaacgggctgggtgtcatcgcctttctgattggtatcacaacatttttcaatcgtgagaacgtcgcttcaaaaagcagctttcggtctatagcgccgttattggcgacatttttatcttctgggcacctatcccgctggtgccagtgccatccttatgccattcgtacattgattacttgctgtgcgtgctgctgggtggcctcttgcgccaggcgctacgcagatgtcgcggatagcttcggaacggttgttataaccacgacgctggctcagctgtccagcgtctccagtaaatcgtcatcaagcgtgatggtgactcgtgcatttgcgttaaaccttttctgtgggtcagggaaacgttattcagcaccgcctgatgttatgttttccgttaaatccaccgtgcgcatagtgatgggaaaggccggagtgttaagtaaagtcatgatgccagctccataccgtagagggcgagatgacggaaaccaggctgcgcgtcactgtatgtttgggggcgttaaacagcgttctacatcgccctgttcgacaatcttaccgtcagacatcaccgccacgtatccgccagacgcgccacaacgcccatatcatgggtcaccagcagcattccggcgcttgtttttgcataatgctttccagcagatcgaggatgcgcgctgtgctaccacgtcaaggtcggtggtcggttcatcggcgatgataaacgtgattcacacagcaccggcatctaatcatcatgggtacgagctgaatcgatcatggtctagcgtttcgtgtgaatgtatcgtccattcacaaatagaggaactaattaagctgggtccagagagcaccctacacaccctgggtaagagccgcgttcacagctgctaa

SEQ ID NO: 29557 - DNA, 1059 bp, Homo sapiens
  SIMILAR (438)..(635): 341254mologous to Cloning vector pSacBII SacB,accession number U09128,Smith-Waterman Score=62.
atgaagctgatgtgtattgatggctacaacaatcggtatacgtgggagatgatgcacattggagaaatgagtgatgaagaattgtttggcgaacgtagaaacattgatagatcggaacgtcgaattgacagtcatgccgctacctgctggttccatccgcatcagcacggcaaaaccgggcgacaggtggcgatggggctggctgggctggtggtgattgaagatgacgagatcctgaaattaatgctgccaaaacagaaaggcttcgcgcacggcaatgcgagggatctgaataatccccagaccggcaagaccggcgcattctactgcgttgccaaaccgaataagaaaattttcgattatgcgctggaacaggcgggcaaaaatgaccgttcacgcgtgctgctggttggctgtctggtagttgtgttatcgctgattatgggcgttattctcggcctgatcgccggttactttggcggcctggtcgataacatcattatgcgcgtggtcgatatcatgctggctctgccaagtctgctactggcgctggtgctgccaaccacgggcaccagaaaacggaattaccagggcgaaagaatcctttatttaccaaagcgttctacggcggcgggcccgaccttcttccgtaaagaaaacccagaagagttaaataatgataccacattgaaaaaagtaatgaagccgctgatcacttcaaacacggtaactgatgaaatcgagcgcgcgaatgttttcaaaatgaccggcaaatggtacttgttcactgattcacgcggttcaaaaatgacgatcgatggtattaactcaaacgatggatattcacggcgcgaaacaggacgaagacggcgtttaccgcgtacgagtcctaaaaatggcgggataacttgccagagcggcttccgggcgagtaacgtgctgttaacaaataaaggagacgttatgctgggtttaaaacaggttcaccatattgaaataaatgcgacggattatgcgaccattgctggccaccgccaccagatgaagcagaaagcttga

SEQ ID NO: 29558 - DNA, 2250 bp, Homo sapiens
  SIMILAR (1207)..(2208): 981254mologous to Escherichia coli Mlc protein,accession number D90801,Smith-Waterman Score=1653.
atgcaacgagtcaccatcacgcttgatgacgatttactggagacgctggacagcctgagccagcgtcgtggttataacaaccgttccgaagctatccgcgacattctgcgtagcgccctggcgcaagaggccacccagcagcacggcacgcaaggtttcgcggtgctgtcgtatgtgtatgaacacgaaaaacgcgacttagccagccgcattgtctccacccagcatcatcaccacgacctctccgtcgccacgctgcatgtgcacatcaaccacgacgactgtctggaaatcgccgtgttgaaaggtgacatgggtgacgtgcagcattttgccgatgacgttatcgcccagcgcggctttttcttcgctttttcgtatgaagatactgtcattaaaataatagaaaaggattttacgatgagcggaaaaccggcggcgcgtcagggtgacatgacgcagtatggcggtagcattgttcagggttcagccggggtacgtattggtgcccccaccggcgtggcctgttcggtgtgccccggcggagtgacgtccggccatccggtcaatcccctgctcggtgcaaaggtccttcccggtgaaaccgacatcgccctgcccggcccgctgccgttcatcctctcccgcacctacagcagttaccggacaaaaacgcccgcgccggtggggagcctcggccccggctggaaaatgcctgcggatatccgcttacagctgcgcgataacacactgatactcagtgataacggcggcagaagcctgtattttgagcacctgtttcccggtgaggacggttacagccgcagcgagtcactgtggctggtgcgcggcggcgtggcgaaactggatgaaggtcaccggctggccgcactctggcaggcgctgccggaagaactccgcttaagtccgcatcgttatctggcgacaaacaatgcgccagaacatttccagttgctgatcaggatgcacggcgtccatctcagcgtgttccccgaggctgaatacggcgttcgccagccagcgccagttggcgcgcgggcgaatcacttcgatatcgcagccgacttcgccttcatcactcaacagcagggcgatatctggagcgtgcgcttaagtacagtaactgtccaccagactactccgatacaatcaggggtaggtaccgagctagcggaaggtatcaatcagctcgtacctcgctccttcagtatcactaaaattgtccgtgagatgctcgaagcacacctggtgcaagagctggaaatcaaagaagcggggaaccgtggccgtccggcggtggggctggtggttgaaactgaagcctggcactatctttctctgcgcattagtcgcggggagattttccttgctctgcgcgatctgagcagcaaactggtggtggaagagtcgcaggaactggcgttaaaagatgacttgccattgctggatcgtattatttcccatatcgatcagttttttatccgccaccagaaaaaacttgagcgtctaacttcgattgccataaccttgccgggaattattgatacggaaaatggtattgtacatcgcatgccgttctacgaggatgtaaaagagatgccgctcggcgaggcgctggagcagcataccggcgttccggtttatattcagcatgatatcagcgcatggacgatggcagaggccttgtttggtgcctcacgcggggcgcgcgatgtgattcaggtggttatcgatcacaacgtgggggcgggcgtcattaccgatggtcatctgctacacgcaggcagcagtagtctcgtggaaataggccacacacaggtcgacccgtatgggaaacgctgttattgcgggaatcacggctgcctcgaaaccatcgccagcgtggacagtattcttgagctggcacagctgcgtcttaatcaatccatgagctcgatgttacatggacaaccgttaaccgtggactcattgtgtcaggcggcattgcgcggcgatctactggcaaaagacatcattaccggggtgggcgcgcatgtcgggcgcattcttgccatcatggtgaatttatttaacccacaaaaaatactgattggctcaccgttaagtaaagcggcagatatcctcttcccggtcatctcagacagcatccgtcagcaggcccttcctgcgtatagtcagcacatgagtcatctcatactgcgcgatgtgatgcctgatagctttcattaa

SEQ ID NO: 29559 - DNA, 2721 bp, Homo sapiens
  SIMILAR (2152)..(2664): 941254mologous to Escherichia coli 37KD protein, similar to YI22-ECOLI,accession number D85613,Smith-Waterman Score=863.
atgacccgcacactcaagccgttaattcttaacaccagcgcactgacgctaacgttaatcctgatttataccggcatttcggcccatgacaaactcacctggctgatggaagtgacaccggtgattattgtcgtgcagctactgcttgccaccgccagacgttatccgttaacgccgctgctctatacgctcattttccttcacgccatcatcctgatggtcggcggacaatacacctacgcgaaagtccccgttggttttgaggtgcaggaatggctggggttgagtcgtaatccgggtaccgagctcatagtcgtatcaaaagccgttcagccgccaccggagccggtggtagagccagaaccggaacgtgagccgatccccgaaccgccaaaagaagcaccggtggtcattgaaaagccgaagccgaaacctaagccaaaaccgaagccggtgaaaaaggtacaggagcagccaaaacgcgatgtcaaacccgtagagtcgcgtccggcatcaccgtttgaaaatacggcaccggcacgcctgacatcaagtacagcaacggctgcaaccagcaagccgggtactcaaaaactcacccagcctcaacttgaaaatgattcatatgccaaggaaaaaccattcaaatccattccgaaatttcctgtcaactttttaagttcaacctggcaggaaggcggcagcatggcgcacttgctgggcaccgatgacgtaggccgtgatgtgctgtcgcgcctgatgtacggtgcgcgcctgtcgctgctggttggctgtctggtagttgtgttatcgctgattatgggcgttattctcggcctgatcgccggttactttggcggcctggtcgataacatcattatgcgcgtggtcgatatcatgctggcgctgccaagtctgctgctggcgctggtgctggtggcaattttcggcccgtcgattggtaacgccgcgctggcactgaccttcgctggcttgccgcactatgtgcgcttaacccgcgccgccgtgctggtggaagttaaccgcgattacgcgtcgctcggtttctctaacgccattctcgatatggctgctcttggtttcctcggcatgggggcacagccgccaacgcctgagtggggcaccatgctctccgacgtgttgcagttcgcgcaaagcgcctggtgggtcgtgaccttcccgggtctggcgatcctgctgacggtgctggcatttaacctgatgggtgacggtctgcgtgacgcgctcgatcccaaactgaagcataagaggttcgagatggcgttattaaatgtagataaattatcggtgcatttcggcgacgaaagcgcgccgttccgcgccgtagaccgcatcagctacagcgtaaaacagggcgaagtggtcgggattgtgggtgagtccggctccggtaagtcggtcagttcactggcgattatggggctgattgattatccgggccgcgtaatggcagaaaaactggagtttaacggccaggatttgcagcgtatctcagaaaaagagcgccgcaacctggaagtttccaaattcagatgtatgcagcgtgaacgccttatccggcatctcaatatcagatcttacatgcgccgctttcagcagccatcgtcctggattgacggcaccagatcgtcttgtgcgtcttcagcgccgtcacggcgcctgcgcggcatggctgggaacgccgatgccagcatcgacaaccaccggcactgtggcctgctggataataatctccagcatggcgcgggtttccagtccctgattcgagccaatcggcgcgccgagcggcatcaccgctgcacagccgacttcttccagacgtttacacaataccggatcggccccgcagtaaggcagcacgacaaatccctgttgtaccagcgtttcggcggctttcagggtttcgatgggatcgggcaacagccagcgggcgtcaggcagggtcacacccgccgcgataagcggttcgaggatagcgtcgttgtgctggcgcaagtcgacacgtttcatcgccagtgtcaccagctggctgccggaagcgcggatcgcggggatcctccaagggcgactgctgagctgcagatcagcccgtccagttacttctggtttaggcaggagttgcacgtcattctcagacgaaccgatgactggatggatggccgccgcagtcgtcacactgatgatacggatgtgcttctccgtatacaccatgttatcggagagctgccaacgtatggttatcgtcgggtatgggcgctgcttcgcagacaggcagaacttgatggtatgcctgcgatcaatgccaaacgtgtttaccggatcatgcgccagaatgcgctgttgcttgagcgaaaacctgctgtaccgccatcgaaacgggcacatacaggcagagtggccgtgaaagaaagcaatcagcgatggtgctctgacgggttcgagttctgctgtgataacggagagagactgcgtgtcacgttcgcgctggactgctgtgatcgtgaggcactgcactgggcggtcactaccggcggcttcaacagtgaaacagtacaggacgtcatgctgggagcggtggaacgccgcttcgggggatctccagaattttctcaaaccgtatggtctggtttgaagatgatcaaatcagtgccgagctggtgcagatcctacaagtattag

SEQ ID NO: 29560 - DNA, 619 bp, Homo sapiens
  SIMILAR (23)..(286): 301254mologous to Homo sapiens Human secreted protein sequence encoded by gene 14 SEQ ID NO:80,accession number Y91359,Smith-Waterman Score=84.
ctctgtactggggtattcgctggtttgttctagagtgcttttggcctgcttttggcctggttccgatttttggccgcgaagcaggcgaaaaacctatggcaccgccccccagtcgtgctactctttttacgtcgcacttgactgtggaggcgtttcccgtctggtcatatttgtatcctggcgaaacccccaggttgcacccacgagcgcacaccagaaccgtcccagccgcaatccggtatccagaccgccaaacacccaacgggttgcgaggcgcaaacacttgcagggcgggagtagttccccgaatgtcgttcgaggcataccgatcatcacagtactccgattttgtatagctagctccctgatcggatcttctgaagcggacttcaggtgggcttcggttcttcatagtattcatgtagcacgcagacagcagcaacaaggtcattaagcgtccaatgcacattttccatggcaagcaaaccataccacatacaaaccgagccaccataagaaacagagcaatggtccattgattattgcgttccatcaggttacgtaccacatcgttgacaggataaacccatagtgcggtgaccaaacacaattgggccat

SEQ ID NO: 29561 - DNA, 1309 bp, Homo sapiens
  SIMILAR (615)..(662): 1001254mologous to Homo sapiens hFATP1,accession number AX015323,Smith-Waterman Score=84.
ccaagtacggctttgtccactacaccttacacactctggggggcaccgctcgggctctcgtagccactgactaccgcccactaacgaaactctctttggacaatggctttcaaacggtagaccacttgcaaatatcccaatgcccctacattcccccttacaactttcccaccgatacgagtcctggcacgcctggcctattacaacctccggaaggtcacgcgtatgatgcgtattggcgctgcgtacgggcagttcgggggcaacgagtctctgccctgcacggtccgcccgtccatctccgttcagtgtatccatctgcgagtgcatagtgtttgcgcctcgcaacccgttgggtgtttggcggtctggataccggattgcgcctggctacggttctggtgtgcgctcgtgggtgcaacctgggggtttcgccagatacaaatatgaccagacgggaaacgcctccacagtcaagtgcgactactaccgcatggcagccttcggccaccacgcctaccgcatgcaggcgctgacgtgctctatgactgcctgcccctgtaccactcggcaggaaacatcatcggcgtggggcagtgtctcatctatgggcgacagtcgtcctccgcaagaaattctcggccagccgcttctgggacgacgcatcaagtacaactgcacgggaattggaccctgggatgggaagggcgatgagtctggggcttccaggcccagaaagcagcaggccagtggctggctctgggcctgtccccggatcttcctcgtgatccctcattccagccaccctgctgcccgcaggaccaatggcagcgtagggggttccaaccggaaccgctttgttataataaccggaccgggcccccagttggccccaaaaggcctttggcaatggcccattggccaagatccggtgaccgaaatagcgacgctgatcggtacgcatgacctgataatgttcgactgtatcggcagcgtgtcagcgccgacaatacagccattagaaaaactcctatcgattgtgcgctacccggcacaggttgggttattttttgccacgcgtcgctgccaggctggcgctactggcaagcagagccagcagcgcaatccggttttattcattttttaccagcgtggaatatcagtcttcacatcggcttttgcgcccgttgccgtaacagcgccaccacgtcaaagccgtcgccaatttccacgcctttcaccgcttgatgctcatcagcgcatgggcgatgtcagcatccaggcggtcaaagaagctcgtacctgctga

SEQ ID NO: 29562 - DNA, 2830 bp, Homo sapiens
  SIMILAR (1723)..(2307): 991254mologous to Escherichia coli RhsC protein precursor,accession number D90709,Smith-Waterman Score=1050.
atgctgcccgactcatcagtccgtttaaataaatacatcagcgaaagcggaatttgctcacgccgcgaagcggatcgctatatcgagcaaggcaatgtgttccttaatggcaagcgagccaccattggcgatcaggtgaaacccggcgacgttgtgaaagtaaacggtcagttgattgaacctcgggaagccgaagatttggtacttatcgccctgaacaagcccgttggtattgtaagcaccaccgaagatggcgagcgcgataacattgtcgatttcgttaaccacagcaaacgcgtgttcccgattggccgcctggataaagactcccaggggctgattttcctcaccaatcacggcgatctggtgaataagatcctgcgtgctggcaatgatcatgagaaagagtatctggtgacggtcgataaaccgattaccgaggagtttattcgcggcatgagtgcgggggtgccaatcctcgggacagtgaccaaaaagtgcaaagttaaaaaagaagcgccgtttgtcttccgcattaccctggtgcaggggctgaaccgtcagatccggcgcatgtgcgagcatttcggctatgaagtgaaaaagctggaacgcacgcgcatcatgaacgttagcttaagcggcattccgctgggggaatggcgcgatttaaccgacgatgagttaatcgacctctttaagctcattgaaaattcctcttccgaggtaaaaccaaagcgaaggccaaaccgaaaacagcgggcatcaaacgtccagtcgttaagatggaaaaaacggcggaaaaaggcggtcgcccggcgtccaacgcaaagtagtgatgatgccattagaggccagcagcctgatggggtcgattgccgggattgccgagctggtgaaagacagcgccaacaaacggactcagccatgatggagttaatggtcgttcatccacatattttctggctcagtctcggcggtttgctgctggcagccgagatgctgggcggaaatggttatttgttgtggagcggcgtggcagcggtgattaccggcctggtggtctggctggtgccgctgggttgggagtggcaaggggtaatgtttgccatcctgacgctgctcgccgcctggctgtggtggaaatggttgtcgcggcgggtgcgcgaacaaaagcacagcgatagtcatttaaaccagcgcgggcagcagctgattggccgacgttttgtgctggaatctccgctggtcaacgggcgcggtcatatgcgcgtcggtgacagttcatggcctgtcagcgccagcgaggatctcggtgcaggcattcgccagtgccagcagctggtcgcgcatggattgcagctcctcaatgtgtcgttcgatctccgccaccttttccagcgtgggcggttggagttcggctgtgcgctgcggttgttaacagattcccagtcgcggctttcacgtaagccccgcggttggcgcggattgtacgggtattcgcccccttgtggggacatagttcggtaccatcaccacgacctctctgtcgccacgctgcatgtgcacatcaaccacgacgactgtctggaaatcgccgtgttgaaaggtgacatgggtgacgtgcagcattttgccgatgacgttatcgcccagcgcggctttttcttcgctttttcgtatgaagatactgtcattaaaataatagaaaaggattttacgatgagcggaaaaccggcggcgcgtcagggtgacatgacgcagtatggcggtagcattgttcagggttcagccggggtacgtattggtgcccccaccggcgtggcctgttcggtgtgccccggcggagtgacgtccggccatccggtcaatccgctgctcggtgcaaaggtccttcccggtgaaaccgacatcgccctgcccggcccgctgccgttcattctctcccgcacctacagcagttaccggacaaaaacgcccgcgccggtggggagcctcggccccggctggaaaatgcctgcggatatccgcttacagctgcgcgataacacactgatactcagtgataacggcggcagaagcctgtattttgagcacctgtttcccggtgaggacggttacagccgcagcgagtcactgtggctggtgcgcggcggcgtggcgaaactggatgaaggtcaccggctggccgcactctggcaggcgctgccggaagaactccgcttaagtccgcatcgttatctggcgacaaacagtccgcaggggccgtggtggctgctcggctggtgtgagcgggtgccggaaagcggatgaggtgcttgctgcgccgctgccgccgtaccgggtactgaccgggctggtggaccgcttcgggcgcacacagacgttccaccgcgaagccgccggtgaattcagcggcgaaatcaccggcgtgacggatggtgccgggcgtcacttccggctggtactgaccacgcaggcgcagcgggcagaagaagcccggcagcaggccatttccggcgggacggaaccgtccgcttttcctgataccctgccgggttacaccgaatatggccgggacaacggcatccgtctgtctgccgtgtggctgacgcacgacccggaatacccggagaatttacctgccgcgccgctggtgcgctatggctggacgccccgcggcgaactggcggcggtgtatgaccgcagcaatacacaggtgcgcagctttacttacgatgataaataccggggccggatggtgccgcccgtcacacgggccggacggaatctgtaccgttacacagcgagggcggtgacagacagctaa

SEQ ID NO: 29563 - DNA, 3078 bp, Homo sapiens
  SIMILAR (1174)..(1878): 831254mologous to Escherichia coli transmembrane protein,accession number L08399,Smith-Waterman Score=955.
atgcaacgagtcaccatcacgcttgatgacgatttactggagacgctggacagcctgagccagcgtcgtggttataacaaccgttccgaagctatccgcgacattctgcgtagcgccctggcgcaagaggccacccagcagcacggcacgcaaggtttcgcggtgctgtcgtatgtgtatgaacacgaaaaacgcgacttagccagccgcattgtctccacccagcatcatcaccacgacctctccgtcgccacgctgcatgtgcacatcaaccacgacgactgtctggaaatcgccgtgttgaaagatactgtcattaaaataatagaacaggattttacgatgagcggcaaaccggcggcgcgtcagggtgacatgacgcagtatggcggtagcattgttcagggttcagccggggtacgtattggtgcccccaccggcgtggcctgttcggtgttgcccggcggagtgacgtacgggcatccggtcaagtccctgctcggtgcaagagtgcttttggcctgcttttggcctggttccgatttttggccgcgaagcaggcgaaaaacctatggcaccgccccccagtcgtgctactctttttacgtcgcacttgactgtggaggcgtttcccgtctggtcatatttgtatcctggcgaaacccccaggttgcacccacgagcgcacaccagaaccgtcccagccgcaatccggtatccagaccgccaaacacccaacgggttgcgaggactctagaggatcccccccatatgatcttgcctgcattgtgctgggtactattccagctggcggtcattgtgcgtatgacacgctcctcgatgctggaagtgctgggcgaggattacatccgcaccgcgcgcgccaaagggctaacccgcatgcgggtgattatcgtccatgcgctgcgtaacgcgatgctgccggtggtgaccgttatcggcctgcaggtgggaacattgctggcgggggcgattctgaccgaaaccatcttctcgtggcccggtctgggacgctggttgattgacgcactgcaacgccgcgactatccggtagtgcagggcggcgtattgctggtggcgacgatgattatcctcgtcaacttgctggtcgatctgctgtacggcgtggtgaacccgcgtattcgtcataagaacgcaccggtgccgatgaccccgttacaggagttctggcactattttaaacgcaacaaaggcgcggtcgtcgggctggtttacgtcgtcatcgtgctgttcatcgcgatctttgccaactggattgcaccctataacccggcggaacagttccgcgatgcactgctcgccccgccagcctggcaggaaggcggcagcatggcgcacttgctgggcaccgatgacgtaggccgtgatgtgctgtcgcgcctgatgtacggtgcgcgcctgtcgctgctggttggctgtctggtagttgtgttatcgctgattatgggcgttattctcggcctgatcgccggttactttggcggcctggtcgataacatcattatgcgcgtggtcgatatcatgctggcgctgccaagtctgctgctggcgctggtgctggtggcaattttcggcccgtcgattggtaacgccgcgctggcactgaccttcgttgccttgccgcactatgtgcgcttaacccgcgccgccgtgctggtggaagttaaccgcgattacgtcaccgcgtctcgcgtggcgggaaacacccggtcaccatttatcacggtggttcgttccccgctaacgactgacggtagtagggtggatcccgatggaatctttacagttgccaacctaatggggtctgaaatgtccatggcgccgcatcctatgaccgagggtgtatacacatatggacccgttgccaaacttgacgctgattccccaggttttaacaatagccagattaccctgctcaaagggtggcattgcggggagaggaatattgtcggcagcctgatggaagtcggtgcccacaacagccggaagctggatagcagagttgctggcggcaaaggacagaacgctggcggcagcaacggcaaagcggaagggctgtatctggtcgcggtggattaccctgaccgttatctcgacaaaacccatcagttttatgagaaacatggcggcaaaacgattattctcgcccgttttgtgccgatcgtcagaacgttcgccccgtttgttgcgggaatgggccacatgtcgtaccgtcatttcgccgcttataacgtgatcggcgcactgttgtgggtggtaatagaatacacccccccgatacttctgagcgaggtctcttctatacgatgccggtcctctgtggaagtttatttagctggccagctcacacctcatggagaccaacacttctttagatgccctaaaacaggaaagttgggtcagttcaccttgcaacaggtatactggtgcatccaggtttttgacgcctctggcttgcagccctacttcctcctgtactacatcctgcagctggtcgacaacttccagcagcctgtagactgccagctggtgaacgacttggccaaaatccagttgtccttagtcctcgaaagctttaaagcagatatccagaaactgctcacttccctgcccgcacaccatttccagattgtgctggaaattaccgagcgcgatatgttgaaagagcaagaagccacacaactcttcgcctggctgcactcggtcggcgtagaaattgctattgatgacttcggcaccgggcacagcgcgcttatctatcttgagcgttttacgctcgattatctgaaaattgaccgtggatttatcaacgccatcggtacggaaacgatcacttcccccgtacttgacgcggtgctgacgctggcgaaacgcctcaatatgctgacggttgctgaaggggtcgaaacgccggaacaggcgcgatggctaagcgaacgcggcgttaatttcatgcaaggctactggattagccgcccgttaccgctggacgattttgttcgctggctaaagaaaccgtatacgccgcagtggtaa

SEQ ID NO: 29564 - DNA, 1557 bp, Homo sapiens
  SIMILAR (1533)..(1114): 991254mologous to Escherichia coli yjjJ,accession number U14003,Smith-Waterman Score=724.
  misc_feature (1)...(1557): n = a,t,c or g
ttangcagcgggctggcgcggctgattaatgacattcctcttcccggtacaacgggcgttgagcgcgtactttttcgcgcacttggcgtctctgaccgtgagatgaactggaagcaatatctttgtgccattctcggcctgaacatgctggggctggcggtgctgttttttatgttgctcggtcagcactatctgccgcttaatccacagcagttgccagtgctgtcgtgggatctggcgctgaataccgccgtcagctttgtcaccaataccaactggcaatcttatagcggtgaaaccacgttgagggtagtggcgctggcaaaagttggcggcggtgttgacagcctcagcacgccaatcggtaaagtcgctggcgtactgctggcaacggtttgttacctggcggtggggccgcttttcgctacgccgcgtacagctaccgtttcctttgaagtggggattgcgccgctgacgggtgattccgcgctgccgctgtttatctacagcctggtctatttcgctatcgttattctggtttcgctctatccgggcaagctgctggataccgtgggcaacttccttgcgccgctgaaaattatcgcgctggtcatcctgtctgttgccgctatagtctggccggcgggttatggtggagagcacgcagggaaaagcaagctctctcacgtcttttaataaaggcactaatgagctgttgccggggatacccatgagcaggtttgcgaggccataaccgaggcctttttcgcccattatggcgagcgcgtggaagcggaaatcatctccccgaacaaaacgccagacttgccaaacttcgccgaaacctttgcccgccagagtagctgggaatggaacttcggtcaggctccggcattctcgcatctgctggatgaacgctttacctggggcggcgtggaactgcatttcgacgttgaaaaaggccatatcacccgcgcccaggtgtttaccgacagcctcaaccccgcgccgctggaagccctcgccggacgactgcaaggctgcctgtaccgcgcagatatgctgcaacaggagtgcgaagcgctgttggttgacttcccggaacaggaaaaagagtttctcttcgatttgccggattttttccggcatttcttgcgcaatgtggcgaaacgcctcgctgatacgcggatctctggcgaccgtttgccagaactgctgcgccagcgggatcgccgttaaccaagcgcttttactgacgttaagatcaaacttcacctcaatggcagcatcacgcagcattccagcgctgtttggtgcatagaccatcggcagcatgtcgtagacgggcgtcagcgcaaatggcggttcagataaataaaacgataaattacctgcgtgcatatcgctgttggcgataagtcgcccaaatgcccagatcacttctgtttgcgccacgctctggtgagtgacaagttgttgctcacacaaacggcgcattgcctgcggccacgatcccggagaagagataaactcaaaccactgtagttcccgaggcat

SEQ ID NO: 29565 - DNA, 4107 bp, Homo sapiens; identical to SEQ ID NO: 18260
  SIMILAR (1338)..(616): 991254mologous to Escherichia coli yjdB,accession number U14003,Smith-Waterman Score=1293.

SEQ ID NO: 29566 - DNA, 1266 bp, Homo sapiens
  SIMILAR (1)..(348): 931254mologous to Escherichia coli K12 putative factor,accession number AE000220,Smith-Waterman Score=593.
atggctcccgaaaatcatgatggggaaaaacactttgctgaaattgtgaaagatttcggcgaaaccagtatgaatgataacgggctggatactggcgagcaggcaaaagctttcgcattgggaaaagtccgcgacgcgcttagtcaacaggttaatcagcacgtagagtcctggctatcaccgtggggaaatgccagtgttgacgtcaaagtggataacgaaggacatttcaccggcagtcgtggaagctggtttgtgccgttacaagataatgatcgttatctcacctggagccagcttggtcttactcagcaggataatgggttggaacaacggatggcgcgcgggtacgacctgacagctcggatgcgcatgccgttctatcaacacctcaataccagtgtcagcctagaacagtatttggagagggaacagatgcgatatccggttgatgtatacacaggcaagattcaggcttatcccgaaggcaaacccagcgcaattgctaaaatccaggttgatggtgagttgatgctgacggagctggggctggaaggtgacgagcaggcggagaaaaaggttcacggcgggccagacagagcgctgtgtcattatcctcgtgagcattatctctactgggcgcgggaatttccggaacaggcggagttgtttgttgcgcctgcgtttggtgaaaacctctcaaccgacggcctgacggaaagtaatgtttatatgggcgatattttccgctggggagaggcattaattcaggtcagccagccgcgctcgccttgctataaactcaattaccattttgatatcagcgatatagcgcagttgatgcaaaacacagccacgatgctgctgaatggcggtttcaacaatcgccagccccaaacctgtaccgccagattcacgatcgcgtgcttcatcggtacgatagaacggacggaaaatctgttcgcgatcttccgggctaacgccaggaccatcgtcgtccaccgtaatggtgataccgtctttatctaccgcaaagcccacttcaatcttcgtccagcccagagccgcgtccgcacccctatgcaggcagaatcacatcgcacccggagagtaacagagcgccacacagccacagccggaaagagaggaacccaaagacccgagcaacagccccacgcgaccaacctgacggcggacccacgacgcaaagagcgccgccccacgcacaagacgcagccacaggaggggggaacgcaacgcagatag

SEQ ID NO: 29567 - DNA, 831 bp, Homo sapiens
  SIMILAR (421)..(825): 901254mologous to Escherichia coli similar to S. typhimurium brnQ,accession number U73857,Smith-Waterman Score=601.
atgaaatccatggcttcttctcaggaggagaatcctggggcgcatagcacattgcgaacaagtgaattcagttcacccacccgcgctcgcccttgctataaactcaattaccatttggatatcagcgatatagcgcagttgatgcaaaacacagccacgatgctgctgaatggcggtttcaacaatcgccagccccaaacctgtaccgccagattcacgatcgcgtgcttcatcggtacgatagaacggacggaaaatctgttcgcgatcttccgggctaacgccaggaccatcgtcgtccaccgtaatggtgataccgtctttatctaccgcaaagcccacttgagaagttttattgtggcgcctcgtttatttagaacgggcgcccgtttgtttcaaccggggctttttttagacaccgggtttaacaaagacgccatgtccatgggaaaaggtaacattattttccctccaatggtcggcttacaggcaggcgaacacgtctggactgcggcattcggcttcctcattactgccgttggcctgccggtattaacggtagtggcgctggcaaaagttggcggcggtgttgacagcctcagcacgccaatcggtaaagtcgctggcgtactgctggcaacggtttgttacctggcggtggggccgcttttcgctacgccgcgtacagctaccgtttcctttgaagtggggattgcgccgctgacgggtgattccgcgctgccgctgtttatctacagcctggtctatttcgctatcgttattctggtttcgctctatccgaccctgttgtcgacggcctccgacaaataa

SEQ ID NO: 29568 - DNA, 1831 bp, Homo sapiens
  SIMILAR (746)..(1321): 971254mologous to Escherichia coli DNA polymerase III delta subunit,accession number L04576,Smith-Waterman Score=959.
aaaatgttttatcgccccgcacacctgaagggacgggtaaacgatgcgtggaaatcactggaatttaaacgtagtgaccattcactcaatatatataacccaactgaatattacgtcgtatttgccggactggcagtcgataaaaccgatctcacaagcaaaattgaatatatcgcgcccggagaacataaacagttaccacttcctgcatctggcggaaagaacgtgaaatgggctgcgatcaatgattatggcggcagttccgggacagaaactcgtccactgcaataaaaaatataaaaacacaggtcatcagggaatgccacaacgacaccaccagggacataaacgcacaccgaaacagttggcgctcatcatcaaacgttgtttgccgatggtgctcactggcagcggcatgctttgcactaccgctaacgccgaagagtattatttcgaccccattatgctggaaaccaaaaaaagtgggaactcctctagaggaccctttgggcccttttaccagaatcaactctgtactaacatgcgaactaggaatctcttaaacctggcgacgctcatagccaacaggagagaaccgctagacagccagcatcacaacagcaccgaggagggacgcaacgccacgcatgagaccacgaggacgcagtcagagttagacaacacgcagagcgaagcccccacttcaaagccaggagaattcacgcgcaacgcggagggaggatttgctgcgcgcgcaaaacagctcaacttagaactggatgacgcggcaaatcaggtgctctgctactgttatgaaggtaacctgctggcgctggctcaggcactggagcgtttatcgctgctctggccagacggcaaattgacattaccgcgcgttgaacaggcggtgaatgatgccgcgcatttcaccccttttcattgggttgatgctttgttgatgggaaaaagtaagcgcgcattgcatattcttcagcaactgcgtctggaaggcagcgaaccggttattttgttgcgcacattacaacgtgaactgttgttactggttaacctgaaacgccagtctgcccatacgccactgcgtgcgttgtttgataagcatcgggtatggcagaaccgccggggcatgatgggcgaggcgttaaatcgcttaagtcagacgcagttacgtcaggccgtgcaactcctgacacgaacggaactcaccctcaaacaagattacggtcagtcagtgtgggcagagctggaagggttatctcttctgttgtgccataaacccctggcggacgctctgtttggcggcacctttgatccggtgcactatggtcatctaaaacccgtggaaacgctggcgaatttgattggtctgacgcggccggaagcgaacagcgtgcagcgtaaacacatgcttgaactggcgattgccgacaagccattatttactcttgatgaacgcgagctaaagcgcaatgccccctcttacactgcgcaaacactgaaagagtggcggcaggtggtgccaattcttacctctatctggtcacgtaaagtcaaagccagagcagcgaaaatcgaaattttaggcaagattcaggcttatcccgaacgcaaacccagcgcaattgctaaaatccaggttgatggtgagttgatgctgacggagctggggctggaaggtgacgagcaggcggagaaaaaggttcacggcgggccagacagagcgctgtgtcattatcctcgtgagcattatctctactgggcgcgggaatttccggaacaggcggagttgtttgtcgcgcctgcctttggctga

SEQ ID NO: 29569 - DNA, 477 bp, Homo sapiens
  SIMILAR (34)..(393): 961254mologous to Escherichia coli o389,accession number M87049,Smith-Waterman Score=603.
atgcaaagtattcgccctccagattgtctatccgtgcatctcaacccgaacgtcagagaaccggtcaatcgcattctggggcatgtgaaaaatgtcattctgatcgatccccaggagtatttaccgtttgtctggctgatgaaccacgcctggctgattttgaccgactcaggcggcattcaggaagaagcgccttcgctggggaaacctgtgctggtgatgcgcgataccactgagcgtccggaagcggtgacggcgggtacggtgcgtctggtaggcacggataagcagcgaattgtcgaggaagtgacgcgtcttttaaaagacgaaaacgaatatcaagctatgagccgcgcccataacccgtatggtgatgcagcgtttgcctcacggcaaaaacaggtaattggtgtcgatatcaaccaacatgcggttgataccttcaatcgtggggacatcgcctatcgtcgaacctga

SEQ ID NO: 29570 - DNA, 586 bp, Homo sapiens
  SIMILAR (243)..(584): 1001254mologous to Escherichia coli O157:H7 UDP-N-acetyl-D- mannosaminuronic acid dehydrogenase; synthesis of enterobacterial common antigen (ECA),accession number AE005610,Smith-Waterman Score =572.
gaagcgccttcgttggggaaacctgtgttggtgatgcgcgatcccactgagcgtccgaaacgggtgacggcgggtacggtgcgtttggtaggcacggataagcagcgaattgtcgaggaagtgacgcgtcttttaaaagacgaaaacgaatatcaagctatgagccgcgcccataacccgtatggtgatggtcaggcatgctctcgcattctggaagcgttaaaaaataatcggatatcactatgagttttgcgaccatttctgttatcggactgggttatatcgggctgccaacggcagcagcgtttgcctcacggcaaaaacaggtaattggtgtcgatatcaaccaacatgcggttgataccatcaatcgtggcgaaatccatatcgtcgaacctgatttggcgagtgtagtaaaaactgccgtagaaggcggttttttacgagcgagcacgacgccagttgaagcggatgcctggctgattgctgtacccacgccgtttaagggcgatcatgagccagatatgacctacgttgaatcggctgctcgctccattgcgccagtgctaaaaaaaggcgcgctggt

SEQ ID NO: 29571 - DNA, 557 bp, Homo sapiens
  SIMILAR (248)..(421): 1001254mologous to Escherichia coli O157:H7 UDP-N-acetyl-D- mannosaminuronic acid dehydrogenase; synthesis of enterobacterial common antigen (ECA),accession number AE005610,Smith-Waterman Score =301.
ctgcagcagcgacagcgtgcgctgcagtgttggggatatcgtggcctttcaggtcaaagaaagatatcacaaccacgctgttgaagttcgcgcacaaactggggcccgaacaatgtacacatctctttgcagaccttcagacgacatccgcttatacgtgtctctatcgcatatcacatcctccactgtatcgcacacgcgacgtcatcatacgatatcacactataacgcgagtcactacggtactatcaaccaacatgcggttgataccatcaatcgtggcgaaatccatatcgtcgaacctgatttggcgagtgtagtaaaaactgccgtagaaggcggttttttacgagcgagcacgacgccagttgaagcggatgcctggctgattgctgtacccacgccgtttaagggcgatcatcccttcatgaggtcagagctgggcatccagggagacagcgaccctggccatgggggccacgccacccaggccccggaggcccagctggccgtccgcccgtgcggacacccgggagccaacactgacccgaagacag

SEQ ID NO: 29572 - DNA, 440 bp, Homo sapiens
  SIMILAR (340)..(438): 1001254mologous to Homo sapiens F20887_2, partial CDS,accession number AC005578,Smith-Waterman Score=181.
atgctgccagctcacctagatgcgtgcgtcactacgctgcagaagatccgatggactcttagcgtggtcgatccaactctggctctacgagttccgttaccagccctgtctatacgtgatgacccaccgctcagggcttatctgccaggcaggggtgcactaaaggtcatcaggttcgacgatatggatttcgccacgattgatggtatcaaccgcatgttggttgatatcgacaccaattacctgtttttgccacgcgtcacttcctcgacaattcgctgcttatccgtgcctaccagacgcaccgtacccgccgtcaccgcttccggacgctcagtgaaatactacccgccggactttgacccatcaaagatccccaaactcaagctccccaaagaccggcagtacgtggtgcggctgatggcccccttcaacatgag

SEQ ID NO: 29573 - DNA, 970 bp, Homo sapiens
  SIMILAR (120)..(311): 1001254mologous to Escherichia coli K12 putative oxidoreductase,accession number AE000495,Smith-Waterman Score=310.
gatcagaatgacatttttcacatgccccagaatgcgattgaccggttctctgacgttcgggttgagatgcaccggatagacaatctggatgtcctggtgcgtggtggcgatgtctgccaagtcgtggtatcggtgccgctatcgtacgtcgtttcgtcaccgatggggccaatgtacgattcacctatgcggggtcgaaagatgccgctaaacgcctggcacaagagactggagcgacagcagtattcacagatagtgctgacagagacgctgtcattgatgtcgttcgtaagagcggcgcattggatatccgtcaggtcccgttcacgccgccacacccgttttgccaccctgcggcccagcggtcgtaaagatagcgactttcgaccagcggctcttcatattgtgtccgcgtgtagtgcaccagccggtgtggactgtcgtaatggtaccggtgattctcgcatgcctgcaggtcgtttagatgacaaccagattgtcttcggtacgaccaacggaatgaccatcagtaccgggctggagtatgggccggataacgagagtaatcctttctcaattaacgcaggccgcccatcggcaccatcgcatctttcttggcggacatcgccagcatatcggcatatttgtaggtttcgcgggtgatctgctcgatggtccagtctttgtattctgcttcacgctgcttgatgaaataagcgtttttagcaaagcgcgcggggtccattaccaccggaacgcacagactttgttcaccgtggtattaccccctctcaccccatcatcaatgaccacaataaacgctggtatcagccgtcagactcgccctccaatgatgcacgttgtcagacacaaaggatttagcacagtggcggcatccacctgtacaaggtgtggtcgaaaggttgaatcggccaacgaagtccggagagctctaaatacggagtcatga

SEQ ID NO: 29574 - DNA, 992 bp, Homo sapiens
  SIMILAR (175)..(798): 1001254mologous to Escherichia coli K12 putative oxidoreductase,accession number AE000495,Smith-Waterman Score=1046.
atgactttagaggcacttcaagacacttttgccgcagagattgcctgctcaggagcgaaacgtctgggacgacctggaacgcgagattgttttttagtgaccattacaaaacctgttgacagaaagttaaaacagttttgtaatgcatgttacataataaatcaaggagtccttatgggcgcttttacaggtaagacagttctcatcctcggtggcagtcgtggtatcggtgccgctatcgtacgtcgtttcgtcaccgatggggccaatgtacgattcacctatgcggggtcgaaagatgccgctaaacgcctggcacaagagactggagcgacagcagtattcacagatagtgctgacagagacgctgtcattgatgtcgttcgtaagagcggcgcattggatatcctggtggtaaatgcaggtattggcgtctttggcgaggccctggaattaaatgccgacgatattgatcgccttttcaaaatcaatattcatgctccttatcatgcctctgttgaagccgcccggcagatgcccgaaggcgggcgcatcttaatcatcggctccgtgaatggcgatcgtatgcctgttgcaggcatggctgcttatgccgccagcaaatctgccctgcaaggcatggcgcgcgggctggcccgtgattttggaccgcgtgggatcaccattaacgtcgtccagccagggccaattgataccgacgctaatcccgccaacgggccaatgcgcgatatgttgcatagtttgatggctatcaaaagacatgggcaaccggaagagtcgctgctctatcatgcgggaattttgccacgtcagaaggcgattattctcggtagctttagcggcagcacgcccaatgattatgacgcaggttacaacctggagtcagtgtacgcgtttttgcgttcccgcctgtcgattccactcattaccggcctcgattttggtcatgaacaacgcacggttacgctgcc

SEQ ID NO: 29575 - DNA, 876 bp, Homo sapiens
  SIMILAR (876)..(496): 1001254mologous to Escherichia coli Hypothetical protein 1 (vnfA 5' region),accession number D90737,Smith-Waterman Score=659.
ctacagaaagtgctggcgcgtgccggccacggttctcgccgtgaaatcgaatctattattgaagccggtcgtgtgagtgttgatggcaaaattgctaaactcggcgatcgtgttgaagttacccctggattgaaaatccgtatcgatggtcacctgatttcggtacgtgagtccgctgaacaaatttgtcgcgttctggcctattacaaaccggaaggtgagttgtgtacccgtaacgatccggaaggacgtccaacggtgtttgaccgtctgccaaaactgcgtggcgcacgctggattgccgtgggtcgcttggacgttaatacctgtggtctgctgctgttcaccaccgatggtgaactgatactcctgctccagcaccgccagttgcggtaaccagtaactgccgctacccccaagacccgaaatcaacaccactacgggcgcatcagcataagggggaggtgagagtgaaagtttcatcgcggcctcattggcgatatgcgcaattgtggcgatttccaccagcgcgtcaggttttaccagtccgcactgaatgcagaatcgcgccggtttatcacccggaaaaaactcggcgtagatttcgttaatcgcggcgtaatttttccagtcggtaataaagatgctgttgaaggtcacatccgccatcgtgccacccgccgtctcgatcaccttgcggatagtttccagaacgtggcgggtttgcgcctttgggtcatcggcaaacagcacgttattatgttgatcaaaagccagcgtaccggagacatacaccacgccatcagccagcgtgccgggaacgaagggggccagcggtgcgctgctgccagcgggaataattacggattttggcat

SEQ ID NO: 29576 - DNA, 3756 bp, Homo sapiens
atgactgcaagaggtggcttcctccgcgatgggaggaagcttggggagattaatcgtgagcgcctatttcgcgcagtttacgacctttcatcagattacgtcaatatgttccagcgaaacgtgtttggtttccggtaccagccacaatgtcagcaggataaacagtacgttcagagccgcatacacccagaaggtgttggcgttacccagcgtgttgagcatggtcaggaacgttgcgccaacgatcatgttggcaatccagttggtggcagtggagcaggtgatgccaaaatcgcggcctttcagcggctgaatttcggagcacagtacccaaatcagcggaccggcactcatggcaaaaccgacaataaacatcagcagcatggcgatggcgaaatactgcgccgacggagagtgaataccgatatgcatcattgtaccgagtacgcccatgccagcaggcatcgccaggaagcccagccggtcaacaaggccgattgcgataaaggtggcaagtacgttggtcaggccgacaatcacggtcccccacatttgctcggtagtgctggtataaccgtcagatcgaagatttcggcgcgtaataatgatgacacgcctgggaaggcgacaccaaaaggaagctctatgagcgaaaagctacagaaagtgctggcgcgtgccggccacggttctcgccgtgaaatcgaatctattattgaagccggtcgtgtgagtgttgatggcaaaattgctaaactcggcgatcgtgttgaagttacccctggattgaaaatccgtatcgatggtcacctgatttcggtacgtgagtccgctgaacaaatttgtcgcgttctggcctattacaaaccggaaggtgagttgtgtacccgtaacgatccggaaggacgtccaacggtgtttgaccgtctgccaaaactgcgtggcgcacgctggattgccgtgggtcgcttggacgttaatacctgtggtctgctgctgttcaccaccgatggtgaactggcaaaccgtttaatgcacccaagccgtgaagttgaacgtgaatatgccgtgcgtgtatttggtcaggttgacgacgcgaaactgcgtgatttgagtcgtggcgtgcagttggaagatggtccggcagcttttaaaaccatcaagttcagcggcggcgaagggatcaaccagtggtacaacgtgactctgaccgaaggccgtaaccgtgaagttcgtcgtctgtgggaagcggttggtgtgcaggtgagccgcctgatccgtgttcgttacggtgatatcccactgccaaaaggtctgccacgcggtggctggacggagctggacctcgcccagactaactatctgcgcgaactggtggagctaccgccagaaaccagctctaaagtcgctgtagaaaaagaccgtcgtcgcatgaaggcgaatcagattcgtcgtgcggtgaaacgtcacagtcaggtgagcggcggtcgtcgttctggcggacgtaaagcccgttgccatcacctgaactcacgccatgtgctccagcagagtgcgttcggtccgagcctagtaacgccgcgtttgccgcgccagctttaccaatcgccagcgtacccaccggaatgccgcgcggcatttgtacgatggagtaatggtctgcgtactttgcgtggcggacgcattatgctgaatggtaaagagatcaataaattatccactggagaacgtttactgcgcggtctggtttatctgccggaagatcgccagtcatccggactgaatctcgatgcttcgctggcctggaacgtctgcgcccttactcataaccttcgtggattctgggcgaaaaccgcgaaagataatgccaccctggaacgttatcgtcgggcgctgaatattaaattcaaccaaccggaacaagctgcacggacattatccggtggcaaccagcaaaaaatcctcattgccaaatgcttggaagcttcgccgcaagtattgattgtcgatgagccgacgcgcggcgtggatgtctcggcccgtaatgatatctaccagctgttgcgcagcatcgccgcacaaaatgtggctgtgctgcttatctcctccgacctggaagagatcgaactgatggcagatcgtgtgtatgtgatgcatcagggcgaaattacccactctgcactgaccgagcgcgatattaatgtcgagactattatgcgcgttgccttcggcgatagtcagcgaggcgtcatgctgaagtttattcagaacaaccgtgaaatcacggcactgctggcggtggtgctgctgtttgtattacccggttttctcgaccgccagtatttaagtgtgcaaacgctgaccatggtttatagcagcgcgcaaatcctgatcctgctggcaatgggcgcgacgctggtaatgcttacgcgcaatattgatgtttcagtgggttcgattaccggaatgtgcgcggtgctgttggggatgttactgaacgccggaattcacaacctgtggcttgtgtcgcacttactgctgttccctactctcgcatggggagaccccacactaccatcggcgctacggcgtttcacttctgagttcggcatggggtcaggtgggaccaccgcgctacggccgccaggcaaattctgttttatcagaccgcttctgcgttctgatttaatctgtatcaggctgaaaatcttctctcatccgccaaaacagcttcggcgttatagggaccgaactgtctcacgacgttctaaacccagctcgcgtaccactttaaatggcgaacagccatacccttgggacctacttcagccccaggatgtgatgagccgacatcgaggtgccaaacaccgccgtcgatatgaactcttgggcggattagccaaccttcgtgctcctccgttactctttaggaggagaccgccccagtcaaactacccaccagacactgtccgcaacccggattacgggtcaacgttagaacatcaaacattaaaggctggtatttcaaggtcggctccatgcagactggcgtccacacttcaaagcctcccacctatcctacacatccgcgacggcagaggatcccccgccaaagtcaacgatacgggtcactttaccagtgtagacgcggcccacttcgatttctgcagtgatctcttcgatacgacgaatagcatgtttcgctttctcgccgtcggtcgctgcaatcttcacagtaccgtcatcttcgatttcgatggtggtgccagtttcttcggtcagagcacggattacagaaccgcctttaccgataacatctttgatcttgtccgggttgatcttgatggtatggatacgcggatatgcagacgcgcacctttcagcctggttcagcgcaacctgcatgatctctttggtgataccttcaattttgatatccatctgcagtgcagagataccgtcgcgggaacctgcaactttgaagtccatatcgcccaggtgatcttcgtcgcccaaaatgtcagacagtacaacgtagttgtcgccttctttcaccagacccattgcgatacccgcaacggcagctttgatcggcacacctgcgtccatcagcgccagagacgcgccgcacacggaagccatagaagaggaaccgttggattcagtgatttcagacacaacacgtacggtgtacgggaatttgtccatatccggcatgactgcacagcacgccgcgcttcgccaagacgaccgtga

SEQ ID NO: 29577 - DNA, 1101 bp, Homo sapiens
atgcaggggaagattgagcagcacggcactcgaggatctgggtatgaaccaaagacaaaaaccacgggtaccgagctagaagtggtatccaccgaccgggccaaaagcatatcaaacgcctgggaaggcgacaccaaagtaagctctatgagcgaaaagctacagaaagtgctggcgcgtgcggcccacggttcttgccgtgaaatcgaatctattattaagcccgctcgtgtgagtgttgatggcacaattgctaaactcggcgatcgtgttgaatttacccttggattgaaaatccgtatcgatggtcacgtgatttcggtacatgaggtgtgtaccggtaacgatccgaaagcacgtccaacggtgtttgaccgtctgccaaaactgcgtggcgcacggtggattgccgtgggtcgcttggacgttaatacctgtggtctgatgctgttcaccaccgatggtgaactggcaaaccgtttaatgcacccaagccgtgaagttgaacgtgaatatgccgtgcgtgtatttggtcaggttgacgacgcgaaactgcgtgatttgagtcgtggcgtgcagttggaagatggtccggcagcttttaaaaccatcaagttcagcggcggcgaagggatcaaccagtggtacaacgtgactctgaccgaaggcagtaaccgtgaagttcgtcatggcgttcgcaagcctgccacgcctttattgccgggcaatacgctggcgatttttttacccttaaccggtgtgctgtgtgtggttctgctggcgatcctcgcggatcagtcgacgatcaatagtgaagcgctcatcaacagcctgacaatggggctggtggcgacattcatcgctttgctcctgttactgctgtggctggaatgggggccacagcgtcgccagttgtggctatggttgcccattttattacctgctctgccactggtggcgggccagtacacgctggcgctatggctgaaactggatggaagctggacggcggtggtctgggggcatctgctgtgggtgatgccgtggatgctgtttatcctgcaacccgcctggcagcgcattgattcacggttaatttga

SEQ ID NO: 29578 - DNA, 741 bp, Homo sapiens
  SIMILAR (516)..(307): 1001254mologous to Escherichia coli K12 putative nucleoside triphosphatase,accession number AE000501,Smith-Waterman Score=373.
ttatccggttatcaagccaaagcgccgtagctggcggcaatgaaagcgagcgaggaatatcaccgtcgttaatgcgccaagcagcgcgcagaacatatcggattgcgtgtcccactggtcgccctgggtgccgagaaaatcatccgctccctgacccattgccagcgctgcccaccactcgattaattcatacatcgcgcttatcgccagcgccacgcagcagaccaggaacgccaccattttacgtccgcgcacgtacatcccgcgaacgagaatttctcgtgccaccagtgcaggcaccagccccttcgtgagatagggaagactaaactcgttggagaacatgactgcatccaccccaccattttggagcgccatcagatcgtcccaggctttgtcgataacccagttcatccccaactgcgcatcaaaactcgggtcgccgggcaatgcacgtagatggcacatggcgatgaccgctttttccgtcccaataacctctttcagccaactcattgaaagtactcgtaagaacagcacgacgctggcgacaataccgaccgccacgacaacgccaataatcccaagcgacatcaattcagaaatcgaccaaccgaacatattgcccacggacaacgctgagatttgcgcactttcaccggcaaaactgaaaccgcctttgagcgccatttcagtgaagtaaggcgcgaactgggtggcgatcagcaggacggtaatcat

SEQ ID NO: 29579 - DNA, 673 bp, Homo sapiens
  SIMILAR (126)..(536): 981254mologous to Escherichia coli L-asparagine permease (L- asparagine transport protein),accession number D90785,Smith- Waterman Score=677.
ggcggccttcctgagagaatgtaaagatccgcagaccatggtgcctaaagccattaacagtgtgatttggcgtattggcctgttttacgtcggctccgtggtgttgctggttatgttattgccggtggagcgcgtatcaggcggggcaaagtccgttcgtgacgtttttctctaaactgggtgtgccatatatcggcagcattatgaacattgtggtgctgaccgctgccctctccagcctgaattcaggtctgtactgcaccggacgtattctgcgctcaatggcgatgggcggttccgcaccgagttttatggcgaaaatgagtcgtcagcatgtgccgtatgccgggattctggcgacactagttgtgtatgtcgtcggcgtattcctcaactatctggtgccgtcgcgcgtatttgagattgtgttgaacttcgcgtcgctgggaatcatcgcttcatgggcgtttatcatcgtgtgccagatgcgcctgcgtaaagcgattaaagaaggcaaagcagcggatgcccactttacgccctaccacgcgacgcccctgcgcaacgtcatgttgcacatttatgtgctgaatggcgtaagccgcttcagcgttatcgataccaatcagatcgcgcagcggtgcaatcgcttcgccctgctctgcggcgcggc

SEQ ID NO: 29580 - DNA, 798 bp, Homo sapiens
  SIMILAR (292)..(798): 881254mologous to Homo sapiens tropomyosin (AA 1- 248),accession number X05276,Smith-Waterman Score=715.
gagcccagccgagcgtccgccgctgcccgtgcgcctctgcgctccgcgccatggccggcctcaactccctggaggcggtgaaacgcaagatccaggccctgcagcagcaggcggacgaggcggaagaccgcgcgcagggcctgcagcgggagctggacggcgagcgcgagcggcgcgagaaagctgaaggtgatgtggccgccctcaaccgacgcatccagctcgttgaggaggagttggacagggctcaggaacgactggccacggccctgcagaagctggaggaggcagaaaaagcctgcagatgagagtgagagaggaatgaaggtgatagaaaaccgggccatgaaggatgaggagaagatggagattcaggaagatgcagctcaaagaggccaagcacattgcggaagaggctgacccgcaaataccgaggaggtagctcgtaagctggtcatcctggagggtgagctggagagggcagaggagcgtgcggaggtgtctgaactaaaatgtggtgacctggaagaagaactcaagaatgttactaacaatctgaaatctctggaggctgcatctgaaaagtattctgaaaaggaggacaaatatgaagaagaaattaaacttctgtctgacaaactgaaagaggctgagacccgtgctgaatttgcagagagaacggttgcaaaactggaaaagacaattgatgacctggaagagaaacttgcccaggccaaagaagagaacgtgggcttacatcagacactggatcagacactaaacgaacttaactgtata

SEQ ID NO: 29581 - DNA, 2780 bp, Homo sapiens
  SIMILAR (1409)..(2074): 941254mologous to Escherichia coli L-asparagine permease (L- asparagine transport protein),accession number D90785,Smith- Waterman Score=1059.
aaaacgcgcaaatagcctcagtaaaagtgcagtatcttgataaccagaaaaagctggctgtaatgaacatcgaatataactaagtttctgaacaactcacgttgctgagcagaaaaatgcgatttaaccaaaaagcctgctgtacacttaagaaacaagaaggtgtaaggaggcgttatgaaaacgcgtattcatgttgtgcagggtgatattaccaaactggccgttgatgtgattgtgaatgcggctaatccgtcattaatgggaggcggcggcgtcgatggggccattcatcgcgcaacggctggcgttcgactgacgcccaccaacgcgaatatcctgtaccgccatcaggaacagattcgcccccggttctttcgccagttttacgcgcagacggtcgataatttgctgcgccgtttcgctgcgttcgtcgcgtggcttgagggtgataaacatcatcccgctgttcactcgcgaaccgcctgtaaagccggtgacattatccactgccggatcgtcacggataattttcatgaaatcctgcaacttaccgcgcatcgcctgaaacgaaatactctgatccgcctgaatcccgcccatcaacacgccagtgtcctgctccgggaagaaggttttcgggatcgagatatacagccagatattcagcgcaatggtgccaagcagcaccacgcccaccagacggccacacatcattggcggtaatgtcagagaaaccagcaacgatattacaatggcgactgcggcgaatgcggaaattaatgctgcagtcgatctagaagatccccccttcgcatttcaagagtcagtcatggccttttctcaagcggttagcggattaaacgctgccgccaccaacctcgatggtattggcaacaatatcgccaactccgccacctacggctttaaatcaagcacggcctcttttgccgatatgtttgccgggtcgaaagtgggactgggggtaaaaattgccggtatcactcaggactttaccgatggcacgaccaccaacaccgggcgaggtctggacgttgctatcagccagaacggttttttccgtctggtagacagcaacggttcggtgttctaacagccgtaacggacaattttaagctggatgaaaaccgtaacctggtgaatatgcaaggtttacagctgacggggttacccggcaaccggtacgccgccgactattcagcaaggggcgaatccgaccaatatttcgatcccgaataccctgatggcagcgaaaactaccaccacggcatcgatgcagatcaacctgaattccagtgatccgcttcctactgttacgccattcagcgccagcaatgcggatagctataacaaaaaaggttcggtgactgttttcgacagtcagggcgtgggtacagtgttcctcggtagtggtcagccgctggatggcaacaccactggctttcatttaatcaccgataatggcggcttcttcccccacggtttgctgcctgcgctggtgttgattcagggcgtagtgtttgcttttgcctccattgaaatggtgggtacagctgccggagaatgtaaagatccgcagaccatggtgcctaaagccattaacagtgtgatttggcgtattggcctgttttacgtcggctccgtggtgttgctggttatgttattgccgtggagcgcgtatcaggcggggcaaagtccgttcgtgacgtttttctctaaactgggtgtgccatatatcggcagcattatgaacattgtggtgctgaccgctgccctctccagcctgaattcaggtctgtactgcaccggacgtattctgcgctcaatggcgatgggcggttccgcaccgagttttatggcgaaaatgagtcgtcagcatgtgccgtatgccgggattctggcgacactagttgtgtatgtcgtcgggcgtatcctcaactatctggtgccgtcgcgcgtatttgagattgtgttgaacttcgcgtcgctgggaatcatcgcttcatgggcggttatcatcgtagctcgtaagctggtcatcctggagggtgagctggagagggcagaggagcgtgcggaggtgtctgaacttgtttggcgtgacaataccagccctggcgcggcgcagttaattgctcgcctgctggactcactgggcaaagcagaaggtattctgggcaccatcgctggcgatgacaccatctttaccacccctgctaacggtttcacagtcaaagacctacgttatccgttaacgccgctgctctatacgctcattttccttcacgccatcatcctgatggtcggcggacaatacacctacgcgaaagtccccgttggttttgaggtgcaggaatggctggggttgagccgcacatccgtatgacaagctgcggcactttttccaggggtttgtgctttcactggtggcacgagaaattctcgttcgcgggatgtacgtgcgcggacgtaaaatggtggcgttcctggtctgctgcgtggcgctggcgataagcgcgatgtatgaattaatcgagtggtgggcagcgctggcaatgggtcagggagcggatgattttctcggcacccagggcgaccagtgggacacgcaatccgatatgttctgcgcgctgcttggcgcattaacgacggtgatattcctcgctcgctttcattgccgccagctacggcgctttggcttgataaccggataacaacttgcgctttgttgatgccggatgcggcgtgaattcgatatc

SEQ ID NO: 29582 - DNA, 836 bp, Homo sapiens
  SIMILAR (142)..(435): 501254mologous to Pseudomonas stutzeri Orf117,accession number AF061070,Smith-Waterman Score=256.
ggcaacattatcccacgcatggtcagcaaactgacattatctctccgccctggcaggcatcagaaaatcgctcatactttaatcggtaaacagcacctttagatgctgttttcgatacacaatttcaatcaaggagtcattatggctggttggtttgaactcagtaagagcagtgataatcagttccggtttgtgctaaaagcgggcaatggtgagactatcctcaccagcgagctttatacctcaaaaacctctgcggaaaagggcatcgcgtcggtgcgtagcaacagcccgcaagaagaacgctatgagaaaaaaacggcaagtaacggcaaattctatttcaatctgaaagccgctaatcatcaaattatcggctccagccagatgtacgccaccgcgcaatctcgtgaaaccggaattgcctccgttaaagccaatggcacaagccagacggtgaaagacaatacgtaattacgatgccgggcgtgggttgttggcggccggcgccttaccagagccccccacaagcgcttcaatggccccccttaaaggggggggcccttccctaaacggtttatcagggggaagcgggaccttttaagggcgagcctggtgggcttgcagggctttggcccttgccgccggtgtttaccacacggggaccggggaaaaaccttggggggggcccacgcttatgggcctgtaacggcgcggccgggtagcgggcgccggccactacggtgacggacactgggcgctggccgccgctgggaacgggacacgcgggttcgcggggatgggcccactgggggtggccgcctccccggggcgct

SEQ ID NO: 29583 - DNA, 699 bp, Homo sapiens
  SIMILAR (699)..(157): 741254mologous to Homo sapiens NAG13,accession number AF194537,Smith-Waterman Score=664.
cttgggcagtatggccattttcacgatattgattcttcctatccatgagcatggaatgttcttccatttgtttgtatcctcttttattttgttgagcagtggtttgtagttcttgaagaggtccttcacatcccttgtaagttggattcctaggtattttattctctttgaagcaattttgagtgagagttcactcatgatttggctctctgtttgtctgttattggtgtataagaatgcttgtgatttttgcacattgattttgtatcctgagactttgctgaagttgcttatttgatcatggtggataagctttttgatgtgctgctggattcggtttgccagtattttattgaggatttctgcatcagtgttcatcagggagattggtctaaaattctctttttttgttgtgtctctgccaggctttggtatcaagatgatgctggcccggtaaaatgagttggggaggattccctctttttctattgattggaatagtttcagaaggaatagtaccagctcctccttgtacctctggtagaattcagctgtgaatccgtctggtcctggactttttttggttggtaggctattaattattgcctcaatttcagagcctgttattggtctattcagggattcaacttcttcctggtttagtcttgggagggtgtatgtgtcgaggaatttatgcat

SEQ ID NO: 29584 - DNA, 5403 bp, Homo sapiens
  SIMILAR (1928)..(981): 581254mologous to Homo sapiens Human secreted protein clone dd119_4 protein sequence SEQ ID NO:108,accession number Y53051,Smith-Waterman Score=845.
gagatggagtcttgctctgtcgcccaggctggagtgcagtggtgcaatctcggctcactgcaagctctgcctcccaggttcatgccattctcctgcctcagcctcccgagtagctgggactccaggcacccaccaccatgcctggctaatttttttctgtatttttagtagagatggggtttcaccatgttagccaggatggtcttgatctcctgacctcatgatccgcccgcctcggcctcccaaagtgctgggattacaggcgtgagccaccacacccagcctcttccctcctatcattttcgtgttctggagacagtagcatacttggccctgggtttgacataaaactagttctacatatagaaagctagggacaaaaatgagttctggacaaaactaaaggactgaataatcatgtgaacagccaactctcctacatatgctaagcactgatgaagtgtttcatatattcactcacctaaatttcacaacaatcctatgaaatgctaactagcatgatccccagtttaaaggtgaggaaattgagtcacaggcagaataacttgctctgggtcaccaagctaataaatagatctgggttcaaacccaggcagcctggctccggaatcaactcttaaccacttagagcatcatcactgagatcgggagagggacaggctgctgtaaagagggtgaagcgaaaatgggaggagagcagcggttaagcaatgatgtgatggggctaaataaaaatggatacaaaaacgagtaaaagaccagagtaaaaggaaaagactggagaaggggcctaacattaaaagagaatgaggagaagggagagttgacaagcaaaggtgaaagcagaaagtcagttgtccatatggcttggggagataaagaaggcccaggaaggcctccaggaaaaggctgccatgtcaggcaggacacagaggacaattgaggaaaagtgattcttacaagatggtgaaggtgccattgtgggtgttgggctctggcacaggcacttggcggagcctctgctctgggttgagatcaatacatgacaacatctcatctccgcaggtacagagctcacatatgttggtgcttgtggaggccttgtgttcctctggtgcagttaaagccttattttgggtgtaactttcagactgcaccagtgaatcctgagcaggttctagttcagtaggtggacctgtgacttcagtcaggcttcgatgcagagtctgaacccggtctggacgaggagctgtagtcttctccagggctgtagaatgtccagtctctgtagtgggttctggaatgatggcaagtcccaggtctggaggctgagttgaggtctcctccgtggttggagacggtttaacctctgtagtaggttttgtagttatggtaagctccaggtccagaggttgaacggtggcttgagtcaggtgtgaatgctgagcctgacccttgtctgaaggtggaagtgtcacctcagggtgtcctggaggaggagctgtagtcatcagggctgtagaaggttcaacctctgtcatggattttggagtgatggtaaaccccaggtccaaaggttgaactgtggctcgagtcaggtgtgaatgctgagtctgaacctggtctggatgtggaagtgtcacctcaggatgctttggagaaactatagtcctcttcggggctgtagaatgtccaacctccgtagtgggttctggagtgatggtaagtcccaggtccaaaagttgaactgtaacgctgggtgacactggatgctgagcttgatcctgacctggtgttggatttgttaccccttgatatactcgaagttggggtacaactttcttaggaggctgagttggggtctccttcatggttggagaaagttcaacctctgtcatggattctggagtgatggtaaaccccagatccaaaggttgaactgtggcttgagtcaggtgtgaatgctctggaggttgagctacaactacattagggaactctggagtctgagctggggcctcctgatgggttagggaagactcaccctcctcagcggtctgtggatgctcagctgcagcctcctgctgggttggagaggggttctcattattaataggttccggagattgaaatgaagtctcctgttgaactgctaaaggtccagcttcttctgatgactctgaaagcagaggtgggcccccgtgctggatggcgggaggttctatatcattacctgaccctgagagccgagttgtagcctcctgctggactagagaagttcccacctctgcactaggctctgctgctatggtgagctgcacgtctggaggcttcacagagacactgggtgaatctaaatgatgagtttgatggtgacctggaggtgaaactgtgacttcatgatgttctggaggctgacctggggtctcctgctgggtcggagaagattcgacctccctagaagtctcagaaggctgaactggctgctgctgctcactgatggaaagttcatgctccataggaggaactggaggctcaattggggcctcctgttgggttgcagaaggttccacctcctctggaaactgaattggggtctcctgctgagcttgggaagattctgtctcattggtagcctctgaagttatggtaacctccacatctgcaggtttaactgtaatgttgggcaagtgataataagcttgatcctcacctggaggttgaactgacacctcatgattcggtagagttagactctccatagaggactctggaggcagagctggggcctcctgctgcattgaagaaggttcttcctcaaggagctgtggaagctgtgctggggcttcttgctggagtgaagaggactggatgtcttcaagggtctctggattttgagtttcgggctctagatggaattgagaaggtccaacttgctcagagggccctggaggctcatctgacttcacccggagttctggaggcaggctaccgggatacggtgtatctgtactggaatattcattctgcaaagtctgtttctgactctgaggtgtggataattggcgtataattccaataatctcagcaaggctccaacgctgagctggatctttcttcagcttcttgggcgaaacagggagcctttcctgtggactcagcttgtcctttaaatcctgctgtgaagccaagaactgctctggctccaggggcagctctccagctgaatcccaggtgtccaggaatggaaccaaattttcagtcgattcctggggtggggctggcatctctgaggaagcagagggccccaggtgatcaaagtcccacgggtctgctgggagagtaggcgcatggggagattcccgtgggaaatgggaggagtgggaagaccagggctcaggcggccccagggggttagaggtcagctggagcgggtccttgacccactccagaggctgagcctccttgactagtagccacaatagttgccacataaggaggggccatgggccccagaaacgcagcggggacatgacacacgctagtgccgggcactgagcggaagtcattctggcagctccgagacgctcgtgccccttgtaagcatgagtcccgccctgtctttatgacacctttatttatgccacagaactgctccatgtcaccagggcactcatgtcacaatcccgcccaagcacgccttcccatcctgccctgccggagcacccctctcctccccttagtgaggaaggatttgggcctcagatcctggtggtcccaggactccagcgcctgctgtggtggggtagggtggggtagggtgggatgggggcgcggcagagcttcccaaggaagtcaccggacctcgcctcaggatattcagaagtgctagttcagttctggcagccttcctcctttaaggtgaaatccgagaacactcttccttccagggagagcaactgacctgcaaaatgggcgccaggatgtacattacagtcatttattccaaagtgttgccattttcgctaaactgtcgcatgtttgataattaattcaccaccctattaggtaggggctgccagggaataagcgaggactccaaattttctgtaggaggggtgttgggagttggcaattcggtctgggagagaaggttttaatccgagtgaagagccctttgcactagcctgggaggaggctgaactgtcatcctgccttgactcaacacagccattcccctagaagttacagcacttctagggtcacctgtgttcagagatctaccctgtgtgcacacatggagaagaggcttaggttgttaaagtcagcatgttaaatcatttcctgaaatgcgactgtaactagaacccagctgacttcccccacagccgttcttacctattttattactgtctggcataattaccagcatgtaaactccaagaaggtgcttcatcttattttagtgcctggcatagacatagggtgcatagtgatggctttaaaattgaaggggggccgggtgtggtggctcacacccataatcccagaactttgggaggccgaggcggggggatcactgaggtcagaagttcgagaccagcctgaccaacatggcgaaactccgcctctactaaaaatacaaaattagccaggcgcggtggtgcacacctgcaaccccagctactcaggaggccaaagcaggagaatcgcttgaacccgggaggcagaggttgcagtgagccgagatcacaacactgcacttcagcctgggcaacaagagagaaactccatctcaaaaaaataaaataaaataaaatggaagagattccaagattcacctcatttagggatggagctattattataatcagatttctgaaatgagtgctgacttcctctcacatttcacaggaagctagacttcttaaagcttgaagtctccttggtgggttttatttaaattgaattaaaataattattttacagggaaaaatttcaaaacactttgcaactttggggtaaaagttaaataaaacactgtagccccaagttaagttcccactgaaatgatacttttgctcctttttttaaaaaaaattccataaatagtaaataatgactgttttgagattaatttagaaacaatccctatttaagagctttcatatgcagtcatgcattgcttgccacgtgaggagcttgagaaatgggtcactaggttatttcaccattgtgctaatatcatagcgtatacttacacaaacctaggtggtgtagccaccatacctagggtacacggtatggcttaggactcctaggctacaaacctgtactgtatgttactgtactgaatactaaaggcaactgtcacagaatggc

SEQ ID NO: 29585 - DNA, 1852 bp, Homo sapiens
  SIMILAR (326)..(1849): 911254mologous to Homo sapiens putative p150,accession number U93572,Smith-Waterman Score=2362.
cttcagtagctgatttgatcaagtggaagaaagggtatcagtgattgaagatcaaatgaatgaaatgaagcgagaagagaagttcagagaaaaaagagtaataagaaatgaacaaagcctccaagaaatatgggactatgtgaaaagactaaatctgcatctgattggtgtacctgaaagtgactgggagaatggaaccaagttggaaaacactcttcaggatattatccaggagaacttccccaatctagcaaggcaggccaacattcagattcaggaaatacagagaatgccacaaagatactcctcgagaagaacaactccaagacacataattctaaatgcccacaagagaaagtaggaaagatataaaattgacaccctaacatcacaattaaaagaactagagaagcaagagcaaacatattcaaaagctagcagaaggcgagaaataactaagatcagagcagaactgaaggaaatagagacacaaaaaacccttcaaaaaatcaatgaatccaggagctgggtttttgaaaagatcaacaaaacggatagatcactagcaagactaataaagaggaaaagagagaagaatcaaatagtcgcaataaaaaatgataaaggggatatcaccaccgatcccacagaaatacaaactaccatcagagaatactataaacacctctacacaaataaactagaaaatctagaagaaatggataaattcctggacacatacaccctcccaagactaaaccaggaagaagttgaatccttgaatagaccaataacaggctctgaaattgaggcactaattaatagcctaccaactaaaaaaagtccaggaccagacggattcacagctgaattctaccagaggtacaaagaggagctggtaccattccttctgaaactattccaatcaatagaaaaagagggaatcctccctaattcattttatgaggccaacatcatcctgataccaaagcctggcagagacacaacaaaaaaagagaattttagaccaatatccctgatgaacattgatgcaaaaatcctcaataaaatactggcaaaccgaatccagcagcacatcaaaaagcttatccactacaatcaagtcagctttatccctgggatacaaggctggttcaatatatgcaaatcaataaatgtaatccagcatataaacagaaccaaagacaaaaaccacacgattatctcaatagatgcagaaaaggcctttgacaaaatccaacagcccttcatgctaaaaactcttaataaactaggtattgatgggacgtatctcaaaataatgacagctatttatgacaaacccacagccagtaccatactgaatggacaaaaactggaagcattccctttgaaaactggcacaagacagggatgccctctctcaccactcctattcaacatagtgttggaagttctggccagggcaatcaggcaggagaaagaaataaagggtattcaattaggaaaagaggaagtcaaattgtccctgtttgcagacgacatgattgtatatttagaaaaccccattgtctcagcccaaactctccttaaactgataagcaacttcagcaaaatctcaggatacaaaatcaatgtgcaaaaatcacaagtattcccatacaccaataacagacaaacagagagccaaatcatgagtgaactcctattcacaattgcttcaaagagaataaaatacgtaggaattcaacttacaagggatgtgaaggacctcttcaaggagaactacaaaccactgctcaaggaaataaaagaggacacaaacaaatggaaggacattctgtgttcatga

SEQ ID NO: 29586 - DNA, 1404 bp, Homo sapiens
  SIMILAR (526)..(1308): 1001254mologous to Escherichia coli glutamate 5- kinase,accession number U70214,Smith-Waterman Score=1309.
atgccctgggctgacaaaagaaatccctctggagcccaatccctgaatggttatgccccgccagacctcatctggggacccagtcatcgggcctttagagcgcaggtcgagtattcaattgggatcagtagcatctacaattctggaacacacaccctcccaatactaaaccaggaagattttgaatccctgaatagaccaataacaggctctgaaattgaggcaataattaatagcctaccaagcaaaaaaagtacaggaccagaccgattcacagctgaattctaccagaagtacaacaaggagctgccgctgtgggatatttttgccaaaatctgttctattcctcacccgtcctatcatgaagagcaactcgctgaatacattgttggttgggcaaaagagaaaggtttccatgtcgaacgcgatcaggtagtgttccaggccttgattcacttggtgaaaggcaacatgggcacagggatcctgggactaccccatcgctgtgaagaacgcgggcatcctgggcagagtcgactgattcaactgtgggaacagctgttttcgatttatggcattcacgtcgggcaaatgctgctgacccgtgctgatatggaagaccgtgaacgcttcctgaacgcccgcgacaccctgcgagcgttgctcgataacaatatcgttccggtaatcaatgagaacgatgctgtcgctacggcagagattaaggtcggcgataacgataacctttctgcgctggcggcgattcttgcgggtgccgataaactgttgctgctgaccgatcaaaaaggtttgtataccgctgacccgcgcagcaatccgcaggcagaactgattaaagatgtttacggcattgatgacgcactgcgcgcgattgccggtgacagcgtttcaggcctcggaactggcggcatgagtaccaaattgcaggccgctgacgtggcttgccgtgcgggtatcgacaccattattgccgcgggcagcaagccgggcgttattggtgatgtgatggaaggcatttccgtcggtacgctgttccatgcccaggcgactccgcttgaaaaccgtaaacgctggattttcggtgcgccgccggcgggtgaaatcacggtagatgaaggggcaactgccgccattctggaacgcggcagctccctgttgccgaaaggcattaaaagcgtgactggcaatttctcgcgtggtgaagtcatccgcatttgcaacctcgaaggccgcgatatcgcccacggcgtcagtcgttacaacagcgatgcattacgccgtattgccgtaatctcagcactttgggagtccgagtcgggcagatcacgaggtcaggagatcaaaaccatcctggctaacatggtgaaaccccatatctactaa

SEQ ID NO: 29587 - DNA, 1518 bp, Homo sapiens
  SIMILAR (1333)..(1040): 441254mologous to Escherichia coli 37KD protein, similar to YI22-ECOLI,accession number D85613,Smith-Waterman Score=132.
  misc_feature (1)...(1518): n = a,t,c or g
atgcagaagagaccacgctggggcgctgaccgaactgatggcacaaattcccgatacgcgatctactgtacagccaacgctatcgactcgataaatggtcatcaccatatccggaagtggatttcaatgtggtgcaaccggcgaccgctggatatcgcacggcaacagtccatttgggaaaaccctggtggctgccggaccctgagataccgcacggacccgggtgtcccaacaagcgcgattgcggtgttacagacgatgtcgcgaatccgataccacataaaatcggtttcattaataacgccaaacttgccgaagctgccgccttgctcgacgcgccacacgcgcgcaccgaacaggaaagctggaacaagggcgatcgctgttggcgatgggctgtggcgcagtgctatgaaaggtggtcatctggatgatgagcaaagcccggactggctgtttaccgcgagggccgcagtcggtaacccgcgcatacagccgggcagtgacgtcatcgtctgcgcggaaatggacgacagtggggctatgtcggggctaaatcgcgccagcgctggctgttttacgctttgtgcgcgccattaccaccgtcagcgccattgtgttcctgtcacgccggatacccgcgtagcgacggcttacatcctcaaccgcgtggagatggcgaatacgcccggtagcatgaaccattatccgtcaggcactccactggagacgacggaaatcgtagccgaagcggcgttccagcgttcccagcatgacgtcctgtacttttcactggtgaagccgtcggtagtgaccgcccagtgcagtgcctcactatcacagcagtccagcgcgaacgtgacacgcaagtctctctccgattatacagcagaactcgaacccgtcagagcaccatcgctgattgttttctttccggccactctgcctgtatgtgcccggtgtcgatggcggtacagcaggtttcgctcaagcaacagcgcattctggcgcatgatccgctctccgataacatggtgtaacggagaagcacatccgtatcatcagtgtgacgactgcggcggccatcctccagtcatcggttcgtctgagaatgacgtgcaactgcgcacgcgacaccggagacaacggctgactaagcttactccccatccccgggcaataaggggcgtgcgctatccacttttttgcccgtccatattcaacggcttctttgagagttcattttccatcgttttcttgccgagcaggcgctggagttctttatctgcttcatggcggcagcaagttcagaggcaggaacaacctgttctccgcggcgacagcagtaagacttccttcctgntatatgaccaggccgagcttgatcagctaatccacggcagcagctccaacgacaggatcctcgtcgctgccaaaaggcttaacgccgcagacgttacgcacctgtgccagtggattgacgcgcatcaggactatgaattttcaaccgacggctag

SEQ ID NO: 29588 - DNA, 1830 bp, Homo sapiens
  SIMILAR (619)..(1365): 981254mologous to Escherichia coli similar to phosphotransferase system II permeases,accession number L10328,Smith-Waterman Score=1273.
atggatgagatgaagtacgatatgtgcggtgcggcagcggtttacggcgtgatgcggatggtcgcggagctacaactgccgattaacgttatcggcgtgttggcaggctgcgaaaacatgcctggcggacgagcctatcgtccgggcgatgtgttaaccaccatgtccggtcaaaccgttgaagtgctgaacaccgacgctgaaggccgcctggtactgtgcgacgtgttaacttacgttgagcgttttgagccggaagcggtgattgacgtggcgacgctgaccggtgcctgcgtgatcgcgctgggtcatcatattactggtctgatggcgaaccataatccgctggcccatgaactgattgccgcgtctgaacaatccggttgcttcctgtcacgctttacccgtaagtacaactgggcgcacctggatatcgccggtaccgcctggcgtactgggttttggcgtaattcttcagtattcggtaatcggtcaaaacagaaacggggaaacgatattagcgcagacgcccccagcggtggcgaagacatctgccatattaaactcaacatcattatttcccaattccggatgtcaggtcagccttcaccttggtatcttgccatcttgctgcaaaacccgatgtttgtcggggaatcactgaccgatccgaacagtttattcgcgcaaatcgtacacattattgaagagggcggttggacggtattccgtaatatgccgctgatttttgctgtcggtttacccattggccttgctaagcaagcgcaggggcgtgcttgtctggcggtgatggtgagtttcctgacctggaactatttcatcaacgcgatgggaatgacctggggaagctacttcggcgtcgatttcactcaggacgcggtggcaggtagcggtctgacaatgatggccgggattaaaaccctcgataccagcattatcggcgcaattatcatttccggcattgtgacggcgctgcataaccgtctgttcgataaaaaactgccggtttttctcggcattttccaggggacgtcttatgtggtgattatcgccttcctggtgatgatcccctgtgcctggctgacgttgctcggctggccaaaagtacaaatggggattgaatctctgcaagcgttcctgcgttcggcgggtgcacttggggtctgggtttacaccttcctcgaacgtattctgatcccaaccggtttacaccacttcatctacggacagtttatctttggtccggcagctgttgaaggcggcattcagatgtactgggcgcagcatctgcaagagttcagtttgagcgccgagccggtgaaatcgttggtcccggatgtgggaccccccgatgcggcaaccattaaagattcgctgcattacggtgtcgtggattacctgatcaaacccttccaggcttcccgctttgaagaggcgctcaccggctggcggcaaaagaaaatggcgctggaaaaacatcagtattatgaccaggccgagcttgatcagctaatccacggcagcagctccaacgaacaggatcctcgtcgcttgccaaaaggcttaacgccgcagacgttacgcacactgtgccagtggattgacgcgcatcaggactatgaattttcaaccgacgagctagccaacgaggttaacatttcgcgtgtttcctgccgtaaatacctcatctggctggtcaactggcacatcttgttcaccagtatccattatggcgtcacggggcgtccagtttaccgttaccgtattcaggcagaacactactcactactgaaagaatattgccaataa

SEQ ID NO: 29589 - DNA, 1297 bp, Homo sapiens
  SIMILAR (578)..(1294): 991254mologous to Escherichia coli K12 putative 2-component transcriptional regulator,accession number AE000485,Smith-Waterman Score=1247.
ggcgcggcagctgccctgcggaggtgtcgcgggtggggtgtgctcgctcctccccagtccccgcgtcgcctctcgccgtttggctgcctggcgcctcctgtgtccgtctccccgcccgacgagtgtcgtcacacccccctccaggcgcgtcaaacgccgggggccggtgtctcctctgcctcgtgatctctcctgccgactcccagcctcagggttttccccgggggcgccccctcgctgcgcccacgaactctggcccctcctcccccgcgctcctcgcggcgtctctcaaggcccctaagagtgggacggacaggtttttcccagccccagcgcgttacacccccggccagttccaagctcccgtcccgcaagtcgcttaagaggttcgcgcccgataaggtctacgcctttttgacaaggttgtctcgacaaaagaaaccgactgaggcgtcggttaagcacttgtcgcccgccaggtagaaattctcggcggcagcatcgccgtggaatcggaacccgggattttcacacaattttttgtccagataccctgggacggggagaggtcgaccagatgatcaatgtattaattatcgatgacgacgcaatggtcgcagagctgaatcgccgatacgtagcacaaatcccaggctttcaatgctgtggaacagcctcgacgctggagaaagccaaagagattatcttcaatagcgatacgcttatcgacctgatattgctcgatatctatatgcaaaaagagaacgggctcgatttactgcctgtcctgcataacgcgcgttgcaaaagtgatgtgattgtcatctcctccgcagccgatgcggcaaccattaaagattcgctgcattacggtgtcgtggattacctgatcaaacccttccaggcttcccgctttgaagaggcgctcaccggctggcggcaaaagaaaatggcgctggaaaaacatcagtattatgaccaggccgagcttgatcagctaatccacggcagcagctccaacgaacaggatcctcgtcgcttgccaaaaggcttaacgccgcagacgttacgcacactgtgccagtggattgacgcgcatcaggactatgaattttcaaccgacgagctagccaacgaggttaacatttcgcgtgtttcctgccgtaaatacctcatctggctggtcaactgccacatcttgttcaccagtatccattatggcgtcacggggcgtccagtttaccgttaccgtattcaggcagaacactactcactactgaaacaatattgccaataa

SEQ ID NO: 29590 - DNA, 1578 bp, Homo sapiens
  SIMILAR (485)..(402): 671254mologous to Escherichia coli hexose phosphate transport protein UhpT,accession number M17102,Smith-Waterman Score=74.
ttaagacgccgccgcttcgcccaaatccttatgccggttcgacggctggacaaaatactgtttatcttcccagcgcaggcaggttaatgtaccaccccagcagcagccggtatccagcgcgtatataccttccggcgtacctttgccctccagcgatgcccagtgaccaaaggcgatgctgtattcttcagcgacagggccaggaatcgcaaaccacggtttcagtggggcaggggcctcttccggcgataacccgcaaatggcgttagcgaaagataacgaacaagacatgatcgtaaaagagatgtacgaccgtgctgccgaacagctgattcgtaagctgccaagcatccgtgctgcggatattcgttccgacgaagaacagacgtcgaccacaacggatactccggcaacgcctgcacgcgtctccaccacgcgagcgtggcgataatcagcgccagcgcgatgcaggccaccaggccacggtcgaccgttcgccaggtcagagagccagccccacagcagcgtaccgaccagcgcaccagcttcaaacagcgtaaagccctgaatcgccaccgctttagagagtttcagttcctggaacgcgtatacggttgaccactggtcgataccaatacgtaccacatagaggaaaatgttggcgaagcacagcagccagatcactttgtttttcagcacatactcaacaaagatctgccacttggtcatatcggtagattctgtctctttgtcctcttcgctgatctcctcgccgaacagttcttcagctttgccgaggccataagattccggggagtcgctgccgtaacgcaggccgataaaaccgacaatcagcgcgataatcgacgggaagataaacatgccgatgacatggccatcgaacaggtaatttgccccgaacagcgccacacctgctgcgcctgcaccgccaaggttgtgagaaatattccagaaaccgaggaatgtcccgcgtttacgacgcggcgtccatttggtgatggtggagtaactgcacgaaccgccggtactctggaaaaagccgcttaaggcgtagaaggcaatcatcaggaacaggctaaccgagccgctgcccatactggcacattgtgggtccgtaattggtgggttcttggtctcactaactttaagaaccaagctgcgaaccctcgcggtgagtgttacagctcttacagtggtgtgtctggagtttattccttctgatgttcggatgcgttcagtttcttccttctggtgggttcgtagtctcgctggctcaagagtgaagctgcagaccttcgcagtgactgttacagctcttaaggcggcgagtctggagttgttcgttcctcccggtggtctcgtggtctcgctggcttcaggcgtgaagctgcagacggcggctgcaggtaaagctgcctgccagtcctgcgccatgcgcccgcactcctcagcccttgggtggtcgatgggactgggcaccgtggagcagggggcggcgctcatcggggaggctcgggacgcccaggagcccatggagggggtgggaggctcaggcat

SEQ ID NO: 29591 - DNA, 532 bp, Homo sapiens
  SIMILAR (11)..(532): 971254mologous to Escherichia coli cydD,accession number L21749,Smith-Waterman Score=864.
atgaattcgcgtctcggacctggggatcattgcccaggcctggttcatggcgcgaattctgcaacatatgattatggagaatattccccgtgaagccctgctgcttccctttacgtgactggttctgacctttgtactgcgcgcatgggtggtctggttacgcgaacgggtgggttatcacgccgggcagcatatccgctttgccatccgccgtcaggttctcgaccgtctgcaacaagcagggccagcgtggattcagggtaaacctgcggggagctgggcgacgctggtactcgagcaaattgacgatatgcatgattactatgcacgctatctgccgcaaatggcgctggcagtgtcggtgccgttgctgattgtggtggcaatcttcccctctaactgggctgcggcgctcattctgctgggcactgcaccgttaattccgttgtttatggcgctggttggaatgggggctgccgatgctaaccgacgtaactttctcgctcttgctcgcttaagtgggcatttcctc

SEQ ID NO: 29592 - DNA, 652 bp, Homo sapiens
  SIMILAR (607)..(38): 871254mologous to Escherichia coli K12 probable ornithine aminotransferase,accession number AE000389,Smith-Waterman Score= 797.
ggatggcgacgtcgtatcgccatccgatttgatattacgcttcttcgacacttactcgcatggccgccagcgccttacgcgccgctttgatcaccagttcacactgttcaatggtcagtgtcagtggcggttcaatgcggatcgttttggcgttattgagcgttccggccaccagtacgcgctggcggaacatctcgctggcaaagttatagccgatttcgttatcaacaaactcaatcgccatcaacatccctttaccacgcgcttcctgtaccagatcgggatattcccgcgccagttgacggaaaccgtccagcaacatatcgcctttttgctcagcctgagccggtaagttctgctccagcaacacattgatggtcgccagcgccgccgcacaggccagcgggttgccgccaaaggtggtggtatgcaggaatgggttgcccaacagaactgaaaacacctcttcagtggcgatggtcgcgccaatcggcattacgccgccgccgagccgctttggcaaggcagaggatatccagctgtacgttctcatgcttacaaacccaacatctttggccgtgccccccatgcccgtgtgtccttcatccgaggataattggtgggggcggagcttcttcgcattatcttgcgg

SEQ ID NO: 29593 - DNA, 2299 bp, Homo sapiens
  SIMILAR (1718)..(2296): 991254mologous to Escherichia coli Lipoprotein rlpB precursor,accession number D90704,Smith-Waterman Score=963.
atgtgccatgttggtgtgctgcacccactaactcgtcatttacattggtacccgatatcgactgtatactgtctacgcacaccaagaagaacaaagatgggtgactgccacgctgccctggcctttatcggtcgacctctacgacgccaaggatcaacgccggcgcattatccaccctttaataagaaaagagacaagtactttattacacttgacgcaaatattacacttttcgtggccacgatattcgtgttctctattccaccgccagatatagaaagacaaagcacaaacgctactgataccttcgtttcggtaccggtttcgtccactggcttagaatatcccgatctggtacaggaagcgcgtggtaaagggatgttgatggcgattgagtttgttgataacgaaatcggctataactttgccagcgagatgttccgccagcgcgtactggtggccggaacgctcaataacgccaaaacgatccgcattgaaccgccactgacactgaccattgaacagtgtgaactggtgatcaaagcggcgcgtaaggcgctggcggccatgcgagcatcatccgctccggcgttaacagcacgctggtcactgccgtcatcggtttccgcacacaacagcatgcattccgacgtttcaccacgcattttcgctttttgcagattgcataagaccaccaccgttttccccatcagctcttcttcgctgtagtacggcagccaggctggtcacggtttgcagagtaattagccccaaatcaaactgtacgatgtacagcttgtcggagtttacatcggcgatatcagcatatcccaacaacatcttatccagacagacgcaattatcccaagaccgtgacacacactccgccgtacagccagcggtttaccctgaatccacgctggccctgcttgttgcagacggtcgagaacctgacggcggatggcaaagcggatatgctgcccggcgtgataacccacccgttcgcgtaaccagaccacccatgcgcgcagtacaaagaattcgcgccatgaaccaggcctgggcaatgatcaatatgccgctcacaaagcccagcagacgagaaatattcagccaacgttgggagatgacgctttgctgttttaaccagcgggttaactctttagtaaccaacagacggacatgggttactgtgtgccaaacaacccatatgctactagatagacacccaagacatttggccacttatccaaagtttgcacacattactagagaatccgaaagacagacctgcctcgtggagcgaaacggcaagatgcttgaggacattcccttggaaacaccaccaccaatttgcaccatcacacgaccactcacaaaaaacaaaccaaccacaatgaaccatgccagcaacacagagtcacaagaccaaggttggcgacgacgacaaacacaagaaacaaagggacacaaactcacaacaagactacaaacaaaagaaacacgtgaaagaccaccaaccataagagaacaccgaactaaccacctaacagtaacgagcagcctaacatacacatacggtcgaccactagaaaaacccacagcagacagggagccaacaccaccgagcaacgaacaacatagggacaccagcaacgccaatcaccacaacccatacaaacgcagtaaacaccaacaaaatgcgcgtgaaggaagcgtgcgatatctggcaacattgttgttatctctggcggtgttaatcaccgccgggtgtggctggcatctgcgtgataccacgcaggttccttccactatgaaggtcatgatcctggactcaggcgatccgaacgggccattaagccgtgcggtgcgtaaccagttacgtctgaatggtgtcgagttgcttgataaagaaaccacgcgtaaggacgttccatccttgcgtttgggtaaagtgagcatcgcgaaagataccgcatcggtattccgtaacggtcaaacagcagagtatcagatgatcatgacggttaatgcgaccgtgttgatccccggccgtgatatctacccgattagcgccaaagtcttccgttcgttcttcgataacccgcaaatggcgttagcgaaagataacgaacaagacatgatcgtaaaagagatgtacgaccgtgctgccgaacagctgattcgtaagctgccaagcatccgtgctgcggatattcgttccgacgaagaacagacgtcgaccacaacggatactccggcaacgcctgcacgcgtctccaccacgctgggtaactga

SEQ ID NO: 29594 - DNA, 409 bp, Homo sapiens
  SIMILAR (3)..(95): 801254mologous to Mus musculus p68 lipocortin protein (AA 1- 673),accession number X13460,Smith-Waterman Score=130.
ctcagtatgagaagtccctctacaggatgatcaacaaggacacctctggcgagtacaagaagactctgctgaagctgtctgggggagatgatgactgaagggaactgtgcgcccagccaatgacttcaaccctgacgcagatggcaaagcgctgcggaaagccatgaagggactcgggactgacgaagacacaatcatcgatatcatcacgcaccgcagcaatgtccagcggcagcagatccggcagaccttcaagtctcactttggccgggacttaatgactgacctgaagtctgagatctctggagacctggcaaggctgattctggggctcatgatgccaccggcccattaccatgccaagcaattgaagaaagccactggagggaagccgcacacaatgaaaagt

SEQ ID NO: 29595 - DNA, 1076 bp, Homo sapiens; identical to SEQ ID NO: 25242
  SIMILAR (791)..(868): 801254mologous to Escherichia coli peripheral membrane protein,accession number L08399,Smith-Waterman Score=88.

SEQ ID NO: 29596 - DNA, 2199 bp, Homo sapiens
  SIMILAR (1392)..(760): 951254mologous to Escherichia coli Sensor protein FixL (EC 2.7.3.-),accession number D90790,Smith-Waterman Score=1059.
tcatttaaaatcattgtataatattccatttaataaatataccttttgtgcattccgaacatcagggttaaacgatccaactttctggtcattgacgtagacgtcgaactgccgggccttacggatatccatgatgaagctgaaccaggcattatctccgttacgccagccaagggttgagggaatggcatattgcttatggtccatcaccactgtgatgccggtactgtcatcatgcgagctgaccgttttatccccggcgaggatcagaaaaaccgagtgctggtaaataccgttctggtccggatttcccgtgcagttgatggtaaacatctttccgctggcatccgtcacactgtattccgcattgccctgaccgtacccctgttgccagagtccggggaccgcagaggctgtaaagctggcgaacattgtaggtatcagcagccgtcccatcagtttgccgtcatgggaatattcgaagtatttttctttcgtatacgggtcggaaggcaggaaatcttccctcgggatctcagcgacgtcctgaaggttatccagtgagtccagccgcgatagcgtgagcagttgatcaaccagacgagtagcgcgatcgatcccggaatgtaattggagcagtgcttttttccgcgcctgcggatcatcgtcagagagctgcgcaacttcggtttgcacttttggtggtttatataatttacgtggattggattttacgctaacaggcattttcattgcccggtcacgacaaatgatttcccccatttcatgaaatggcgggctgctgcacatggcggcgagaatattgccttcaagctggcgaatctgccgttcttcggtgatatccgagaaagtcattaccaggttgtcataaaccgggctgatagaggctttaatccagattttttcaccggtgcgcgtcaacagcagaaattcgtcctgatcgcgggcggttttccatagcaactgttgtaaacgaatgcggttatcggcagggaattcaggaatgttcaggagtgtatcgggctgcataccgctggcttcgctaatgcagtaaccaaacatttcggtaaatgcgcgattgcactgcacaatatggcgttccggatcgaggacaatcaccggtcggtcgagatggtcaacggcaataatcaattgtcgggtctgttctttttgcgccatttctacgctggcatcccgtaccagcgccaggtaataaactttcccctcggcgctcactttcgatagcgcaaaacgggtccagattttactgccgtcttttttctccagctgcagctcccgactcatcccctcaacacgcgctttaccgccttcacggttgtgacgaatggattcaggatgcgcaggacgcatttgaatattgcagttgcgcgtccagccggtgacgccgtttgcgttatcccaacccggtgtcatgacgacgcttagcccattgagactttcttgcccggtcagcgacaccacgccctttgccacactcatggctgaaacatagcgggtggtggtaggcgagggaatgccattgctgccaccgtcgcaggtatctaacggcaaagttccagcatcgattgccagatctgtttgctgggttcccctgttgccgccgcaagtttggtcaccagctgttttagcgcattgtgcaaagttatgacggatataatccgtgaccgcctgacgattattccccagacgtaaatactcccctaattgcgctaaaagctggcgggcagaatggcttttttgcgcggccagcagacgttgcgccagattatgctcagcggcagggaagtgacgcgaaagcagcggtgaatctcccgacagaccaatatcgtgcctgatacccgcccacagttctgctctttgctgttgcgtcagtgaggtcactttcgtcattaagctttccagcgaagtacgttgctgactggataaaggctgaaatcttcgcaagtatgcctggccgcgatgattatggcacacttgtccggttaactctcgtctcatacaggtaacacaaacgtctgattcgactcggtcccttgtcagatcgagccggtaccggggatctctagagtcttttgttgtccaggcttcagaggcaggtaagctctgcaccgtccagattgcaggggacctattatacaactccttgacccttgccat

SEQ ID NO: 29597 - DNA, 1362 bp, Homo sapiens
  SIMILAR (822)..(4): 801254mologous to Escherichia coli RhsD protein,accession number X60999,Smith-Waterman Score=1075.
tcacgagagctgtaggtaccgagtggtcgcatccgttgtcgtcgccggtaactcactgtgcgcgtcatcgtagcggtagcgtactgtctccccgctgcgcgatgtctccgataccagcctgcccggttcatcatattcccggcggctctccagcccgtccggggacaccaccgccgtcagctggttcccgtcgttatagtaaaatttcgtctcccgcccgtccggtgtggtgatgtccgtgatatcgccggacaccacattcagaccgtactctgtcctccgtcccgccgcgtccgtctgcgccgtgagccttcctgccgcgtcatacccgctgcgcgtgacgctgccgtccgccagttcttttttcaccacccgtttcagcccggccccgccttctgtatgcagcacctcacgccggttcaggctgtcggtgacggtgatgcggtcctgctcataaagatagcggtagcttaaccctgccgggttcagttgctccaccacccgccccgtatcgtcgtagcggtagcgcatctccggccttcccgcgtaacggtgcgccaccatccggcccgggtgctgcgcgtcatacgtgaaagcgcgcacctgcgtattgctgcggtcatataccgccaggctgctgcctctttcatgaaggaaccagcggagtacctggggccccaggagcgccggaacatgccaggccgggtagtcagcccgcccgtcgctgtcgtaacggtcggatttccggggcccgtgtgacggtgcgccaatccggccccggtatttatcatcgtaagtaaagctgcgcacctgtttgccactacggtcatacaccaccgccagttcgccgcgtggcgtccagccatagcgcaccagcggcgcggcaggtaaattggcagacagacggatgccgttgtcccggccatattcggtgtaacccggcagggtatcaggaaaagcggacggttccgtcccgccggaaatggcctgctgccgggcttcttctgcccgctgcgcctgcgtggtaagtaccagccggaagtgacgccagcacaatccgtaggcggtaccagctattattccttgccgtagcgtcgcatcaggcaacggctgccggatgcggcgtaaacgccttatccgacctacggttatgttccgtttgtaggcctgataagacgcacagcgtcgcatcaggcaacggctgccgaatgcgggcactgccgtcttctccattttctgtgatcctctgaagctttcttctctcaactcgtcaaagtcattctctgtccagctttgttcaattgctggtgaggaactgcgttccattgcttttggtgttttagtcatgaggtctttgcccat

SEQ ID NO: 29598 - DNA, 1392 bp, Homo sapiens
  SIMILAR (676)..(1101): 951254mologous to Escherichia coli Orf A,accession number L09068,Smith-Waterman Score=721.
atggatcgcaccagcgcaccgggcgaaagcgagttgtacaacattttttgtcaggcgctggaatccgccaacggacgcagcattattgtgcgcactatggacattggcggcgacaaacccgttgattatctgaacattcccgcagaggcaaacccgttcctcggttatcgcgccgtgcgtatttatgaagagtacgcgtcgttgtttaccacgcagctacggtcgatcctccgcgcctccgctcacggcagcctgaaaatcatgatcccgatgatctcctcaatggaagagatcttatgggtgaaagaaaaactggcggaagccaaacagcaactacattctgtatgggccgacgttggcgatccctttaaagttggacctcgaagcatgcaagctttgtcctggcccacgatttgcaacgggccgaatgggaaaaaccctcactacgcatccaatcccttacggcacgccatcacataccgcttgaacttcattcctgcattgagactctatggatccccacaaggaggaaccatgaacattaccccgtttccgacgctttcgccggcaactatagatgccataaatgttatcggacagtggctggcgcaggatgatttctccggtgaggtgccgtatcacgccgattgcgtgatccttgcaggcaatgcggttatgccgactatcgatgcggcatgtaagattgcccgcgatcagcaaattcctttactgattagtggtggtatcggtcactcgacaacttttttgtatagcgccatcgcacagcatccgcactacaacactatccgcaccactggcagagcagaagcgaccatcctggcggatatcgctcatcagttctggcacattccgcatgaaaaaatctggattgaagaccagtcaacaaactgcggtgaaaacgcacgctttagcatcgcgctattgaatcaggccgtaaaacgagttcatacggctatcgttgttaatgaccccaccatgcagcggcgcacgatggcgacgttccgccgtatgactggggacaatcccgatgcaccacgctggttaagttatcccggattcgttccttcacgccgccagaatcacctctttttccacttccaccaacggctgaatatcctgactttgtcccagcgggatcggcgtactggcaatcgccagcggcagctcgcgttcggaaatatattccccgaatacttggcaatatgcccgggttttcctcatctcgaccgcgtatttgtgccagtcggcggcggcggtctggctgctggcgtggcggtgctgatcaaacaactgatgccgcaaatcaaagtgatcgccgtagaagcggaagactccgcctttgagcatttgagcctctgtttactcacctga

SEQ ID NO: 29599 - DNA, 4752 bp, Homo sapiens
  SIMILAR (1617)..(868): 921254mologous to Escherichia coli No definition line found,accession number U00039,Smith-Waterman Score=1200.
ttacggcaagcctgtgaggcggataggaccagccctgatcttgtgtccagcatcgctgagcaccttggcggccaccagcccggccacaccagcgccaaccacaatcacctctggggacggccaagcattcgagacgaccccgctaagagcccagagtgcgggctgagtagagactatgtcgtacgacgaggtatagactatgtcgtacgacgaggtagagactatgtcgtacgacgaggtagagactatgtcgtacgacgaggtagagactatgtcgtacgacgaggtagagactatgtcgtacgacgaggtagagactatgtcgtacgacgaggtagagacttgtggtaggaagtgacaactggggttactgactcgccgcagccactctttcttctgacagcccggtaaagcgcatgatgtcagccccatcaggtcgcgttgacgaatatgtttttgaattaactccagcagcgccatacgtcggtgctgcatgatttcatcatcaggcatgacggtgacatcaatcagcggaaatgcggaggcataaagctgccttgccagtttgggatcggcgaaacaatccagccaacacagcgaatagggataggggctttcaataccgtggtaaaacaacaatggcaccaccatcggcaacgttttgtatccagcatcaaggtgattttgcattgcggcaatagcgtaacgcatcatgcgaaatgcgatcagtttgtttgaggtgctttgatgttcaatcagacaatagatgtatcctggtccttgttccgttttcaccgaccacagcacatcggaatagctttctacgcagatcgtcatcaataaagatggagaccccccaggcatggccgggtgtcgcaagtcacgttgggcttcgctgaagttgtgataaaccccggtgccgacgcgggcgcaagggcagccaaagcagccggtttcttccacctgcggcagctcgatacgcagaccgctgacgtccgccagcatttgcatccagacatcggagtgcgccgggccgccagtgacgcgtagggtgtgaacatcagtaaaacgttcgcgcattcggttgaggtgggtcatatggctgaacaccaccccttcatagatggcctgcaacaggtgcgcgcgggtgtgaatggcctgcatcccgtagaaaccactggtcatctcgagtccggcgttgctgccgtacaggaacggcaggaaaaagagatcgcccccagccttcggcaagctggcaacggcctgattgatctcatcaaacgagatttctccccactgtgcggtaaaccattcgaggttgccggaagaggtagggctggcttcgtgaacgataaattcaccatcgttaacgtagcgaccatagacatacggatgcgcttcaccgtcacgtaaaccgcgggttatgccgctggtcaccgcccaggtccccatcaccgcattgagggtaaattcgtcttcgatcccggcgcagagtgcggtggaaaccacatcaaacaggccgccaacaacgggcgtacccgctttcagaccggtcatgtcatctgacagcaaagcggaagcttcattggtcagttcttttgccttttctggatcgccatgaaacagagccaggcgcgctacctgcacgtcacgcatcgcatataaaccttgttcagagatacgctctgtgccgctgccgttttctgggtttgctgaacttgctgagtttgctgttgtgccgccatcgccctgatgcatcaccagcacctggtcgctaatgtgcttcatcattccgatatgctgggtaacataaatatacgaaatgccctgtttttcctgtaattccaacttcccgggcacgttcttgcgttgaagttgcccgtctgccgaaagacgtgaagattgagatcgaagcgatcgctgttcgtcgctaatcttgatggaaattcgggctatcatgcccggattaagtcctgccagaatcgcaaccagccacgggaaatagcttaacggcagcgcctgtaattgcagataactggccagcggtgaaaacggcaatgcgatcccgacaatcatcacgatcacggtcatgatcattaacggccacgatgcacagctctgaataaacggcacacggcgggtgcggatcatatgcacaatcagcgtttgcgacagtaagcccaccacaaaccatcccgactggaacagcgtttgcgtttccggcgtgttgaccgagcccttcttgacgacagtaattgttgggttgggcactacgccgtcgtaaatcgcccatgccagccctgcagcatccatcttatcggtcactttcgccaccacgccgcattgcaccagcgttttatcggtgacgatcagcgccttctgataaccacggcgtttcacctcatcggttaaagccccaacagcaccccgaccaaaccatgccgtttcgttcagaatcatttcttcaattcgtaacccataggttttgaatttctccagcactacggcaatctcttcatcgctcagcactggcaccgggtccgtaatcgccagggtcgtcaggtaaagttgcgccagcacttcaacttcatgcgccagccataacgctttttccagattcacctcacaagcgataagcccatgatgttgtaacaaagttgccttacgatttttgagagccagcgcaacatgttcagaaagttcgcgtgttccaaaggtcgcataaggcgcgcaaggaatagaattaccgccagccgccgcaatcatgtagtgaatagcggggatcgatcggttaagaatggaaactgccgtgcaatgaacggcatgattgtgaacaaccgcgttggcatccggtctgctttgataggctgccatatggaaacggacctgcaggcatgaccggccagcaagcattatataatgccaggccagttcttcttcaattgtcccgttttgaaaagctgtgcttgatatcgagatcatccatgataattccgccgcccatattagcttcgccgaggatttaccggagctatgattagcgcaatcagagatatagtctgagggaaaaacagcaaatttattcaacaaggcgataacctgctctggggcgggtgaatgcaccaggccctgggcttctgacattaaagcgcagtgcgcgggtggtatatcgcggtttgccactggtaacggcttcaaacggctgtgcgacacgctgcgatatttgcaggcgattgaaaacggcttgaaaaactggcggttgatccacattgcgaccgtgcgcagatgcccgtttccgacgtttcgccggcaactatagatgccataaatgttatcggacagtggctggcgcaggatgatttctccggtgaggtgccgtatcaggccgattgcgtgatccttgcaggcaatgcggttatgccgactatcgatgcggcatgtaagattgcccgcgatcagcaaattctggctgagggcgatttcggtttgcgttgtgagattcgtgattggtgtgcgaatttcgtgagcgatatccgctgagaggttgggctggcgggtgagagcatcctcagtacgctcgatcgtgtggttgagcgacagtaccagctgttccagctcagtgggcacggtctgcgggtcgagcgagacgtcgagatctttcgaggtgatgttctggatttgagcgctgacgctgcggatcggcgcgtgacctttatgtaccgccaacagtacgataaagacgatcaggatgctgattaccgatgcggtcataatgagtttattcgtcaagtcatttatgtaatgaagatgaaaatcgatcgaaagcgcgatgtagagcgtataaatcggtttgccgtccaccaacgggccaaccggcaagttaatcatccgccagttgctgtgttccatatgcccgtgaccgtggcctggcatcatcatcgtcgggccggaaaggagatacacctcgccaccctgagcgtctttatcgggtatggcgtcacgcgtaaactcgcggatatccggcgcaccgggggagtgatacacgcgttttagccctgactgaccttcggtttcgcgcgcgacaataaagtcgtccagcgtaccatccagcgccgcgagaatttcagcggcaatggcgtcaagatcctgctcctgggctgccatcacgcccggccagcgtagaatatcaaccgggttgatttccccttcgtcactctgcatttttacccagttcgcggcagttaccagctgtttagccagtttttcgttgaggatcagctcaccttgcgcgctacactgaccctgtggggctagtccgttgctggaaccggttttatccgtgaaaaccatccggggcaggtgatgaataaattgcgccgtctgtttccccgtgcgcgcccggaaagccaggagttgaatatcctgcgcgggattctggcttctattgagcagcagaataaaggtaacaaggccgaataacagccgttgcctgatgcgacgcgtaatgcgtcttatcaggccaatccggttaaacggcaagcgcccaggaccatacccccagcgtaagacgtgcagcgcggcccattcaaaaaagccggactcatccagcagcaggctgatgataatgacggcgataaacgcagccgtcgcgttccagacgatatcccacaccaccggaatatcacccggatggaccacgcccgtaactaacgccagtactgcgcgacgaatttgttcgataaccgcagccat

SEQ ID NO: 29600 - DNA, 1100 bp, Homo sapiens
  SIMILAR (591)..(4): 951254mologous to Escherichia coli similar to E. coli yhaD,accession number U82664,Smith-Waterman Score=935.
ttagtttttaattccctgacctattttaatggcgcaggcaatatttcgcgcgctgttgaagagattggtttcaccgctggcgagcacttcggctaaaggtgccagacgaggcaaaatgctgaataccgcgtcaatgccgtactggtgcaccacttccacgccatcacccacatacgccagcaatcccagatcacacggtacattaaactgcttcgccaccgacgccacacccagcggcgctttaccgcctgccgtttgcgagtcgatgcgcccttccccggtaatcaccagtgctgcgccctgcactgcctgcgcaagattgaccgcattcaacacaatttcaatgcccggtttaatatccgcattgagaaataccgccgccgcaatacccataccgcccgcagcgccgccgcccgccatctggcagacattaatttcagtttgctgttgtaaaacacgggcgtaattttgcagcccctgttcaagttcttcgaccatctccggcgttgcccctttttgcgggccaaacaccgccgccgcgccgcgtgcccctaccagcgggttatcaacgtcacatgctacttcaatatgaccaagccaccgtgaactgatacccaggtattcaccatttttgctggcattaaaacgtaggccggataaggcgctcgcgccgcatccggcgctgttgccaaactccagtgccgcaataatgtcggatgcgatgcttgcgcatcttatccgacctacagtgactcaaacgatgcccaaccgtaggccggataaggcgctcgcgccgcatccggcactgttgccaaactccagtgccgcaataatgtcggatgcgatacttgcgcatcttatccgaccgacagtgactcaaacgatgcccaactgtaggccggataaggcgctcgcgccgcatccggcactgttgccaaactccagtgccgcaataatgtcggatgcgatacttgcgcatcttatccgacctacacaaaatttgtcgaacgacgagctgctgcccgttgcgcgtgcgtttagtcagttcctggacctgggccacaccgccgagcaataccacagcatttctgatgtcgtgt

SEQ ID NO: 29601 - DNA, 753 bp, Homo sapiens
  SIMILAR (674)..(84): 981254mologous to Escherichia coli BENZENE 1,2-DIOXYGENASE ALPHA SUBUNIT (EC 1.14.12.3),accession number D90884,Smith-Waterman Score=1043.
ggcccagcggtggtccattccacgagcggcagtttctgaaaagatatagttagtaatgccaggaatgccgtcgtcgcggcgcttttctgaccaagccccatttccagacacagtttgctgttgcgggcgcggtggcctataagcaatttctggatttcacaccagttctccgagtcatcctgctcgagaaacccagcaggaccaaaagcacgagtggcgctgttttcaaaagcggctttaacttcatcggaggcggctttgtcagtaatacagaacgcccacacttcaacttgatcagggccgcgcggatgccagacgcggagtgtggcagtgccgtttagccatgaaagcgtggggaaaatattgttatgacccgccaggcgcagggcgcgaacttcacctaaacgttgttctgcttcggcataggtttcgcggtaatagcttgaaactgcgccatcgacccagacattagcatccggtttttcagtaaagaagaaaccgctaccgtgaccgtcctgaccaaattgcagcgcatctttggcggtttcccacaccgggcgggcggtttgtccatcaccgaggcgcttatcgctgccatcatctttcgcccctaatacctgaacggcagaagcatggctgaacagagcatgatactggtcactggcgaactgctcgtggaactgaatcttgaaccgagtcaggttggtaatgaatttgccgagaaatattacggcccggcaagccaggtggtgc

SEQ ID NO: 29602 - DNA, 1561 bp, Homo sapiens
  SIMILAR (614)..(661): 1001254mologous to Escherichia coli similar to,accession number D90883,Smith-Waterman Score=83.
tcgccctgttgacgttgggcgtggcatccatgctgctcggctttctcatccgtccgacgattcagccacaaggggcaagtcgccagcaggagagcaccggttggtctgcgtggttggcgctggttcgccagaactggcgctttctggcctgcgtttgtttattgcagggggcacatgcggcctattacggttttagcgccatttactggcaggcagctggctactcggcctcggcggtggggtatttgtggtcgctgggcgtgggtggcggaagtcattatctttgcgctgagtaataaacttttccgccgttgtagtgcacgcgatatgctgttgatctcggcgatttgcggcgtagtgcgctggggcattatgggagcaactacggcgttgccgtggttgatagtggtgcaaattatgcattgcggcaccttcacggtctgccacctggccgccatgcgttatattcctgctcgccagggtagcgaagtcatccgtttacaggcggtttactcagccgtcgcgatgggcggcagtatcgctatcatgaccgttttcgccggtttcctgaaacaaaatatggacctcggcgtgttatgggtaatggcgatgtgtggcgcttccggcaatgtttttgcgcccgaaagttgttccctcatgctgattcgagcattttgcggatctgctcctgttgatgtgttgtcagcgtcaggtccgtatagatcagcggtggtgaaaagagcggtaatggcatggtataaggcgcaataatcagtgccgcgccagcggcagcgcctgtctgcaaaaatgcctttaccgacatatgcttaatgttgagcggcagtaacgttagttcgcgtaactgctgctcaatctgcgcttctcgctcgctatcattcccggtaagaagaataatctgtttttcatgcagatcgttttcctgcattagccaggcaccgaaaatcaccgcgaccagaccactttcctcatcagaaagatggacgccgtattcactttcaaatccggccagcgccgcgcgggtggtgcgcaccaggcgtgggtacagtctggcgaactcttccggcagggtattatcaataccgatggcaaacaaactgcgatttaacgccgaaaccggataccctgcccgacgatacaacgctttatcgactaacttctgatctacagccttattgtctttaaattgcgtaaagcctgctggcagtgtgtatggcattgtctgaacgttctgctgttcttctgccgatagtggtcgatgtacttcaacataacgcatcccgttaggctccacggaatatttcaccggttcgttgatcactttcccccgcgtcaccgaacacacgaccaaacgacgagcacacgacggccagtgaccaaaggcatcattcaggatcaacaccgggccgcggatttctgtgtcgtccaactgttgcagcaaatattcatccgccgcttcccacgcctgtagcgggttaacgtcatccgtcgccggaaaacgttgtagtgtcagtgaacggaaaccgttgtctaagtggctcat

SEQ ID NO: 29603 - DNA, 5892 bp, Homo sapiens
  SIMILAR (4619)..(4717): 1001254mologous to Escherichia coli Orf A,accession number L09068,Smith-Waterman Score=162.
ctattggcacccgcagacactagaccccctggtgccacactgtacctccatggccttcttcaactgcttggcatcgtaatgggccggtggcatcatgagccccagaatcagccttggcaggtctccagagatctcagacttcaggtcaatcattaagtccttttgtgcattccgaacatgagggttaaacgatccaactttctggtcattgacgtagacgtcgaactgccgggccttacggatatccatgatgaagctgaaccaggcattatctccgttacgccagccaagggttgagggaatggcatattgcttatggtccatcaccactgtgatgccggtactgtcatcatgcgagctgaccgttttatccccggcgaggatcagaaaaaccgagtgctggtaaataccgttctggtccggatttcccgtgcagttgatggtaaacatctttccgctggcatccgtcacactgtattccgcattgccctgaccgtacccctgttgccagagcggatgcggcacacgtatcgcttctactgcgcgcgcattacggataaaaaactcaggatttttaatcagataatcgacaaccgcccggtcatcaagctccgtgagtgtttcctgcagttcttcccctggttgcttcatagatgaataaatccgtcgtagacatgtaccgccgggccagtcatatataacgggtgacccggactcatcttccattctccgctcttcatcctccagttgccgacgctcctgatcaagctggcgctggcgatcgtccagctgcctgcggcgatcttcaaactggcggcggcggtcgtcatattgtctgcgccgatcgtcgctcacttcacgctgccagccgtcgtcgcgcgaatcttcatagtcaatatttttggtgtcgcgatggcgttttttcacccgcggcttctctttctctttagcttttttcttctcagcacgtttagccagtactttcttcgatggcttgccggtctgcttttcgcttggcgcacgcgttttcgggcgtaactcatcaataacgcgagctttaattggctcttcaatatagcggcctactttacccagcagcagatggtcatgggcttccaccagcgaaattgcggtgcctttacgaccggcgcgcgcggtacgtccgatacggtgcaaataagtatcgccactgcgcggcatatcgaaggtaaagacgtggctgacgtcaggaatgtcgataccgcgcgcggcaacatcggttgcgaccagtacgtttacgcgaccttcgagatacagttgctgatgtcgtagtgtgctcacgagcgctaccgtgcctaccctacgctcaacctcgggcatattcacggtggcgacgcttctaaccgtatttgcgcttgctgtgagttgcgtgtggatattcgtccgctgcctggcatgacactcaatgaacttaatggtttgctcaacgatgcattggctccggtgagcgaacgctggccgggtcgtctgacggtcgacgagctgcatccgccgatccctggctatgaatgcccaccgaatcatcaactggttgaagtggttgagaaattgctcggagcaaaaaccgaagtggtgaaccgcgaactgataacccaggtaattcaccatttttgctggcattaaaacgtaggccggataaggcgctcgcgccgcatccggcgctgttgccaaactccagtgccgcaataatgtcggatgcgatgcttgcgcgatcttatccgacctacagtgactcaaacgatgcccaaccgtaggccggataaggcgctcgcgccgcatccggcactgttgccagactccagtgccgcaataatgtcggatgcgatacttgcgcatcttattcgaccgacagtgcatcacacgatgcccactgtagccggataagcgctcgcgggcatctttgggtacgtttttgtgtctctcctgagctctaaagcgggcgattcgccgctccagctggtctttggtgtcattaaaaatccaggttgtcggtggctggacgcctttgcggcggtcgcgtgtttgcgcgttaactgtggtgcgcatggtgtaacgaatctcttcgtcgagctgcgccagccagtcacgaaatttccagtcgtccagtaagctggcttcgtgaaagagaaactggctaatgcggtgatgtaactctagtgaaacttgcgcactcatttcatcacctccagttctccgagtcatctgctcgagaaaaccagcaggaccaaaagcacgagtggcgctgttttcaaaagcggctttaacttcatcggaggcggctttgtcagtaatacaaaacgcccacacttcaacttgatcagggccgcgcgaatcccaccgcgggatgttggcacgcccgtttacccttgaagcgtggggaaaatattgtatgacccgccaggcggcgggcgcagattggcgtgtcgtgacgttaagaccaccgtgatcatacggacctgacgctgacaacacatcaacaggagcagatccgcaaaatgctcgaatcagcatgagggaacaactttcgggcgcaaaaacattggcggaagcgccaccagcgccattacccagaacacgccgtggcccagatattgatacaggaaaccggcgaaaacggtcatgatagcgatactgccgcccatcgcgacggcagagtaaaccgccctggcgagcagcaatataacgcatggcggccaggtggcagaccgtgaaggtgccgcaatgcagaatttgcaccactatcaaccacggcaacgccgtagttgctcccataatgccccagcgcactacgccgcaaatcgccgagatcaacagcatatcgcgtgcactacaacggcggaaaagtttattactcagcgcaaagataatgacttccgccaccacgcccaacgaccacaaataccccaccgccgaggccgagtagccagctgcctgccagtaaatggcgctaaaaccgtaataggccgcatgtgcccccagacgatgccagttttctccggctcctacatgtaaataccacgcatcaggttcatcatgaatttcgatacctttgatccggttgatgatcaccgtgccgcgatagtcctccagaaaaagtacattacttccttcacccagaataagaacgggttgtccttctgcggttgcatactgccaggcattgagtaattgttgttcgtcttcggcacatacaatgtgctgagcattatgatcaatgccaaatgtgttccagggttttaaggagtggttcatagctgctttcttccgcagccaatctgttcctctaaggtccgccagcatcgactccatactgcgcgtcagcccgccctgcgtggtgctgaccgcctttccccacgcatcgtactgtgtctcgctccggttgccgtccggggtgataacggcagtcaggtcgcctgcggcgttgtattcataccgcgtttcacggccctgtgcgtctttcaccgaggttaaccggccacggttgtcatagcggcggtaaaggctgatgccttcctcgcggtggaccgccgtcatctggccgaagcggtcgtattcataacgggtctggtagcccgagcagtcggtgaacgccagcaactgcccgtagcggctccaggtcatctgccgggtgctgcccgtcgcatccgttgtcgtcgccggtaactcactgtgcgcgtcatcgtagcggtagcgtactgtctccccgctgcgcgatgtctccgataccagcctgcccggttcatcatattcccggcggctctccagcccgtccggggacaccaccgccgtcagctggttcccgtcgttatagtaaaatttcgtctcccgcccgtccggtgtggtgatgtccgtgatatcggcggacaccacattcagacggactctgttctcgtcccgccgcgtcgtttgcccgtgagccttctgccgggtatcccgctgcgcgtgaccccgtttccgacgctttcgccggcaactatagatgccataaatgttatcggacagtggctggcgcaggatgatttctccggtgaggtgccgtatcaggccgattgcgtgatccttgcaggcaatgcggttatgccgactatcgatgcggcatgtaagattgcccgcgatcagcaaattctgattagtggtggtatcggtcactcgacaacttttttgtatagcgccatcgcacagcatccgcactacaacactatccgcaccactggcagagcagaagcgaccatcctggcggatatcgctcatcagttctggcacattccgcatgaaaaaatctggattgaagaccagtcaacaaactgcggtgaaaacgcacgctttagcatcgcgctattgaatcaggccgtagaacgagttcatacggctatcgttgttcaggaccccaccatgcagcggcgcacgatggcgacgttccgccgtatgactggggacaatcccgatgcaccacgctggttaagttatcccggattcgttcctcagttaggaaataacgcagacagtgtaatctttattaatcagttacaaggattatggccagttgagcgttatctctcactactcactggcgagctgccgcgtttacgcgatgatagcgatggctacggtccccgcgggcgagattttatcgttcacgttgattttccggcagaagtcatccatgcatggcaaacgctgaaacatgatgcggtgctcatcgaggcgatggaaagggtaccgagcacggattcgtctatgcgtatggcgcagcatacggagcagggggggattgtgattctgactacccaccagccgctcaacgttgctgaaacgtttcgccatagcgccgaaatcgccaacccgctgtggttcttcctgattgtaattaccctttttccgctcagtatcggtccggagccgcaactgctggcgcgtattgcaccgggcattatctgggttgctgcgctgctttcatccttgctggcgctggaacgactgttccgtgacgatttgcaggacggcagtcttgaacaattgatgttgttgccgttacccttgcccgccgttgtgctggcgaaggtgatggcgcactggatggtaaccggtctgccgttactcatcctttcgccactggtagcaatgctactgggaatggatgtttatggctggcaagtgatggcgctgacgctgctgctgggaacgcctacgcttggctttctcggtgcaccgggcgtggcgctgacagtgggacttaagcgcggtggtatgctgctcagggtaccagctagagattcgtctacttgtagaacctatggacgtgaagggcgtaactttacgcattctaatgaaacgacgcgcagttccctccgcgatggcctggctgttgattattttaccgttcaggatgcatcagcacaaggttgcatgacctggcttgcgccacaaaacggtgaacacattttggatctttgtgccgcccccggcggtaaaacaacgcatatccttgaggtggcaccagaagcgcaggttgttgcggttgatatcgacgaacagcgcctctctcgggtttacgacaatttaaaacgccttggtatgaaggcgaccgtgaaacaaggtgatggccgttacccttctcaatggtgtggcgagcaacagtttgatcgcattttattagatgcgccttgttcagcaaccggtgtgattcgtcgccatccagatattaaatggttacgtcgcgatcgcgatatcccggaactcgcgcaattgcagtggttcagatttcttagcgaaatacgtaagacccttcatgagttagcccttaatatatgtctcagttctcatcttcaccactttcttgaatgtgtccaatag

SEQ ID NO: 29604 - DNA, 2468 bp, Homo sapiens
  SIMILAR (1260)..(931): 841254mologous to Homo sapiens calphobindin II,accession number D00510,Smith-Waterman Score=442.
acagacagaggttcaggatgtttattggatctgacatagcccaaaccagggcagaggctgtagcaaggggaggaagctgggaaagcctgagggtcagaggggagtggaggtggacaggatctatggctacggtttttcagccgctcagccgtgctgggccctcgatggcccgtgggagtgggagcgtttcctaagctccactgaagataagagcccaacccaacccctccccccacccctgccccttccttagtctctggagctggaacaatcaggcttggccatggcggctggtgctgataaccatttcttggcagaagtgcccgccaaagctgtggccctagtcctcaccaccacagagagccagcaaggccttcaggaagtctccggaggtgtcaccctcaatggcttggtggagagacttgtcatatttctcaatgaattccctccggatgttgagcaggtcaatctcactgcgggataccatgatcctggtcagagtcttctcatctgtgccagcacccttcatggatttgtaaagtttgtcggcaaagaagagaggcttgttcttgacactttgaacaatggccacaaatgcatccctgacatccccagacatctccttcttgatggtgtgctccacgtcatagttggtcatcttgatgaactcctggaagactctccggaggtgcggatagctccgggtacacaggatcgtcatgaaacgtgtctccaaggaagttttgtctccactgggtgtgtctgctatttccaagatctcagcagccacctgggcatcttcccgtgcctggtccaggttttctcctccctcctcacgatgccccgtggccagagaaatgaggatcctcctgaagtggccagatgtgtctgagctcagagcatccctccagggacttgtgatagtcctcccttataggcctcattgatggcccggatttcaagcattggtccgagtggccaggatttacaataagagccttttcaatctgtgccggctccctccatggccttcttcaactgcttggcatcgtaatgggccggtggcatcatgagccccagaatcagccttgccaggtctccagagatctcagacttcaggtcagtcattaagtcccggccaaagtgagacttgaaggtctgccggatctgctgccgctggacattgctgcggtgcgtgatgatatcgatgattgtatcttcgtcagtcccgagtcccttcatggctttaccgcagcgctttggcatctgcgtcagggttgaagtcattggctgggcgcacagttcccttcagctctactcgggccactgcactaagttcccacatctgataggccacctgcgctgcctccgggaagaactggccagcagcatcatcatctcccccagacagcttcagcagagtcttcttgtactcgccagaggtgtcattcttgatcatgctgtagagggacttctcatacttggtccggaagatctcccgaatgtcgagcatgtccaactcactacgggagaccatgatgcggatcagggtgttgtcccgagtccccaggcccttcatagccttgaagagcctttcagcaaaatattccggggtgctccggatacacttcactacggccagcattagcttctcaaagtccccagacagctcccctcggatgctggcttcaatcggcttccctgtggtcttcagatactcatcgaacaccaaccgaagatgctgcttgctgcgatttcccaagatgtaaatgaactgggcttcatctgttccccatttcagttcccctgcctcgtataggtcctggacatcctgttgtaccaggtcctcgctcactacgtcatcctcctccctggttccctggagcaggaccacaagcatcttctggaagtggccagaggtgtcgccgatgatgtcagcctccaggtcccgctcgtaggcatctttgtatgctgccaccagctggtgcatctgctcattggtccgggaagccaagatctcaatgaggcacttctcatcagtgccaatgcccgagatggcatctttaatttctttggcatcacaataggcaggtggcctcatcaggcccacaatcaaccgttcaaacttgcccgtcaattcatactttaaatcagcaatgaggtccttgccgtagagggacttgtagctctggcagacctcctgcctctgcctgttgctccgtgaggtgattatgtccagtatggcctccttgtcactgccaaagcccttcatggcagtgtacagagcctcggcatcctggttggggtcaaagcctgggaagtcatggatggagccccggtacttggcaccctgtgctggtttggccatggtctccggttcgcagcagaatccacgcgcagcggaggcctcgggtcgcagacggacgcacgggcgcagggactcgaggacgcagcgctcgctggatcgg

SEQ ID NO: 29605 - DNA, 1215 bp, Homo sapiens
  SIMILAR (679)..(1200): 981254mologous to Escherichia coli similar to S. typhimurium fm1A,accession number U82664,Smith-Waterman Score=858.
cagccccgatccctaaccgcgcgatcgcgtgtctacctcgagcgaaccgatccatgtgattccgaccgggcccgatcgatccggtggagccgatcaccacccgtccctgccgtaccgttcgcaatcggtgcacatttgatacgatcgcatcggccgcaagcgggcgactacaatcgcgacatccccagtgatcctaccaaccaggcggtcggtaaaacgcaggcccagtttcaacgctggtatcgccgccagattgtttctagagtatcaaagcggctcgcgccattttttcacgagcggggggggcgctgtcaggcttccgtttcagctttatcgcgtaaagcgccttcttccaaaggtgagggcgctcttcgctgagactgaaagcttcatttttcgtccatgatggcgttgtaaatctggaactgacttatttccttgtctaaggattaagataatctaagaaatacctgacaatataaaaagaattttcagcctggtaatttaccgcttcaggtctatatttgtgttgaatatattttgcgcggaagtattcatctaacggggctctctattttttagaatagagtgcatattttcaattaagacattcttagaggataaaaaggaatttactactatcagtgtcttaaataaagtaatcggttatatacggatgtggagtcgataaatgagattgaaggaatatatatgaaattaagatttatttcgtctgcgctggctgccgcactattcgccgctacgggtagttatgctgccgttgtagatggcggtacaattcactttgaaggcgaactggtgaatgctgcctgttcagtgaatactgactcggcagaccaggttgtcacactcggtcaatatcgtaccgatattttcaatgctgttggtaatacctctgcattaattccattcaccattcagttgaacgactgcgatcctgttgttgccgctaatgctgccgttgcattttctggtcaggctgatgcaatcaatgataatttattggccattgcatccagtaccaatacaacaacagcaacgggtgtcggtattgaaatacttgataatacatccgcaattctcaaacctgatgggaatagcttctcaaccaaccagaacttgatccccgggaccaacgttctttatttttctgcacgttataaaggcaccggtacaagtggcatgatgctctag

SEQ ID NO: 29606 - DNA, 1668 bp, Homo sapiens; identical to SEQ ID NO: 28800
  SIMILAR (1215)..(460): 901254mologous to Escherichia coli Putrescine transport protein,accession number D90708,Smith-Waterman Score=1158.

SEQ ID NO: 29607 - DNA, 2224 bp, Homo sapiens
  SIMILAR (1274)..(1903): 991254mologous to Escherichia coli L-rhamnose-H+ transport protein,accession number M85158,Smith-Waterman Score=1081.
aaaatatttccccgcccccggcgagaaggtgtggcacagtgcgccaaggaatagcgggacgagcatcatcccccccgggattttctcaatcgagcgttttatctgcatttccatcacctgtcggcatatttttaagggctgatgcgtaattcctcaatggagcatcagtgttgatggaaacgaagatagacattcatttaatcaataaaagtgatcaaaaccacatcaattgaaacgctgttttatttttatcggatcattgtttttattttgaaattgatcacaaaaaaaccaccgccgttggcgatggttcattttttaagctgatatgcggcctatacgcctcattgcagcaggcggcaaatgattattttttcgccgcaaaacgtgccgctgcttcgtcccagttcaccacgttccagaactctttaatgtagtccggacggcggttctggaatttcaggtagtaagcatgttcccacacatccaggcccataatcgggaagccggaagcgccagaaatagcttcacccatcagcggagaatcctggttagcagtagaaaccaccgccagtttatcgcctttcagcaccagccatgcccagccggaaccaaagcgggaagctgccgctttttcaaattctgctttgaagttatcaacggagccgaagtcacgttcgatagccgctttcaggtcaccctgcagggtggtgccttttttcagacctttccagaacaggctgcgcgttagcgtgaccgccagcgttgttgcgcagtacggttttcttgtctgctggcagctggtccagtttggtgatcagctcttcaaccggcaggttggcaaattctggcaggctttccagcgccgcgttggcgttgtttacgtaggtctgatggtgtttggtgtggtggatttccatggtctgcttatcgaagtgcggttccagggcatcgtaagcatacggcagggatggcagggtatagctcatattcatctccagtattgtcgggcggccgattgttaatgccgcgtaagcagttggttcattatagttaattaaatgatattgaaaatgattatcaatgccgtacttttcgtaagggtatggttttgcaggaaaatgcccgagatgtgaagcaaatcacccacttaatgccgtgattgccagtaaatcgacaacggcggcaacaggcgaaaggttaatcgacagcacgatttttacactcatctcgtcggagatgtgacgcgacgaaaaatgatgaggataagaagatgagtaacgcgattacgatggggatattttggcatttgatcggcgcggccagtgcagcctgtttttacgctccgttcaaaaaagtaaaaaaatggtcatgggaaaccatgtggtcagtcggtgggattgtttcgtggattattcatccgtgggccatcagcgccctgttactaccgaatttctgggcgtattacagctcgtttagtctctctacgcgactgcctgtttttctgttcggcgctatgtgggggatcggtaatatcaactacggcctgaccatgcgttatctcggcatgtcgatgggaattggcatcgccattggcattacgttgattgtcggtacgctgatgacgccaattatcaacggcaatttcgatgtgttgattagcaccgaaggcggacgcatgacgttgctcggcgttctggtggcgctgattggcgtagggattgtaactcgcgccgggcagttgaaagagcgcaagatgggcattaaagccgaagagttcaatctgaaaaaagggctggtgctggcggtgatgtgcggcattttctctgccgggatgtcctttgcgatgaacgccgcaaaaccgatgcatgaagccgctgccgcacttggcgtcgatccactgggatcttgtccgcctcaaaagcccgacttctcgctggcaaaatcgctgatcattcacaatgtgttactctcgacactgggcgggttgatgtggtatctgcaattctttttctatgcctggggccacgcccgcattccggcgcagtatgactacatcagttggatgctgcatatgagtttctatgtattgtgcggcggtatcgtcgggctggtgctgaaagagtggaacaatgcaggacgccgtccggtaacggtgttgagcctcggttgtgtggtgattattgtcgccgctaacatcgtcggcatcggcatggcgaattaa

SEQ ID NO: 29608 - DNA, 269 bp, Homo sapiens
  SIMILAR (65)..(244): 501254mologous to Escherichia coli K12 putative dehydrogenase,accession number AE000371,Smith-Waterman Score=116.
cgtgtaacggaacggcgctgtcgctgccgttatatccgtgcgatacgtcgatttccaggtcaccacctccgttccatccgccgccagctgtgcactgaagagatcctgcgtcagggtcgcgagatgatccaatggtcgtcaccgaaccgcaaaatggtgactggcacatcggtcgcggcgtcgccattatcatgagaaatcgggtatcccggatatcgatcaggctaactgcatgatcaaactgaatcggacggttcttaaaccactga

SEQ ID NO: 29609 - DNA, 970 bp, Homo sapiens
  SIMILAR (98)..(805): 861254mologous to Homo sapiens putative p150,accession number U93563,Smith-Waterman Score=1026.
agcgattgtagctttcctgttatctggaaatgctacagaaccagattgggttgaccacgatgttcgcgcctacatagcagcgatggaaatgaaagtggaaatacaaactaccattagagaatactataaacacctctacacaaataaactagaaaatctacaggaaatggataaattcctggacatatacaccctccgaagaataaaccaggaagaagttgtatccctgaatagagcaataacaggctctgaaattgaggcaataattaatagcctaacaaccaaaaaaagtccaggaccagatggattcacagccgaattctaccagaggtacaaggaggaactggtaccattccttctgaaactattccaatcaatagaaaaagaaggaatcctccctaactcattttatgaggccagcatcattctgatatcaaagccgggcagagacacaaccaaaaaagagaattttagaccaatatccttgatgaacattgatgcaaaaatcctcaataaaatactggcaaaccaaatccagcagcacatcaaaaagcttatccaccatgatcaagtgggcttcatccctgggatgcaaggctggttcaatatacgcaaattaataaatgtaatccagcatataaacagagccaaagacaaaaaccacatgattatctcaatagatgcaggaaaggcctttgacaaaattcaacaacccttcatgctaaaaactctcaataaattagatacaaaaagtgaacttttagatataaacaacctttatcaagcagcctctgatgaaataagagcgattgtagctttcctgttatctggaaatgctacagaaccagattgggttgaccacgatgttcgcgcctacatagcagcgatggaaatgaaagtggacctccggcttacaggaatactagtccgcttttctgattcagggatcggagcggattatcaaacgtga

SEQ ID NO: 29610 - DNA, 2688 bp, Homo sapiens
  SIMILAR (487)..(885): 941254mologous to Escherichia coli CTP synthetase (EC 6.3.4.2),accession number M12843,Smith-Waterman Score=633.
  misc_feature (1)...(2688): n = a,t,c or g
ccgccaggcaggccatgaaatttatcttgaggattttgggacggagtattcctgtttaagtcatttacaggatctgactgtcgacattctgaggatcgatatatcttttattgatgcgcgaggagatataaaaaggccacgcctgcaatcatcgaaatggctaaaacactgaaactgaagatggtaacggagggaatcgaaaccatgtaaacaagaagagtggttacgccagcatggggtgcactacggtcagggcgtgctctacagcaaggcattaccgaaagaagatttcttacgctgggccgagcaacatttgtaaatttttgggctgacggcacgccgcacagcccgtcacgctacctattcgtcgatgattgactcgaatccgccatagatcattcgcttgccgtcaaacggcatggactcgccgaactctttcatccgtgggtccgacatcatcttttgattagcagcgtcgcggacctcggcggggtcgtatcctctctgggtaaaggcattgccgcagcctccctcgcttccattcttgaagcccgtggcctcaatgtgaccatcatgaaactggatccgtacatcaacgtcgatccaggtactatgagcccaatccaacacggggaagtgttcgttactgaagacggcgctgaaaccgacctggacctggggcactacgagcgtttcattcgtaccaaaatgagccgccgcaacaacttcaccacgggtcgtatctactctgacgttctgcgtaaagaacgccgcggtgactacctcggcgcaaccgtgcaggttattccgcacatcactaacgcaatcaaagagcgcgtgctggaaggtggcgaagcgattcgccagatggctgttgaaattggccgtgagcacactctgtttatgcacctgacgctggtgccgtacatggcagcgtctgatacaaaaagtgaacttttagatataaacaacctttatcaagcagcctctgatgaaataagagcgattgtagctttcctgttatctggaaatgctacagaaccagattgggttgaccacgatgttcgcgcctacatagcagcgatggaaatgaaantgcagcagttagttccgccaccgggcgttaaggggagagataagatggtccattacgaagtagttcagtatttgatggattgttccgttatcacttacaaccagcctgtccagcctttacgcagcaacgattggaatctctgccagccagaattcgctatacgtagcaacaagataacctataactcaacgcaagcgcagcagtgcccgattgaaaacacatattgcctttatttgtatggacgcgattcgttgggttatcccgccctccacccaggtaccatggcacttacgccgccagttcgcgcgcctcgtgggcatgaaacagcataaagttcatgtcattaaagagcgagttgcgcagcggttttggttccaaacaggacatcctgctggaagaagtgtgcgttgtggcaaacctgcgagaacgggcgtccggtactgttccgctacacccgtgaagaagagtttattgctaacacctctcgtcacgtcgcgaaagtcaccgtcaaactgggagcgaaaaaagatggtcgcctgacggcagtgaagatggatttccgcgccaacactggcccttacggcaaccactcactcaccgtaccgtgtaacggaccggcgctgtcgctgccgttatatccgtgcgataacgtcgatttccaggtcaccacctactacagcaacatttgcccaaatggtgcttatcagggttatggcgccccgaaaggtaacttcgctatccccatggcaaaagcggaactgggtattcatatgggtagccacgatatggctcccctgcccacccgtttgctcaaaaagctcaaaaacgccgatgcgctgatcgtcgaggcggatgtttccaccagcgatacgccttttgctaatttgcctgcctgcgaggcgctggaagagcgcattagcgaggagcaactccaaaacctgcagcacattagccaggagatgggcatttctccctcactcttttctacccaaccgctgtggcaaatcgcgatggttcttcaggcgacgcaggcacaaaaactggggctgcgggcagaatacggtatcgattaccagctattgcaggcggcgaagcaacaacataaacccgtgattgaactggaaggggctgaaaaccagattgccatgactggcgctgctggacgatacgctgacccactggcataccaacgcacggttgctgcaacaaatgatgagctggtcgtgctgttccggcgcttaggggcttcctttatgcagtactgcctgcgaccggaaatagggaaggtggaaattgcgccgttcgcctatatgcgtggacgtacctttgaaaatgcagtcgtcattcttgacgaggcgcagaatgtgactgccgcgcaaatgaaaatgtttttaacccgcctcggggagaacgtgacggttatcgtcaacggtgatatcacgcaatgcgatttgcctcgcggcgtgtgctccggattaagtgacgcgctggaacgtttcgaagaagatgaaatggttgggatcgtccggttcggtaaagaggactgcgtacgttcggcactttgccaacgtacgctgcatgcctacagttaa

SEQ ID NO: 29611 - DNA, 544 bp, Homo sapiens
  SIMILAR (218)..(391): 1001254mologous to Homo sapiens Human protein clone HP10563,accession number Y94867,Smith-Waterman Score=305.
  misc_feature (1)...(544): n = a,t,c or g
ggaattcggctgagtggcacttaagcgggccatgccatgcaaccttgggcgctgccaaccgtgggcgagctctgggtgtgcgggcggcctggcgcggcgctccgctgtgtcagcgtgttatgatgccgtcccgtaccaacctggctactggaatccccagtagtaaagtgaaatattcaaggctctccagcacagacgatggctacattgaccttcaggctccctcctgctgtcaggctacatcagcaaagggggggcagaccgggccgttccagtgctgatcattggcattctggtgttcctacccggattttaccacctgcgcatcgcttactatgcatccaaaggctaccgtggttactcctatgatgacattccagactttgatgactagcacccaccccatagctgaggaggagtcacagtggaactgtcccagctttaagatatctagcagaaactatagctgaggactaaggaattctgcagcttgcagatgtttaagaaaataatggccagattttttgggtccttcccanagatg

SEQ ID NO: 29612 - DNA, 1477 bp, Homo sapiens
  SIMILAR (1244)..(1471): 731254mologous to unidentified RED BETA,accession number A95106,Smith-Waterman Score=295.
ctagtcatcaaagtctggaatgtcatcataggagtaaccacggtagcctttggatgcatagtaagcgatgcgcaggtggtaaaatccgggtaggaacaccagaatgccaatgatcagcactggaacggcccggtctgcccccctccgggcgtcgcgggccccgcgcgtggtccgctcccggtctccgccaagccgggtttttctctgactaggcgccttatctcgttcgcgcgttccaactccgcctgatcgcctcacgcaagcacgaagcgcgctttgaggcccagccgctcgtgacctcaatagaaacaccgcgaagagcgggctgaacgccagcgcattgaagcggaacagcgtgcggaacgcgagaagaaggaaaccgaagagcgtgcgcgccgcgaaaaagaagaagccgttgccgccgagcgccgccgccaggaagaggcagaagccgcccgtttggtcgaagagcagcgcaaagctgaagaagaagcgcgccgagccgcagacaaagagcaccgccgcaccgtcaatcgtcgtgtctacgcagatctgattgctcagggcatcccagaagaatacgcacagaaagcagtgctggcgatcgctggcggcaaagtgcaggacgcgcacatcaaatattgaggcaaacatgaacgcatacctcacttacgaccgcatcgaagaacggcgctgggttgagcagcaactcaccgacgagaaagagaagtggatcgacgaccgggcgaaagaactgatcgccatgttcccgaaatatgctctgcaaatgagtagcctgtttctcccaaaagaagcgcaaatggcactagtcggtgaaaaggcagaggaagcctataacgactatgtcacacgcatctgttacgaccgcgccgaagaagaaaacgcccagttccgccgcgaggggctcgataagccgccgatccacatctacaaggactttgatactgaagagcagcgcggggacattgtaggggcgtatgtaacggtaaaaactgacgatggtgattaccttacccatacgatgggcatcgatgccatctactccatccgtgaccggtctgaagcatggaagaagtacaaatctgacaacagcaagaagtgtccatgggtcaccgatgaagagcagatgatcctaaagacggtcgtgaagcaggcagcaaaatactggcctcgacgtgagcgcctggatgccgccatcgaccatgttaataccgagggtgaggaaggtatcaacttctcagcagaacgccagccagaacgcgatgtaaccccagcaggagacgaaattatcaaggagattaacgacgtccttatcgcaatggataagacatgggaagaaaacctgctcccagtctgttcgcaaattttccgtcgtgatattcgcgattcatccgagcttacccaagccgaggcagttaaggccttaggcttcctcaagaagaaggcggcagcatga

SEQ ID NO: 29613 - DNA, 1134 bp, Homo sapiens
  SIMILAR (367)..(726): 431254mologous to Homo sapiens HSPC274,accession number AF161392,Smith-Waterman Score=178.
atgcaaccttgggcgctgccaaccgtgggcgagctctgggtgtgcgggcggcctggcgcggcgctccgggcggggacagaaccgtcctctcgggctctgggcgtgtccgagaccgcgctccccgccgaaatcaagctccgagtcatccgtgtggggcattcgtcccccctggcacagttggcctctttccagaagcccgttttgtttgttttacgtctaaattcgcgtcggttcttatttctctccctggcaaggtctgaagacggaatcctctttgccaagagtaaacattcgtctcccctctccctcacgcccctgcgatgtattgttttgatgcggatgtatgaacagttaatgtcaggggacctgtgtcagcgtgttatgatgccgtcccgtaacaaccctggctactggaatccccagtagtaaagtgaaatattcaagggctctccagcacagacgatggctacattgacctgcagttttaagaaaccccctcctaagatcccttataaggccatcgcacttgccactgtgctgtttttgattggcgcctttctcattattataaggctcccctcctgctgtcagggctacatcaagcaaagggggggcagacccgggccgttccagttgctgatcattgggcattcttggtgttcctaccccggattttacccacctgcgcatcgctttactatgcatcccaaagggctaccgtgggttaatcctaatgaatgacattccagacttttgaatgactagcacccaccccattagctgagggagggagttcacagtgggaactgttcccagctttaaggatatctaggcaggaaactatgagctggagggactgaagggaatttcttgcagcttgcaggatgttttaaggaaaataatgggccagattttttggggtccttccccaaagatgtttaagttgaacctacagtttagctaatttagggacaagctctatttttttcatccctgggggcccttgacaagtttttccacaggaatatgtatcatggaagaatagaggttattctgtaatgggaaagtgttgcctgccaccaccctctgtagagctgagcatttcttttaaatagacttcattgccaatttgtt

SEQ ID NO: 29614 - DNA, 426 bp, Homo sapiens
  SIMILAR (2)..(358): 1001254mologous to Escherichia coli Flagellum-specific ATP synthase (EC 3.6.1.34),accession number D90834,Smith-Waterman Score =596.
gattgccgactccgcgcgggcgatcctcgacggtcacattgtgctgtctcgccgactggcggaagccgggcactatccggctatcgatattgaagcgtcgatcagccgcgcaatgacggcgttgatcagtgagcaacattacgcgcgagtgcgcaccttcaaacagctgttgtcgagttttcagcgtaaccgcgatctggttagcgtcggcgcgtatgccaaaggcagcgatccgatgctcgataaagccatcgccctgtggccgcagctggagggctatttgcaacaaggcatttttgaacgcgcggactgggaagcgtctctccaggggctggagcgtattttcccgacagtgtcataacccaggagataacggcagatggcagaacatggtgcgctggcgaccctgaaagatccccgggtacc

SEQ ID NO: 29615 - DNA, 1735 bp, Homo sapiens; identical to SEQ ID NO: 24864
  SIMILAR (601)..(14): 981254mologous to Escherichia coli HisP-like nucleotide binding protein (phnL),accession number J05260,Smith-Waterman Score =983.
  misc_feature (1)...(1735): n = a,t,c or g

SEQ ID NO: 29616 - DNA, 4182 bp, Homo sapiens
  SIMILAR (2182)..(3069): 991254mologous to Escherichia coli K12 putative enzyme,accession number AE000280,Smith-Waterman Score=1575.
atgggctttcatctttccgtggcgacgggcactggctttatcgccctcgccggggtcgccgccgaatttggcgtggtgatgctgatgtatttacgtcacgccatagaggccgtgccgtcgttgaataatccacaaacattcagcgagcagaagctggatgaggcgttatatcacggcgcggtcctgcgcgtgcgcccgaaagcgatgacggtggcggtgattatcgccggtctgctgccgattctgtggggaacgggggctggttcagaggtgatgagccggattgccgcgccgatgattggcggcatgatcaccgcacctttgctgtcgctgtttattatcccggcggcgtataagctgatgtggctgcaccgacatcgggtgcccctcaacaaaaaagacacacaggggaaaggcgtgaaaaacgcgtcaaccgtatcggaagatactgcgtcgaatcaagagccgacgcttcatcgcggattacataaccgtcatattcaactgattgcgttgggtggcgcaattggtactggtctgtttcttggcattggcccggcgattcagatggcgggtccggctgtattgctgggctacggcgtcgccgggatcatcgctttcctgattatgcgccagcttggcgaaatggtggttgaggagccggtatccggttcatttgcccactttgcctataaatactggggaccgtttgcgggcttcctctctggctggaactactgggtaatgttcgtgctggtgggaatggcagagctgaccgctgcgggcatctatatgcagtactggttcccggatgttccaacgtggatttgggctgccgccttctttattatcatcaacgccgttaacctggtgaacgtgcgcttatatggcgaaaccgagttctggtttgcgttgattaaagtgctggcaatcatcggtatgatcggctttggcctgtggctgctgttttctggtcacggcggcgagaaagccagtatcgacaacctctggcgctacggtggtttcttcgccaccggctggaatgggctgattttgtcgctggcggtaattatgttctccttcggcggtctggagctgattgggattactgccgctgaagcgcgcgatccggaaaacagcattccaaaagcggtaaatcaggtggtgtatcgcatcctgctgttttacatcggttcactggtggttttactggcgctctatccgaacatccccattgactcgataaacacgatgattaacacggcagtcatggtcagaatggaaacgggatcgaaaatcggcataccaaacgacatcggcgtaacaatcgcaaaccatgaagcatcatgtagcccggataaattgacttcattcatcatccacgaaagaggtcagatgggtatcatagctcaaaataaaatcagttcattgggcatgctgttcggtgccatcgcttggatgatggggattatccacttttcattcggccctttctccgcaccaccgccaacgtttgaaagcatcgtggcggacaaaacggctgaaattaaaagaggtcttctcgccggaataaaaggcgaaaaaattaccaccgtggagaaaaaagaggacgtagatgtcgataaaatcctcaatcaaagcggtatcgcactggccattgctgcgctcctttgcgcatttattggcggtatgcgtaaggaaaatcgctggggcattcgcggcgcgctggtttttggcggcgggacgctggctttccataccttgctttttggtatcggcatccattttgctgatattccttatcttttccttcctgaccggcggttcactggtttaagcagcctgaataatgcccgccgggtgatcatcagcgggcattatcgtcagaacttctgttttttctcctccaccttcaccccttgtgtcggccggtgtcatagtcgcgtacaactggcgaatagccatcttgtggacgtggacgaaacgcccccatccagcgcggccgtgcatctttacgccacggacgcagactccattggtaactgcggaacggatcgcgaattttgtccatgtaatccaataaggcgtcatgcattttgctgcgaacgtctgcaaaacggatatcatcgatcagggtatgcatttcatttgggtcattacggcgatcgtaaagtcatcactaacttttattctctgattgccaaaaatcatctttcacactggctcgaaacgctgcccgcgcagattgctaactggcagcgcgagcagcagcacgggttgtttaagcagtggtcaaatgcggtggagtttctacctgaaattaaaccgtatcgtcttgatttattgcatagcgttacggcagaaagcgaagagccactgagcgcagggcaaattaaacgcattgaaacgctgatgcgcaacctgatgccgtggcgcaaagggccgttctcactgtatggcgtcaacatcgataccgaatggcgttccgactggaaatgggatcgtgttctgccccatctttctgatttaaccggacgcaccattctggatgtcggctgcggcagcggttatcacatgtggcgcatgattggcgcaggcgcgcacctcgcggtggggatcgaccctacgcaactgtttctgtgccagtttgaagcggtgcgtaaactactgggtaatgatcagcgcgcgcatttgttacctattgaacaacttccggcactgaaagcctttgataccgtcttttcgatgggcgtgctttaccatcgccgttcaccgctggagcatctatggcagttgaaagatcaactggtcaatgaaggtgaactggtgctggaaacgctggttattgatggtgatgagaacacggtgctggtaccaggcgatcgttacgcgcaaatgcgtaatgtctatttcatcccttccgcgctggcgctgaaaaactggctgaagaagtgtggttttgtagatatccgcattgcggatgtgagcgttaccaccacagaagagcagcgacgcaccgaatggatggttaccgaatcgctggccgatttcctcgacccacatgatccggccattttccagatctggccatgcaccttcatgcacgcataccacgccttttttgatcccgtcagtcaccaccgcgcctgtcaaaatctgaccacgtttgttccagacacgcaccagatcgccattcgcaataccaaagcgtgcagcatcttcgtttcatttgcgcttcgtaccacgcattcgtgcgccatttcacattcgtctctagaggatcccccggcgattctgtttaagattgccgatcgaatggaacaaaacctcgagctgttagcgacactggaaacctgggataacggcaaacccattcgcgaaaccagtgctgcggatgtaccgctggcgattgaccatttccgctatttcgcctcgtgtattcgggcgcaggaaggtgggatcagtgaagttgatagcgaaaccgtggcctatcatttccatgaaccgttaggcgtggtggggcagattatcccgtggaacttcccgctgctgatggcgagctggaaaatggctcccgcgctggcggcgggcaactgtgtggtgctgaaacccgcacgtcttaccccgctttctgtactgctgctaatggaaattgtcggtgatttactgccgccgggcgtggtgaacgtggtcaatggcgcaggtggggtaattggcgaatatctggcgacctcgaaacgcatcgccaaagtggcgtttaccggctcaacggaagtgggccaacaaattatgcaatacgcaacgcaaaacattattccggtgacgctggagttgggcggtaagtcgccaaatatcttctttgctgatgtgatggatgaagaagatgcctttttcgataaagcgctggaaggctttgcactgtttgcctttaaccagggcgaagtttgcacctgtccgagtcgtgctttagtgcaggaatctatctacgaacgctttatggaacgcgccatccgccgtgtcgaaagcattcgtagcggtaacccgctcgacagcgtgacgcaaatgggcgcgcaggtttctcacgggcaactggaaaccatcctcaactacattgatatcggtaaaaaagagggcgctgacgtgctcacaggcgggcggcgcaactgctggaaggtgaactga

SEQ ID NO: 29617 - DNA, 1191 bp, Homo sapiens; identical to SEQ ID NO: 25722
  SIMILAR (273)..(1): 951254mologous to Escherichia coli HipB protein,accession number D90782,Smith-Waterman Score=470.

SEQ ID NO: 29618 - DNA, 504 bp, Homo sapiens; identical to SEQ ID NO: 24867
  SIMILAR (1)..(231): 1001254mologous to Escherichia coli Biotin sulfoxide reductase 2 (EC 1.-.-.-) (BDS reductase 2) (BSO reductase 2),accession number D90829,Smith-Waterman Score=408.

SEQ ID NO: 29619 - DNA, 2058 bp, Homo sapiens
  SIMILAR (172)..(693): 971254mologous to Escherichia coli elongation factor G,accession number X00415,Smith-Waterman Score=861.
atgccagcaattcttcgcattctgtctggcgaccattctccgccaaccacgcagccatcaacagcagtgaaccaaaatgatcttccggttcgttttgcttcatttcaaactgaatgcctttctcgcgcatccactgacgaagtgccaatgttgaatcgccaaacaccaatcccgaatggctaccagtgcatcagcgacattaaaggtggtgtaatccctggcgaatacatcccggccgttgataaaggtatccaggaacagctgaaagcaggtccgctggcaggctacccggtagtagacatgggtattcgtctgcacttcggttcttaccatgacgttgactcctctgaactggcgtttaaactggctgcttctatcgcctttaaagaaggctttaagaaagcgaaaccagttctgcttgagccgatcatgaaggttgaagtagaaactccggaagagaacaccggtgacgttatcggtgacttgagccgtcgtcgtggtatgctcaaaggtcaggaatctgaagttactggcgttaagatccacgctgaagtaccgctgtctgaaatgttcggatacgcaactcagctgcgttctctgaccaaaggtcgtgcatcatacactatggaattcctgaagtatgatgaagcgccgagtaacgttgctcaggccgtaattgaagcccgtggggagagcactatagtaaggaatatagccgtgtctaaagaaaaatttgaacgtacaaaaccgcacgttaacgttggtactatcggccacgttgaccacggtaaaactactctgaccgctgcaatcaccaccgtactggctaaaacctacggcggtgctgctcgtgcattcgaccagatcgataacgcgccggaagaaaaagctcgtggtatcaccatcaacacttctcacgttgaatacgacaccccgacccgtcactacgcacacacacctcaccagatcattcagacccgcaacgcccgtgaactggtcgatagcatcaccagcgccggttcggtatttcttggtgactggtcaccggaatcggcaggtgattacgcctccggcaccaaccacgttctaccgacttacggttacaccgccacctgttccagcctcgggctggcagatttccagaagcgcatgaccgtacaggaactgtcgaaagaggggttctccgcgctggcttcaaccatagaaacactggccgccgccgagcgcctgaccgcccacaaaaatgccgttactttgcgagcaagcatgagcaccgtgactattaccgatttagcgcgtgaaaacgtccgcaacctgacgccgtatcagtcggcgcgtcgtctgggcggtaacggcgatgtctggctgaacgccaacgaataccccactgccgtggagtttcagcttactcagcaaacgctcaaccgctacccggaatgccagccgaaagcggtgattgaaaattacgcgcaatatgcaggcgtaaaagcggagcaggtgctggtctaccgtggcgcggacgaaagtattgaactgctgattcgcgctttttgcgaaccgggtctctctggcggcgaacgtcagcgggcgtggatcgccatgctggtggcgcaggatagccgttgtctgttgctcgacgaaccgacctcggcgctggatatcgcccaccaggttgatgtgctgtcgctggtgcaccgtttaagtcaggagcgtggcctgacggtcattgccgtgttgcacgatatcaatatggcggcacgctactgtgattatctggtcgccctgcgcggcggtgaaatgattgctcagggaacgcctgcggaaattatgcgcggcgaaaccctcgaaatgatttatggcatcccgatgggtattttgccgcatccggcgggtgctgcacctgtgagttttgtttattgatgagcggcttacctcttatttcgcgccgtcgactgttaacggcgatggcgctttatccgttgtatatggcagatgaatcccgctctcgcgacggctattgatctccgggtcggacgcttgaattcgtaatcatggtta

SEQ ID NO: 29620 - DNA, 3586 bp, Homo sapiens
  SIMILAR (3053)..(3583): 1001254mologous to Escherichia coli calcium/proton antiporter,accession number L28709,Smith-Waterman Score=890.
tcaattacgatgggtcagaatcgaatcgaccagaccgtattccaccgcttcaggggcggaaaggaagcgatcgcgctcggtatcacgttcaatctgttctaatgattgacccgtatgaagcgccataagttcattcatgcgccctttaactttcagaatttcacgggcatgaatttcgatatcggtcgcctggccctggtagccgcccaacggttggtgaatcatcacgcgcgaattcggcaggcaaaaacgtttaccttttgcccctgcggtcagcaagaaagcgcccatcgaggccgcctggcccatacagatggtgctgacatcaggcttgataaactgcatggtgtcatagatagacatcccggcagtgatcaccccgcctggggagttaatgtacagatagatatctttttctgggttttccgcttccaggaacagcatctgcgccacaatcaggttagccatgtggtcttcaacctggccatcaagaaaaaatgacgcgttccttgaccagttgtatgtcttgggaacatttgcgctcctcgtctttctcttcgtgcagattattctcttcctcatccgcacggttcggaccgacacccacgtagtggaagatactggccgcaaaggtagccgcaaagccaacagccgcgagcggtttccagatgcctttccagaatttcacggtttcgctgatttccgggttctccggcaatccatgatacagatttggcttgtcagcatggtgcagcacgtacatgacgtgtgtccacgtatccgggcgctacaacatgatctcagtgatgttatcggtcaggaacaaggaaagcgaggactggaaattaccgctgctggcgggcacaaccttttactgattgggccgccgggaacaggtaaaacaatgctcgccagccgtattaatggcctgttgccagatttaagcaatgaagaggcactccatattgcgccaggtaaaaaacagtggagttggggacacagtgaatttggccaggcgtgggataagagtctgaccgacaataacggcccgtatatcgaactgatgaccggtatttttgccgataaccagcccgattttacctggcttgatgcttacgaagagaagcgttttgagcagtatttcctgccttatcattctttgggcatggtgcaaaatgcctcccgcgatgcggtgataaaactccagcgtagtaagcgggggattgagtgggggctgtatgccatctctccgttgaacggataccgcctggcgatccgcgaaatcggtaaatgcaacgcgttacttgatgatgccgtggcactgatgcctgcgaccgccatccagggcgtgttgcacggtatcaatcctgaaaggctgaccattgagctctccgatgccgacggcaatattgtactgagttatcaggaacatcagccgcaagcgttgccgttaccggacgtcgccaaagcgccactggcagcacaagacattaccagtacagatgaagcctggtttatcggtcagcatctggagcaatatcatcacgccagccgttcaccgttcgattactacctgcgcggcgtggcgctggacccgctggatatcgctggcgatgaccagcaggatccgattgccgactccgcgcgggcgatcctcgacggtcacattgtgctgtctcgccgactggcggaagccgggcactatccggctatcgatattgaagcgtcgatcagccgcgcaatgacggcgttgatcagtgagcaacattacgcgcgaattcagtttcaccgcgtatgcccagcgcagaaccgtaaacagataggcatcagcaattgtaaatctttgcccgcagatccagtgctcatccttcagtgcctcgttcacatattgcagcttcttctccagctgcgcgcgaactgtcggtttgtactcttccggtgtatcagggcgaaacagaggtgtgaaacctttatgcagctcggtggcgatgtaattcagccattcgatggttttatagcgggaaatactgtttaccggtgccagcaactggcggtcggggacgctgtcggcaagatactgcataatcgctacgccttccgtcagcaaagtaccgtcatccagcagcaatgcaggcacctggcccttagggttaacggcaaagtgttggctgagctgcaagctagccagctggacgtcacatgtggtaccccgacacgcacagcctccctggcagctgctagcgtgaagcatctatggcagttgaaagatcaactggtcaatgaaggtgaactggtgctggaaacgctggttattgatggtgatgagaacacggtgctggtaccaggcgatcgttacgcgcaaatgcgtaatgtctatttcatcccttccgcgctggcgctgaaaaactggctgaagaagtgtggttttgtagatatccgcattgcggatgtgagcgttaccaccacagaagagcagcgacgcaccgaatggatggttaccgaatcgctggccgatttcctcgacccacatgatccgggtaaaacggtggaaggttatccggcacctaaacgcgcgctggctgatcaaacgccgttaacttcggtgcattgcccgtatatttttcgatatacaccaacgctgagttaccggcacaggcatttgccagctgcgagctggggatatccgccgttaacacgttcgcactgccgtttttacacaagccattttccagatctggccatgcaccttatgcacgcataccgggatagccgttgtctgttgctcgacgaaccgacctcggcgctggatatcgcccaccaggttgatgtgctgtcgctggtgcaccgtttaagtcaggagcgtggcctgacggtcattgccgtgttgcacgatatcaatatggcggcacgctactgtgattatctggtcgccctgcgcggcggtgaaatgattgctcagggaacgcctgcggaaattatgcgcggcgaaaccctcgaaatgatttatggcatcccgatgggtattttgccgcatccggcgggtgctgcacctaccaaaacgcatcaaagtttgtttgtctacgagcacgaagatgacagtgatgatgacgacccgcatcacggtaaaccgtctgcccatagcagcctgtggcatgctatctggttgattatccatctgattgccgttattgcggtgaccaaaatgaacgccagctcgctggagacattgctcgacagcatgaatgcccctgtcgcctttactggcttcctggtggcactgttgattctgtcgccggaaggtttaggtgcattaaaagcagtgttgaacaaccaggttcagcgcgcgatgaatctgttctttggttcagtgttagcaaccatttcgcttaccgtacctgtcgtcacgctaattgcctttatgacgggtaacgaattgcagtttgcacttggtgcgccagaaatggtggtgatggtggcctctttagtgctgtgccatatctccttctccaccggacgtactaacgtgctcaatggcgcagcgcatctggcactgtttgccgcctatttgatgacgatatttgcctga

SEQ ID NO: 29621 - DNA, 655 bp, Homo sapiens
  SIMILAR (655)..(131): 961254mologous to Escherichia coli Arginine binding protein artI,accession number D90724,Smith-Waterman Score=887.
cagcgctgaacctgcccacgcgacaggacgccattttgccgactcccataccgcaaagaacatcgccagcgccagcccgacaatcaatgcacaaacggcaaggccgacggtcatcccggcggcgcttgttctggaaccatttgttgtagatggtttcgtaagtgccatctttcttcactttttccagcgcagtgttgagtttctgctgcagctcagtgttgccctgacgtaccgcgatgccgaggccagtgccgaagtaatctttatcggtcactttgtcgcccaccgccgccagtttcgggttatctttcagccactcagtgaccactgcggtgtcaccgaagacgccgtcgatacgcccgttttgcagatccagttttgcgttctggtagctgtcatacggaacggtagtgatttccgggtgcttatccataatgaatttctggtgtgtcgtcccgttctgtacgccgacttttttgcctttcagctgatcaacactggtgtatttgccttgctgacccacaaacagggcagagttgtcatagtacggggtggtaaacagcacctgcttttcacgctccggagtgatatccatgcccggcatcacgggttctaagcgacggaatttcaggcttgggatccaggtgtgaaacgc

SEQ ID NO: 29622 - DNA, 924 bp, Homo sapiens
  SIMILAR (1)..(579): 951254mologous to Escherichia coli IN2-2 protein,accession number D90779,Smith-Waterman Score=941.
atgagcagcaatacatttactctcggtacaaaatccgttaaccgtcttggttatggcgcgatgcaactggcaggtcctggagtttttggccccccacgagatcgccacgtcgctataaccgtgctgcgtgaggcgctggcattgggcgtcaatcatattgataccagcgacttttatggtccgcacgtcaccaatcagattatccgcgaagcgctttatccttactctgacgacctgacaattgtcactaaaattggtgcgcggcgtggagaggacgcatcctggttgcccgcattttctccggcagagctgcaaaaagcggtgcacgataatctacgtaatctcgggctggacgtgctggatgtggttaacctgcgcgttatgatgggggatggtcatggcccagcggaaggatcgattgaggccagcctgaccgtgctggcagagatgcaacaacaaggcctggtaaaacatattggcctgagcaacgtcacaccgacgcaggttgcagaggcgcgcaagattgccgaaattgtctttgtgcaaaacgaccacaacttcgcgcttcgcgacgcgctgcatgcattaaagttacgagttcgtcagggcgaaggtaaagacctgaataacgaaagtacgccaatggctttcgaaaatattaaacaagttattgatgacatggcgaccgatgccaccatgtttgacgttaacaaaaagtgtttgctgttgttcaatgtattggcggatgacggatattggcgcacctccgcagctactggcaaaatagccaggactccacaaaacgcctttgtagtaatacctgaatgcaatatctggtcgatctcgtcgcagtcacctacccgatacgcctttgaggctgtttaccagactggatatcgccagtttgggaggatagttaattaa

SEQ ID NO: 29623 - DNA, 1761 bp, Homo sapiens; identical to SEQ ID NO: 17886
  SIMILAR (1090)..(1743): 991254mologous to Escherichia coli alpha-amylase precursor,accession number X58994,Smith-Waterman Score=1174.

SEQ ID NO: 29624 - DNA, 519 bp, Homo sapiens
  SIMILAR (3)..(242): 1001254mologous to Escherichia coli Arginine binding protein artI,accession number D90724,Smith-Waterman Score=423.
tgcaaaacgggcgtatcgacggcgtcttcggtgacaccgcagtggtcactgagtggctgaaagataacccgaaactggcggcggtgggcgacaaagtgaccgataaagattacttcggcactggcctcggcatcgcggtacgtcagggcaacactgagctgcagcagaaactcaacactgcgctggaaaaagtgaagaaagatggcacttacgaaaccatctacaacaaatggttccagaagtaattcctgatgaatgaattttttcctttagcaagcgccgccgggatgaccgtcggccttgccgtttgtgcattgattgtcgggctggcgctggcgatgttctttgcggtatgggagtcggcaaaatggcgtcctgtcgcgtgggcaggttcagcgctggtaaccattttgcgtggcctgccagaaattctggcggagcctgattatctattttggctcctcgcagctgctgctgacgctttcggatggcttcactatcaatcttgggttccgtgca

SEQ ID NO: 29625 - DNA, 1086 bp, Homo sapiens
  SIMILAR (568)..(1083): 941254mologous to Escherichia coli tehB,accession number M74072,Smith-Waterman Score=839.
atgcatcagaccaagaaaggcaatcagtggcactttggcatgaaggcccacattggtgtcgatgccaagagtggcctgacccacagcctggtcaccaccgcggccaacgagcatgacctcaatcagctgggtaatctgctgcatggagaggagcaatttgtctcagccgatgccggctaccaaggggcgccacagcgcgaggagctggccgaggtaagaaccttgaaacagcatccacgcaagaacaaaacggccatcaacatcgaatacatgaaagccagcatccgggccagggtggagcacccatttcgcatcatcaagcgacagttcggcttcgtgaaagccagatacaaggggttgctgaaaaacgataaccaactggcgatgttattcacgctggccaacctgtttcgggcggaccaaatgatacgtcagcgtccatttaccgttagcgataagtttttcattgagcgcaataccactgctggccagcgcgtctttatacccggcaagacgttcaatgctggtgggggaatccatcgagccggcatactaacttcggtatgtgttgaatgtgtaaaccgtggtaaaacgctggatctgggctgtgtcaatggtcgtaacagtctttacctggcagccaatggttatgatgttgacgcatgggataaaaatgccattagtatcgccaacgtcgagcgcataatatccattgaaaatctggataatttacacacccgattcgtctatctgaatatcctcacatttgatagacagtacgattttattctttcgactgtggtgctgatgttccttgaggctaaaaccatccccgggttgattgccaatatgcaacgttgcactaaacctggtggttacaacctgattgtggcggcgatggataccgctgattatccatgtaccgtcggcttcccgtttgccttcaaagagggagaattacgtcgatattacgaaggctgggagagggtgaaatacaatgaagacgtcggcgagctgcaccgcaccgacgccaacggtaatcgtattaaactgcgtttcgccacgatgctggcacgtaaaaaatga

SEQ ID NO: 29626 - DNA, 2444 bp, Homo sapiens
  SIMILAR (1422)..(1321): 971254mologous to Escherichia coli glycine acetyltransferase,accession number U00039,Smith-Waterman Score=167.
atgttaggcaagcactcgcacggaccaccggacgagcacgaacattggaccaaggataacgccaaaagctcacgagaagcccggcacccacagacagaacaaaacgaaaactcacctagggcaaaaacctcgagacgtggaacacgagataaagcgcacatgaggacgacaacagcggggtcacaaaaggtacgtctatattacgaaggctgggagagggtgaaatacaatgaagacgtcggcgagctgcaccgcaccgacgccaacggtaatcgtattaaactgcgtttcgccacgatgctggcacgtaaacctgttttacgttgggtagacccgagttttgatcaaagcaaatatgacagcatcgtctggaacccaatcacttattatccggtaccgaaaccgtcgacccaggtagggcagaaagttctggataaaattttgaactataccaacaccgaaatgaaagaagcgatagcgcagcgtaaaccactggttaccaccgctgggccgcgtagtctgattttccgtggggccattaccggtgtagataccagcaaagaagggctgcaattctatgaagtggttcctgttgcattagtggttgcggggacgcaaatggctacaggccaccgtaccatggatactcgcctctattttgaaggtgagctgattgatgcagcgactaataaaccggttatcaaagtcgttcgtcagggcgaaggtaaagacctgaataacgaaagtacgccaatggctttcgaaaatattaaacaagttattgatgacatggcgaccgatgccaccatgtttgacgctggaggtaccagcaaccaattcaatgatcataccgtcacgtttgcggtattaagcggatcggcaacttccttcaacaatcaaaacaccgcaaaaacggatgttaatggtctggcgacttttgatctgaaaagtagtaagcaggaagacaacacggttgaagtcacccttgaaaatggcgtgaaacaaacgttaatcgtcagttttgtcggcgactcgagtactgcgcaggttgatcagaagctagctcaagcagccacgcacacatctccggctgcgatggggaaaatcaagttgtgcattgccagaaggagtcctggaagcatgttgaccaccccgaacattttaatgccacagatgcgtaatccggttgccagcagcaataaaccgcctacggcgctgaagtctgccatgatcctcccacggccgacccgtaaccccggggggcgcagggagtcggccgaggctgcacggccgcgacgtcgggccgctaagcccgtcaccgttgttggcatagcgatagcgtgtagctttgcacagacgcacaccatcaataatagacgcgtggttcagtgcgtcggagataatggcgtcttccgcacccaagaagcgtttcaaacgaggccaccgttagcatcaaagcaggaagagtagagaatcgcatcttccatccccaggaaggccgccagtttttgttcaagctctttatggctgtcctgagtgccgcaaataaaacgcaccgaagccatgccgaagccgtgagaatccattcccgcattggccgccgcaatcagatcaggatgattcgccagccgaagatagttgttggcacaaaagttaatgacgtggcttccatcagccacagtgatatctgcttgctgcgcagacagatcggggcgtttgtaatagcacatgacaaaaatgccctggtcatcgtccacaatgtttctgactgcgacacaattgtggaagctgcagcactattacccgcttttgatcataggcgttttacgaggtcgactcatagctggattcccgtgatacctgatgctctgaattcggaggagaaaaccacagctgtgcaaggtacacgttcggatatgaactggcaggatgttagcggtaaatctgccgccagcgtcgcgcactggcagaaaatcagccagttccgcgcccgccatcccgcaattggcgcgggcaaacaaacgacacttttgctgaagcagggctacggctttgttcgtgcgatgggcaagattgtagcccgtttctccttcccggtccccctccccactttggcccctgggacctgctcagaaccccagggtgaaggagacatctcaagtgtgacccattggctgcttctgctgcgggagagggagagacgggcaagcgccgccgggatgaccgtcggccttgccgtttgtgcattgattgtcgggctggcgctggcgatgttctttgcggtatgggagtcggcaaaatggcgtcctgtcgcgtgggcaggttcagcgctggtaaccattctgcgtggcctgccagaaattctggtggtgctgtttatctattttggctcctcgcagctgctgctgacgctttcggatggcttcaagtggattcctaagtag

SEQ ID NO: 29627 - DNA, 2763 bp, Homo sapiens
  SIMILAR (1594)..(2214): 981254mologous to Escherichia coli ribonucleoside triphosphate reductase,accession number L06097,Smith-Waterman Score =1131.
atgggcgttgattgctttaagaccgactttggcgaacgtatcccaactgatgttcagtggtttgacggttccgatccgcagaaaatgcataaccattatgcgtacatctacaacgaactggtgtggaacgtgctcaaggacaccgttggtgaggaagaagctgtcttgtttgcccgctcggcctccgtcggtgcgcagaaattcccggtacactggggtggcgattgttacgctaactacgaatcaatggcggaaagcctgcgcggtggtttgtctattggcctttcaggttttggcttctggagccacgatatcggcggctttgaaaataccgctccggcgcacgtttacaaacgctgctacgccaaaacgaaccatctcttcaagagaggcattttctgccagtttcagtgtcatcgcgccgaccatgctgtcaccagcgccaacgttttagaaaacgccgccatcatattggatgtctttgctgaacatacacatgatttttgtgagctggtgattgtctggcgcggtaatggcctgcatgtactcaacgatcgcccttatcgcattacccgtggcgatctcttttacattcatgctgacgataaacactcctacgcttccgttaacgatctggttttgcagaatattatttattgcccggagcgtctgaagctgaatcttgactggcagggggcgattccgggatttaacgccagcgcagggcaaccacactggcgcttaggtagcatggggatggcgcaggcgcggcaggttatcggtcagcttgagcatgaaagtagtcagcatgtgccgtttgctaacgaaatggctgagttgctgttcgggcagttggtgatgttgctgaatcgccatcgttacaccagtgattcgttgccgccaacatccagcgaaacgttgctggataagctgattacccggctggcggctagcctgaaaagtccctttgcgctggataaattttgtgatgaggcatcgtgcagtgagcgcgttttgcgtcagcaatttcgccagcagactggaatgaccatcaatcaatatctgcgacagttaagatgcgcactgaaaaacggttctctgttagacttcagagaaactctctacattatggcacttgcaatgaaagtaatctctcaagttgaagcgcagcgcaagattctggaagaagcagtttccactgcgctggagttggcctcaggcaaatcggacggtgcggaagttgccgtcagcaagaccaccggcattagcgtaagcacgcgttatggtgaagtggagaatgttgaattcaatagcgatggcgcgctggggatcactgtttatcaccagaaccgcaaaggtagcgcatcatccaccgatttaagcccgcaggccattgcccgtactgtacaggcggcgctggatattgccgttataccctcgcagaatcctgtggcggcgtggcagacaaagagctgctggcctttgacgcaccagatctcgacttggttcaccctgccgaagttttcccggatgaagccattgaactggctggaccgcgccagaacatgcccgcattgcaggcggaccaacgcattacccgtaccgggtgcttgtggcgtgcgtctcaatgctgacgatgatgtttctgaaatcttcaaaaacggtcgtgcgtctatttcgctgggttacatcggcatccacgaaaccattaacgcgctgttcggcggcgagcatgtttacgacaacgagcagcttcgcgcgaaaggtatcgccattgttgaacgtctgcgtcaggcagtggatcagtggaaagaagaaacgggttatggtttcagtctctacagcacgccgagtgaaaacctgtgcgatcgcttctgccgtctcgatactgctgagtttggcgtggtgccgggcgtgaccgataaaggttactacaccaacagtttccacctcgatgtggagaagaaggtgaacccgtacgacaagatcgactttgaagcgccttacccgccgctggcgaacggtggtttcatttgctacggcgagtatccaaacattcagcacaacctgaaggcgctggaagatgtctgggattacagctatcagcatgtaccgtattacggcaccaatacaccgattgatgagtgctacgagtgtggctttaccggtgagttcgagtgcaccagcaaaggcttcacttgcccgaaatgtggaaccatgacgccctccgtgtgtcggttagtcagcatcaactctccggcaattcgtcgtctgcaacaaaagacccaggtttttccactggagcgcaatgccgccgtgcgcacgcgtcttacccactcgatggaagtccagcaggtggggcgctacatcgccaaagaaattttaagccgtctgaaagagcttaaattactggaagcatacggcctggatgaactgaccggtccctttgaaagcattgttgagatgtcatgcctgatgcacgatatcggcaatccgccgtttggtcattttggcgaagcggcgataaatgactggtttcgccaacgtttgcacccggaagatgccgaaagccagcctctgactgacgatcgctgcagcgtggcggcactacgtttacgggacggggaagaaccgcttaacgagctgcggcgcaagattcgtcaggacttatgtcattttgaggggaatgcacaaggcattcgcctggtgcatacattgatgcggatgaatctcacctgggcacaggtgggaattgaacaatga

SEQ ID NO: 29628 - DNA, 987 bp, Homo sapiens
  SIMILAR (563)..(3): 1001254mologous to Escherichia coli No definition line found,accession number U00006,Smith-Waterman Score=954.
tgacggttcagcccctgcaccagggtaatgcggaagacaaacggggcttcttttttaactttgcactttttggtcactgtcccgaggattggcacccccgcactcatgccgcgaataaactcctcggtaatcggtttatcgaccgtcaccagatactctttctcatgatcattgccagcacgcaggatcttattcaccagatcgccgtgattggtgaggaaaatcagcccctgggagtctttatccaggcggccaatcgggaacacgcgtttgctgtggttaacgaaatcgacaatgttatcgcgctcgccatcttcggtggtgcttacaataccaacgggcttgttcagggcgataagtaccaaatcttcggcttcccgaggttcaatcaactgaccgtttactttcacaacgtcgccgggtttcacctgatcgccaatggtggctcgcttgccattaaggaacacattgccttgctcgatatagcgatccgcttcgcggcgtgagcaaattccgctttcgctgatgtatttatttaaacggactgatgagtcgggcagcataaattctcctgtaaaaaacggaatataccgtacctttgggttgataaaaaatagtcatgagcgaactatttgttatttccattggcttgaattcgttacctgctcaaatcactttccagaagcaatgtgcgacatcgtgagccatgtcagtaagtggttaaattcgcagtggtagcatgcctcccgtgatttcttactaaccggagaagtaatggaactgcttttattgagtaactcgacgctgccgggtaaagcctggctggaacatgcactgccgctaattgctgaacagttgcagggtcgccgctcagcggtgtttatccctttcgctggcgtaacgcagacctgggatgattacacagcgaaaacggctgcggttctcgctccgctgggtgtttctgtcaccggtattcatagcgttgtc

SEQ ID NO: 29629 - DNA, 1943 bp, Homo sapiens
  SIMILAR (627)..(1145): 1001254mologous to Escherichia coli RNA polymerase sigma-32 subunit,accession number M20668,Smith-Waterman Score=879.
  misc_feature (1)...(1943): n = a,t,c or g
atgactgggagccagcaggtggggtaccgagctcgaattcgtgcctttccccctcttgccagtgctcaggccacacctgtgaggtacgggtatattccgttttttacagaagaatttatgctgcccgactcatcagtccgtttaaataaatacatcagcgaaagcggaatttgctcacgccgcgaagcggatcgctatatcgagcaaggcaatgtgttccttaatggcaagcgagccaccattggcgatcaggtgaaacccggcgacgttgtgaaagtaancgtgaccaaaaagtgcaaagttaaaaaagaagcgccgtttgtcttccgcattaccctggtgcaggggctgaaccgtcagatccggcgcatgtgcgagcatttcggctatgaagtgaaaaagctggaacgcacggcgcttcatgaacgttagcttaagcggcattccgttgggggaatggcgccgatttaaccgacgatgagttaatcgacctctttaagctcattgaaaattcctcttccgaggtaaaacctaaagcgaaggccaaaccgaaaacagcgggcatcaaacgtccagtcgttaagatggaaaaaacggcggaaaaaggcggtcgcccggcgtccaacgagatccacgaatacgttctgcgtaactggcgtatcgtcaaagttgcgaccaccaaagcgcagcgcaaactgttcttcaacctgcgtaaaaccaagcagcgtctgggctggtttaaccaggatgaagtcgaaatggtggcccgtgaactgggcgtaaccagcaaagacgtacgtgagatggaatcacgtatggcggcacaggacatgacctttgacctgtcttccgacgacgattccgacagccagccgatggctccggtgctctatctgcaggataaatcatctaactttgccgacggcattgaagatgataactgggaagagcaggcggcaaaccgtctgaccgacgcgatgcagggtctggacgaacgcagccaggacatcatccgtgcgcgctggctggacgaagacaacaagtccacgttgcaggaactggctgaccgttacggcgtttccgctgagcgtgtacgccagctggaaaagaacgcgatgaaaaaattgcgtgctgccattgaagcagaggagcctcctgtacacagaactgctggccagactccatttcttcgccacctcacatccagcactggtgggacagctatgccaacaggcccagagctggttccagttgtgcgcacaccctgtgctggtgcccctcggaggattcctccagcccccgggaggacccctccgggcaactctcagcggctgtcacaaagtatatgttgcgtggtttccactgcgctggagttggcctcaggcaaatcggacggtgcggaagttgccgtcagcaagaccaccggcattagcgtaagcacgcgttatggtgaagtggagaatgttgaattcaatagcgatggcgcgctggggatcactgtttatcaccagaaccgcaaaggtagcgcatcatccaccgatttaagcccgcaggccattgcccgtactgtacaggcggcgctggatattgcccgttatacctcgccagatccctgtgccggcgtggcagacaaagagctgctggcctttgacgcaccagatctcgacttgttccaccctgcggaagtttccccggatgaagccattgaactggcggcccgcgcagaacaggcggcattgcaggcggacaaacgcatcaccaataccgaaggtggcagctttaacagccactacggtgtcaaagtttttggcaacagccacggcatgttgcagagcgccagcgacgggcgacgaacatcaacacgattgaatgtcgcggcggcggcattcagattcgccgagccactccagaagtcgctgcatgcctgcagtcttattccttaa

SEQ ID NO: 29630 - DNA, 1467 bp, Homo sapiens; identical to SEQ ID NO: 13816
  SIMILAR (871)..(1464): 1001254mologous to Escherichia coli phoB protein (aa 1- 229),accession number X04026,Smith-Waterman Score=1038.

SEQ ID NO: 29631 - DNA, 602 bp, Homo sapiens
  SIMILAR (3)..(602): 1001254mologous to Escherichia coli beta-ketoacyl-ACP synthase I,accession number AJ012162,Smith-Waterman Score=1032.
aactgggcaaacaggacatcgtgtttgctggcggcggcgaagagctgtgctgggaaatggcttgcgaattcgacgcaatgggtgcgctgtctactaaatacaacgacaccccggaaaaagcctcccgtacttacgacgctcaccgtgacggtttcgttatcgctggcggcggcggtatggtagtggttgaagagctggaacacgcgctggcgcgtggtgctcacatctatgctgaaatcgttggctacggcgcaacctctgatggtgcagacatggttgctccgtctggcgaaggcgcagtacgctgcatgaagatggcgatgcatggcgttgataccccaatcgattacctgaactcccacggtacttcgactccggttggcgacgtgaaagagctggcagctatccgtgaagtgttcggcgataagagcccggcgatttctgcaaccaaagccatgaccggtcactctctgggcgctgctggcgtacaggaagctatctactctctgctgatgctggaacacggctttatcgccccgagcatcaacattgaagagctggacgagcaggctgcgggtctgaacatcgtgaccgaaacgacc

SEQ ID NO: 29632 - DNA, 2700 bp, Homo sapiens
  SIMILAR (2607)..(1885): 921254mologous to Escherichia coli usg protein (aa 1- 337),accession number X02743,Smith-Waterman Score=1095.
ctatgaagttaccaagaaatagtctgaccacattttgtgctttttacttgctttatcttcaaatggcctatgtaccaagccagagacattaccggcactaacatttgataaggctttgttccggtcagattcacactgttcccaaccgataaattgcttccttcccaaacttttccaaatcctctttttctccactgccagatcggtgccgtcggcaatctcggcaaatgagagatcttttttagctttgctgagcaaaatggcatcggcaagatcaagacgaatattgcggttaatttgtgactgaatcatggtggattcgcgcgccggatcccccgactgcacccagtttttcgggtagcgtgtcgaggcattgataccttcgcgctgggcatcagcatcaagaatgcagccataggtacgcaggccacgagcctgggtattccccagcaccattgtcaggtccggcagataattctttttgacgtcgttttcgacgtactggccggagtacaccacgattgccacatcgccaaacatccccttgtatgaaacagccatacccaggtctttcacggcagtttccagctcagagttagaaccacgacgcgtatccagcttcttctcaacagccttgaaggaacggaacagcgcccagcctttcggatcgaacacaatgatgttgaccacaccgctggcgttgagcgcgtaggcttcaatgtcatcggtcgggtcatacgtttctttgtcgcgggttgaccatgcagccgcaccggcctggacaatgtagttaccagcgctgcggcccatatcgacttcaacaggctcgaacgcttccccggtcatggtgtatttaccgctgagcaccgacgaaacagcctgtttctcttcaccgtagcactcggcggtttcatcttcagtacgaaggatcgcgggaagcgacagaccggacgacgaacagggaactaaccgaagaggggacaccccgggtacacgggacggacataccgccgcccacgttagccgcgagcccatacgacacgacaacgagccaacccgaatggaagacccatcaagagtggccctgccccagctggtagaggcaggatttgaacccagacagtgtagttctagagccagcattcctaaccacctcaacagttgtctggagtctaagtctgctcttatgaaacaggactctccacaagccccacataagccttttgactcaaaatagttctgaaggcttaaaatacctttaaagagtgtaaattttctcaagctccttttaggtttggcaatgatccctttttggcttccgttgtctcccgtgacggtttcgttatcgctggcggcggcggtatggtagtggttgaagagctggaacacgcgctggcgcgtggtgctcacatctatgctgaaatcgttggctacggcgcaacctctgatggtgcagacatggttgctccgtctggcgaaggcgcagtacgctgcatgaagatggcgatgcatggcgttgataccccaatcgattacctgaactcccacggtacttcgactccggttggcgacgtgaaagagctggcagctatccgtgaagtgttcggcgataagagcccggcgatttctgcaaccaaagccatgaccggtcactctctgggcgctgctggcgtacaggaagctatctactctctgctgatgctggaacacggctttatcgccccgagcatcaacattgaagagctggacgagcaggctgcgggtctgaacatcgtgaccgaaacgaccgatcgcgaaactgaccaccgttatgtctaacagcttcggcttcggcggcaccaacgccacgctggtaatgcgcaagctgatgataatctctgcttccaccacatcaatactgcgatgaaccgacccataagtatctttatattgttttactctcttattctcttcagagagcacaatatcttcgccttgaacaaacgcatcacgcgcttcttctgctgccagtggacgcagagcttcaaagttgaccatctgggcatgaccgtagaataccggtgcctggacgacgctagccgaaatcatcagcccttcgtcctgcaggattttgcgtacttcgtcaacgatacgacgttcttcacgcacgctaccttcgctatccggcagtaacggcagcatgttgaacgccagctgacgcccgaagaaatcttcttcgtcaatcggaatgccgttgagcaatttcgcactctgccccgctaacgcatcgaccgcttttttgccctgggcggaggctgaaatcaggctggtaacgctgatacgtgataaaccgccctgatcgattaacggtttcagtgccgccagcagctggctggtcagactgtctggtacggcgatgacattccggttccggtaatctgtcagtacaaacgggtttacttccggcaccaccagcggtacgtcgggttcgagagcaaacaatccactgctgtcgatcaccaggcaacctgagttggtcgcttcttcaacccaggcagcggtagcttctttggctgcgacaaaaaatggccgctgcgcctgcgtccagtcgaattcagcggcattctgcccgtgattgtctgataaatcaatcgcaaacagcaagaaccagtgttcctggcatctggcaagggtgtgcaggaagatggtgtctgcaatcat

SEQ ID NO: 29633 - DNA, 2475 bp, Homo sapiens; identical to SEQ ID NO: 9232
  SIMILAR (2431)..(2327): 971254mologous to Escherichia coli Initiation factor IF2- alpha,accession number AJ002540,Smith-Waterman Score=174.

SEQ ID NO: 29634 - DNA, 2742 bp, Homo sapiens
  SIMILAR (882)..(355): 821254mologous to Escherichia coli CG Site No. 18295,accession number U00039,Smith-Waterman Score=705.
ctatttaatagggaggtatgttgtcttggacaaggtcaaagttaacaaatggctttgtaactccttggaatagagtcctacattacctgattgtaaagtggtggcgataatcgccagcattggcgtaatacctgatcctgctgcaattgccagatagcgcccctggcgttcggcctgcggctgatagccgaaatgccccctggcggatgtgttcgcggggcatagcgggagaaaacgtccgccttcaatggctttcaccgccacactaatttcgccaggcactggcagacgagcgattaactccgtcctggcgcagttcaaggcaggcgaatcaaacatatggttgagtgcgttacctacaccgttgacgcccaccatcaggatcacaaacggcgctttgccttcaacattcagcggctcatcgactttcgccagaatctcgcccatctcttctttcagcaggccatagagcgcctcggcgtcacgaagctgcttgcgggatgcgccttccgtcagattggtgataattttacgtgtggtttccacacccacatcggcgatcaaaagctgctcttccagctcctcaaacagatcatcgtcgatttttttaccgcggaacaggctgataaatccggaaccgagattttctttggtttttaacaggctgcgtttcaggcgcgcgaaaaaaccttctttggtcggtttttcctgctcctgagcgatttcttccaccggctgctcttcttctgccggaggaaccaccatcaccgcctcttctgccgccacggtgtggatactgactatccgctggatcacgagtttatcaccggtggcgaatatcgtcgtatctgcacgctgggtgagaaactgcgtggcttgccagagcttccagacagcgtggtcggaaacagaaactaattgctgacctttttgccagcttttcagcataaatggtccggaaccggcggtattttgcgcgaggaagccgcgagcatcatccgctgcatgttcctgtccgttttcagtgtccagcggcataaaacgaatggcaaaacggctcttatgtccggaaatttgcggataaagctgtgaatcgagcgacagattcaggcgcagcaagtcggcatcgccaccgttatcctgataaaaaccattcaggctggtttgtttacggaagggggccgactggcgaattaaatccagcaccatggtaagtgcctgggtgagcgggttcaggctggcaatccaggtttctacctggctgtcgcgctgcgcctggggtagatgcagccaaatgtgcaatgtaggtaaatcaaagcaatgacaataccgggcgatgtggagcaggcgatgaaaacgctgcaaacttttccgggtatcgggcgctggacggcgaattattttgctttgcgtggctggcaggcgaaagatgttttcctgccggatgattatctgattaaacagcgatttccgggaatgacaccggcgcaaatccgccgttatgccgagcgctggaagccctggcgttcttatgcgctgttgcatatctggtatacggaaggctggcaaccagacgaagcatgacgttggtcgccggatgcggtgcgagcgccttatccggccatcaagtagcaggtaatctgccatattcgctttcagacgagtgaaggtaccgagctgaaggtgctgggggccggtggtgaagccatcgcaagaaatgaagtcgcgcagccgggcgttcacgaaacgctggatgagctgacaacacgtctggcagaaggtctgctggaagcggcagaagaagccggaattccgctggtcgttaaccacgttggcggcatgttcggtattttctttaccgacgccgagtccgtgacgtgctatcaggatgtgatggcctgtgacgtggaacgctttaagcgtttcttccatatgatgctggacgaaggtgtttacagcatggaagatatcaataacaccatcgatgctgcacgtcgggtgtttgcgaagttgtgatccagcatggtttgtcggatgcggcgtgaacgccttatccgacctacgattcggggccgtttgtaggcccgataagacgcgccagcgtcgcatcgggcatccgttgtcgcgtaaacgagggccgttatatggaaaaattaacggctctgctttctcaacaaatagataaaatatggcgcgccgataaaggttgacagcagccccgccgggattgtcgatgacttgatccgtactatcgatcagctgtgccgtgaatacgacatcaacattgcctttaaccagcttgaagtgcatttttccgccgtcagtcagtcgctgcgtgtaattgtctgttgtcatgaagtcacggcttgtactaatatcgcagcgcgtcgcagcgacggtactggcagggatctgattttcctccagcagcacaatcaaatcgacagccagtttgacatcgtctaggggcattttgccagtgacatattctctccattgccggtgatggtgtggttgtgtgccgtggtggtgcttgttttgtgttcgtgtgtcctcatggtcgcggtattttcgtattctgctgagtttcggtttttccgcgttatcccgcttgtctctgtttcctgtcgtttgtgtcgcctcctccggctttccatttcctggtttcctgtcggatcccttggcgcccgtctgataatgttcttgtgatcccttgaggtactcacagctagttagaggcat

SEQ ID NO: 29635 - DNA, 3342 bp, Homo sapiens; identical to SEQ ID NO: 25857
  SIMILAR (3342)..(2647): 801254mologous to Escherichia coli O157:H7 evolved beta-D- galactosidase, alpha subunit; cryptic gene,accession number AE005537,Smith-Waterman Score=986.

SEQ ID NO: 29636 - DNA, 1328 bp, Homo sapiens
  SIMILAR (511)..(1038): 1001254mologous to Escherichia coli BasR,accession number D14055,Smith-Waterman Score=906.
  misc_feature (1)...(1328): n = a,t,c or g
gtgagcgaaatggttgatacaactcaaactaccaccgagaaaaaactcactcaaagtgatattcgtggcgtcttcctgcgttctaacctcttccagggttcatggaacttcgaacgtatgcaggcactgggtttctgcttctctatggtaccggcaattcgtcgcctctaccctgagaacaacgaagctcgtaaacaagctattcgccgtcacctggagttctttaacacccagccgttcgtggctgcgccgattctcggcgtaaccctggcgctggaagaacagcgtgctaatggcgcagagatcgacgacggtgctatcaacggtatcaaagtcggtttgatggggccactggctggtgtaggcgatccgatcttctggggaaccgtacgtccggtatttgcagctcttggtgccggtatcgcgatgagcggcagcctgttaagtccgctgctgttcttcatcctgtttaacctggtgcgtctggcaacccgttactacggcgtacgcctggtggtactggatttagggttacccgacgaagatggactgcattttctcgcccgtatccggcagaaaaaatataccctgccggtactgatcctcaccgctcgcgatacgctgaccgacaaaatcgccgggctggatgtcggtgccgacgactatctggtgaagccttttgcgctggaagagttacatgcccgtatccgcgccctgctacgacgccataataatcagggcgaaagtgagctgattgttggcaatctgacgctgaacatgggtcgccgtcaggtatggatgggcggtgaagagttgattctgacgcccaaagaatatgctctgctgtcacggttaatgctcaaagcaggcagtccggtgcatcgggaaattctctacaacgacatctataactgggacaatgaaccctcgaccaacaccctggaagtgcatatccacaatctgcgcgacaaagtgggcaaagcccgtatccgcaccgtgcgcggctttggctatatgctggtcgcgaatgaggaaaactaattgaatctgatgcattttctgcgccgaccaatatcgctgcgccaacgcgtgatattgaccatcggggccattttgttggtggttgaactgaacagcgtctttctgctatggcatgaagtaccgagcagattcagctgtttgagtcaggtgtanggccaatcgccaccacgaccgccccatcatgcgtgagatncgngaggcggccgcacagcttgatgttccccgggtttttatatggcagcctgacgctatttatctgctataggggggaacgaaataacccgccg

SEQ ID NO: 29637 - DNA, 4129 bp, Homo sapiens
  SIMILAR (2837)..(3730): 981254mologous to Escherichia coli beta-ketoacyl-ACP synthase I,accession number AJ012163,Smith-Waterman Score=1526.
ccccttcctctttgtctcgccagtggagtttttggacaggcccataacaggtcacaatgcgtttttggtgctttggtaatcccgggtcctgcgtttggtcggtgggtgaagcgccattcgcagataactttcggcctcccttgtttcaaaagacaggccggtacccggccagcctttttttgtctgcctcaaaccagtatttcataaccatatcgggtcggcaaaatccgggactccagttgccaatcgcaatgtcgtaatcacctttacccactctgtcgcgcatggtggcgttcgccagcttttccagcttcacaatgatgcccagcttgttgagactggattgtgtcgccagagcaataggctcccagttcggatcgttatcggagtagagaaacgtcaggctggtgggtttgctcgtcactttatcccattcggctttggctttcgtttcgtcatggttgtattgcattgccgtcgcatcgtagccccacatgccttccggaatcgggccgcgcatctgttttccgttaccactcagaatgccgttaaccatgccctgataatcggtagaccaggaaatggcccgacgcagatccgcctgattaagaggcgctttgctgttattcagatacagataggtaacgcgcagtgacggatactctgccacattgactttattttcctgcttcagggcgttgagttgatccaccggcagcgcatcggcaatgtcaatgtcgccacgggagagctgcaggcgacgggaggcactttcaccaataatttttaccgatacccgtttgaagttcggtttattgcctgggtaatgcggatttggcaccagaactaattgctgacctttttgccagcttttcagcataaatggtccggaaccggcggtattttgcgcgaggaagccgcgagcatcatccgctgcatgttccttatgaagacagaatttgttatgccttggaaagcagtcagcaatttcatccagtgtctctttcccggtgagtaattttgcctcggcaaaattaggaaacagataatcgacataactcaatgcttcgcaaatatcatccagcgtttcattcaaccgcggtttgatcatatcggcacagataatcatctgccgggctttagcttgcgtaaaaatttctgttagcgctttaccatccaatagtggactgttgaaaatactggccagtgataataatttcgcctgagaaaaccgcgcaaaatcaacatcgtcaatattcaatttccacagactgccattacggtttgtgacaaacgtccgctcgccatcctccgtcaccagtccaacgttaatagaggtatctatgctgacgtcctgcttcaggctttgaatatcaatattctctttgcggcaatggtcgagaataaattgccctgcggcatctttaccaatacgactcattaatgctgtgcgatggcccagacgagaaataattgttgcttcatttattgcatcacccccggtggtcattgcgattctttcaagaggataagaatccacatcaaagatatttttactgaccggttgcaatggaatatcaacaatagcggcacgtacttcacgttctaaatgcaggaaaggctgatcctggttttctttcactgcaaccattgcggcctgacagagctccgtatgaatgttgattttcgcgatacccaacgaacttgcagttttaatgtcggcatcactgatccccgatgcaccgtgcaaaaccagcggaacagaaacggcatcgcgtacgcgtttgacgacctcaaagttcaattgtggctctgacgtataaaccctatgctggttgccgatggcgacagccaatgaatcacagcccgtacgttcaacaaattcagccgcctggtcaggatcggtatagtgatagcccgccagcgcttcctcataaacggtttcattaccgacatgccctaattccgcctctgattcggggagcagcaatgaagaagcccagccgttgggggaacctggtttagaggggcaggaactcagagtggaacaggatgagggggcacgggatgggcctggagataccgctgagcccctgttgggtgtctgacccatggctgaccagagagatgtaggttctgaggcctccacgttcctgtccacccggtgggatgacagctcagtggtccctgcaggtcctccgtgggccagagctccgggcaggtaggcgaggaagtgaagactggacatggagcgtctcagtttttccctgtgaggtggagaggaaaagggcagcatgtgatccctcgctgcccacagctgttggacgggcagtttgcctgaactcgcctttcttgctccccaggtcctggggtcgtggcagtgggtgatagcaatcgccagcgcatcggcggcatccgcctgtggattagcgggcagtttcagcaaggtgcggaccatatgctgcacctggcttttttcggcactgccaatacctaccaccgtttgctttacctgacgtgccgcgtattcaaatactggcaactcctgattcaccgccgccacaatcgccacgccgcgcgcctggcccagtttcagggctgagtcagcgttctttgccataaagacttgttcaatggcgaaataatcaggctggaactgggtgatgatttccgtcacgcccgcatagatgagtttcagacgagacggtaaatcatccactttggtgcggatgcatccgctacccaggtaggacagttgcctacctacctggcggatgacgccgtagccggtcacgcgcgaacccggatcaatgccgagaataatagccatcacgcgtctccgttttgtttctctcaggagctgaaggattccggcatgcgtagccacgtctggggcaacgtaaaactggataccactggcctcattgaccgcaaagttgtgcgctttatgagcgacgcatccatttatgcattcctttctatggagcaggcaatcgctgatgcgggcctctctccggaagcttaccagaataacccgcgcgttggcctgattgcaggttccggcggcggctccccgcgtttccaggtgttcggcgctgacgcaatgcgcggcccgcgcggcctgaaagcggttggcccgtatgtggtcaccaaagcgatggcatccggcgtttctgcctgcctcgccaccccgtttaaaattcatggcgttaactactccatcagctccgcgtgtgcgacttccgcacactgtatcggtaacgcagtagagcagatccaactgggcaaacaggacatcgtgtttgctggcggcggcgaagagctgtgctgggaaatggcttgcgaattcgacgcaatgggtgcgctgtctactaaatacaacgacaccccggaaaaagcctcccgtacttacgacgctcaccgtgacggtttcgttatcgctggcggcggcggtatggtagtggttgaagagctggaacacgcgctggcgcgtggtgctcacatctatgctgaaatcgttggctacggcgcaacctctgatggtgcagacatggttgctccgtctggcgaaggcgcagtacgctgcatgaagatggcgatgcatggcgttgataccccaatcgattacctgaactcccacggtacttcgactccggttggcgacgtgaaagagctggcagctatccgtgaagtgttcggcgataagagcccggcgatttctgcaaccaagccatgccgcactctcggtccaggtagtagataccacatgttcccatgggggctgacggcgacccatgttcagcgtcagattgccaacaatcagctcactttcgccctgattattatggcgtcgtagcagggcgcggatacgggcatgtaactcttccagcgcaaaaggcttcaccagatagtcgtcggcaccgacatccagcccggcgattttgtcggtcagcgtatcgcgagcggtgaggatcagtaccggcagggtatattttttcagctctgcttctacaacgctctctttactctcactttcagagcacagtcccaactgctcttgcacggtttcgtctagcagcatgcgtcttatcctccagttccaggtattttcccattgcatcgagcccat

SEQ ID NO: 29638 - DNA, 957 bp, Homo sapiens; identical to SEQ ID NO: 24890
  SIMILAR (1)..(780): 1001254mologous to Escherichia coli K12 putative transient receptor potential locus,accession number AE000229,Smith-Waterman Score=1365.

SEQ ID NO: 29639 - DNA, 821 bp, Homo sapiens
  SIMILAR (183)..(779): 991254mologous to Escherichia coli Rhizopine catabolism protein MocA,accession number D90769,Smith-Waterman Score=1067.
gcgcaggccaggtggcggataaggttcatgcttcgtactactgcacccgcaacgatctggaactggtggctgtctgtgacagccgcctttcccaggcgcaggcgctggcagaaaaatacgggaatgcatccgtgtgggacgatccgcaggccatgctgctggcggtgaaacctgatgtgcggggctgccatgtgatgtgcgaaaaaccgcccgccatgacgccagaacaggcgcgggaaatgtgcgataccgcgcgcaaactgggcaaggtgctggcctacgactttcaccatcgttttgcgctcgatacgcaacagctgcgtgaacaggtgaccaacggcgttttgggagagatttacgttaccaccgcccgcgccctgcgtcgctgcggcgttcccggctggggtgtctttaccaataaagaactgcagggtggtggcccgctgatcgacatcggcattcatatgctggatgctgcgatgtatgtgctgggctttccggcggtgaaaagcgtgaatgcgcatagctttcaaaagatcggcacgcaaaagagctgtggtcaatttggtgagtgggatccggcaacttacagcgtcgaagattcgctgtttggcaccattgaatttcataacggcggcattctgtggctggaaacgtcatttgcactcaacatccgcgaacagtcgattatgaacgtcagcttttgtggtgataaagctggtgcgacgctgtttccagcacatatctacaccgataacaacggtgaagtaatgacgctatgcaacggaaatagcggtcaggctagtcatctaacacaatag

SEQ ID NO: 29640 - DNA, 776 bp, Homo sapiens
  SIMILAR (201)..(722): 1001254mologous to Escherichia coli K12 putative transient receptor potential locus,accession number AE000229,Smith-Waterman Score=901.
gtatcacgcagcccaacggtgcggttaaataccggtttttccgccgtagaatggcggctatcgaggcagaagtaaccttcacgctcaaactggaatgctttacccgcaaccgcatctttcagcgactgttcagcaaagccctgtttgaatcacagcgattccgggttaatcaccgacaagaaatcatccgcagcaactggaatcaggcgttctttccggaaaacattctggagaaatttcgttatatcaaagagatgggcttcgatggttttgagattgacggcaaactgctggttaacaacatcgaagaagtcaaagcggcgatcaaagaaaccggtttaccggtgaccaccgcctgcggtggctatgacggatggattggcgactttatcgaagagcgtcgtcttaatggcttaaagcagatcgagcgcattctcgaagcgctggcagaagtgggcggtaaaggcatcgtcgttccggctgcgtggggcatgtttaccttccgcttaccgccgatgacctcgccgcgtagcctggacggcgaccgcaaaatggtgagtgattccctgcgcgtactggaacaggtcgccgcgcgtaccggaaccgtggtgtatctcgaaccgttaaaccgctatcaggatcatatgatcaacaccctcgccgatgcccgccgttacatcgtcgaaaacgatcttaaacatgtacagattatcggcgatttcagtgcagacgggtgcgccgtcccaagcttgctatgccatgcgtggcgcatttag

SEQ ID NO: 29641 - DNA, 2076 bp, Homo sapiens
  SIMILAR (970)..(1554): 981254mologous to Escherichia coli Rhizopine catabolism protein MocA,accession number D90769,Smith-Waterman Score=1019.
atgctgctttcggacgggcgctatgtaatggcgtattgctcgactaatttacactggatcacccgccgcgcgccgtttggcgtggcaacgttgctggatcaggatgtggaaatcgacttcagctcgcagaccacaccgaatgatgtggtcacgcgcttttgggcatcccaaatcatgttggcaccgatacggcacttaacgctgaagctggggttacgagattccaccttcgccagaatgcgtccgttaccgatgcgattcaggcgaaccagcggccaatcgacccacatcgccgtcgcgccacaaacggcaacgggcatgatgaacagattaagcagcgggatcatcgtaaacaggctggttaaagcaccaaactgcatattggtgattttgcgtgtgcgcagggcgcagatcgagcgcattctcgaagcgctggcagaagtgggcggtaaaggcatcgtcgttccggctgcgtggggcatgtttaccttccgcttaccgccgatgacctcgccgcgtagcctggacggcgaccgcaaaatggtgagtgattccctgcgcgtactggaacaggtcgccgcgcgtaccggaaccgtggtgtatctcgaaccgttaaaccgctatcaggatcatatgatcaacaccctcgccgatgcccgccgttacatcgtcgaaaacgatcttaaacatgtacagattatcggcgatttctatcacatgaatatcgaagaagataacctggcgcaggcgctgcatgacaaccgcgacctgctcggtcatgtgcatattgcggataaccatcgctaccagccgggcagcggcaccctggatttccacgcgctgtttgaacagctgcgcgcggataactatcagggctatgtagtgtacgaagggcgtatccgggcggaagatcctgcccaggcgtaccgtgattcgttggcctggttgcgtacctgctaagaggtctttgtgaaaagtgcaatgacaagctctccgctgcgggtcgcgataataggcgcaggccaggtggcggataaggttcatgcttcgtactactgcacccgcaacgatctggaactggtggctgtctgtgacagccgcctttcccaggcgcaggcgctggcagaaaaatacgggaatgcatccgtgtgggacgatccgcaggccatgctgctggcggtgaaacctgatgtggttagcgtctgctcacctaaccgttttcattacgaacataccctgatggcactggaagcgggctgccatgtgatgtgcgaaaaaccgcccgccatgacgccagaacaggcgcgggaaatgtgcgataccgcgcgcaaactgggcaaggtgctggcctacgactttcaccatcgttttgcgctcgatacgcaacagctgcgtgaacaggtgaccaacggcgttttgggagagatttacgttaccaccgcccgcgccctgcgtcgctgcggcgttcccggctggggtgtctttaccaataaagaactgcagggtggtggcccgctgatcgacatcggcattcatatgctggatgctgcgatccttgcagccacaccaggggcctttcagcccctttacccactctacgcgcgcacaccactggacgcgccagcactacgacggcaggcttggcgccagctgaaccttggccggcagcaccacggtgaatggggtcaaaatggaaacagcatgagaggggccacagaagggattcaccaggaagaagaggaaagaccttgctggagaggtcatggcctgctgtggctcctgggctggcagagaagtcactggggtgctatgctggcagaacttgctagaaatctaccctctaagatgctaaggaaagctattcatgtggaggtctttcactggatgcattctgctgcaaaatcaaccgagagggatgccagtggaagctgctggaggctgggaggtgctgaccatcatgttcagcaggagccagttgctgaagaaggtgtggatactctaggagccatgcgtgtttgcagcagcctgcagaaagagtgtaccggaaccaggaaggaaaactgcttctttctgtaa

SEQ ID NO: 29642 - DNA, 1263 bp, Homo sapiens
  SIMILAR (475)..(849): 971254mologous to Escherichia coli K12 2-deoxy-D-gluconate 3- dehydrogenase,accession number AE000368,Smith-Waterman Score=633.
atgtacaagtggacgccaatcatgagcaccgtgatggaaatcggctacgacaacgtcgaatcccagcgcaccggcgacaagaacaatcagtgcagaattaccctcgcgcaacaatggcaggctggcgacagcatctggtcacgcccggctattcgtgtcttcgcaacctacgccaagtgggatgagaaatggggttacgactacaccggtaacgctgataacaacgcgaacttcggcaaagccgttcctgctgatttcaacggcggcagcttctgtcgtggcgacagcgacgagtggaccttcggcctacaacggctgtcaaatgtaggccggataaggcgtttacgccgcatccggcatgaccaacgatcacgttatcagtcatttcaggctggatggctccagcctcgcattagcaaagatgagattatttcgcctgtggtgcagttttgctggtggattgaacacaaagaaaaacacttcatcgcgcgaggcaatggcggcaatactatcaatatcgcgtccatgctctccttccagggcgggatccgagtgccttcttataccgcatcaaaaagcggcgtgatgggtgtgacgcgattgatggcgaacgaatgggctaaacacaacattaatgttaatgcgatagccccgggttacatggcgaccaacaatactcaacaactacgggcagatgaacaacgtagcgcggaaattctcgaccgcattccagctggtcgttggggactgccgagtgacctgatggggccgatagtgttccttgcctccagcgcttcagattatgtgaatggttataccattgccgtggatggcggttggctggcgcgttaattcattcttcttacttttatgaccctgccgcatggcagggttttttatacctgtagatcatcataatccatatcatggttatgaaataatccatattaattatcaattaatgaactttatgaattttatctgctgtaaaattaggtggttaataataatctcaataattcaacttaatttgaaaattggaatatccatcacataacgacatgtcgcagcaatttaatccatatttatgctgtttccgacctgacacctgcgtgagttgttcacgtattttttcactatgtcttactctctgctggcaggaaaaaatggttactatcaatacggaatctgctttaacgccacgttctttgcgggatacgcggcgtatggataatgtgggttcggtagctgctgcggtcgcaa

SEQ ID NO: 29643 - DNA, 967 bp, Homo sapiens
  SIMILAR (86)..(622): 991254mologous to Escherichia coli lamB,accession number A31943,Smith-Waterman Score=987.
atgcacagaacctgtcagcaggtgctgctagagtaccagcgcgactgtactcgcaaagacacctacgacgacagtgatggcactgagtgtcctgaagggctttaacaagtttgttgttcagtacgctactgactcgatgacctcgcagggtaaagggctgtcgcagggttctggcgttgcatttgataacgaaaaatttgcctacaatatcaacaacaacggtcacatgctgcgtatcctcgaccacggtgcgatctccatgggcgacaactgggacatgatgtacgtgggtatgtaccaggatatcaactgggataacgacaacggcaccaagtggtggaccgtcggtattcgcccgatgtacaagtggacgccaatcatgagcaccgtgatggaaatcggctacgacaacgtcgaatcccagcgcaccggcgacaagaacaatcagtacaaaattaccctcgcacaacaatggcaggctggcgacagcatctggtcacgcccggctattcgtgtcttcgcaacctacgccaagtgggatgagaaatggggttacgactacaccggtaacgctgataacaacgcgaacttcggcaaagccgttcctgctgatttcaaggggcggcagcttcggtcgtggcgacagcgacgagtggaccttcggtgcccagatggaaatctggtggcaaaaaaaatatgcctggcatgatacagtgcccctgatactttgtgttgctgctgctatcgcctgcgccctggcacctttcacgcccatcgtgactggcgcactctttctctatttctgtttcgtactcacgctcagtgttattgattttcgcactcagctcctgcccgacaaactcaccttaccgctgctctggcttggcttggtatttaatgcgcagtatggattaattgatttacatgatgcggtttacggcgcggtagcgggctatggggtgctgtg

SEQ ID NO: 29644 - DNA, 2001 bp, Homo sapiens
  SIMILAR (1175)..(1423): 1001254mologous to Escherichia coli cytoplasmic membrane protein,accession number M14031,Smith-Waterman Score=411.
atgccgatccgacacgaagtgtgttcaagcagcagtgcaggggagttatgcagaccagccgtggcacaaacatcaatgcaaatgtctgtcatctcacacaaacccatcatcatatatacaaaacatttcagccaggtgtgttggttggcgataggccatcatcagtcccaagcctcactcgcagcaggcctgcagagtcgggccagcatcccatatgcagcccaaggcagatttcaggggatgtatggaaatgcctgtatgtccaagcagaagtttgctgcaggggtggggtcctcatggagaaactctgctaggacagtgtggacgggaaatgtgcggttggagttcccacacaaagtccccactggggcaatgcctagtggagctgtgagaagagggctactgtcctccagactccagaatggtagatccactgaaagcttgcatcatgcacctggaaaagccacagacactcaacgccagcctgtgaaagcagccaggagaggggctttaccctgcaaagtcacagagctgcaagctcagccgaacacaaacccagttgacacaattagtgttttggagagttgtgaacaaactctagatgttgctgttgttgttccgcctttaagtgaccaagtgtctgaggaagaggggaaaaacgacaagccgaagaacgagctagagccagcgcaagagagaagcgggaagccaacagcgctgacgagcagcgagcgacggcacagcgacagacagcgcaggacacacccaacagaggagcgaagaccgggcgagaacacggacagacgcagcacgagcgaagccggcgaagcgcgcaccgccggaaggaggcaccgacgcgcacacgacacggcaggcagcgagaccaagacagacgagcagaggagacgagcagagaaacaaaagacaagaaatagagagaagaagatgacgcatgatcagaacataaaacatgaaactaaccaacaagaaagcagagagaggtcaaacaagacagcagaaagagacgaagagtcacagactcagggtggtccagaagattcggcattgccactggagtttatcccaagagacgcccagcgatccgaacaccgtcatcgcaccaacagcaataatgatgtagttaaggatggtagtaatggcatacgacgcgccctggcgcaatgtgctggtggcagcgaccggctggatggttggcgtcagtgtggcgctggcgggtgctatcggctttattggtctggtgatcccccatattctccggttgtgtggtttaaccgatcatcgcgtattacttcccggctgcgcgctggcaggggcgagcgcattgctgctggccgatattgtagcgcgcctggcattagctgccgcagagctgcctattggcgtggtcaccgcaacgttaggacaaaacgacacacgacacacaacaacacgaagaacagacgcagcgacacagaaaagagacagcagaaagaagatcgaacgaacagaagaagacgaacaagacacaagaaggagaaagaagcacagacgaacaaaacgaacaagcagaaggacacacgagagaacgaagagcacaaaagagcagcacacaccacaccttggttgggtcgacagcgggttgtggtgtgggagcccgccagcattcgccaacgggcattgtgggaactactgcaaggaaacacatgggaaaataaaggaatcatttccagggattctactagatcggcattcctgaaaccgggcctaaccacaaggtgcttattacgggtcgaaaatccagtacccgtggaggcaagcagtttttttaaaagcgggtccaagagggagagtgatagactgtccgggaacgcccgtgggctccaaagtctgattaacgtgatgccacacgctcccccgccagttgtggaaaaagattgtgagcaagggttgttgaataccgggatgtggacccccaggatagaaagagacaactatatttga

SEQ ID NO: 29645 - DNA, 513 bp, Homo sapiens
  SIMILAR (511)..(242): 1001254mologous to Escherichia coli K12 putative vimentin,accession number AE000483,Smith-Waterman Score=454.
agcatcgacgccagtttttccaccaatgtcagacgcaggttaagcggcgcatttaacatcccgccgttcgtccatgtctgaagctgcacacgcgaaaaaagttcctgcatcagtcgttcacgaaactgctgctgatgggcttgtggaaggcgggcatcatcaccctgcgccagatccactaaaaagcggggataaaccgactccagcacgcgaccggggccgtcaagtaacgtcttggtcaatatcgttctgccgtgaaaagtgtttgaatatcatcgcgtaacagctgggcgtcggtgtaaatccagccgtgagtcatcacagtctgctgcaattgctgttgcatcagcctgaccaccgattcattttgttgacgcagagccagactttcgcgtaaacgcgtctgtaattccgtcaaacatgaagcgaactcagcgaaaaaagtattcatgcctgccgtaacagattcatcgacctgctctgccagaactttagccatttgttggcaataga

SEQ ID NO: 29646 - DNA, 1812 bp, Homo sapiens
  SIMILAR (1761)..(1790): 1001254mologous to Escherichia coli UDP-MurNAC-pentapeptide presynthetase (AA -20 to 432),accession number X15432,Smith- Waterman Score=54.
atggccggtctggatgttactcataaagcacaaatccacgttgaagacaccgagcgtttccgcgcgattggtaaccctgtttcaaccattgttgccgaactgctggatttcttcctcgaatatcataaagacgaaaaatggggctttgtcggcgcaccactgcatgacccatgcaccatcgcctggctgttgaaaccggagttatttacctctgttgagcgctgggttggcgtggaaacacaggggaaatatacccagggtatgacggttgttgattattattatctgacaggcaataaaccgaatgccaccgtaatggtcgatgttgatcgtcagaatctcaaagaagagatttccgagttcgcggtgaaccttgatgcattgcacagccaggaagtcaaaagcagcttaatgatgtcggacaaacggtgtactcggcaaacagggccagaagctcactggaaatcaacgttcacccacgacgacttcgcagcgttcgtgataccaccgtccacagttgaaatgctcggcttatcacaccgccatgttggcagtttacatgctgccgatgagcggatggcactggaaaatgcccgtgatgcttacacccgtcgtagcgaaggatgttcaatttgggtggtgaaggcgagtgaaattgttgcctcgcaaccggaagaacgcggtcaggcacgcaacttcttatcgtatgccgctgaattagcgggagaaggcgatgaagataccctggccttcacccgagacgagcgccagttcagcaacttattgttggttgaacaaccaaacggcaattttgccgacaccattgcacgccagtatttcatcgatgcatggcatgtggcgctctttacccgtctgatggaaagcccaattaaagaagcgcgctatcacctgcgttttagtcgtggctggctggagcgactgggcaatggtactgacgtatcagggcaaaagatgcagcaggccatcaacaagttgtggcgttttaccgccgaactgttcgatgccgacgagattgatattgcactgagtgaagaggccgaagtttttgccgggatcaacgaagccacattgaacgtaccgcaagagcaggcgtatcgcactggcggtaaaaaaggactgcataccgaacaccttgggcccatgctggcagaaatgcagtatctccagcgtgtcttgcccgttattgaacttggcgcgaccatcatggcgaaaatagcctggactgtgagtctgactcgcccgggaaatgcgctggtcaacaaccctggcagcgcgcatctggaaggtttttgctcgcttgcgggtgtcgcgaaagcgaaaggtgaaatctttagcggctgccggaaaacgcgtcgatgttctgctgccgttgccggggcgtcacaatattgcgaatgcgctggcatgactgcgctctccatgtccgtgggcgcaacgcttgatgctatcaaagcggggctggcaaatctgaaagctgttccaggccgtctgttccccatccaactggcagaaaaccagttgctgctcgacgactcctacaacgccaatgtcggttcaatgactgcagcagtccaggtactggctgaaatgccagggtaccgcgtgctggtggtgggcgatatggcggaactgggcgctgaaagcgaagcctgccatgtacaggtgggcgaggcggcaaaagctgctggtattgaccgcgtgttaagcgtgggtaaacaaagccatgctatcagcaccccagcggcgttggcgaacattttgctgataaaatgcgttaattacgcgtcttaa

SEQ ID NO: 29647 - DNA, 1521 bp, Homo sapiens
  SIMILAR (1521)..(565): 1001254mologous to Escherichia coli penicillin-binding protein 3,accession number K00137,Smith-Waterman Score=1628.
tcagacatccgcaaactgcgaattatcgcaggtccagcaagtccgtaatgcgtctgattccaagatatctcggagaaaccacttaaggggttcggcattgaaggctaaaactggtttctcaaagtgtcgccggtgaaattccgattcctcgtgtccactggctgcctcttcatcacgagttacttcctgatcggtaaaccagttgctggcattctcgaagggctgactcactggctgcagaccatggggactgcgaatgcggttctgctgggggcgatcctcggtggcatgatgtgtactgacatgggcggtccggtaaacaaagcagcgtacgcattcggtgtgggtctgctgagtactcaaacctatggcccgatggcggcgattatggcggcaggtatggtgccaccgctggcaatgggtctggcaacaatggtggcgcgtcgcaaattcgacaaagcgcagcaggaaggtggcaaagccgctctggtattgggactgtgcttcatttcggaaggtgcaattccgtttgctgctcgtgatccgatgcgtgtgctgccgtggttgcaacgcggtcatcaccaccatcggtttaaccgttgagccaggttcaaacacgtcggtgatggtacggttacgcatcgcctctttcggcgtgccgctcagattgttagggttgtatgacgggctgttagccatcgccagcacttcaccggtgttgacatccaccagcacggcgctaccagattcagccttgttaaaggccaccgcattgttcagttcgcgataaaccagcgcctgcaggcgttcatcaatactcagcgccaggttgtgcgcagcctggctgtcagtagaagaaatatcttcaattacgcgaccatagcggtctttacgcacaatgcgctcacccggctgcccggtaagccatttatcgaaactcttctcaacgccctcaatcccttgactatcgacgttagtaaagccaatgaggtgagcagtcacttcgccggatggataataacggcgagattcttcacgcagatgaatccccggcagtttcagttttttgatgtagtccgccatgtcagggttcacctgacgcgccagataaataaagcgccctttcgggttggcgttaatgcgggctgaaagctgatccagcggaatattgagcgcgttagccagcgccttccagcggtcaccgacgctgataccgccagcgtcatgcacttctttcgggtcagcccaaatcgcttttaccggcacgctcaccgctaacgggcgaccagaacggtcagtaatcatgccgcgggaggtggaaacttgctgaacgcgaagagaacgcatgtcgccctctttcaccagcatatccggggagataacttgtaaccacgctacgcgtccgagcagaaaagccagcgccaggagaatacagccgcataacaacgcaaaacgccaactgataaagttggcatgttcttcctgacgttttggtttctgcgttttcgccgctgctttcat

SEQ ID NO: 29648 - DNA, 969 bp, Homo sapiens
  SIMILAR (573)..(19): 1001254mologous to Escherichia coli No definition line found,accession number U00039,Smith-Waterman Score=947.
tcagcaacgcgacgtgctctcgttatccgggttaagacgacgacgactaataattcgcagcagacgccacagtacccatgccagcaatatcacactgatagccgccagcaccgccagcagaatcggatggtttgccagcgcataccacacgcgctcgaaccacggcagatgacctacgtaataaacgtcgccaacacgtaggctgttgataccggactcgcggatcaccgcgaccgaaccgaacatggtggcgcgtttgccgctatcgttcaccgcatcgttaagcatttcataaccgcgtgggctatctgccaacagcgcaatcacgctgcgctggtcgttatacggcgactggaagccaatcaccgccgccatcgcaccggaagaggtcagcgttgaccgggtttctgccgcgcgatcgctctcgtccggcacaatgccggggaacggggtctggcgcatcggtgttttcacccagctttcggtcgcctgcaccaataggtcgatctgcttatcgtctttcagtttgtccgggataccaccgatgatcatgatgtcggcatctttgccctggcggctaacgaccgtgcagctttcgataatattctcgacccaaccggtagcgtcgatgttctgctgccgttgccggggcgtcacaatattgcgaatgcgctggcagccgctgcgctctccatgtccgtgggcgcaacgcttgatgctatcaaagcggggctggcaaatctgaaagctgttccaggccgtctgttccccatccaactggcagaaaaccagttgctgctcgacgactccttcttggttaatgccgcacaacaaaacattcttagcgtgcacattttgaaccagcaaacaggaaaacccgctgctgacgtgacagtcactctccaagagggtgacggctagacatgattgggggaacagcggcaggaactcagggttaaaggggcgcat

SEQ ID NO: 29649 - DNA, 2412 bp, Homo sapiens; identical to SEQ ID NO: 15734
  SIMILAR (1026)..(1091): 721254mologous to Escherichia coli O157:H7 putative L-serine deaminase,accession number AE005540,Smith-Waterman Score=80.

SEQ ID NO: 29650 - DNA, 3198 bp, Homo sapiens
  SIMILAR (1318)..(1854): 981254mologous to Escherichia coli ORF_f325,accession number U28377,Smith-Waterman Score=936.
atggcatggcgtcggttgtcccggcggcgtgtcgctggcaatgaccggacatggcctgcaccacagcgacattggcggtacaccaccctgtttgagatgaagcgcagcaaagagctgcctgtgcgctggtgcgatttcagcgccttcacgccgatgatgcgcacccacgaaggtaaccgtcctggcgacaactggcagtttgacggcgacgcagaaaccatcgcccatttcgcccgtatgaccaccgtcttcaccaccctgaaaccttacctgaaagaggccgtcgcgctgaatgcgaagtccggcctgccgcaacttgtggatatcagagaggagatgccagagcagacagccaaacgaatgttgagccttcttggtattcttaagtacaaaccttcaggaaatgccacagatatgggtaaagaacaccggactttgccagctaatttcgcgtttaatgaattcgtagcgcggcacctgcgacaccgccgcacggttaaccagctccagccgggagaaaatcacctgggtggtggtgtcgcggtcgcgtcttcttttggcaccagcatcatcgccacgccaatcgccgttacgccgccgatcaacttgccgacaatcatcgggaagatcatggcgttcatgttggcagcggcgaagcctaagtggtcgcccagggcgaaagcagcggaaacggcgaaggcgcagttgatgactttgccgcggaactcggtgatcttgtttgcaagcaggctctcatcccacgctcctgcagggctccaaggtcacattaactttactattagtacaaagattctggacagcaatgaaccatgtgggggccagaaggggtttgttccccaaaagggccgaagtgacacgctcatcaagccagttctcgtcaaagacccaatggtgagtcagggtctacggtgtctcaagaattcggccacctccacgaccaacctctacacacaggccctgttggcttacattttctccctggctggggaaatggacatcagaaacattctccttaaacagttagatcaacaggctatcatctcaggattcattttagtaacagttattaagtcatcaaatgctgatgacacatcaatctacatgttttatcaaaaggtcggcgacaactcaatcgacagctggaaaaacgcgggccgtgtctttaaagacagcgataagttcgacgccaacgatccgatcctgaaagatcagacgcaagaatggtccggttgtgatccccagctcggatgcgatttcgtcgtatctgaagcgagggctttcgcgtcggatcatcgccaagccgaatggagcagcaaagacgactttatgcgtctgggtaaaccgattctgtttttcggtgttactgctggcaacatggattcgatgatcaaccgttataccgccgatcgccgtttacgtcatgacgatgcctacacgccggataacgtcgcgggtaagcgcccggatcgcgccacactggtttatacccagcgttgtaaagaggcgtggaaagatgtaccggtgatcctcggcggtattgaggctagtctgcgccgtaccgcgcattatgattactggtccgataccgtgcgccgttccgtgctggtggattcgaaagccgacatgctgatgtttggtaacggtgagcgtccgctggtggaagtggcgcatcgtctggcgatgggcgagccaattagtgaaatccgcgatgtgcgtaataccgcgattatcgtgaaagaggcgctgcctggctggagcggcgtggattccacccgtcttgatacccctggaaaaatcgacccaatcccgcatccgtatggtgaagatttgcctcctgtgcgttcagacgaacaggctgaagcactgccggaagcgtatgaaccgattgaggttaacgaattcggtgaaatcgatctgcttgcaatggttgaagatgaaatcatcctcgccttgccggtagttccggtgcatgattctgaacactgtgaagtgtccgaagcggacatggtctttggtgaactgcctgaagaagcgcaaaagccaaacccatttgccgtattagccagcttaaagcgagtaaggtccatggccgtacaacagaataaaccaacccgttccaaacgtggcatgcgtcgttcccatgacgcgctgaccgcagtcaccagcctgtctgtagacaaaacttctggtgaaaaacacctgcgtcaccacatcactgccgacggttactaccgcggccgcaaggtggtgtgggatgatgtgctcatgagtgaacaagggaagcagctagcttccaggtgtctaatatcctgggatggatgtgtgtggcatgacctgctgatgaaagatgcggctcttctgcgtctggaggccaatgcaaatgtaggttcatccagcactggggagtactatgggatgttccaattctggtatggtcactacccctatcaagtggctgagtatgatcagtgtccagtgtctggccaatggaactttcctcagcccttcattgaccaaatgccccaagggcattcgagccagcgttccattatctggaggccctcgttctctgaaggcacggaccttttcagctttttccggccagccatccagccagccatccagccagccaaccaactatccatccacaatttgtggacacaattccggcattcaaccaaaattccagttgaatgggtgaatggtgaatggctgaatggacgaatgccaggggatcatcatgaatggcaatgcaactatcaggacccaatggtgagtcagggtctacggtgtctcaagaattcggccacctccacgaccaacctctacacacaggccctgttggcttacattttctccctggctggggaaatggacatcagaaacattctccttaaacagttagatcaacaggctatcatctcagatttaccacacatgaaagctgccaaagcttatggctggcatcctctgaagcagcagccccagttgcagctggacccctttgagccacagctggagctggagcagctgggatgcaggaaacagtgtttggaggctgtgcagcagcttccaggagcagaagtggagctgcagctgcaggcagctcccggatccctgaggcgctccgggcggtggatgagagtgtcttactgcttaggccagacaaagagctga

SEQ ID NO: 29651 - DNA, 1310 bp, Homo sapiens
  SIMILAR (1266)..(556): 1001254mologous to Escherichia coli Phospho-N-Acetylmuramoyl- Pentapeptide-Transferas e,accession number D10483,Smith-Waterman Score=1220.
ttactggcaggtacggcgctggttggcggcgtacagcctgctgacgccatcaccgttgacgcgatgatcccgaacttcaactgggcgttcctcggcgttaccacctggatctttatggccgcaggtggcgcggagtccgtcgctgtgtacgttaacgacgtcaaaggcggttcgaaatcgttcgtttaagtgatcatcctcgccggggattttatccgggtatgtatcccgctcctcgggctctcccatctcatctctcatctccccggcctcactctgcgctggccacatgcgtttcttctgttcctcaagcaaaccaacttgttccaaccccagaacctttgcagcagctctttcctctgcctggagctctccttctccaaatgaaggtttcagctccaatcctgctttcttagggacatctctgatgatgttccacttagagttgcgaaggtgcatcgccccaattgttaccacagatcttctcccattgacatctggagacgttggccttgtgttactctgtgttggcttagatggaagtttatggagcgactgcaggatgacagaaagcgtttctaccacgaacacgccccccataatcaccagcaggaattcctgacgtagcagtacggcgataatgcctaacgcaccacctaacgccagcgaacctacatcgcccataaagacctgcgccggataggtgttaaaccacaggaagcccagtcctgccccgactatcgcggtacagacaataaccagttccccggcgtgtcgcagatacggtatatgcaagtagctggcaaagttcatattgccggtcgcccacgccaccagcgcaaaaccaccggcgacaaatacggtcggcataattgccaggccgtcgagaccatcggtcaggtttaccgcgttgccagtacccacaatgacgaagtaagccagcagaatgtagaacagccccagctgcggcatcacatctttaaagaatgggaccaccagctgcgttgcgggcgtgtctttgccggcaaggtacagggcgaaggcgacacccagcgcaatgaccgacatccagaaatacttccaacgagcgatcaaccctttggtgtctttacgcaccactttgcgataatcatcaacaaagccaataacaccgtaacctaccagcaccaccaacacgcaccagacgtacggattggacgggtaagcccacagcagtacggagatcacaatcgccgtcaggatcataatcccgcccatggtcggcgtacgcgcttgctgaagtgtgattcaggaccgtcgttacgcaccac

SEQ ID NO: 29652 - DNA, 1171 bp, Homo sapiens
  SIMILAR (235)..(357): 1001254mologous to Escherichia coli Sensor protein copS (EC 2.7.3.-),accession number D90699,Smith-Waterman Score=200.
gacagccataaagagcttgaacaaaaactggcggccttcctggggatggaagatgcgattctctactcttcctgctttgatgctaacggtggcctgtttgaaacgcttctgggtgcggaagacgccattatctccgacgcactgaaccacgcgtctattattgatggtgtgcgtctgtgcaaagctaaacgctatcgctatgccaacaaagatatgcaggagctggaacaccatctgatcgtctttatcgtactgttggcggtacataaaggtcacgcgccgatccgcagcgtcagccgtcaaatccagaatattacctcgaaagatctcgacgttcgcctcgacccgcagaccgtgtttcattgagctggaacagctggtactgtcgttgaaccatatgatcgagcgtattgaggatgtctttacccgccagtccaatttctcagcggatatcgctcacgaaattcgcacaccaattacgaatctcataacgcaaaccgaaatcgccctcagccagtcgcgcagccagaaggagctggaagatgtgctctactctaatctcgaagagctgacgcgaatggcgaaaatggtcagcgatatgctgtttctcgctcaggccgataacaaccagctaatccccgaaaagaaaatgctcaacctggcggatgaagtcggcaaagtgttcgattttttcgaggcgttagcggaagatcgcggcgtggagttgcggtttgttggcgacaagtgtcaggtcgcgggcgatccgctgatgctgcgtcgggcgctaagcaacctgctttcgaacgccctgcgttatacgccaaccggagagacaattgtagtgcgctgtaagacgggcgatcacctggtgcaagttatcgtcgaaaaccccggtacgcccattgcgcccgagcacttaccgcggatgtttggcccggttttattttggtgaccccttccggtcagcgaatggggggaggggagcggccatttgttctggggaaccggccaaaaggtcatcgatagcctctctactaaggcccccgttgctggtcaccctccgctttgtcccgcgggacccgggtacgattttcaccttgacggcgggtacgcccttcaagccccacttcgttttggactgaacatatggaggacgtcgtcctcgccgccc

SEQ ID NO: 29653 - DNA, 2651 bp, Homo sapiens
  SIMILAR (171)..(1001): 801254mologous to Escherichia coli penicillin-binding protein 3,accession number K00137,Smith-Waterman Score=1087.
ggtgtacatcttcacctgacccaccctctggccttcctccaggttttgctaagctaacctcccttatcgtgacacttgttgaggtgggagtttcccctgaacctgatgaaggctggctgtatctggcagtggtcattgacctgtggtcacgtgccgttattggctggtcaatgtcgccacgcatgacggcgcaactggcctgcgatgccctgcagatggcgctgtggcggcgtaagaagccccggaacgttatcgttcacacggaccgtggaggccagttcggtgaccgctggaagggctggctaacgcgctcaatattccgctggatcagctttcagcccgcattagcgccaacccgaaaggcggctttatgttatctggcgcgtgaggtgaaccctgacatggcggactacatcaaaaaactgaaactgccggggattcatgtgcgtgaagaatctcgccgttattatccatccggcgaagtgactgctcacctcattggctttactaacgtcgatagtcaagggattgagggcgttgagaagagtttcgataaatggcttaccgggcagccgggtgagcgcattgtgcgtaaagaccgctatggtcgcgtaattgaagatatttcttctactgacagccaggctgcgcacaacctggcgctgagtattgatgaacgcctgcaggcgctggtttatcgcgaactgaacaatgcggtggcctttaacaaggctgaatctggtagcgccgtgctggtggatgtcaacaccggtgaagtgctggcgatggctaacagcccgtcatacaaccctaacaatctgagcggcacgccgaaagaggcgatgcgtaaccgtaccatcaccgacgtgtttgaacctggctcaacggttaaaccgatggtggtgatgaccgcgttgcaacgtggcgtggtgcgggaaaactcggtactcaataccattccttatcgaattaacggccacgaaatcaaagacgtggcacgcatcacgaccgaggaagactttaatcatgcgagtgcagctcgattcgtatgcgctgccgccgaaagacgttgcaaaaccaccattaacctggtgccggaaaacgaagtgctgaacgtgctggaaggcgaagatgctgaaaccaacgcgctgcgcgcaaaacgtcgttgcccgaaatgcggcacggcgatggacagctatctcatcgatccgaaacgtaagttgcatgtctgtggtaataacccaacctgcgacggttacgagatcgaagagggcgaattccgcattaaaggttatgacggcccgatcgttgagtgtgaaaaatgtggctctgaaatgcacctgaaaatggggcgtttcggtaaatacatggcctgcaccaacgaagagtgtaaaaacacacgtaagattttacgtaacggcgaagtggcaccaccgaaagaagatccggtgccattacctgagctgccgtgcgaaaaatcagatgcttatttcgtgctgcgtgacggtgctgccgttgccgcaaggttcaacgatgatcgccaccgacgtggcctcgccgttctttacgccgatcaagctgacctttatggtgtcgctgattctgtcagcgccggtgattctctatcagcgctgtataagcatgaacgtcgcctggtggtgccgctgctggtttccagctctctgctgtttttatatcggcatggcattcgcctaccttgtggtccttccggcggaatttgggctccttggcaaatacggcgcggaagacaggctgtgaattgcctggcaccgatgatcaccctggaaaaaatcgtgcgtggaaaacgtactgcagtcagtgagccattgttccccaactacctgtttgtggaatttgacccagaagtgattcataccacgactatcaacgcgacccgcggtgtcagccacttcgtgcgctttggcgtcgcagcgatagtcccatcggcggttattcatcagctatcggtatataaaccgaaagacattgtcgatccggcaaccccttatccgggtgataaggtgattattaccgaaggcgcgttcgaaggctttcaggccattttcaccgaacccgatggtcacaccggcattctgattgccaacggcgcagatatgaaacgctggctggcgaagctgaccaacaataatgctcagggcgaatactacatcaccgacattattgcgctggcgtatcaggaagggcgtgaaatcgtcgccgttcatccgcaacgtttaagcgaagtagaaggcgtgaataaccgcctgcaactctcccgtctggagcgtgtttatcagtccgaacaggctgaaaaactgctgttagcaggcgttatgctgcgcgatccagcgcgttttgatctgcgtggtacgctaactcacgggcgcgatgttgaaattgatactaacgttatcatcgagggcaacgtgactctcggtcatcgcgtgaaaattggcaccggttgcgtgattaaaaacagcgtgattggcgatgattgcgaaatcagtccgtataccgttgtggaagatgcgaatctggcagcggcctgtaccattggcccgtttgcccgtttgcgtcctggtgctgagttgctggaaggtgctcacgtcgtctctagtcccacccgatga

SEQ ID NO: 29654 - DNA, 2814 bp, Homo sapiens
  SIMILAR (1383)..(1766): 1001254mologous to Escherichia coli UDP-MurNAC-pentapeptide presynthetase (AA -20 to 432),accession number X15432,Smith- Waterman Score=636.
atgcggtcgcgttttttacgtgtcgcgttttaccactattcagtcacttcccttcccgcactccccgcgcttcggtactaccgccttgggtctggggtcaatgtaagccataataccggctttctccgcagtcccaaacgttgcggccaggccctcacatgcccggtaacattattcggccaaagttctcagctggttcaccggcgagcagaaacagcgcgcgttcaggcgctgacccgcgttggcatggtgcattttgcccatcagcgcgtttcaccctctccggcggccagcagcaacgtgtggcgattgcccgtgcgctgtgcagcaggcgaaaaatcagcgcgcatcgtgatggacaccctgcgcgacatcaaccagacgacggcatcaccgtggtcgtcacgctgcatcaggtggattacgccctggctactgcgaacgcatcgtcgccctgcgccaggggcacgtcttctacgaggcagcagccaacagtttgataacgaacgttttgaccatctctaccgcacattaaccgcatatggagaagaagctgagcgtgagtcacgccttcttgtccccggactacgcgggtaccgagctgagttaggcatgaatacttttttcgctgagttcgcttcatgtttgacggaattcagacgcgtttacgcgaaagtctggctctgcgtcaaccaaatgaatcggggtcaggctgatgcagcagcaattgcagcagactgtgatgactcacggcggatttacaccgacgcccagctgttacgcgatgatattcaaacacttttacggcagaacgatattgaccaagaccggttcggtcggttaaacatagatcccccattagaattcgatgtaattttcagtgtagaccataattttcttaactgaggttcatcgcggctttatggacttttctgaaagcgttgtgaatgcgcaatcagatcacggtacataccgtatggccatgcaattaagatgttcaccggaatcgctaccaatctggaataaaaagactgttcgaagctcattccggagaggaaaacttcaatacacatgttcacgacagaacagtaaacaaccatcgcgaaccacggcgctaccagattcaccttgttaaaggccaccgcattgttcagttcgcgataaaccagcgcctgaggcgttcatcaatactcagcgccaggttgtgcgcagcctggctgtcagagaagaaatatcttcaattacgcgaccatagcggtctttacgcacaatggctcacccggctgcccgccatttatcgaaactcttctcaacgcctcaatcccttgactatcgacgttagtaaagccaatgaggtgagcagtcagcgaaatcgaaagcgattcaccgccaccaatatccatgtgacctcgcacggtacggaatttaccctacaaaccccaaccggtagcgtcgatgttctgctgccgttgccggggcgtcacaatattgcgaatgcgctggcagccgctgcgctctccatgtccgtgggcgcaacgcttgatgctatcaaagcggggctggcaaatctgaaagctgttccaggccgtctgttccccatccaactggcagaaaaccagttgctgctcgacgactcctacaacgccaatgtcggttcaatgactgcagcagtccaggtactggctgaaatgccgggctaccgcgtgctggtggtgggcgatatggcggaactgggcgctgaaagcgaagcctgccatgtacaggtggtgcgtaacgacggtcctgaatacacttcagcaagcgcggtacgccgaccatgggcgggattatgatcctgcggcgattgtgatctccgtactgctgtgggcttacccgtccatccgtactctggtgcgtgttggtggtgctgggtggcgccccgtggccggtcgttcaaataaatgttgccccccacccaacccaaccaacccgcccaatccaacccaacctccttatgcccatcacgcaacctttcgtagtcctgcacgccggcatttagctaatccccgaaaagaaaatgctcaacctggggatgaagtcggcaaagtgttcgattttttcgaggcgttagcggaagatgcggcgtggagttgcggtttgttggcgacaagtgtcaggtcgcgggcgaccgctgatgctgcgtcgggcgctaagcaacctgctttcgaacgccctgcttatacgccaaccggagagacaattgtagtgcgctgtcagacggtcgatacctggtgcaagttatcgtcgaaaaccccggtgacggaaatggacgtcaaaaggctcacttctgtttgcagatgcccattcgccgaattaaacaacgccagtccatatagaagcgaaggtgacggtaacgctcgagtgtcagcgttgcgggaagccgtttatcatcaggtctacacaacgtattgttttagtcctgtgcgttcagacgaaaggctgaagcactgccggaagcgtatgaaccgattgaggttaacgaattcaaccgtcggacgcaagttagtggcaacggctggagttccgcagtggccctttcggtacacataccgttcactcttgggcgctgtcttcgttcgttatttctccgtgcatacagggcgcacacagcttttagttttgcttgttcggcatgccggtgctacctttcctcctgtatccctcacggtgcttattaggggcccttgctgtaatgctggtagcagtcgtttctgtaacaaaagggtaccccttaaggccccgtatgcacgtaaactacgcgttaaagctatctaa

SEQ ID NO: 29655 - DNA, 361 bp, Homo sapiens
  SIMILAR (164)..(334): 911254mologous to Homo sapiens Human secreted protein fragment encoded from gene 41,accession number Y07892,Smith- Waterman Score=283.
  misc_feature (1)...(361): n = a,t,c or g
aaggatagtctttcccattaataggaaggtattctgaacccctagtctaataagctcacatttgaacgcgcatggacttccttctacctaaactttcgaactttttttagacacaggaagtagcaagaagggagatgccaagtgacaatcaccaggaagatgcctctctctagtgacctgggtagtttgcacggcttggctggaaaccacagtccccccatctgtgccagaaccccccatgtggccactgtcctcagacagctcctggagcttgaggataagcactggaatggctccggctccctcctcctcaacaagaagtttctcgatgatcttctgcacaaaaaccaacagctgaccn

SEQ ID NO: 29656 - DNA, 411 bp, Homo sapiens
  SIMILAR (142)..(2): 971254mologous to Homo sapiens Human signal peptide containing protein HSPP-97 SEQ ID NO:97,accession number Y87320,Smith-Waterman Score=247.
gatactgaccagtctcatgtgccactggtgaggaggaagacaacgtgcttttcccaaagggcgatgatctccccagatgatgacccttctcaggaggcaggagcgctttcccggaataaccttttggctccttattcagctctgactttcatggagaatggcaactgtcttctccagctttttcagctgggcaagctcctggttcaggcaagccacctgcatggtcagctgttggtttttgtgcagaagatcatcataagtatgtgactgttgcccactcacaattgagatggcagcaccttcctccaactgttgaattttttctgacaaaatgaggttttcctccagcactctgaccagtttttgcttcaaactttccgagaaacttcttgttgaggaggagggagccgg

SEQ ID NO: 29657 - DNA, 594 bp, Homo sapiens
  SIMILAR (44)..(574): 981254mologous to Homo sapiens Human signal peptide containing protein HSPP-97 SEQ ID NO:97,accession number Y87320,Smith-Waterman Score=879.
ttggctggaaaccacagtccccccatctctgccagacccccccatgtggccactgtcctcagacagctcctggagcttgtggataagcactggaatggctccggccccctcctcctcaacaagaagtttctcggaaagtttgaagcaaaaactggtcagagtgctggaggaaaccctcattttgtcagaaaaaattcaacagttggaggaaggtgctgccatctcaattgtgagtgggcaacagtcacatacttatgatgatcttctgcacaaaaaccaacagctgaccatgcaggtggcttgcctgaaccaggagcttgcccagctgaaaaagctggagaagacagttgccattctccatgaaagtcagagatccctggtggtaactaatgagtatctgctgcagcagctgaataaggagccaaaaggttattccgggaaagcgctcctgcctcctgagaagggtcatcatctggggagatcatcgccctttggtaaaagcacgttgtcttcctcctcaccagtggcacatgagactggtcagtatctaatacagagcgcgttggatgctgcccagagcctggcttatagagc

SEQ ID NO: 29658 - DNA, 1742 bp, Homo sapiens
  SIMILAR (1)..(714): 941254mologous to Escherichia coli Sensor kinase CitA,accession number D90702,Smith-Waterman Score=1090.
atggagccaaagcaaatcgcacgcgtggtccgtcagcaagaggcgctgtttagttcggtttatgaagggctgattgcggtggatccgcatggttacattaccgccatcaatcgtaacgcaagaaagatgctggggctgagttcccccggacggcaatggttgggtaaacccattgttgaagtggtcaggcccgccgatttctttaccgaacagattgatgaaaaacgtcaggatgtggtggcgaactttaacggtctgagcgttattgccaaccgggaagctattcgttcaggtgatgatttgctgggggccattatcagctttcgtagtaaagacgaaatttccaccctcaatgcgcaactgacgcaaataaaacaatacgttgagagccttcgtacattgcgacacgagcatctcaattggatgtcgacgctcaatggtctgttgcagatgaaagagtatgatcgcgtgctggcgatggtgcagggggagtctcaggcccagcaacagcttattgacagcctgcgcgaggcgtttgccgatcgccaggtggcggggctgctttttggtaaagtgcagcgcgcccgggaactggggctaaaaatgatcattgtccccggtagccagctttcgcaactgccgccaggactggataaaagcgcctgtagtgaggctaccgaggccagcggtgcaggtaacatggcctggaacgcatctggcaacattgcccggacagaaccagacatgttgtccatcactttgtcgaagaagctctgctgctttggcgaccgcatcatcgaaatccccgagactatcgaccagcccgttagcttttgcatcctgaccggtccagacgtggcactgggcaattttatcaatctgctccggcgtcgaatgacgcgcatcagcaaccagcgtgacagtacggtggatgtcgctaaccgcctgattgactggtgccagtcgcgcggtgaagcggttatcgccagtcaggactggcacccggcgaatcacggcagttttgccagtcagcacggtgtagagccttatacgccaggccaactcgacggtttgccacaaaccttctggccagatcactgtgtgcagaacagtgaaggcgcacaattacatccgttactgcaccaaaaagcgatcgcagcggtgttccataaaggcgaaaatcctttagttgacagttacagtgccttttttgataacggccgtcggcagaaaacctctctcgatgactggttacgcgatcatgaaatcgatgaattgatcgttatgggcctggctactgactattgcgtgaagtttaccgtgctggacgcgttacagttaggttataaggtaaacgtgattaccgatggttgtcgtggcgtgaatatccagccccaggacagtgcgcacgcgtttatggagatgtcagcagctggggcaacgctatatacgctggcagactgggaagagacacaggggtaattttacgctggcctacaattctgtactggcattgtaggccaaataaaacacgtcagtggcacatctggcaattgatgccatcaacgaaagatttaattcacctcagaaatctcttccaacgacaccttccgcgtttcgatgccaaaaatggagagaaccagcgcacagagcaataacataacaccaagtaccataaacaccgtgatcgacccataatgtgttaataatgccgcaacgccatagggcgtgaagactgcgac

SEQ ID NO: 29659 - DNA, 2043 bp, Homo sapiens
  SIMILAR (250)..(852): 491254mologous to Vibrio cholerae pyrazinamidase/nicotinamidase,accession number AE004400,Smith- Waterman Score=475.
gcggtattgtggtggtcaacctgacacaatgtatgtccggtaaagtgaacatgggtggttatgccaccggtaacgccctcgcccatgccggcgtaattggcggtgcagatatgactgtagaagccacgctaaccaaactgcattacctgcttagccaggaactggatactgaaaccattcgcaaggccatgagccaaaacctgcgcggcgaactgacgccggatgattaaggagactgtaatgccccctcgcgccctgttactggtcgatttacaaaatgatttctgtgctggtggcgcgctcgccgtgccggaaggtgacagtacggtggatgtcgctaaccgcctgattgactggtgccagtcgcgcggtgaagcggttatcgccagtcaggactggcacccggcgaatcacggcagttttgccagtcagcacggtgtagagccttatacgccaggccaactcgacggtttgccacaaaccttctggccagatcactgtgtgcagaacagtgaaggcgcacaattacatccgttactgcaccaaaaagcgatcgcagcggtgttccataaaggcgaaaatcctttagttgacagttacagtgccttttttgataacggccgtcggcagaaaacctctctcgatgactggttacgcgatcatgaaatcgatgaattgatcgttatgggcctggctactgactattgcgtgaagtttaccgtgctggacgcgttacagttaggttataaggtaaacgtgattaccgatggttgtcgtggcgtgaatatccagccccaggacagtgcgcacgcgtttatggagatgtcagcagctggggcaacgctatatacgctggcagactgggaagagacacagggaaccccccatgtggccactgtcctcagacagctcctggagcttgtggataagcactggaatggctccggctccctcctcctcaacagaagtttctcgacagtaattcacaccaaccccaccaatcaaaatgtgctgctcctcttttcaggccatcccattgctctccagcctggaatccagtatttatgttcactccaagacctgaatttatattataacaacattccttcattagtggaagtgtcccgtctacaaccgttacccttcctcaaagaactggatttgagacttaatcctgttgtaaggaaagatacagattataggctctttgctgtatatacactacaaactctggagaaattagtattgccttttccagaatgtcatatagttggaatcattcaatccctggtggtaactaatgagtatctgctgcagcagctgaataaggagccaaaaggttattccgggaaagcgctcctgcctcctgagaagggtcatcatctggggagatcatcgccctttgggaaaagcacgttgtcttcctcctcaccagtggcacatgagactgaggctctcaccgccattgccaccagtatggtgctcccattgtccgccatcccgcccgccgtcactgccaccgcccgcgagaccacccggcgcacgccaggccccgcccattgccccgccccccgcgcgcgcgccgccgcgaccccgggaaccgttattggccgggtcacaagcccgcccgcccgctgctggagccgcgaccatgcctccatctgtggcctggaccccaggatcctaccccctaaactccttctaggcaaccatcttggtcaacttcacccaatgactacctatgctcctcctgttattgacagccctgaaaaaatggagttcaaggtcataggccccattggacctgatatcttcaccaggctcctgagaacccaactgagcagccctgtcctcagattccagctcggacataacattgggggtcagaaaactgactcccaaggtacaaactggaacagccaggatgatcttctgcacaaaaaccaacagctgaccatgcaggtggcttgcctgaaccaggagcttgcccagctgaaaaagctggagaagacagttgccattctccatgaaagtcagaggtag

SEQ ID NO: 29660 - DNA, 594 bp, Homo sapiens
  SIMILAR (279)..(70): 911254mologous to Escherichia coli alternative,accession number X59551,Smith-Waterman Score=338.
ttaaacacaaaaagtgccaaataagttgggggatcgtctagagtcaacgtgcctcaagttttcatctctcttgtaagccagatgttcagtgaaaacgatctgccgctcgtgcggaagcgcaagacagaaccatgattccgtattacgcgtcgcgcccggcgcatagcgatgacgtaaatgtgaaaaaatttcaaactctaccgtgcgctgacagacaattaaggtcagttgttcagcgacaacatcaatggtgacctcttcctttactttggatactgatggtaagaagtcaatatgggccgtgcacagtggctcacacctggtgggattgcttgaatccaggagttcacgaccagcctgggcaacataatgatacctcatataatatttcaaagagaatactcttggtgacaggcagctctcctccacacagtaattcaagcgcctagcattctttaatcttattgcttcaccactcattgacatctgataattacctacatctctatcatcccatacaaagaaatattgtttcttcagggtagcctttctaggttctgcctcctcaacctctttaatctgtctagccagcat

SEQ ID NO: 29661 - DNA, 1434 bp, Homo sapiens
  SIMILAR (1305)..(10): 921254mologous to Escherichia coli branching enzyme (EC 2.4.1.18),accession number M13751,Smith-Waterman Score=2273.
tcacgctaggacgacgtggtgccagttatcgccgccttccaacagatgccagtcgaggctggcgtcatggttccactcgcggccctgggcaaattcgttacccatgaacagtagtttcttgcccgggaatgcccacatccagccatagtaggcgcgcaggttcgcgaatttctgccatgcgtcgcccggcatgcggtcgagaatcgattttttaccgtggaccacttcatcatgcgacaacggcaggacgaagttttcagtgtagttgtagagaatcccgaaggtcagtttatcgtgatgatactgacgataaaccgggtcgagcttcatgtagtccagggtgtcatgcatccagccgaggttccacttgtaccagaagcccagaccgcccatatcctgcggacgagaaacgccagggaaatcggtagactcctcagccattgtcaccgcaccggaaacctgctcaccaagaatacggttggtattacgcaagaattcaatcgcttcaagattctcgcgcccgccaaattcgttcgggatccactccccctctttacgggcatcaataccaaaacggttcatccagtaaagcgcgttaccgacgagaaagtaactgacttcacggcgaccatagttgtagatcagcgtgttccagtcctgatgatagctttcacgcgaatcgctgtgttcatacaagttcgtgccatcaaattcggcaagcgcaaagtcatcagtcgggaagtggcctggcacccagtcgagaatcacgttcagaccagctgcgtgtgcggcatcaatgaaataacggaagtcgtcgcgagtaccaaaacggcgggttggcgcatacaggccggttggctgataaccccaactgccatcgaagggatgctcgttaatgtgcagtagttcgaggtgggtaaagcccatccatttagcataaggcaccagttgatcggccagctcgcggtagctcaaccagaaattgttgtcggtgtggcgacgccaggaacccaggtgaacttcataaatagagattggcgcatcaaactgattcgcttttttgcgctcttcagtctgtacaaccttttccggcagcccgcaaataagagacgcggtttccgggcgcatttgcgcttcaaaggcataagggtcggacttcagacgcaagttgccattggcatcaatcatctcgtatttatagagctgaccgttatgcgccccagggataaacagttcccagatgccgctctctttacgcaggcgcatctgatgaactttgtcggcgtcggcgttaaattcgctgatcgactcccggaggaacagcttgatctgatagagctggaggctgattcgaagttgtgggagctgttccagcttgaagatcgcagtccgccagtcacactgtccctgatatgcactggccagggggatcat

SEQ ID NO: 29662 - DNA, 2312 bp, Homo sapiens
  SIMILAR (1236)..(1892): 941254mologous to Escherichia coli Orf26,accession number D10165,Smith-Waterman Score=1052.
aaggatcgtactgccgcgcaaagatggcgataatgattttttttgggtcccgacaccagaaaaaattgttgccgacgcgatgggtgcactgcgcctgaaagtgggtaaagaccttggtctgaccgacgaaagcaaatgggcaccgctgtgggttatcgacttcccgatgtttgaagacgacggtgaaggcggcctgacggcaatgcaccatccgttcacctcaccgaaagatatgacggctgcagaactgaaagctgcaccggaaaatgcggtggcgaacgcttacgatatggtcatcaatggttacgaagtgggcggtggttcagtacgtatccataatggtgatatgcagcagacggtgtttggtattctgggtatcaacgaagaggaacagcgcgagaaattcggcttcctgctcgacgctctgaaatacggtactccgccgcacgcaggtctggcattcggtcttgaccgtctgaccatgctgctgaccggcaccgacaatatccgtgacgttatcgccttcccgaaaaccacggcggcagcgtgtctgatgactgaagcaccgagctttgctaacccgactgcactggctgagctgagcattcaggttgtgaagaaggctgagaataactgatatgactcaaatacacgaaatcattcgcgttgcatcgaggcggcaactgagtgaactcccatgagcatagataactatgtgaatgggatgagcgaaggcagtcaacgaagaggcagcgtaaaggataaagtgtataagcgtcccgtttcgatcttagtggtcatctacgcacaagatacgaaacgggtgctgatgttgcagcggcgtgacgatcccgatttctggcagtcggtaaccggcagcgtggaagagggtgaaaccgcgccgcaagctgccatgcgcgaagtaaaggaagaggtcaccattgatgttgtcgctgaacaactgaccttaattgactgtcagcgcacggtagagtttgaaattttttcacatttacgtcatcgctatgcgccgggcgtgacgcgtaatacggaatcatggttctgtcttgcgcttccgcacgagcggcagatcgttttcactgaacatctggcttacaagtggcttgatgcgcctgctgcggcggcgctcactaagtcctggagcaaccggcaggcgattgaacagtttgtaattaacgctgcctgaacaggcagggctatctggagatatttttatggcaggtcatagtaaatgggccaacaccagacatcgtaaagctgcgcaggatgctaagcgcggtaaaatcttcactaaaatcattcgtgagctggtaaccgcggctaagctgggcggtggcgatccggacgctaacccgcgtctgcgtgcggcggtggataaagcactgtctaacaacatgacccgtgacacactgaaccgcgcaattgcacgtggtgtgggcggtgatgatgatgcaaacatggaaaccatcatctacgaaggttacggtcctggcggcacggcaatcatgattgaatgtctgtctgacaaccgcaaccgtaccgttgctgaagtgcgtcatgcatttagcaaatgtggcggtaacctcggtactgatggttccgttgcctatctgttcagcaaaaaaggcgtgatctccttcgagaaaggcgatgaagacaccatcatggaagcagcactggaagcaggtgctgaagacgttgtgacctatgatgacggcgcgattgatgtctacactgcatgggaagaaatgggtaaagtgcgcgacgctctggaagcggcaggtctgaaagcagacagcgcggaagtttccatgatcccgtctaccaaaggaagagacctgcagcaaagcaagcttcgcgccgttctccgtggccacttcccgactgatgactttgcgcttgccgaatttgatggcacgaacttgtatgaacacagcgatccgcgtgaaggctatcatcaggactggaacacgctgatctacaactatggtcgccgtgaagtcagtaacttcctcgtcggtaacgcgctttactggattgaacgttttggtattgagtgctgcgcgtcgatgcgccgtaaagagggggagtggatcccgaacgaatttggcgggcgcgagaatcttgaagcgattgaattcttgcgtaataccaaccgtattcttggtgagcaggtttccggtgcggtgacaatggctgaggagtctaccgatttccctggcgtttctcgtccgcaggatatgggcggtctgggcttctggaaaaagacggtgcagggaatccggaattaa

SEQ ID NO: 29663 - DNA, 918 bp, Homo sapiens; identical to SEQ ID NO: 10720
  SIMILAR (550)..(915): 831254mologous to Escherichia coli similar to E. coli yhaD,accession number U82664,Smith-Waterman Score=468.

SEQ ID NO: 29664 - DNA, 1389 bp, Homo sapiens
  SIMILAR (693)..(127): 941254mologous to Escherichia coli No definition line found,accession number U00006,Smith-Waterman Score=970.
tcaacaggaggatacgcatgccaactcaagaagcgaaagctcatcacgtcggtgaatgggcatctctgcgcaatacgtcgccggaaatagccgaggccattttcgaagtcgccggtacgacgaaaaagccaggctgtatttacgatcaacatcctgcgagaaatcacggggatgagtcgcttgccatttttctgacgtccacagcaggaacggaatggtgtacatatgacgcgtcgggttgtcctcattacgcccctgagttttgtgcggcggcgtgtcgtaaacctcttcaccgtggtcagagaaataaaccaggaaaccgttcgggtttgctgctttaaagtctttaatcaggctggcaaccacatgatcgttatacaggttagcgttgtcataatcgttatatgactccagctcttccgcgtttaatcccggcggaacatgatcggtattgccatcaaacttgccctgattttccgggtagcggtatttgtatttgatatgcgtacccagcagatgaacaatgatcagtttcttcggcgcagggtcattcagcacttcctggaacggattcagcacgttggtgtcgtattcacgcgcactctgcgtacgttgctggtgcatgtagtactgcttgtcgatctggcgcgaaaataccgtcagcatggactctagagaagagtccgctggctgaccgaatttgatgatgttcaggcatattgcaccgcgatgacgcctaaaacgactatgcttcagcggaatggcgcgaatagtacgcacattagacgtgatatcttccccggtggtgccatcgccacgggtcgcggcactgactaaaacgccattttcatacagaataacaatgccgccaaacagttcgcggtcgaacggttccagttcagcaataacctgggtcgcggcctgatgcgggaaacccgtcagcgcgggtggtcggatgcagcagacagctctagagtcttccgcgtgcacagatggcgatggctggtttccatcagttgctgttgactgtagcggctgatgttgaacgttttcgctcgggaagacgtacggggtatacatgtctgacaatggcagatcccagcggtcaaaacaggcggcagtaaggcggtcgggatagttttcttgcggccctaatccgagccagtttacccgctctgctacctgcgccagctggcagttcaggccaatccgcgccggatgcggtgtatcgctcgccacttcaacatcaacggtaatcgccatttgaccactaccatcaactttatttgaagcatggtttcgctgattgcgaaccgtttgctgattatcgacttgatccacacagtcgatttttatcattgacgctatgcgaaaataatgaattgccat

SEQ ID NO: 29665 - DNA, 768 bp, Homo sapiens
  SIMILAR (669)..(334): 1001254mologous to Escherichia coli o195,accession number L10328,Smith-Waterman Score=621.
ctgggtttcgtcgagatgttggcgaccgtgattggtttgcgtggcgtcatgcctgttgaaatcagcactacgcgtcggcgtccgtggcgtaatagtgatttccagcgcatgatcaataatctgggcaccgctttccacgttaatacgtgctgcatctgccatttctttcggatcgctaccagcaatttgcacggtgcgaataccgggttcatcaatgtgcaccatccgtaaacgagatttgtcgctttcccaaacctgtgggttagaagacatcatctcggatactgtcaatccggctcccatctcgtagcacaacgtccgaaaaggtctgtctggcgtgcgttcaaccaactctttcagcatttcatcaggatatgtgttcttaataccggcaaattcgtcctcttcatcatactcaaattcaacaccttctatgctggcatcatcctgaaaactacctgcaaacttttcagcagcagaaccgtccgcaatacaccacggacagagatgttcaacttcatcaacgcaataaaagggacccgagtaataaactgacgtctgttgttcacagcaatcgcactctacggttttatcctgttcaaatgcgcctgtttccagtggcttgggatgatatttgaattggggtaacggcctgatattttgagtcatagaaacatcctgtctcacaatccgctcaacaagatcatctgtgaagaaaccattcgcctcggcggttcgatggtgcaccaccacggtatcggtaaacat

SEQ ID NO: 29666 - DNA, 762 bp, Homo sapiens
  SIMILAR (474)..(25): 981254mologous to Escherichia coli o195,accession number L10328,Smith-Waterman Score=847.
tcacgccacagtcacagcgtgccggcagtggagacagcggaaaagataaccctgacaatggccacccttatgcaggcatttagctagatcagaatttctaataccgaaattctcacaatcttcttcaaggttggcaaattcatcgaggcgatcttttatatcattccagcccacatagccgataaaaacacagaaatcgccacaatgcgcgagccagaattcctgctgccatccatgataacctggcgtgcgttcaaccaactctttcagcatttcatcaggatatgtgttcttaataccggcaaattcgtcctcttcatcatactcaaattcaacaccttctatgctggcatcatcctgaaaactacctgcaaacttttcagcagcagaaccgtccgcaatacaccacggacagagatgttcaacttcatcaacgcaataaaagggacccgagtaataaactaacgtctgttgacgcaaaagaggccgtaaatgacccctgcatttgcttcctggaatgaatttttcgcaatgggcggttacgccttttttgtctggctggcggtggtgatgaccgttattccgctggtggttttggtcgtgcactcggtgatgcaacatcgcgcaattgtgctgcgcaacagcaggaggctgcatgaatattcgccgtaaaaaccgcttgtggattgcctgtgccgtgttggcagggctggcgctgactatcggtctggtgctatatgcgctgcgctcgaatatcgatct

SEQ ID NO: 29667 - DNA, 4188 bp, Homo sapiens
  SIMILAR (397)..(969): 991254mologous to Escherichia coli core protein,accession number L19084,Smith-Waterman Score=1000.
atgcggaatgtgccagaactgatgagcgatatccgccaggatggtcgcttctgctctgccagtggtgcggatagtgttgtagtgcggatgctgtgcgatggcgctatacaaaaaagttgtcgagtgaccgataccaccactaatcagaatttgctgatcgcgggcaatcttacatgccgcatcgatagtcggcataaccgcattgcctgcaaggatcacgcaatcggcctgatacggcacctcaccggagaaatcatcctgcgccagccactgtccgataacatttatggcatctatagttgccggcgaaagcgtcggaaacggggtcacgcgcagcgggatacccggcagaaggctcacgggcaaacgacgcggcgggacgagaacagagtccgtctgaatgtggtgtccgccgatatcacggacatcaccacaccggacgggcgggagacgaaattttactataacgacgggaaccagctgacggcggtggtgtccccggacgggctggagagccgccgggaatatgatgaaccgggcaggctggtatcggagacatcgcgcagcggggagacagtacgctaccgctacgatgacgcgcacagtgagttaccggcgacgacaacggatgcgacgggcagcacccggcagatgacctggagccgctacgggcagttgctggcgttcaccgactgctcgggctaccagacccgttatgaatacgaccgcttcggccagatgacggcggtccaccgcgaggaaggcatcagcctttaccgccgctatgacaaccgtggccggttaacctcggtgaaagacgcacagggccgtgaaacgcggtatgaatacaacgccgcaggcgacctgactgccgttatcaccccggacggcaaccggagcgagacacagtacgatgcgtggggaaaggcggtcagcaccacgcagggcgggctgacgcgcagtatggagtcgatgctggcggaccttagaggaacagattggctgcggaagaaagcagctatgaaccactccttaaaaccctggaacacatttggcattgatcataatgctcagcacattgtatgtgccgaagacgaacaacaattactcaatgcctggcagtatgcaaccgcagaaggacaacccgttcttattctgggtgaaggaagtaatgtactttttctggaggactatcgcggcacggtgatcatcaaccggatcaaaggtatcgaaattcatgatgaacctgatgcgtggtatttacatgtaggagccggagaaaactggcatcgtctgggggcacatgcggcctattacggttttagcgccatttactggcaggcagctggctactcggcctcggcggtggggtatttgtggtcgttgggcgtggtggcggaagtcattatctttgcgctgagtaataaacttttccgccgttgtagtgcacgcgatatgctgttgatctcggcgatttgcggcgtagtgcgctggggcattatgggagcaactacggcgttgccgtggttgatagtggtgcaaattctgcattgcggcaccttcacggtctgccacctggccgccatgcgttatattgctgctcgccagggcggtttactctgccgtcgcgatgggcggcagtatcgctatcatgaccgttttcgccggtttcctgtatcaatatctgggccacggcgtgttctgggtaatggcgctggtggcgcttccgccaatgtttttgcgcccgaaagttgttccctcatgctgattcgagcattttgcggatctgctcctgttgatgtgttgtcagcgtcaggtccgtatgatcacggtggtcttaacgtcacgacacgccaatctgcgcccgccgcctggcgggtcatacaatattttccccacgcttcaagggtaaacgggcgtgccaacatcccgcggtgggattcgcgcggccctgatcaagttgaagtgtgggcgttttgtattactgacaaagccgcctccgatgaagttaaagccgcttttgaaaacagcgccactcgtgcttttggtcctgctggttttctcgagcagatgactcggagaactggaggtgatgaaatgagtgcgcaagtttcactagagttacatcaccgcattagccagtttctctttcacgaagccagcttactggacgactggaaatttcgtgactggctggcgcagctcgacgaagagattcgttacaccatgcgcaccacagttaacgcgcaaacacgcgaccgccgcaaaggcgtccagccaccgacaacctggatttttaatgacaccaaagaccagctggagcggcgaatcgcccgctttagagctcaggagagacacaaaaacgtacccaaagatgcccgcgagcgcttatccggctacagtgggcatcgtgtgatgcactgtcggtcgaataagatgcgcaagtatcgcatccgacattattgcggcactggagtctggcaacagtgccggatgcggcgcgagcgccttatccggcctacggttgggcatcgtttgagtcactgtaggtcggataagatcgcgcaagcatcgcatccgacattattgcggcactggagtttggcaacagcgccggatgcggcgcgagcgccttatccggcctacgttttaatgccagcaaaaatggtgaattacctgggttatcagttcgcggttcaccacttcggtttttgctccgagcaatttctcaaccacttcaaccagttgatgattcggtgggcattcatagccagggatcggcggatgcagctcgtcgaccgtcagacgacccggccagcgttcgctcaccggagccaatgcatcgttgagcaaaccattaagttcattgagtgtcatgccaggcagcggacgaatatccacacgcaactcacagcaagcgcaaatacggttagaagcgtcgccaccgtgaatatgcccgaggttgagcgtagggtaggcacggtagcgctcgtgagcacactacgacatcagcaactgtatctcgaaggtcgcgtaaacgtactggtcgcaaccgatgttgccgcgcgcggtatcgacattcctgacgtcagccacgtctttaccttcgatatgccgcgcagtggcgatacttatttgcaccgtatcggacgtaccgcgcgcgccggtcgtaaaggcaccgcaatttcgctggtggaagcccatgaccatctgctgctgggtaaagtaggccgctatattgaagagccaattaaagctcgcgttattgatgagttacgcccgaaaacgcgtgcgccaagcgaaaagcagaccggcaagccatcgaagaaagtactggctaaacgtgctgagaagaaaaaagctaaagagaaagagaagccgcgggtgaaaaaacgccatcgcgacaccaaaaatattgactatgaagattcgcgcgacgacggctggcagcgtgaagtgagcgacgatcggcgcagacaatatgacgaccgccgccgccagtttgaagatcgccgcaggcagctggacgatcgccagcgccagcttgatcaggagcgtcggcaactggaggatgaagagcggagaatggaagatgagtccgggtcacccgttatatatgactggcccggcggtacatgtctacgacggatttattcatctatgaagcaaccaggggaagaactgcaggaaacactcacggagcttgatgaccgggcggttgtcgattatctgattaaaaatcctgagttttttatccgtaatgcgcgcgcagtagaagcgatacgtgtgccgcatccgctctggcaacaggggtacggtcagggcaatgcggaatacagtgtgacggatgccagcggaaagatgtttaccatcaactgcacgggaaatccggaccagaacggtatttaccagcactcggtttttctgatcctcgccggggataaaacggtcagctcgcatgatgacagtaccggcatcacagtggtgatggaccataagcaatatgccattccctcaacccttggctggcgtaacggagataatgcctggttcagcttcatcatggatatccgtaaggcccggcagttcgacgtctacgtcaatgaccagaaagttggatcgtttaaccctcatgttcggaatgcacaaaaggtcctgccaacattagcggactgcactaacgactga

SEQ ID NO: 29668 - DNA, 909 bp, Homo sapiens; identical to SEQ ID NO: 10721
  SIMILAR (520)..(906): 1001254mologous to Escherichia coli putative,accession number L31628,Smith-Waterman Score=657.

SEQ ID NO: 29669 - DNA, 870 bp, Homo sapiens
  SIMILAR (870)..(94): 991254mologous to Escherichia coli No definition line found,accession number U00006,Smith-Waterman Score=1418.
ctgaaaagtgtggcctgaggggagttcgatgtaaacattgcggcagttgtattgccggatgtggcgtaaacgccttatccagcctaccgccgcgatctgatcgccatagggcagtgtgtcgtaatcgatcagtgcgtttttcttatacgggttaccaatccagcgggtagtttctttgaactgcggattcaccactgaacgggttggatcgtaaccgtcgtaagataagcccgccaaatctgaccaggtgtggatcagttccgccaggctgtatttacgatcaacatcctgcgagaaatcacggggatgagtcgcttgccatttttctgacgtccacagcaggaacggaatggtgtacatatgacgcgtcgggttgtcctcattacgcccctgagttttgtgcggcggcgtgtcgtaaacctcttcaccgtggtcagagaaataaaccaggaaaccgttcgggtttgctgctttaaagtctttaatcaggctggcaaccacatgatcgttatacaggttagcgttgtcataatcgttatatgactccagctcttccgcgtttaatcccggcggaacatgatcggtattgccatcaaacttgccctgattttccgggtagcggtatttgtatttgatatgcgtacccagcagatgaacaatgatcagtttcttcggcgcagggtcattcagcacttcctggaacggcttcagcacgttggtgtcgtattcacgcgcactctgcgtacgttgctggttcatgtagtactgcttgtcggtctggcgcgaaaataccgtcagcatggtattgcgggcggtcatcgtctgctggttggtgatccagaaggttttataacccgcctgtttcatcat

SEQ ID NO: 29670 - DNA, 1028 bp, Homo sapiens
  SIMILAR (338)..(832): 961254mologous to Escherichia coli cadA,accession number M76411,Smith-Waterman Score=847.
  misc_feature (1)...(1028): n = a,t,c or g
gaaacagaatgacgaaagagccccgccgggagcagaagccgcaggggagggacgaacacctcgacaagagcgcaagaaggcaagaaacagggaccgcccccgccagaagaagacccgaacaaaagaagacaaccgcaccccacaagaagaagacgaccaaagactaaaaaaaaaaaggaccacaaaaaaagcgcccgggagctcaagcaacacacaacgccagccggacggaagacaccgaacccgggggaacctaaagggaagacccccacccaccaacccccccgagaaaaagggggaacaccaggggcggaaaaaacccacccccccgaagaaaaagaggatccccgactttaaacgtgcgttcgacctgaacctgcgtgtgaaaaacatgctgccgtctctgtatcgtgaagatcctgaattctatgaaaacatgcgtattcaggaactggctcagaatatccacaaactgattgttcaccacaatctgccggatctgatgtatcgcgcatttgaagtgctgccgacgatggtaatgactccgtatgctgcattccacaaagagctgcacggtatgaccgaagaagtttacctcgacgaaatggtaggtcgtattaacgccaatatgatccttccgtacccgccgggagttcctctggtaatgccgggtgaaatgatcaccgaagaaagccgtccggttctggagttcctgcagatgctgtgtgaaatcggcgctcactatccgggctttgaaaccgatattcacggtgcataccgtcaggctgatggccgctataccgttaaggtattgaaagaagaaagcaaaaaataattagctcgtacaagggaagtggcttgccacttcccttttttgctcataaggagaacacatgaaaacaccctcacagccgcgcgcgatataatatatcgtggcgatccaaatctgggagtacttcagtttatacggcatgcgtgccttactcattctctatctcacccatcgcnctgactagggtctacgaggt

SEQ ID NO: 29671 - DNA, 559 bp, Homo sapiens
  SIMILAR (2)..(559): 881254mologous to Escherichia coli N-acetylmuramoyl-L-alanine amidase,accession number L19346,Smith-Waterman Score=805.
tgattatgcgtttattcttcaaagcaaacgcaccgtggcgctcgatatcaaacaaacgggcgtgattcagggactgccgttgttgttcagcggcaataatctggtgaaggcgattcgctctggaacgcctaaagatgcacaaacgctacggctggtggtcgatcttaccgaaaacgttaaatccgaaccggttaagcgcgcagaatggcagcaatttacactgtcgtctttacgattaacgccgatgtgccggccaccgcctcctccgccgcccgtggttgcgaaacgcgttgaaacgcctgcggttgtcgcaccgcgcgtcagcgaaccggcgcgcaatccgtttaaaacggaaagtaaccgcactacgggtgttatcagcagtaatacggtaacgcgtccggcagcgcgcgcgacggctaacactggcgataaaattatcatcgctattgatgccggacacggcggtcaggaccctggcgctatcggccccggtggtacgcgggagaaaaatgtcaccatcgccatcgcgcgtaaattgcgtactttgctcaatgac

SEQ ID NO: 29672 - DNA, 4524 bp, Homo sapiens
  SIMILAR (2395)..(3123): 961254mologous to Escherichia coli cadA,accession number M76411,Smith-Waterman Score=1233.
  misc_feature (1)...(4524): n = a,t,c or g
atccagccgcagtacagggcaccacgactttggttaatgataccggctttgaccccgtgggttccggctctatcgctcaatcatggggtcagcattcgggcacaccatcctattgttgagactgggaggctgccaccatgcttcgcgctttccctctggcgaaaaagggagaaggacgggcccgtctgccttcactttatgccagcttcgggatggatatcgggacggcgaagccgaacgctgaagagttactcgccgcgccgcaccgattgctggatattcgcgatccgtcgcaggcttactcggctgctgattttcgccgcgatgcgctggcggaaatggccgatatcaccgcggcggggcggatcccactgcattgctggaagggttgtcgccgctaccgtcggcagacccggaagtacggggccagaattgagcaacaggcggcagagcaaggttgggagtcattgcatcgtcaacttcaggaggtagatccggttgcggcagcaaggattcttccaaattgtcccccaaaggctttcccgggcactggaagtttttttcatttcgggtaaaactttaacggaactgacgcaaacgtcaggagacgctctaccgtatcaggtgcatcagttcgccatcgccccggcgagccgtgaactgctccatcaacgcattgagcagcgttttcatcagatgttggcttcaggttttgaagcagaagtccgggcgctttttgcccgaggagatttgcatacggacttgccttccattcgttgcgtgggttatcgccagatgtggtcttaccttgaaggcgaaatctcatacgatgaaatggtttatcgaggtgtttgcgccacgagacagttggcgaagcggcagataacctggctgcgtggttgggaaggggttcactggcttgacagtgaaaaaccagaacaggcgcgtgacgaagtattacaggcgggttataaaaccttctggatcaccaaccagcagacgatgcccgcccgcaataccatgctgacggtattttcgcgccagaccgacaagcagtactacatgaaccagcaacgtacgcagagtgcgcgtgaatacgacaccaacgtgctgaagccgttccaggaagtgctgaatgaccctgcgccgaagaaactgatcattgttcatctgctgggtacgcatatcaaatacaaataccgctacccggaaaatcagggcaagtttgatggcaataccgatcatgttccgccgggattaaacgcggaagagctggagtcatataacgattatgacaacgctaacctgtataacgatcatgtggttgccagcctgattaaagactttaaagcagcaaacccgaacggtttcctggtttatttctctgaccacggtgaagaggtttacgacacgccgccgcacaaaactcaggggcgtaatgaggacaacccgacgcgtcatatgtacaccattccgttcctgctgtggacgtcagaaaaatggcaagcgactcatccccgtgatttctcgcaggatgttccaaagaaatgggttttgcttacggcccaatcatggccccctcccaagatnaacgtcagggtcttgagcgcagtgtcgggcatcaatagcgatgataattttatcgccagtgttagccgtcgcgcgcgctgccgcacgcgttacagtattactgctgataacacccgtagtgcggttactttccgttttaatcggtatgcgcgccggttcgctgacgcgcggtgcgacacccgcaggcgtttcaacgcgtttcgcaaccacgggcggcgaagaagctggtggcggcacatcggcgttaatcgtaaagacgacagtgtaattgttgccattctgccgcttcaccgcttcggttttaccgttttcggcgcatttgaacaggataaagccgtagagtgcgattgctgtgaacaacagacgtcagtttattactcgggtcccttttattgcgttgatgaagttgaacatctctgtccgtggtgtattgcggacggttctgctgctgaaaagtttgcaggtagttttcaggatgatgccagcatagaaggtgttgaatttgagtatgatgaagaggacgaatttgccggtattaagaacacatatcctgatgaaatgctgaaagagttggttgaacgcacgccaggttatcatggatggcagcaggaattctggctcgcgcattgtggcgatttctgtgtttttatcggctatgtgggctggaatgatataaaagatcgcctcgatgaatttgccaaccttgaagaagattgtgagaatttcggtattagaaattctgatctagctaaatgcctgcaaaagggtggtcattgtcagggttatctcttccgctgtctccactgcggcaagctgagactcacctggcacggcttcaaaaacatcgataacgagcacatgtatcttgacccgatcaaagtcaccctgctgactccggggatggaaaaagacggcaccatgagcgactttggtattccggccagcatcgtggcgaaatacctcgacgaacatggcatcgttgttgagaaaaccggtccgtataacctgctgttcctgttcagcatcggtatcgataagaccaaagcactgagcctgctgcgtgctctgactgactttaaacgtgcgttcgacctgaacctgcgtgtgaaaaacatgctgccgtctctgtatcgtgaagatcctgaattctatgaaaacatgcgtattcaggaactggctcagaatatccacaaactgattgttcaccacaatctgccggatctgatgtatcgcgcatttgaagtgctgccgncgatggtaatgactccgtatgctgcattccagaaagagctgcacggtatgaccgaagaagtttccctcgacgaaatggtaggtcgtattaacgccaatatgatccttccgtacccgccgggagttcctctggtaatgccgggtgaaatgatcaccgaagaaacccgtccggttctggagttcctgcagatgctgtgtgaaatcggcgctcactatccgggctttgaaaccgatattcacggtgcataccgtcaggctgatggccgctataccgttaagcttggttttgatgataaccatgccatcagcngctgttcagcgcatatgctttctctggtttacgttacccctatttctcgggcggctgggcttgccgaccgcctgctcggcaaccgcactgcagtgattgccggcgctttagagcacatccacaacggcacctggaaatccaagctacttggaagacacgacatcagaaatgctgtggtattgctcggcggtgtggcccaggtccaggaactgactaaacgcacgcgcaacgggcagcagctcgtcgttcgacaaattttgtgtaggtcggataagatgcgcaagtatcgcatccgacattattgcggcactggagtttggcaacagtgccggatgcggcgcgagcgccttatccggcctacagttgggcatcgtttgagtcactgtcggtcggataagatgcgcaagtatcgcatccgacattattgcggcactggagtttggcaacagtgccggatgcggcgcgagcgccttatccggcctacggttgggcatcgtttgagtcactgtaggtcggataagatgcgcaagcatcgcatccgacattattgcggcactggagtttggcaacagcgccggatgcggcgcgagcgccttatccggcctacgttttaatgccagcaaaaatggtgaatacctgggtatcagttcacggtggcttggtcatattgaaagtagcatgtgacgttgataacccgctggtaggggcacgcggcgcggcggcggtgtttggcccgcaaaaaggggcaacgccggagatggtcgaagaacttgaacaggggctgcaaaattacgcccgtgttttacaacagcaaactgaaattaatgtctgccagatggcggggcgcgggcgctgcgggcggtatgggtattgcggcgccgggtatttttcaatggggatattaaaccgggcattgaaattgtgttgaatgcggtcaatcttgcgcaggcagtgcagggcgcagcactggtgattaccggggaagggggcatcgattcgcaaacggcaggcggtaaagcgccgctgggtgtggcgtcggtggcgaagcagtttaatgtaccgtgtgatctgggattgctggcgtatgtgggtgatggcgtggaagtggtgcaccagtacggcattgacgcggtattcagcattttgccttgttttggcacctttagccgaagtgctcggcagcggtgaaaccaatctcttcaacagcgcgcgaaatattgcctgcgccattaaaataggtcagggaattaaaaactaacccttacctttaaagcggatgcgatttatatcgcataagagtgcagtactcatgccggatgcggcatgagtaccatatccttcctgaaaatcgagaaaattctatatattgcaga

SEQ ID NO: 29673 - DNA, 776 bp, Homo sapiens
  SIMILAR (1)..(306): 961254mologous to Escherichia coli cydD,accession number L25859,Smith-Waterman Score=487.
atggaaacattgcgtatttttggtcgtggtgaagctgaaattgaaagtattcgttctgcttcggaagatttccgccaacggacaatggaagtgctacggctggcgtttttatcctccggcattctcgaattttttacctcgctgtcaattgctctggtggcggtctactttggtttttcctatctcggcgagctggattttggtcactacgataccggtgtgacgctggctgcgggttttctggccctgatccttgcgccagagtttttccagccattacgcgatctcggtgccaccctccataaaccgaaattttctgaagcattgcgaaccggccttatttttggtgccgtcgaaaccctgacgccgctgatcggctggggaatgggcatgttagccagccggtttgtccttgaatggaaccactggattgcgtttgtgctgctgatattcctcggcgggcgaatgattattgagggttttcgtggcgcagatgatgaagatgaagagccgcgccgtcgacacggtttctggctactggtaaccaccgcgattgccaccagcctggatgccatggctgtgggtgttggtcttgctttcctgcaggtcaacattatcgcgaccgcattggccattggttgtgcaaccttgattatgtcaacattagggatgatggttggtcgctttatcggctcaattattgggaaaaaagcggaaattctcggcgggctggtgctgatcggcatcggcgtcaagatctctggagcacatcaccg

SEQ ID NO: 29674 - DNA, 729 bp, Homo sapiens
  SIMILAR (729)..(352): 1001254mologous to Escherichia coli shikimate kinase II,accession number X04064,Smith-Waterman Score=630.
gctcggccgagttaaacgacgcacaagacaaggtggcaagccccagttccccttagaggatcccctgtagtggcactcagaatcccttccgaccagtctgaagcggtccctctttgtcaggggtcctcatagcgctttttcgcacacatcgtttcctgagcggtcggatgttccctgatcaccgagtctggtttaggatgatcggctctgagttggtaccaggttaccgtctgtcctggctttcctttttcaatcgtcactatatatgcttcacgaggataaggcggtttcgttggcatcgatcttccttatttcacgggatgaacgttaagtataggcgctcgaaaatcaacaattgatcgtctgtgccagggcgctgcgaatttcagaaatcacctggctgggttcgtttgttgcgtcgatgataatatgcgcaacttcgcgatatagcgcatcgcgttcttccagcacttcctgaacttcttcgctcagcggttttcccgttaaggttggccgtaaatcttcttccggtgcagcttgcagtcggttaaccaggactgatactggcgcacacaaataaaccacgatcccgttattttgcatgaagtgacgattaaattccgtcagaataatgccgccgcctgtagcgataacggtggatggcgcagttaccgcttccagcgccgccgtttctctggcgcgaaatcccgcccactcttccctttcgac

SEQ ID NO: 29675 - DNA, 1404 bp, Homo sapiens
  SIMILAR (699)..(82): 951254mologous to Escherichia coli similar to phosphotransferase system enzyme I,accession number U00006,Smith- Waterman Score=984.
ctacaaaccaataaatagatattgccaatatatgacaaagtatattgttcctatcaggagaaaatgaacacctggctcgcacccgtcgatataaatcgtttgttgctgccacggagtaagggcatcaatatccacaccaaccagcgttggaatgttgaacgaacgggcaaggatcaccgtatgtgaggtggtgccgccgcttttgagcaacaatcctttgaggtgatttttatccagttcgaggaactggctgggggtcagttcatcagccatacaaatggcgggctgcgtcagtttgcccggtgccgggaagcgttgctcaccgtagatttgctggagtaactggaagcagacgtcgcgtacgtccagggcacgttcttgcaggtagctgctgctggaacgggaaaactcttcgcaaaagtgattcgcgctggcaacaattgcttcggcgcagcttaatccggcgctgacgcctgccaataaatgttcgcgcagggaagtatcgccagccacggatcggtgagcttccagaatcgcgctggtagcaccgtcgctatccagcaaacaaaactcaatgtttttcaagaccaaagtcaggccgttttccaatgcagattgctcggcgtcaacgcctttggctgcgggaagattacccagcgcattgagatctccaagtgatacgaccctgagctcggcacccggatttagtaacgcacgggccaccgccacgcgctgcgcctgccccacggaaaggcgggcagcctggtcgccaacaggcgtatcaacgccttgtgggaggagcggtagaaactcgctgacccaggcgttatccagcgctgcttgtaattcttgttcgctggcatcaggtcgcgccagtagtacgttatcccgcaatgttgctgccggtaattgtgggttttgcccaacccaggagagatgtttacgccatgattctggtgataaatcgcgtaattctatcccgttgattcgtagcgatccctgatatgagagaaaaccagaaagcgcgttcagcagtgagcttttacctgaaccgctgcgaccaaccaacaccgcacgttggcctgctggcaaagtaaagttcagcggtccggccagcgttttaccttccggcgacgtgataaacagctcctcggcctcaatggtcaccggatcggtcgatgctaattccgcctcaccacgttgcggatgggcgagcggggtttccataaacgttttcagactgtcagctgcgccaacagcctgggcgaaaccatcaccattttctttggaaaggctacggccatcaccactaccggaaccttcctgcccgaatggtccaccactttcattattaccctgatattgcaaagcaaagttcaagccatcgacctcccaagtccccat

SEQ ID NO: 29676 - DNA, 6396 bp, Homo sapiens; identical to SEQ ID NO: 25602
  SIMILAR (4216)..(4758): 971254mologous to Escherichia coli K12 N-acetyl glucosamine-1 -phosphate uridyltransferase,accession number AE000450,Smith- Waterman Score=900.

SEQ ID NO: 29677 - DNA, 5052 bp, Homo sapiens; identical to SEQ ID NO: 24661
  SIMILAR (5052)..(4039): 841254mologous to Escherichia coli GLYCINE BETAINE/L-PROLINE TRANSPORT ATP-BINDING PROTEIN PROV,accession number D90891,Smith- Waterman Score=1348.

SEQ ID NO: 29678 - DNA, 2801 bp, Homo sapiens
  SIMILAR (872)..(1435): 1001254mologous to Escherichia coli BILE ACID-INDUCIBLE OPERON PROTEIN F,accession number D90868,Smith-Waterman Score=983.
tgaacaccggtaacaccacctacaaagcggtacagcgttctgccgacctgatctccatcgggccgatgctgcagggtatgcgcaagccggttaacgacctgtcccgtggcgcactggttgacgatatcgtctacaccatcgcgctgactgcgattcagtctgcacagcagcagtaatctcgtcatcatccgcagctttgcgctgcggatatctgaaccggaaataatcactatttccggttttttattctcttaatttgcattaatcctttctgattatcttgcttaactgcgctgcatcaatgaattgcgccatcccactttgcatacttaccactttgttttgtgcaagggaatatttgcgctatgtccgcaatcactgaatccaaaccaacaagaagatgggcaatgcccgatacgttggtgattatcttttttgttgctattttaaccagccttgccacctgggtagttccggtggggatgtttgacagtcaggaagtgcagtatcaggttgatggtcaaacaaaaacacgcaaagtcgtagatccacactcatttcgcattctgactaacgaagcaggcgaacctgagtatcaccgcgtacagctgttcaccacgggccgaggaacgccccgggcctgatgaacttcccgtttgaaggattaacctcaggatcgaaatacgggacagccgttggcatcatcatgtttatgctggtgattggcggcgcgtttggcattgtgatgcgtacaggaaccattgataacggtatcctggcgcttattcgccatacccgcgggaatgaaattctctttattcctgcgctgtttattctgttttcacttggcggcgcggtatttggtattgctatgtcaactccacttcaaggaataaaagttctcgatttcaccggtgtgcaatctggcccatcttgtactcaaatgctggcctggtttggcgctgacgttattaaaattgaacgtcccggcgttggtgacgtaacgcgtcaccagctgcgagatattcctgatatcgatgcgctttacttcaccatgcttaacagtaacaaacgttctattgagttaaataccaaaacagcggaaggcaaagaggtaatggaaaagctgatccgcgaagctgatatcttagtcgagaactttcatccaggggccattgatcacatgggcttcacctgggagcatattcaagaaatcaatccacgtctgatttttggttcgatcaaagggtttgatgagtgttcgccttatgtgaatgtaaaagcctatgaaaacgttgctcaggcagcgggtggcgcggcatccactacgggtttttgggatggtccgccgctggtaagcgctgcagcgttgggtgacagcaacaccggaatgcatttgctgatcggtttacttgctgctttgctgcatcgcgagctcaatatgacggtcgcggagatcgtcgaaagggaagagtgggcgggatttcgcgccagagaaacggcggcgctggaagcggtaactgcgccatccaccgttatcgctacaggcggcggcattattctgacggaatttaatcgtcacttcatgcaaaataacgggatcgtggtttatttgtgtgcgccagtatcagtcctggaagatttccgccaacggacaatggaagtgctacggcctggcgtttttatcctccggcattctcgaattttttacctcgctgtcaattgctctggtggcggtctactttggtttttcctatctcggcgagctggattttggtcactacgataccggtgtgacgctggctgcgggttttctggccctgatccttgcgccagagtttttccagccattacgcgatctcggtacgttttatcatgctaaagcccaggctgttggcgcagctgacagtctgaaaacgtttatggaaaccccgctcgcccatccgcaacgtggtgaggcggaattagcatcgaccgatccggtgaccattgaggccgaggagctgtttatcacgtcgccggaaggtaaaacgctggccggaccgctgaactttactttgccagcaggccaacgtgcggtgttggttggtcgcagcggttcagggagccgctactgcccgtatatcaaccatcgaaatgtccgtctgggcccaattgtaacagatgtgccgtgggaaaattcgggcgacaaatcattgccggaagccactgcgcaggtcatctcgagcgggtcaggggcgacaaaagttgaagacggtttgggcgacctcaacaagccggtgagtaatcagaacttagttactggaatagatacgccggtctataacgcgccgagtgcgggaagtgcgccatttggggtactggcggacaatatgcgctacccgattttgcataaactgaaagacaggttaaatcaaacctggtatcagatccgtattggcgatcgactggcctatatcagcgcactggatgcccaacccgataatggcctgtcggtgctaacctatcaccatattctgcgcgacgaagaaaacacccgttttcgccatacttcgacgaccacatcggtacgcgctttcaataaccagatggcctggctgcgtgacaggggatacgcgacactgagcatggtgcagctggaaggctacgtgaagaataagatcaatctccctgcgcgagcggtggtgattacctttgatgatggcctcaagtcggtgagccgctatgcgtatcctgtgttgaaacaatatggcatgaaggcgacggcgtttattgttaccacgcgcatcaaacgtgtttag

SEQ ID NO: 29679 - DNA, 198 bp, Homo sapiens
  SIMILAR (196)..(77): 871254mologous to Escherichia coli phnA protein,accession number J05260,Smith-Waterman Score=168.
ggaggttgcgggaatttgtaggcctgataagacgcgcaagcgtcgcatcaggcagtcggcaccgttgccggatgcggcgtaaacgccttatccggcctttcaccttcagatctttaatgatggtaacgctgtcgccgtcagccagcagattgccgttagcatctttaacgatcagctcgtcgctttcctgtgcaggtt

SEQ ID NO: 29680 - DNA, 1593 bp, Homo sapiens
  SIMILAR (1)..(408): 981254mologous to Escherichia coli Flagellar biosynthetic protein FliP,accession number D90834,Smith-Waterman Score=671.
atgtcaccggtgatcgacaaaatgtatgtagatgcgtaccagccattcagcgaagagaaaatatcaatgcaggaggcgctggaaaaaggggcgcagccgctgcgtgagtatatgctgcgtcagacccgtgaggcagatttagggttgtttgccagactggcgaataccggcccgttgcagggacctgaagccgtgccgatgcgcattttgctcccggcctacgtgaccagcgagttgaaaaccgcatttcagataggcttcacgattttcatcccttttttgattatcgacctggtgatagccagcgtgttgatggcattggggatgatgatggttcccccagccaccattgctctgccctttaaactgatgctgtttgtactggtggatggctggcaattgctggtcgcgttggtcacgggccttatcatcagtattttgcaggccgccacgcagattaacgaaatgacgctgtcgtttattccgaaaatcatcgccgtatttatcgccattattattgccggaccgtggatgctcaatctgttgctggattacgtccgcaccttgttcactaacctgccgtatatcatcggccgtactatgttgcaggtgacaagcgaacaatggctatcctggttaaacctgtacttctggccgttactgcgcgtgctggcgctgatctccaccgcgccgattctgagcgaacgcagcgtacagaacgggtggtacccctctgcaacgctaagtagcactaactggcaatacgcctgttcctgctctgcgggcaaacgacattccaggactcacaaccgaccaggttgtctctggttaacaaaggcgcgacggtgtgcggtgttcgtgtacgtaaccatctcaccggcgaaactcaggcccttcatgcacctgtcgtggttaatgccgctgggattctgggggggcaacacagttgcccgaatattgccggatctgcggcgattcgcatgcaatatctacaagggtcgtgtaagtcgtgtacttccgggtatgcaggcggcttttgtagatattgggctggataaagccgcgtttcttcatgcatccgacatcatgccgcacaccgaatgtgtggcgggtgaagaacaaaagcaattcacggtgcgcgacatctcggaactggttcgtcaggggcaagatctgatggtgcagaccctgaccccacagtccttatgcctgatgtctaaccttcggaaattttgggatatgggtcacgtgttttggttctcagagatttttgacaaaaggtggtgcaatctagtgaaactcctggtgctttgttttttgttctgccggcttttccgggccataccgagatgtggtgagatttttgcccggcggcaagtcagatacttgcctgctgtgatcaacattgaagccgcgcggctgggtttcctgttggttggaaatgcgagctttgcccggaacagtaagccaatggagttcaggacaagaaagacgccgagcataaagagtggggcgtttgccagcaaggagagatccaactctgaaaatgctttgatatggaaaatatcaagcaaattgaccgacataccatag

SEQ ID NO: 29681 - DNA, 5421 bp, Homo sapiens; identical to SEQ ID NO: 25104
  SIMILAR (1570)..(2232): 981254mologous to Escherichia coli O157:H7 putative oxidoreductase, Fe-S subunit,accession number AE005366,Smith- Waterman Score=1174.

SEQ ID NO: 29682 - DNA, 933 bp, Homo sapiens; identical to SEQ ID NO: 13703
  SIMILAR (427)..(320): 661254mologous to Escherichia coli phnB protein,accession number J05260,Smith-Waterman Score=119.

SEQ ID NO: 29683 - DNA, 1546 bp, Homo sapiens
  SIMILAR (1208)..(1543): 991254mologous to Escherichia coli K12 flavodoxin 2,accession number AE000373,Smith-Waterman Score=607.
atgaatggcactatttatcagcggatagaagacaatgcgcatttcagggagttagtcgaaaaacggcaacggtttgccaccatcctgtcgattattatgctggcagtttatatcggctttattttactgatcgccttcgcgcccggctggctgggcacgccgctgaatccgaacaccagcgtcacacgcggtattccaattggtgttggagtgattgtgatctcctttgttctcaccggtatctacatctggcgggcgaacggcgaattcgaccgtcttaataatgaagtcctgcatgagcggggccgtagagcgccagccaacgaactggcaggcgattcttatgttcctgattttcgtcgtgtttacgctcggcattacctactgggcatcaaacgcgtacgttctcgccggataaggcgtttaccccgcatccggcaacggtgccgactgcctgatgcgacgcttgcgcgtcttatcaggcctacaaattcccgcaccctccgtaggccggataagggcgtttacgccgcatccggcaacagtgccaactgcctgatgcgacgcttgcgcgtcttatcaggcctacaaattcccgcaccatccgtaggccggataaggcgtttacgccgcatccggcaatcgggtgcacgatgccctgatgcgacgcttgcgcgtcttatcatgcctacagccgttgccgcacccgccggataaggcgctcgcgccgcatccggcagtgtttacccgcggcgactcaaaatttctttctcataagcccgcacgctctccagccattcgctacctgctggcgtcggtctggggcccagtcggcatgatggcgatgatgctggcgatgactggctttgtcgtggcaacccggaaactcagaaggcgatttgggtttaaatcttgcaaaaacggggtgctttatcggatctcgtcatcttcaatcaccaccagcccagccagccccatcgccacctgtcgcccggttttgccgtgctggatgcggatggacccgatgctcgatatgatggggatgcagatgctaatggagaaatatggcgatcaggcgatggccgggatggatcacagccagatgatgggccatatgttcctcggtcacaaagtgattcgcgcaaaccacgtcggcgactggggcactcagttcggtatgctttttcgcatcgcggtagaaaccttcaaggaagactgggaagccgtctgggatcagctcgacgacctgaaccttgaaggtaaaattgttgcgctgtatgggcttggcgatcaactgggatacggcgagtggttcctcgatgcgctcggtatgctgcatgacaaactctcgaccaaaggcgtgaagttcgtcggctactggccaacggaaggatatgaatttaccagcccgaaaccggtgattgctgacgggcaactgttcgtgggtctggcgctggatgaaactaaccagtatgaccttagcgacgagcgtattcagagctggtgcgagcaaatcctcaacgaaatggcagagcattacgcctga

SEQ ID NO: 29684 - DNA, 1215 bp, Homo sapiens
  SIMILAR (517)..(792): 981254mologous to Escherichia coli Flagellar biosynthetic protein FliP,accession number D90834,Smith-Waterman Score=446.
atgggcagcaaaatttttcacaatctcatcccatactgcacaacaggccggataaggcgtttacgccgcatccggcaacagtgccaactgcctgatgcgacgcttgcgcgtcttatcaggcctacaaattcccgcaccatccgtaggccggataaggcgtttacgccgcatccggcaacgcaacacgaggagacaacacaagacgacgaggtgaacacagcgaacaggagcgagcacgcagacgaagcaagcagggagcagaaacgacaacgacaacgctgcctgcaccggcgctacaactcccagccctggcgcgccgcgcaaacggccactagcctggtccgcactactccgatccgaacgccgaaccgaaaaccaccccaagcacacaggccacccagcaagtccggatctcccaagaacccttgccctggcaagccccggcccaagaaatatcctcggtcgagtctagaggatccccaattgcagatcacaccaggtttctgtttcacgtcccaaacgctggtgttaatcacctcgttgacgtttattccggcaattttactgatgatgaccagtttcacccgcatcatcattgtttttggtttattgcgtaacgcgctgggaacaccctccgcgccacctaaccaggtattgctggggctggcactgtttttgaccttttttattatgtcaccggtgatcgacaaaatttatgtagatgcgtaccagccattcagcgaagagaaaatatcaatgcaggaggcgctggaaaaaggggcgcagccgctgccgttgagtggggtaaacagcgatgtatacgtagccgcaactaccaagagtatcggcttcgcaggtaaaaccgttgtggtacagggtgacgcattgggcattgcggggattcagttcaccagtggtcagcatcgactctatctggctgataaaatgtggaaataccacatccagcttaggacattcggcgtcactaaacttaccggtgatactggcccgagaaagaagacgacacatgaaagacgaagagagaacgagagagagcagagtacgcaagctgcaactctctatggacccgatgctcgatatgatggggatgcagatgctaatggagaaatatggcgatcagacgatggcgtcaatttcgttaatcaaaccagccagacctttgatgtcattatctggtatcggccggacctctga

SEQ ID NO: 29685 - DNA, 1608 bp, Homo sapiens
  SIMILAR (925)..(1107): 881254mologous to Escherichia coli DAHP synthetase (aroG),accession number J01591,Smith-Waterman Score=295.
ctagccggttgtgtatggtgttcggtgtatattgatggcacgttgatttgttgatgcgggcatatgagtgtgggcgggggcagttgtgcgcatagttttggtagttgcgggatcatactcggtactgtgataagtcactaacttggtgatgggggttgctggtgggcgttggtgtagctttgggtcatcgcgcatacagtcgactggcgctgagagcgttgaagcagcggtgacaagtggatatgccaagaggcggtgatcgtgtatgatgatgggtccgatatatggaatataatgtatattaacgggatagaggaggtaaggttgagtattgatcagtttagatgagagtaacgacggtgcagctgcacacagcgaggatgttgtcggaggactggctgctggaagtcctacatacagtctgagcagggcgagtgctcctgtagctccttccttgggtaggcgacgcatgttgtccggtgtactcagaaggtcgttgctgtccgacccagactcgccgagcgcatgacgagccatcagaaccatcgcactcaggtgtgccatcgctgaactcgagtcatctaacagtcgagatagcgtgaagcactctatggcgacactcatatggagcactggatttagaggtggagctatgaatgagagaagtgctggctcatcagttgatgggatgcacgtgcactcatagccagcaacgttaggcttccggtctgctggctcgtacaggttgtagctacgacaacatctagctgcagaccaggacatggagctgctcattgcatcatgagaacggctccggccacgtggttctttgtagttctcggttcggcgttcggctgggtctctctcctctacgtactctcttagaaatgtcttccagttgtctcgtcttcggcggtggccgtctgccctctcgcacatattcacgacggtacgattaaagtggctatcgatgccattaatgccgccggtgcgccgcactgcttcctgtccgtaacgaaatgggggcattcggcgattgtgaataccagcggtaacggcgattgccatatcattctgcgcggcggtaaagagcctaactacagcgcgacgacgttgcacacccgtggctttagagttgccgttatcacgttccctgatcgagtgcttctcaggggatgctgtccatagagtaccccgaatccccgtacagatcagtttcgcccgggctgtcgcgtatgagctcaggtgctctcgcagcttgtattgaccagccttggatggatgcatgggcatttggattgctgacgtcactgtatatctgtttgggcgactccatagttgttcccccggatgcgtgccgcttccgtgtgtggacagagcttggtcatgctggtacctggtgtgcgaatgggcttgtgatcctacccccatggctgagtcttgaggggatgctccttggatgcttctgggaccaggtgttttcttgctacaggcagcgattgtaagcggcatatatcttttgtgttctctgattcttgctctctctggcgatggttttctgatcttgctactgatccttatgaccttgcgattgatcgcatagtccat

SEQ ID NO: 29686 - DNA, 802 bp, Homo sapiens
  SIMILAR (40)..(66): 881254mologous to Escherichia coli Oligopeptide transport system permease protein OppB,accession number D90849,Smith-Waterman Score=49.
ctgatgccccaggtgctctagaggaccccgaacgttcttcaaatgctctgggactacatccgctttattttggcgataccctgtttcgcagcgcctcggtcctgccgctgattaaagacagtcccccggtttccatcacccccggattgtggagcacgctgattatctatctggtgtcgattccgttaggcattcgcaaagctgtttataatggcagccgctttgacgtctggagtagcgcatttatcatcatcgggtacgccattccggcctttttgtttgccatcctgctgattgtcttcttcgcgggcggcagctatttcgacctgttccctctacgcggcctggtttccgctaactttgattcgctgccgtggtatcagaaaatcaccgattatctgtggcatatcacgctgccggtgctggcgacagtgattggtggctttgcggcgctgaccatgctgacaaaaaactcattccttgatgaagtgcgcaagcaatacgtggtgaccgcgcgtgcgaaaggggtaagtgaaaaaaatattctctggaaacatgtgttccgcaacgccatgctgctggtgattgccggttttccggcgacgtttatcagcatgttttttaccggctcgctgctgattgaggtgatgttttcactcaatggtctgggcttactgggctacgaagcgaccgtctcgcgcgattatcctgtaatgtttggtaccttgtatattttcaccctgattggcctgctgctgaatattgtcagtgatatcagctatacgctggttgatcccgggta

SEQ ID NO: 29687 - DNA, 541 bp, Homo sapiens
  SIMILAR (540)..(331): 1001254mologous to Escherichia coli 2-oxoglutarate/malate translocator (SODiT1) homolog,accession number D90715,Smith- Waterman Score=352.
ttacccgaagatcaaacgcagcgcgataaaatattgatggcaattatgggttccggcaacgatctggaaattgacggtattggcggcggtaatccactgaccagtaaagtcgccattattagccgttccagcgatccgcgtgctgatgtcgattatctgtttgcgcaggtaatcgttcatgagcaacgtgtcgataccacgcctaactgcggcaatatgctgtctggtgttggggcattcgccattgaaaatggtttgattgcagcgacttcgccagttactcgcgtacgtatccgcaacgtcaatacgggtacgttcatcgaagcacaaggatttaatatcgttataacccacgccaaagatgaccggacctgccgcgccgccatagtgagtaaccatgccgccataggagttggagaacaacagtgccagcgcggttaacattaacggtgcgccggagacgttcgccagcatggcaaataccggtaacatagcaacgatataggcactaccggaagcgaagaaataacgcacgataatg

SEQ ID NO: 29688 - DNA, 3390 bp, Homo sapiens
  SIMILAR (921)..(208): 981254mologous to Escherichia coli K12 putative oxidoreductase,accession number AE000306,Smith-Waterman Score=1224.
tcatccggactgaatctcgatgcttcgctggcctggaacgtctgcgcccttactcataaccttcgtggattctggcgaaagggtcaggctattaagggtgccataatcgcccgttattgtccaggcagaccagtcacagtgacacctggacttcacagcaggacgccagcgacaagttatctccaacacccactggataacggttcgcagcagtgattcgtcggttgcagccggaacaatgcggtcgaccatggttcccggaagactgacgtgctcttttatccacccggcgagttctggcgaacgcttttctgccattcccagcaccgcgtttttcaccacatgaccattgtcgggaatattgtcgcaggagagcacggtaaacggtgtaaggccgcgctcacggcggcgtttcagtgcttcgacgagaatacccggtgcggagtgaggttcttcaggggtttgtagatcgtgaataatccgcggattactggtgtcgagtgcaccggtggccgggtcaatacaatagcctttttcggtaatcgtcagggaaacaattgccacctgtggctcgcaaaatttctcaataattgccgctaaggaatccagttttgcattaaggcattcgtgaacggcaccgacaattatcacctgattgccgtccgcacctttctccagcacggtatataaatggttctgtgcgcggagctggctcatcagttgatcaccgctgaacaagctgatttcacagatcccccagtcgcctacctgggcattcagcacacgatcggtcagtaacgcctgatgagcgcggtgaaaggctccaaagccaaaatgaacgatacgtgattgcaactgctggcgatcatagcgtggagcgtgtacatgatgcgggagcgtaacggaggcgattgtattcataggagtcacgtgggcgctggcagatgcccctttgatgcctggtgcggtttcaacgatttccagatcaacggtctgcggcagctcaagcgccagcagttgaccgtcccaggtcagcacctgcatgtccggcatgccgccctctggcataaacagcaactcttcttcaatccaaccacggcaacatattcggacttcagaccctggcactctttgcctgggcgcgcaggctctgatccgcgtctggctgcggcgcagcgcaattccggttggctcgcgcagaaaatcgtgcagcgagccgctgtcgaagcgtcgcagcgtcggccagagggtgaggtccgcgaagtagtggtcgattaaacagagcgcgacgccgttgacacgacgcagggtgcgcaggtggatgacgttctccccctcggtaatccccagtgcgtcagcgacgtggccggacgcggggcgcaataccgaaagcagtttttcgctggtgggatggctgccctgatccagcagattctggctaaaacgcgcctgggcgttgagcgggtaatcgaacgggcgcatcagcaccagcacgccgacgccctgacggcgctgtacccagcctttttccaccagttggtcgatggcgcggcgcagggtgtggcgattcacctcaaagcgcgctgccagttgctgctcggcgggaagatagtcgccgcagcggtagtgttgacgaagctcctgctcaagttttgcggctatctcttgatagcgtgttgggtaggcaaccgttgagagaggaaatccagcaggctgaccgtgacgatgataagcaccatcagggcgcaggtttgtgggaactggaaaccgcgaatcgcttcccacagggtgacgccgatcccgcctgcgccgaccatgccgacgacggtcgccgcgcggacgttggattcgaagcgatggagggagtacgagatcagcagtgggatcactgtggcagacgccgtagaggatcccgcgaggaaaccgtgcgaaagcgggggtccgcaaaacagcaaagctggggggtgacgacgtaccgcggtccgggaatacccaccagcgtgaagcaattgagaaagcgcacacgcttccacagaggcgaagaaaggccggacaaggtatccaattaaccagcaatggtccggtaacaaggagaagcgcatcgagggaacctttccaaggtgggtaaacgcctgggatatcgtggagcctggaatacacggcttcgccacggcaagcccagtgactgtacacggaggcagcaaaccggagttctagtcggagcacgaaggtaaagcaggtaaggaggcggccagcaaagtaccgcaaaacacgacactgcgtccacccggcagccgtgtggcacaggagtgcaatgtgaatggcaagcattggcaacgtactagggttgtcaccggacgtcatttctggctctttcttttgttctgctattatggaccgaaaggagactgccacgcataatttcttcagccctttccattcaaacgtgaaatcaataagttcatcagggacatcgcaaacaatatgaagacggatttcttctctgccgtgactcttttcactgattgcgtaactgtcatgctctggattatttaattctttcagcggaaatttttcctcaaaggctttatttagccgcccctgggttccttttaccgcgaataaataatcacctccctgtttttgtatcttctctgcaatatctttctggcaacccatcgcatcagttgtgatgatttttcctttaatatccagcatgttaagaagttctgggatagctgtaatctcattagatttctcatccgtcttgatctgtccgatgaccagactgtgcattgttgagaacgcactaatgacatgaatcgctcccctgcggcgactcttgtcataagagtgccggagcgtttttccatcaattgcaatgacgtctttatcatcagtgaccccgcgtaacatgcaaaccaaaccacatgatggcggcaattccgcccctaataatccgggaaacagtgcaccacgtacaccgtaagaagcacgcaggatcatggcaaaaggcacaccgtatttactgcccgcagcaccgtttaataccattaccgcggcaatgaaaaaggcgctgaggataattgccagcataatacggcttttgaagccaaatagcagggcttcagaaaccgcttcaatattgagcgccacgataatctgatttgccactttgcaggtttgaccatcgccgttaccgcccacgagggtgatatttttaccgagcagttcaaacagcggtttaacacgttcaaataccgcttcatcaccgccaaccataatcgacaacgtcccttcacgttggttggcagccaagcggcggttctgatatttgggtgtccataggtgcccgggttcgggttcttgtggcgtggttctatagctcat

SEQ ID NO: 29689 - DNA, 3732 bp, Homo sapiens; identical to SEQ ID NO: 10341
  SIMILAR (1392)..(523): 771254mologous to Escherichia coli Biotin sulfoxide reductase 2 (EC 1.-.-.-) (BDS reductase 2) (BSO reductase 2),accession number D90829,Smith-Waterman Score=1167.

SEQ ID NO: 29690 - DNA, 708 bp, Homo sapiens
  SIMILAR (708)..(496): 1001254mologous to Escherichia coli sohB,accession number M73320,Smith-Waterman Score=354.
tcacacaaaagacaaagtctttccttcctcagcttccagagagtcctggtaccaggaatcatatggggatccaaagagtcgactgcacacagcaagttcgaagctcgacataatgatccactttccattccacagcgttatatgggatagaatttctgggacttgagctgtcaccttggagtccatggtgctgatcttcatggtaaggttagggaaggagccaggagcatgggccactgtgagagcgagttgctgggtactccttcctcttcccctggaaattccagaaatcttttgggagtagctgagagccttttccatctcagacgtgatggagtcgatgtcatcactctcataaagtgaagatggccaggtggggagagcagcagacagaaggaagctgttttctgatttctgcccatggctgtttggggtcagggactctagagagctacttcttccctcagacacagccccacgaagtctctgcccatacatgtaaccgccgctggcagcgactttgtctaccgtaacagttaaaggaatgtttttatcgcgcagacgctgcagttgcgaagccgccagcccgtaaccatgcaccatgccaccagggctttccagacggagcacaacctgatcctgcggtttgaatgctgcgagtacagccgttatctcttcacgtagcgagttcacttcatgggcgtccat

SEQ ID NO: 29691 - DNA, 1338 bp, Homo sapiens
  SIMILAR (799)..(1335): 991254mologous to Escherichia coli GlnQ (AA 1-240); gtg start,accession number X14180,Smith-Waterman Score=898.
atgacgaggcactacggtgctgaagcaacaaatgccctgcttccaggaaaagcctctaagcatcagattgtcggatgcggcgtaaacgccttatccgacctggatccccgtaggccggacaagacgcgcagcgtcgcctccggcataggagcggcgctactgcttcgcctcatcaaaacactggctgatgatctccagaacctgacggatctgagcgtcttcaatggtgagcggtacaaggatgcgcagcacgttgtaatacgggccgcaggagagaagaatcaggcctttatcgcgggcgcgagacacgatctcggcggggagttaggggtcggcctggtgtggatcccggcttcaaaggtcaatgggataatgggcccaagcccggtgtggctaacgtttcgcgtgtctaacattgcgggcgaatcagcggaagggctgctggtgaccaagccgaagaactacgatcaggttccggcgaacaaacccattgttgacgcgatcaaagcgaaaaaacaggacccaagtggcgcattcgtttggaccacctacgccgcgctgcaatctttgcaggcgggcctgaatcagtctgacgatccggctgaaatcgccaaatacctgaaagcgaactccgtggataccgtaatgggaccgctgacctgggatgagaaaggcgatctgaaaggctttgagttcggcgtatttgactggcacgccaacggcacggcgaccgatgcgaagagatattgcgccaacgtgaagggggtgaatcccgacacgcaggaaccaagtccctcgggcgttaaggttaacgatccgaaagttgacgagcgcctgattcgccaggaagcaggtatggtgttccagcagttttacctcttcccgcatctgacagcgctggaaaacgtcatgtttggcccgctacgcgtgcgtggcgcgaacaaagaagaggcggaaaaactggcacgtgagctgctggcgaaagtcggtctggcagaacgtgcacatcactacccttccgaactttctggtggtcaacagcagcgtgtggcgattgcccgcgcgctggcggtgaagccgaaaatgatgctgtttgatgaaccgacttccgctcttgacccggaactgcgccatgaagtgctgaaggttatgcaggatctggctgaagaagggatgacgatggtgatcgtgacccacgaaatcggttttgccgagaaagtagcttcgcggctgatctttatcgacaaaggccggattgcggaagatggcaatccgcaggtgttgatcaagaacccgccgagccagcgcttgcaggaatttttgcagcacgtctcttaa

SEQ ID NO: 29692 - DNA, 1794 bp, Homo sapiens
  SIMILAR (1680)..(1030): 971254mologous to Escherichia coli Acriflavin resistance protein F (EnvD protein),accession number D90845,Smith-Waterman Score=1034.
ctacatgttctttttttcattcagcaaagtattctcggcgttgacaatacgttgcgtgaaaaccaaagaggtgccacgcattgatgttatttcagtctgtatttcgagcatatcgtcgagccgcgcaggtgcgtaatattccaccgtcattttacgtaccacaaaggcaacgcgttcagccatcagcgcctgctgactgaagtgatgatgacgcagcatctctgtgcgtgctctttcataaaaagcgacgtaactggcgtggtacaccacaccaccggcatcggtatcttcatagtagacgcgaaccggccatcgaaacagcgttgtattcactttacatcccggtaatgcaacaaaagttagagcttttaaacgctgcttctgcggacgaaagcccacgccgtgaatcacaccagcacagacggcccacatcagcaataaaccatgccagatttccagttcactgttcttcgcggcaaaacgagatgggtcccaaaacatacatccgctatgtaggctgtagtctttactcgcctggttaagcggaatcaatatcttcgcatcatccagaatcgcaattgccagcccgctggctgcatccgtaccactttcaatggacaacatttcgctctgcactccgtcgggggttcctgaaaaggtgacgtcaaccgtgctgacatctgttccgcaatcctgcaaattaatgatgaaagatttctccgggccataattcccatgagaaaaacgtgtcagcgagacatcgcctaactgcacattgatttgcttgctatcctgtgccagcacgcatgtattacggcgaaacgatccgctaatgttgaccgtgccatcatgggcaaatagctcacagccccacgttaatcccaataagaacagaatccagattatcccgttcaacatcactccttcactggtaaaccagatcaaaatagagacccgccgcgcatttacgccgttgctcccgctttgtggacttataacgaagtgatactgctctttgtttcctgtcgccgttccttgcagtgcggcttgcaacggtttcattcccgcttccagatgacgtgcaatgttttccagcaccacgatggcgtcatccaccacgaaaccagtagcgatggtgagcgccattaacgaaaggttattgagactgaatccgcacaggtacatcgccgcaaacgtaccaatcagcgaaaccggcaccgaaacggcgggaataatagtggcgcgacccgagcgcaggaataaaaacaccaccagaatcaccagcgccaccgagataatcagcgtttgctcgacttcttccagcgaggcgcgaatggtgggggagcgatcctgggcaatttgcagatcaatcgccgccggaatggtttcctgcaactccggtaattttgcccggatgctgtcaaccgtctggataatattggcttccggcagtttgcggatcatcagtaaaatagccggtttggcgttggtcatcccggcgttgcgcacatcctgcactgagtcggtcaccgtcgccacatcgcccagacgaaccgcgccgccgttgttgtagtgaataatcaacggctgatattcagcggcggtttttagctcatcattggtctggatctgccagcggtgagtgccatcttccagcgcgccgtcgtccagcgacacgctcttgattaaacagcgccttgcgaattcagcccgacgcgtacggcgggcaggtgagctgccttcgagcatcgacatcaccatcaacgttcgatttgccgaaatcgtcggaaccat

SEQ ID NO: 29693 - DNA, 2517 bp, Homo sapiens
  SIMILAR (2517)..(1303): 881254mologous to Escherichia coli O157:H7 putative outer membrane protein,accession number AE005365,Smith-Waterman Score= 1856.
ttatgacggcgaaaaaaaccgcagtaaacggggcgatgctgcctggtgaattggtgtgcgtaacgcaaagggtttcctcgctgtagaacttgtgcaaggatcatttccgaagtaccgactggaccacctgctgattgtaccaagaaggtccacagctgtctcctgctctcccgggccggggtgagtgttgtggtctggtcttgtcgttctcgagtggtctgggcctgcgcgcgcggtgacccgctcctcatcgttcttttgcccgttgttgcgcgggcccgggtagaaggttttcttagctgggtggggccatgtgaatgccgtcgggccaatgggcggtattacttctgccagtatgccgatgctggtggttgagaacgtgaccgacggcaaccgggcgtactgcaacctcaacgaaggtatcggcaaagtgatgcgttttggcgggcgaagatgtcctgactcgccatcgctggatgcgcgatgtgttaatgccagtattaagcgcggcactgggataaacatcatcccgctgttcactcgcgaaccgcctgtaaagccggtgacattatccactgccggatcgtcacggataattttcatgaaatccagacgggtatgattgagcacccattttagtgacttgccgtagccttgttgcagggctaccaacatgcgaccaaaaccacgcagtcgcttttgctcgcgcggcttgctggctttcagcatccagccacacatcattggcgttaatgtcagagaaaccagcaacgatataccaatggcgacagaaagcgtcacggcaaattcgcgtaacagtcggcccggcaatccgcccatcaacagcagcggcaggaacaccgccaccagtgacagactcatcgacagcaccgtaaaaccgacttcgcgagtaccttgcagtgcggcttgcaacggtttcattcccgcttccagatgacgtgcaatgttttccagcaccacgatggcgtcatccaccacgaaaccagtagcgatggtgagcgccattaacgaaaggttattgagactgaatccgcacaggtacatcgccgcaaacgtaccaatcagcgaaaccggcaccgaaacggcgggaataatagtggcgcgacccgagcgcaggaataaaaacaccaccagaatcaccagcgccaccgagataatcagcgtttgctcgacttcttccagcgaggcgcgaatggtgggggagcgatccgtctggattatattggcttccggcagtttgcggatcatcagtaaaatagccggtttggcgttgccatccggttcgctcggttcgaaagtcttcgccccttcgctgcggaactccaggtactgctgtttcacgtcggtatcagccgttttgttcgtgttgccaaatgcaatcgagcggctgctgtcaaggttgtgaacgtcgtaacgcaaggcgttattccagttcatgccgttatcgaacgacatctgatgtttcaggccaaaaaactggctataaccgcctgtaacgccattatcacccgctttctgcgcaccatcaccatcgagacgagcgataccgtactccagactcatcgtctggctttcgctcaggtcgatagttttacgcaatgccagcatgtcgtattcggtattattacctaactcggcacgcggatcgcctttcgcgacaacgttgaacgccagaccgttacccactttcggcgcggcatctgccagcatactaaagcggttgcttaacacgcgcgcttcgcggaataccgtggtcgcctggctaccgctgacctgtttcagagcactgttcagttcagcagtcgtgccgacgttcaggctggtaaacagttcgttgttggtgtaacccgcatccagtgctttcgcgatgtcattcaccgaggcatctgttgccacatcggtgtaggcatttttgctcatggtgacgtcaacgttaccgctggcatcggtgctgcctttggcagtccataccacggacgttgaggtgatggcgtcagcgtcggtcaggttgctaccttccactacgttatcaaaactcacagtggtgtctgccgtaccagcggtaaagcccgtgttaatctccacgccgttcatgctggcattgttaaccttcagcttcccggcgctgccgttaacgttggtaccgacgacatagccgttgaggttgttcatgctgccaccagcctcatcacttcccgacgttacactaaccgtattgggcttcggcacatccggcaacgtatagtcgccataatgcacttcgctgctattaccgttgttaccgttcataccttcaacattgatgctgtcgccctgcttgatcagtccagaacccgtaaccccatcggcaatcaccaccgtgccgttgttaaccacatgacctactgtacccagtacgctaaatgcaaacgagtcattggcgaagatattgatggtgccgttgttttcgattaccgcatccgccgtggcgttggcatcgagttgcataccgatcat

SEQ ID NO: 29694 - DNA, 2502 bp, Homo sapiens; identical to SEQ ID NO: 28918
  SIMILAR (1063)..(1536): 931254mologous to Escherichia coli K12 putative isomerase,accession number AE000179,Smith-Waterman Score=790.

SEQ ID NO: 29695 - DNA, 2187 bp, Homo sapiens; identical to SEQ ID NO: 24742
  SIMILAR (1)..(633): 1001254mologous to Escherichia coli paaZ,accession number X97452,Smith-Waterman Score=1056.

SEQ ID NO: 29696 - DNA, 1272 bp, Homo sapiens
  SIMILAR (58)..(783): 991254mologous to Homo sapiens p53 tumor antigen (aa 1- ?),accession number X02469,Smith-Waterman Score=1302.
atggctggcaccgtgacacttttccgggcccggaaggatacccgagttggcccctgcgggacaggcaagtctgtgacttgcacgtactcccctgccctcaacaagatgttttgccaactggccaagacctgccctgtgcagctgtgggttgattccacacccccgcccggcacccgcgtccgcgccatggccatctacaagcagtcacagcacatgacggaggttgtgaggcgctgcccccaccatgagcgctgctcagatagcgatggtctggcccctcctcagcatcttatccgagtggaaggaaatttgcgtgtggagtatttggatgacagaaacacttttcgacatagtgtggtggtgccctatgagccgcctgaggttggctctgactgtaccaccatccactacaactacatgtgtaacagttcctgcatgggcggcatgaaccggaggcccatcctcaccatcatcacactggaagactccagtggtaatctactgggacggaacagctttgaggtgcgtgtttgtgcctgtcctgggagagaccggcgcacagaggaagagaatctccgcaagaaaggggagcctcaccacgagctgcccccagggagcactaagcgagcactgcccaacaacaccagctcctctccccagccaaagaagaaaccactggatggagaatatttcacccttcagatccgtgggcgtgagcgcttcgagatgttccgagagctgaatgaggccttggaactcaaggatgcccaggctgggaaggactatttcgacctgttccctctacgcggcctggtttccgctaactttgattcgctgccgtggtgtcagaaaatcaccgattatctggggcatatcacgctgccggtgctggcgacagtgattggtggctttgcggcgctgaccatgctgacaaaaaactcattccttgatgaagtgcgcaagcaatacgtggtgaccgcgcgtgcgaaaggggtaagtgaaaaaaatattctctggaaacatgtgttccgcaacgccatgctgctggtgattgccggttttccggcgacgtttatcagcatgttttttaccggctcgctgctgattgaggtgatgttttcactcaatggtctgggcttactgggctacgaagcgaccgtctcgcgcgattatcctgtaatgtttggtaccttgtatattttcaccctgattagcctgctgctgaatattgtcagtgatatcagctatacgctggttgatccgcgtatttga

SEQ ID NO: 29697 - DNA, 2316 bp, Homo sapiens
  SIMILAR (529)..(1392): 971254mologous to Escherichia coli yejE,accession number U00008,Smith-Waterman Score=1500.
atggaaccttccaatgctactgaagcttacattggtcaaccctacgtagtctcaacgaacatcgagtataacgttaacaatggccggaccaagcaagcagactttgcctcattcgggacttgctattatactactcagggtcagagaccacttgaggaggcagtctgtccattctcagatctccagcgtgcatcctgggagaaccatgcgacaccgcgggcccggggtcaccacgggttcacggggagactgaagttggccaaagtttcagtgacttacgcgctgggggaacgagagggagaaggcgtaatcacatgtgctatcgacctgttccctctacgcggcctggtttccgctaactttgattcgctgccgtggtatcagaaaatcaccgattatctgtggcatatcacgctgccggtgctggcgacagtgattggtggctttgcggcgctgaccatgctgacaaaaaactcattccttgatgaagtgcgcaagcaatacgtggtgaccgcgcgtgcgaaaggggcccgttgggcgcgttttcgtcataaccgtcgcggctactggtcgttatggattttcctcgtcttgtacggtttgagtaagtgttctgaacttatcgccaacgataaaccgttgctggtgcgttatgacggcagttggtatttcccgttattgaaaaactacagcgaaagcgattttggcggcccgctggcaagtcaggctgatgatcaggacccgtggctgagacgacggctggaaaataacggctgggtactgtgggcaccgattcgctttggtgctaccagtatcaactttgctaccaataagcccttcccttctccaccctcccggcaaaactggctgggaacggatgccaacggcggcgatgtgctggcacgcattctctatggcacgcggatctcggttctgtttggcctgatgctgactctctgttccagcgtgatgggcgtgctggcgggggcgctacaaggctattacggcggtaaagtcgatctctggggacaacgctttattgaagtatggtcggggatgccgacgctgtttttgattattttactttccagcgtcgtacagcctaacttctggtggctgctggcaattactgtcttgtttggctggatgagtctggtcggcgtggtgcgggcggagtttttacgtactcgtaatttcgactacattcgtgcggcacaggcgcttggcgtcagcgatcgcagtatcatcctgcgtcatatgttgcctaatgccatggtcgcgaccctcacctttttaccgtttattttatgtagttcgataaccagcctgacctcgctcgatttcctcggcttcggtctaccgctcggttcaccgtcactcggtgaactgctaaagaagttccaggttttggtgaagtgttccgcaccgttgtcgtttgaagagattggcacttccacgttgcaatctcgtgcggtagcgggcgtcgccaacaaaacgctgattttcgccattgagcgacacagaagacaggtgatttctgcatttccaactgagctatgcagcatcgacatgtcccctgccttttccaaggatccggggcacaaaccgttgatcagctgcccatgccttgccactttaactcggaactcctgggcaccaaactgcatgctggtgggaagaagtgctgtgcttattgccggatactttgcgagcagccttcatatcgctgccgtttccctccgagcttccaccttgcagcctccgccctggctggcctctgggatcggttatccgggctttgccgtgcctgaagccggggtcactctagccgtacaaccttcaaccatgtgcccggatcaatggtacatgattgagcacttgtttatggatgctggattcagcacccgcacgagatgccgcaccaccgatgtggaacgtacgcatggtcagctgtgtacccggttcaccgatggactgtgccgcgataacaccgattgcttcacccttgttgagatccccggccgtgttgttatacatgcatcgccggactatagcggaggcgacggtaccgcacgttcagactacatgggaatgtacgccagttacatggcacaaaacggtttttacagcgatctcgttataaaagcatcgcgccagaaaaatagtttccacgtactggacagtcagaacaacggcgttaacgccaacggcactgcgaatggaatgagcatctccctggaccgggcagaggttccctgtcccctaggttatgggttctatagagccgaacccagcttacatacagcaccagaatga

SEQ ID NO: 29698 - DNA, 1755 bp, Homo sapiens; identical to SEQ ID NO: 22743
  SIMILAR (582)..(67): 1001254mologous to Escherichia coli Acriflavin resistance protein F (EnvD protein),accession number D90845,Smith-Waterman Score=867.

SEQ ID NO: 29699 - DNA, 918 bp, Homo sapiens
  SIMILAR (107)..(706): 971254mologous to Escherichia coli Acriflavin resistance protein F (EnvD protein),accession number D90846,Smith-Waterman Score=913.
caatgccaacgtgcgtaacccgcagggcgcgctggaagatggcactcaccgctggcagatccagaccaatgatgagctaaaacccgccgctgaatatcagccgttggatgtgcgcaacgccgggatgaccaacgccaaaccggctattttactgatgatccgcaaactgccggaagccaatattatccagacggttgacagcatccgggcaaaattaccggagttgcaggaaaccattccggcggcgattgatctgcaaattgcccaggatcgctcccccaccattcgcgcctcgctggaagaagtcgagcaaacgctgattatctcggtggcgctggtgattctggtggtgtttttattcctgcgctcgggtcgcgccactattattcccgccgtttcggtgccggtttcgctgattggtacgtttgcggcgatgtacctgtgcggattcagtctcaataacctttcgttaatggcgctcaccatcgctactggtttcgtggtggatgacgccatcgtggtgctggaaaacattgcacgtcatctggaagcgggaatgaaaccgttgcaagccgcactgcaaggtactcgcgaagtcggttttacggtgctgtcgatgagtctgtcactggtggcggtgttcctgccgctgctgttgatgggcggattgcccggggccgaactgttaacgcgaaatttggccgtgaacgcttttctgtcgccattggtatatcgttgctggtttctctgacattaacgccaatggttgtggatttgtcgccaacgcaatgttatcagaggatcccgttattacctaataactggtacggtaaatatagagatcccaattaccccggttatcggaattttgacaaggtcttcaggaattaccgactggatcgaaaaacgctgttgtaa

SEQ ID NO: 29700 - DNA, 857 bp, Homo sapiens
atggaaggcaaatatccaaatgaacaaaacaataatcaatatacagaacacacaatcaaaaaagtccccaactgcccccaattgcacctggcaccaaccacaaacgaatacctggggggaccctcacagacggggagcccacctactgcactttcgttggtgcttctgattgccaccgaccactctggacccccacaagacgtaacacacgaacccaacttaccacgaaacacgttgaccaaccccacaacacctaacctaccacgcgttaactggatctaccattatgtcccaacgcggagtggacatcccttgccactggcacgacataacctgtggacacgcccactcacttccccacaggcgaggccgaaaggcgtagtcgatgggaaacaggtaatattcctgtacttggtgttactgcgaaggggggacggagaaggctatttggccgggcgacggttgtcccggtttaagcgtgtaggctggttttccagcaaatccggaaaatcaaggctgaggcgtgatgacgaggcactacggtgctgaagcaacaaatgccctgcttccaggaaaagcctctaagcatcaggtacatcaaatcgtaccccaaaccgacacaggtggtcaggtgaagcgacttgctcgtggagtgaaatcagtcgaagataccagctggctgcaactgtttattaaaaacacgcactgtgcaaacacgaaagtggacgtatacggtgtgacgcctgcccgggccggaaggttaattgatggggttagcgcaagcgaagctcttgatcgaaccccggtaaacggcggccgtaactataacggtcctaaggtagcgaaattcttgtcgg

SEQ ID NO: 29701 - DNA, 872 bp, Homo sapiens
  SIMILAR (526)..(116): 891254mologous to Escherichia coli similar to E. coli yhaE,accession number U82664,Smith-Waterman Score=603.
atggtggaaggatgggttaccagcgcctgggcgaagaaacatcacccgcgctggtaccgtgaggtccgcaagccacggaaaaggttcgcggcacggaagcaaaagccgcccatcagcgcctggcgcacaacgtaccgggtccgcaccggcttttgaagcaaatagcaggggcttcagaaaccgcttcaatattgagcgccacgataatctgatttgccactttgcaggtttgaccatcgccgttaccgcccacgagggtgatatttttaccgagcagttcaaacagcggtttaacacgttcaaataccgcttcatcaccgccaaccataatcgacaacgtcccttcacgcgcaccgatttcaccgccggagactggcgcatcgagataatcgccgcccagttcattcacctgacgagcgaaacgcttagtttcaatcggggaaatggagctcatatcaacaatggttttgcccttcagcgaggctttggtacaaccattttcaccgaacagaacttcttcaacctgagccatcacactgacgtaagctggctttcgatgctgtatctgccgtggccttttacctttcattattgtgctgttgatgtgaagcgccgtgcgtctgccacgaatgaagcttttttgatcttccttaccccggtgatgatggtgtcgctgatgatggccgcggatccttccctgcttgctacgccgcgtacgtacctgatgagccatatgccgtggctaccgtttttgctgatcctgctgcccgccaacatcatgaccatggtgatgtatgcctttcgtgcggaacgcaaacacatttccgaaagcgaaacccactttcggaacgcgatggaatattccgctatcg

SEQ ID NO: 29702 - DNA, 1253 bp, Homo sapiens
  SIMILAR (1066)..(167): 901254mologous to Escherichia coli putative aliphatic sulfonate binding protein precursor,accession number AJ237695,Smith -Waterman Score=1309.
tctgtgtgagttttccggtcaggtcataatgataacgttgcgtccgcccgtcaaagccgccctgctgtaccagccggtccagcgcatcgtaactgaagacgctgtggctgccgtccaggaaccagttccccacagataccatggggcgacagtattcagaataatgcagacgattttcataaaacagatctgccgtttgctgctgtaaggcggcaacctcggcgttaaccggtttgatggtggtaggagggcgatgatctaagtaagaggcaatcaccggtgccggtaagcccatcgtttttgccagtaaagcgatgctttgctcgcgctggctgcgggttaacgcatcggcctcactaaaggttgccagtacgccctgaataaaagcgccgtttttttctgcatagggacgagctgccagataaaacgatccagtttgattgagatcggtgccgtctttcagcacccgcacgccgccctgtaataatgcagcagagtagtagggatcccagatagcccaggcgtcaacggttccccttgtttggaacggcggcgcggggcctccagcggggctccaggtaagtgggttgggatatcggtaaacttaagtccgggcctgccgcagtgcacgcagtaaaaggttgggtgaactggaaccttactgaacggcacctttgcgacctttacgatcggctaccgttttgatcgggctgttttctgccaccagaatcacttcggctttgggcttcggtggctcgacgcccacgtacaccaaatcagccccggcagcctgggcaaagattggcggaatatccccggtactgccgagatcaatactgccaacgtttaacgcttccaacatttgcggacccgcggggaactccacccaggagatttttgattccggatagcgcttttccagtaactggtggctttttgccagcaccataccaatactgcctttctgatagcctatacgtaacgcttcaggcgaggattctgcagcaaccgcaaaagtagagacgctaagcaatcccgccagcgccagtttaatgaagttacgcatgggcattacctcgcagagacagaaggtcaggaacctgaacatcgcggcggggcaatgcctgccagaaaggttctagcgcgggaacaagaacggtttggcagatttggcgtgaaatgggcggcttggatgggaatcaatatacttgtgagtcattcggccaaacacgccctggcaggaatcctctaga

SEQ ID NO: 29703 - DNA, 2816 bp, Homo sapiens
  SIMILAR (1714)..(2091): 501254mologous to Sphingomonas sp. LB126 FldA protein,accession number AJ277295,Smith-Waterman Score=298.
atgtcagcggcacagattggttttctctcgcggcgatcccgctcggcgcggctattgcgcgagcggttttggtttgttgattatcggcgtgttgttattgctggtctggtggagttgcgacattttcgccagacgccgccgcaggttgaccatcgccttaccgcccacgagggtgatatttttaccgagcagttcaaacagcggttaacacgttcaaataccgcttcatcaccgccaaccataatcgacaacgtccttcacgcgcaccgatttcaccgccggagactggcgcatcgagataatcccgcccagttcattcacctgacgagcgaaacgcttagtttcaatcggggaatggagctcatatcaacaatggttttgcccttcagcgaggctttggtaaaccattttcaccgaacagaacttcttcaacctgaggtgtgtccggcacataataaaaatgatgtccgatgcttccgttacctggcgagcagtttcaaactgacggcacccagtgacagtaattcatcagcaaccgatcttttttcgacaagaccaacacgccacaacaagagcaaaaagaacaacagagacaccgatcagacgaacaacagaaacccaaagaccaaacgacgacacccacgaaccaaaaacggcaacaacaagaccacaggcttccagttatgcgctaatataattagacacagggagcgcggggtgttattgactgccgaactaccggtagctgcagttacaaagctatgcctgcgggtctaccacgcgctatggcgactacggcgattgcaccactgctgcacccaagtgaactgtcccgatatggtcccccagtcgattagtgcaaaatttttccgcggttacatttacgatgcttcaaggtgtttcttacccttttgtggatttcgaggcttcccggttgggttctgctctggttcccgggacaccgccgaaccgtcaaacggaggaccaatgccacgcatcggtctgcgcgctaccaagttccaggaccacatcgccgcacacgagcactgcagaatttgccctcagccgcatccttcggggaaaccaggaaccgtaatcactggccattcgggcgaacgattctcgccgccctggaaaacgcagttccccggcgcggtgctggatgagagcgacaaacgcctgaacagagatgctgcttgctacgccgaatatggaacaacgcactcagggcatggccttctcgaccgacaaatcgaccgtgctttgcgctttgatcaccccacgccgactacggcaatattccaaaacaactgtatacctttaccggagggacggtacctccgagtgatggaccggatgacgtgcaatgttttccagcaccacgatggcgtcatccacacgaaaccagtagcgatggtgagcgccattaacgaaaggttattgagacgaatccgcacaggcaaatccggaaaatcaaggctgaggcgtgatgacgagcactacggtgctgaagcaacaaatgccctgcttccaggaaaagcctctagcatcaggagggtaaaaagaacggaagaggagactgtgtgcggggccctgtggatgggagagcagtggcttcacgaattgaaagacacggcagatgcggtgccttggaatgagtttttgtcgcatggtcagcgccgcaaagccaccaatcactgtcgccagcaccggcaggtaatcgttcatgagcaacgtgtcgataccacgcctaactgcggcaatatgctgtctggtgttggggcattcgccattgaaaatggtttgattgcagcgacttcgccagttactcgcgtacgtatccgcaacgtcaatacgggtacgttcatcgaagctgatgtgcaaacgccaaatggtgttgtcgagtacgagggtagcgccagaattgacggcgtaccgggtactgccgcaccggttgcgctcactttcctgaatgccgctggaaccaaaaccggaaaagttttcccgactgataatcagattgattattttgacgatgtcccggtgacctgtatcgatatggcgatgccagtcgtcattattccggctgaatatctggaaaaacagaatcctcgctgaagcgttacgtataggctatcagaaaggcagtattggtatggtgctgcaaaaagccaccagttactggaaaaacgctatccggaatcaaaaatctctgggtggagttccccgcgggtccgcaaatgttggaagcgttaaacgttgcagtattgatctcggcagtaccggggatattccgccaatctttgcccagctgccggggctgatttggtgtacgtgggcgtcgagccaccgaagcccaagccgaagtgattctggtggcagaaaacagcccgatcaaaaccgtagccatcttaaagatgaacaaggattgccaagcgccaaaagcaccgcggtgtttaatatgttcaaacacctggcccatgtgcttcagaaaaatatcatctggttgattaaagcaaaacgcgaggtcttagctcgcgtttgtcttttacatcaatggcttttgaccccgctgccaccagcgtagcaacaatcgatcggcgctctctgccgcgctgccggaagcggttaaagttgggcatttgcccaccacgccaatggaacccacaatagcaaacggtgcggaaacattttgccgccacacaggccatcatgtaaccgccgctggcagcgactttgtctacgtaacagttaaaggaatgtttttatcgcgcagacgctgcagttgcgaagcgggatcctctagagtgaactga

SEQ ID NO: 29704 - DNA, 795 bp, Homo sapiens
  SIMILAR (678)..(139): 931254mologous to Escherichia coli K12 putative ATP-binding component of a transport system,accession number AE000313,Smith- Waterman Score=847.
ctaaacagagtaaattctaatattaaggatgtagttgatggtatccgccacgccgtaaggcacgatgccgagcgccagcagtaattccaccggcaaccactccagcgccacaatacgattgggatcaatagccgccgcgtgggcggtattcatctccccgtcgttcgcatcgaccaccacgtagacgccatgtttcctgtcgccgccgatatgcaaattgtcgccacctgcaagatctaccacatcgtgcctgccgataaccgttccgctgctgccactgacttcaaggccatcgttgtatgatctgccgctctgccaggtggagaaatcagagagatcgagcacaccgccgtttaacacgatcgactgcggatcgtcctggagagcggtaagatctgccgcgtcgccttccagagaaagcaccgcaccatcatcaacgactatatcgccggttagcgccatcgactgcgcccctgccagcacgtagctgccgttttgcgcaatggtgagctgaccagcaccttcgatgatgccagcaaaactgccctgattaacagtaacgttgccaccagcatcgatatttaaagtgccattctgaaagcccgtcaatgcgtgcacaaaagtttgttgggtcgagccaacgtttagctcagcctgattttgatacggatctatactaacgagcagccacgcaagaatgcgggcccacctgcacgcgggcgcatacgccggatgcactggaagaacaaaaaatctggtcgagctggcgcagctggcacgcgaaaacgacgccat

SEQ ID NO: 29705 - DNA, 2016 bp, Homo sapiens
  SIMILAR (853)..(1452): 941254mologous to Escherichia coli fhuC product (AA 1- 265),accession number X05810,Smith-Waterman Score=949.
atgataactggatttgcccctatatttccagacatctgttatcacttaacccattacaagcccgctgccgcagatattcccgtggcgagcgataacccagcgcactatgcggatgccattcgttataatgctcgaacgcctctgcaagccggagtgtactttgtgcgggatgggcctgggcccttagcttcggtccgtaacaaagagcggtacttcgcgaacaactacatttacgacatgggtcgtaataaagatggtcgccagagcacctggtacatgggtctgggtaccgatatcgacactggcctgccgatgagcctgtccatgaacgtctatgcgaaataccagtggcagaactatggcgcagcgaacgaaaacgagtgggacggttaccgtttcaaaattaaatactttgtgccgattaccgatctgtggggcggtcagctgagctacatcggcttcaccaacttcgactggggttccgatttaggggatgacagcggtaacgcaatcaacggtattaagacccgtactaataactctatcgcttccagccatattctggctctgaactacgatcactggcactactctgtcgtagctcgttactggcacgacggtggtcagtggaacgacgatgcagaactgaacttcggcaacggcaacttcaacgttcgctctaccgcgcgggggtggttacctggtacaatctgtaggccggataagatgcgtcagcatcgcatccggcattgtgcaccaattgccggatgcggcaccggttgtaggcctgataagacgcgtcaagcgtcgcatcaggcacaaatgtctaatgcctacgactacagcgaaatacagccgccgtcggaaggggagattcttcttgatgcccaaccgctggaaagctggagcagcaaagcgtttgcccgcaaagtggcttatttgccgcagcagcttcctccggcagaagggatgaccgtgcgtgaactggtggcgattggtcgttacccgtggcatggcgcgctggcgctactgggggcggcagatcgcgaaaaagtcgaggaagctatctcgctggttggcttaaaaccgctggcgcatcggctggtcgatagtctctctggcggcgaaccgggcgtggatcgcatgctggtggcgcaggatagccgttgtctgttgctcgacgaaccgacctcggcgctggatatcgcccaccaggttgatgtgctgtcgctggtgcaccgtttaagtcaggagcgtggcctgacggtcattgccgtgttgcacgatatcaatatggcggcacgctactgtgattatctggtcgccctgcgcggcggtgaaatgattgctcagggaacgcctgcggaaattatgcgcggcgaaaccctcgaaatgatttatggcatcccgatgggtattttgccgcatccggcgggtgctgcacctatgaataccgcccacgcggcggctattgatcccaatcgtattgtggcgctggagtggttgccggtggaattactgctggcgctcggcatcgtgccttacggcgtggcggataccatcaactatcgcctgtgggtcagcgaaccaccattgccggactcagtgatcgacgtcggtttgcgcacagaacctaaccttgaactgctgaccgaaatgaaaccatcgtttatggtctggtcggcaggatatggcccttcaccagaaatgctggctcgtattgcgccgggtcgcggatttaacttcagtgtacgcaatacgccgttggcgagaaccctgcagttaattttgcgggaaggcccaaggggtcaccctgctttggtccaggtggtggacttattaattgagccgccccaacttcctctcctggtcccctctgttcaaactcgcatccccaggatccagccccaatcacacccagcccatggggtcaatgaggctgtcaggaaccctacggtctgggtggcccccttcatagacgagatcatttcttcaatccacaagtattccatttag

SEQ ID NO: 29706 - DNA, 1587 bp, Homo sapiens
  SIMILAR (1003)..(1584): 991254mologous to Escherichia coli No definition line found,accession number U00039,Smith-Waterman Score=962.
atgtgggagcggcaaaaacaaaaaactggctgcccgccgagatacatgcgcggcgaaacgcgtggaaatgatttatggcatcccgatgggtattttgccgcatccggcgggtgctgcacctgtgagttgggatcattgatgagcggcttacctcttatttggagcggtcaactgttaacggctatggcgctctctccgttgctatggcagatgaataccgaccacgcggcggctattgatcccaatcgtattgtggcgctggactggttgccggtggaattactgctggcgctcggcatcgtgccttacggcgtggcggataccatcaactatcgcctgtgggtcagcgaaccaccattgccctactcagtgatcgacgtcggtttgcgcacagaacttaaccttgaactgctgaccgaaatgaaaccatcgtttatggtctggtcggcagaatatggcccttcaccagaaatgctggctcgtattgcgccgggtcgcggatttaacttcagtgacggcaaacagccgttggcgatggcgcgtaaatcgctgacggaaatggcagatttacttaacctgcaaagcgcagcggaaacgcatttagcgcaatatgaagactttatccgcagcatgaaaccccgctttgtgaagcgtggggaattacctctggcgaacagagaagaattaaaccttttgctaaacaaaggcattctccctttgtgtgaccagagacaggagatagaatctgaatgtgcttttaccatcttctgtgctggagatgccaactgttttcccccgtccccaacacacctgcccctcacagcccttcagcagaggccctgtggccttagtggctctgcctccaaggaagcctggggcagacagcagatctgtaggggaccacagaaaatatctgacataagaatgagaggtgacacaagaacagaggcgttgccgtggaggaggagccagacaggaaaagaactagaatttggctgtacccttcgcgtaaccgtactgggtacgttcattatgctggcaacctatacgctgttttacatcatgacggtctactctatgacctttagtaccgccgccgcgccagttgggcttggcctgccgcgtaacgaagtgttgtggatgttgatgatggcagttattggttttggcgtgatggtgccagtcgctggattactggctgatgcctttggtcgccgtaaaagcatggtaatcatcaccacgctgatcatcctgttcgcgctgttcgcctttaacccactgctcggttctggcaacccgattctggtttttgccttcctgctgctggggttaagtctgatgggtctgaccttcgggccaatgggtgcgctgttaccagagctgtttccgacagaagtgcgttacaccggagcatcgttctcttacaacgtagcgtcgattctcggggcttccgttgcgccatatatcgcagcctggttgcagactaactacgggctaggtgcggtggggttatatctggcggcgatggctggcttgacgttaatcgccctgctgctgacccatgagacgcgacatcagtcgttgtaa

SEQ ID NO: 29707 - DNA, 1191 bp, Homo sapiens
  SIMILAR (664)..(1020): 991254mologous to Escherichia coli P15,accession number M24148,Smith-Waterman Score=627.
atgttcccctcagggaaggggcggctattatgtacgttcaccatcttcttcatcttgctcacacagaccatctcagaggctgtttaccaaggaacccaacataagacagcaaagaaattggaacaggatgctgttttggcagtggccatggatggaccggatgccactgttgctgcaggtgactctaaggatcccgagatgatagagtggctgcctactcgtctgtacagatggctcttcaggactgacatgtccctgcccccggctgcactggtgttagccactgaaggttcacagcccagtgcctctccagaaattactctcatccaagacagggaggttcagggagcggggagccacatgcactgcgtgcagacaaacagtacaagcgaaaaacggcccgctggactgcgtacagaaaaattaccacgttgccgaaagcactccagacagcaaaccggcgatggtagcggaagactacaccaaccgctgcgtaagaacctcaaaaaattcgagaagtgggctcgccaggaagggattgaatgttaccgcctgtatgacgccgatctgccagaatataacgttgccgttgaccgttatgccgactgggtggtgatcaaaggatattgtggtcgatggcggctcaacgctgggggcataagcatgatctggaaacgccatttaacgctcgacgaactgaacgccaccagcgataacacaatggtggcgcatctgggaattgtgtatacccgtctgggcgatgatgtgctggaagccgaaatgccggttgatacccgtactcatcagccgttcggtttactacatggcggcgcgtcggcggcgctggcggaaacgctgggatcgatggccggatttatgatgacccgcgacggacagtgtgtggtaggcacagaacttaatgcaacacaccatcgcccggtgtctgagggaaaggtacgcggcgtctgccagccgctgcatcttggtcggcaaaatcagagctgggacatcgtcgttttccgattgaaccaggcggcgctgggccgtttggcttggcaaccttggctccccgggcccttggcggggttacccggggcaacgatttctccgggggcgcaccttcggacccaagcccccccaccccagtctgggaaagtgcttcaggataaacccagcctaatgctaaaatag

SEQ ID NO: 29708 - DNA, 2235 bp, Homo sapiens; identical to SEQ ID NO: 10825
  SIMILAR (491)..(462): 901254mologous to Escherichia coli dfp (CG Site No. 18430),accession number L10328,Smith-Waterman Score=47.

SEQ ID NO: 29709 - DNA, 2934 bp, Homo sapiens
  SIMILAR (1123)..(1758): 1001254mologous to Escherichia coli f445,accession number L10328,Smith-Waterman Score=1129.
atgccacgctttcctgcgaagtggtgctggaaaatctcgccgcctcccctgtcgtcacgacgctggaatataccctgtttgatggcgaacgcgctggtgcacagcagcgccattgatcatttggcaattgaaaaactgaccagcgccagtcttgcttttactgtcgaacagccgcagcaatggtcagcagaatccccttatctttaccatctggtcatgacgctgaaagacgctaacggaaacgttctggaagtggtgccacaacgcgttggcttccgtgatatcaaagtgcgcgacggtctgttctggatcaataaccgttatgtgatgctgcacggcgtcaaccgtcacgacaacgatcatcgcaaaaggcgcggcgttggaatggatcgcgtcgagaaagatctccagttgatgaagcagcacaatatcaactccgtgcgtaacgctcattttgtcgattatgtgaacagcggtttttataacaacactacctttcaccgcgtcattcctggctttatgattcagggcggcggtttcaccgagcagatgcagcagaaaaaaccaaacccgccaatcaaaaatgaagccgataacggcctgcgcaacacgcgtggcaccatcgcgatggcacgtaccgctgacaaagacagcgccaccagccagttctttatcaacgttgccgataacgccttccttgaccatggtcagcgtgatttcggttacgcggtatttggtaaagtggtgaaaggcatggacgttgccgataagatttcccaggtgccgactcatgacgttggtccgtaccagaatgtgccgtcaaaaccggcttctgttcgttatgacgttaacgatcaacgtctggatatagacgttcctcaagcctgggtaatgaaaaattaccaaaactatgttgatccatcgttatgggaaaacggcattaatgcggccatgttgtcatacaacctcaacggatatcatagtgaaacccctggtcgaaaaaatgaaagcatttatgctgcatttaacggtgggatgaatttaggtgcatggcgactgcgtgcctcgggcaactacaactggatgaccgattctggcagtaattatgattttaagaatcgcaagccggggcgtcggcgttatctgacgctggtgatgatctttattacggtagtcatttgttatgtcgaccgcgccaacctggccgtggcttccgcccatattcaggaagagttcggcattaccaaagcggaaatgggctatgtattttcggccttcgcctggctttatacgctatgtcagatccccggcggttggtttttagatcgcgtaggttctcgcgtgacttattttattgcgatatttggctggtcagtggcgactttattccagggctttgccacgggcttaatgtcattaattggtctgcgcgcgataaccggtattttcgaagcgcctgctttcccgaccaataaccggatggtgaccagctggttcccggaacatgaacgcgcttctgccgttggtttttatacgtctggtcagtttgtcggtctggcgtttctgacgccgctgctgatctggattcaggagatgttgagctggcactgggtgttcattgtcactggtggtatcggcattatctggtcgctgatttggtttaaggtttatcagccgccgcgcctgaccaaaggtatcagcaaagctgaactggattacattcgtgatggcggcggtctggtggatggtgatgcgccgggacagctgccagaacgaatgagcccagctctcctgcccgcagccagccgcgtgtgggtgcaactggcgaccagccactggaatgggaagatgcgcggttttggttttgttcagttcaaaaacctcctagaagcaggtaaagctctcaaaggcatgaacatgaaagagataaaagaccatcgaccctacgtcgttggatttgccgccgatacaaataatgtggaagaatacgcccggcaaaaacgtatccgcaaaaaccttgatctgatctgcgcgaacgatgtttcccagccaactcaaggatttaacagcgacaacaacgcattacaccttttctggcaggacggagataaagtcttaccgcttgagcgcaaagagctccttggccaattattactcgacgagatcgtgacccgttatgatgaaaaaaatcgacaactggctccgggtgacactacgctggttccgaccgggctggcgattcatattgccgatccttcactggcggcaatgatgctgccgcgctccggattgggacataagcacggtatcgtgcttggtaacctggtaggattgatcgattctgactatcagggccagttgatgatttccgtgtggaaccgtggtcaggacagcttcaccattcaacctggcgaacgcatcgcccagatgatttttgttccggtagtacaggctgaatttaatctggtggaagatttcgacgccaccgaccgcggtgaaggcggctttggtcactctggtcgtcaaaaaacaaactgcgaaaaggaaccgtcgcgaggaaatacttcagtctctggcgctgatgctggaatccagcgatggaagccaacgtatcacgacgcacccatcggcacgctttctggtggcaatcagcaaaaagtggtgatcggtcgttgggtctatgctgccagccagattttgttgctcgacgagccaacgcgcggcgtcgatatcgaagccaaacagcagatttaccgtattgtccgtgagctggctgccgaaggaaaaagcgtggtgtttatctccagtgaagtggaggagttgccgctggtgtgtgaccgcatcctgttattacagcacggcacgttctcgcaggagtttcacgctccggtcaatgtggatgagctgatgtccgccattctgtctgtgcactga

SEQ ID NO: 29710 - DNA, 1643 bp, Homo sapiens
  SIMILAR (300)..(713): 961254mologous to Escherichia coli 23 kD protein,accession number L10328,Smith-Waterman Score=657.
agacatagcccggtatcgtgctgggtacctggtaggattgatcgattctgactatcagggccagttgatgatttccgtgtggaaccgtggtcaggacagcttcaccattcaacctggcgaacgcatcgcccagatgatttttgttccggtagtacaggctgaatttaatctggtggaagatttcgacgccaccgaccgcggtgaaggcggctttggtcactctggtcgtcagtaacacatacgcatccgaataacgtcataacatagccgcaaacatttcgtttgcggtcatagcgtgggtgccgcctggcaagtgcttattttcaggggtattttgtaacatggcagaaaaacaaactgcgaaaaggatccgtcgcgaggaaatacttcagtctctggcgctgatgctggaatccagcgatggaagccaacgtatcacgacggcaaaactggccgcctctgtcggcgtttccgaagcggcactgtatcgccacttccccagtaagccccgcatgttcgatagcctgattgagtttatcgaagatagcctgattactcgcatcaacctgattctgaaagatgagaaagacaccacagcgcgcctgcgtctgattgtgttgctgcttctcggttttggtgagcgtaatcctggcctgacccgcatcctcacagaacatgcgataatgtttgaacaggatcgcctgcaagggcggcgcagtaaatccggccagttcagttcacccgcgacgccccagccgttgctgatgcagccacagcgtgctgcctgccgtcgggcgctcctgatgcgccagtcgcaccaccagcttctgctcgccccagcgtccgtgcgccaggttatctgcgccgaggatttccagccgtgtccatcacaatcggttcatcgccggactgccgataaaactcgctacaaacaggctggcgggcttttcgtagacttcaactggtgtgccaatctgttcggcaacaccgccgttcatcaccattactcgctgggcgagcgtcatcgcttcaacctgatcgcgacggtgcaactgttgcagttcaagacgcatctgcacgcgcagcttggcatccaggttagagagcggctcatcaagcgggggaccacaggccttgcctcctgttcaggtcgttctcccactcagtgggacacttcctttacattctctgtgaggacggagtatcgttgtcttcatgtaagagtcagtctattcagaaactgcgccgccaatcagacgccagctaaggccagagaggaacagtacaagcagaccggaaagcgcaacagaggattgatgttcccaggtcaggctgtgcagccaccaacagcgtgggcataaatatcaacaccagcgcgaagccagtggttttcaacgatggcgggcaaacggtgcgggtgattaagcgcgcaaccattcagggtaaccggtattttggcaaattttcgaaggctgaaaaacaaacataacgaagggcaacccagggtgagcaccttttaaaaaagggccgaaaggcattttacggcccccggcccaaaatttcccggtgtttttgggaaaggggggcccacctttttttaacccccgggggggaattgggccctcccccccctggttgacccc

SEQ ID NO: 29711 - DNA, 1893 bp, Homo sapiens
  SIMILAR (4)..(1227): 861254mologous to Escherichia coli p-aminobenzoate synthetase,accession number K02673,Smith-Waterman Score=1769.
atgtatagccgctttgatattgtggtcgccgagccgatttgcactttaaccactttcggtaaagaaaccgttgttagtgacagccaaacacgcacaacgaccactgatgacccgctacaggtgctccagcaggtgctggatcgcgcagacattcgcccaacgcataacgaagatttgccatttcagggcggcgcactggggttgtttggctacgatctgggccgccgttttgagtcactgccagacattgcggaacaagatatcgttctgccggatatggcagtgggtatctacgattgggcgctcattgtcgaccaccagcgtcatacagtttctttgctgagtcataatgatgtcaatgcccgtcgggcctggctggaaagccagcaattctcgccgcaggaagatttcacgctcacttccgactggcaatccaatatgacccgcgagcagtacggcgaaaaatttcgccaggtacaggaatatctgcacagcggtgattgctatcaggtgaatctcgcccaacgttttcatgcgacctattctggcgatgaatgccaggcattccttcagcttaatcacggcaaccgcgcgccatttagcgcttttttacgtcttgaacagggtgcaattttaaagctttcgccagagcggtttattctttgtgataatagtgaaatccagacccgcccgattaaaggcacgctaccacgcctgcccgatcctcaggaagatagcaaacaagcagtaaaactggcgaactcagcgaaagatcgtgccgaaaatctgatgattgtcgatttaatgcgtaatgatatcggtcgtgttgccgtagcaggttcggtaaaagtaccagagctgttcgtggtggaacccttccctgccgtgcatcatctgcaccataacggcgcaactaccagaacagttacacgccagcgatctgctgcgcgcagcttttcctggtggctcaataaccggggctccgaaagtacgggctatggaaattatcgacgaactggaaccgcagcgacgcaatgcctggtgcggcacattggctatttgagcttttgcggcaacatggataccagtattactatccgcacgctgactgccattaacggacaaattttctgctctgcgggcggtggaattgtcgccgatagccaggaagaagcggaatatcaggaaacttttgataaagttaatcgtatcctgaagcaactggagaactatcgccgcgcgctgcgcgacctgaaagaagaggtcgctatacggctttcgccgtttgagttatcggcgttctgcagcccgtcgatagcgtccatggctaccaggtaccccaatggtcggcatattccgccggatctgcgtctccccaaggaacgcggtattatcatcgtctttaccggcaatggaaaaggcaaaaccaccgcggcatttggtacggcaacacgcgcagttggtcacggaaaaaaagtaggcgtcgtgcagtttattaaaggcacctggcctaatggcgaacgcaatctgctggagccacatggcgttgagtttcaggtgatggcaacgggctttacctgggatacacaaaaccgcgagtctgataccgccgcctgccgcgaagtctggcaacatgcaaagcggatgcttgctgattcctcactggatatggttttgcttgatgaactgacgtatatggtggcgtatgactatttgccactggaagaagtggtgcaggcgttaaatgaacgtccacatcaacagacggtgattatcacgggtcgtggttgtcatcgggatattcttgaactggcagatacggtaagtgaattacgccccgtcaaacatgcgtttgatgccggtgtaaaagcgcagatagggatcgattattaa

SEQ ID NO: 29712 - DNA, 2145 bp, Homo sapiens
  SIMILAR (1950)..(1402): 1001254mologous to Escherichia coli glyoxylate carboligase,accession number L03845,Smith-Waterman Score=966.
ttactcgtcttcatcctcaaaacgcgccacgattcgctcgccggagtggttggcacgcagctcttctgccaccagcgcgattgcctggccgctgctcatcccttgtgccatcagttcctggatccgctcgacagctttttgctgctgttcatgggtgagtgaaggtaaacctgccgtgggcgatgcttttacactccggctatgccgatcatccgtatagccgctttgatattgtggtcgccgagccgatttgcactttaaccaccgatgtcggtgcagccacatcagcttatacgccgccgggataataaacagcgacagcaaaggtgcggtgatcatgccgccaatcataggcgcggcaatccggctcatcacctctgaaccagcccccgttccccacagaatcggcagcagaccggcgataatcaccgccaccgtcatcgctttcgggcgcacgcgcaggaccgcgccgtgatataacgcctcatccagcttctgctcgctgaatgtttgtggattattcaacgacggcacggcctccggaggcgctgcgctgtagtccggaatatcccagccggtccacttagtgccgtcccatttcagcaactgacgcttcggatcccacgggttatttgagacgacttcgagctgagtaccacttggatcctctacagtcctgacgtcatggagcgatttgaagaccgaattctttagtcgttctcgcttttcaatgaatgtcagtttatgaatatcagacatttcttttggtcggagaaaaacctcatccaaccattgacagacgttatccgcgatgtgcttgtagcggtatttcttaagtgagtactgctgatgtagaacctggcctttacgcttagcgcagaccgaagccataggcgctctaaatggcgtaaggatgtggggtaagtcccgtttgggtagtttgcggctgctcttctggctggccttcctgtataggttctgatcaggatcattttgtggggtaactaattgcgcccgcagctgttcttctgtcggcggttgtgattgcgactgaatatctaactgcgcttcacgcgtcaccaccggcgcgttgggcgtatcatcagatggaagcagaaatccgaccgccaatacaatggcggcaataatgatcccccgacgatgcatcggcggcagagggtccatgaagagaaaattgtccggcgcgtgcaagactttctccagggttggttttagttcaaagcgtccgggcatggtttcctctggtaacgctcgtgacgcactcaattcattcattgtgaccacaagtttttcttcgctttttcgtatgaagatagatgagcggaaaaccgccggcgcgtcagggtgacatgacccctgagctccattcgctgcaggtctgttgaccagcacatggatgtacggaatgttgaactgcgcgccaacagctaactcttcaatcaggaactggaagtcaaagtcgccagaaatcgccaccacattgcgtttcggatcagcggcacaaacccctagcgcagccggaatcgtccagcctaacggaccagcctgaccacagttgatccagtggcggtctttaaagacatgcagcatttgtgccgcagcgatttgtgacagaccaatggtggtgacataacaaacatcgcgaccaaaggctttgttcatctcttcatacacgcgctgcggtttcaccggcacgttgtcgaagtgggttttgcgcagcaaagtgcgtttacgctgctggcagtcggcgacccattctttacgacacggcagacgacccgctttttgcatctcctgcgccacttcaaccagcagtgtcagcgccgctttagcatcagagacaataccgagatccggacacagcacgcgaccaatttgcgtcggctcaatatcaatatgaacgattttgcgcccttcggtgtatttctcgtaacgatgcccggtttgcagacccaccatcccggccatcagttcatgatcgtccgggatacagccccagcccattagcgttgggatcaccggaacgctggtcagttcagcaacctgttgtaacagagcagctgcgtcagcattaattaccccgcccccggcaacaatcaccggacgttcggcctggattaacat

SEQ ID NO: 29713 - DNA, 810 bp, Homo sapiens
  SIMILAR (313)..(807): 961254mologous to Escherichia coli cobalamin-independent methionine synthase,accession number M87625,Smith-Waterman Score= 849.
cttcccctaaggcccacagtggagtcagctgaagctctgcatgacaggggaggtggctagtgtcgaggcatgcatagctgcccgtgtgcttgggaccacttccagggtgcttcccttgcaggtcccccatgggcctgcagcagatgatgcacggcagggaaggttccaccacgaacagctctggtacttttaccgaacctgctacggcaacacgaccgatatcattacgcattaaatcgacaatcatcagattttcggcacgatctttcgctgagttcgccagttttactgcttgtttgctatcttcctgaggatcgggcaggcgtgaggatcccccagattgacgaaccggcgctgcgcgaaggtttaccgctgcgtcgtagcgactgggatgcgtatctccagtggggcgtagaggccttccgtatcaacgccgccgtggcgaaagatgacacacaaatccacactcacatgtgttattgcgagttcaacgacatcatggattcgattgcggcgctggacgcagacgtcatcaccatcgaaacctcgcgttccgacatggagttgctggagtcgtttgaagagtttgattatccaaatgaaatcggtcctggcgtctatgacattcactcgccaaacgtaccgagcgtggaatggattgaagccttgctgaagaaagcggcaaaacgcattccggcagagcgcctgtgggtcaacccggactgtggcctgaaaacgcgcggctggccagaaacccgcgcggcactggcgaacatggtgcaggcggcgcagaacttgcgtcgggggtaa

SEQ ID NO: 29714 - DNA, 2073 bp, Homo sapiens
  SIMILAR (142)..(1437): 981254mologous to Escherichia coli p-aminobenzoate synthetase,accession number K02673,Smith-Waterman Score=2208.
atggtggccggtgctaatctgggattgataagaccaggcttgcgactccggaaaatcacagtgcatgctggctttcatttgggctcatacctgttgatgtgcgtgacagtgctgattacggaactgatacctgtacgcggctacattctccgagcgagccacctgccgtgggcgatgcttttacactccggctatgccgatcatccgtatagccgctttgatattgtggtcgccgagccgatttgcactttaaccactttcggtaaagaaaccgttgttagtgaaagcgaaaaacgcacaacgaccactgatgacccgctacaggtgctccagcaggtgctggatcgcgcagacattcgcccaacgcataacgaagatttgccatttcagggcggcgcactggggttgtttggctacgatctgggccgccgttttgagtcactgccagaaattgcggaacaagatatcgttctgccggatatggcagtgggtatctacgattgggcgctcattgtcgaccaccagcgtcatacagtttctttgctgagtcataatgatgtcaatgcccgtcgggcctggctggaaagccagcaattctcgccgcaggaagatttcacgctcacttccgactggcaatccaatatgacccgcgagcagtacggcgaaaaatttcgccaggtacaggaatatctgcacagcggtgattgctatcaggtgaatctcgcccaacgttttcatgcgacctattctggcgatgaatgccaggcattccttcagcttaatcacggcaaccgcgcgccatttagcgcttttttacgtcttgaacagggtgcaattttaaagctttcgccagagcggtttattctttgtgataatagtgaaatccagacccgcccgattaaaggcacgctaccacgcctgcccgatcctcaggaagatagcaaacaagcagtaaaactggcgaactcagcgaaagatcgtgccgaaaatctgatgattgtcgatttaatgcgtaatgatatcggtcgtgttgccgtagcaggttcggtaaaagtaccagagctgttcgtggtggaacccttccctgccgtgcatcatctggtcagcaccataacggcgcaactaccagaacagttacacgccagcgatctgctgcgcgcagcttttcctggtggctcaataaccggggctccgaaagtacgggctatggaaattatcgacgaactggaaccgcagcgacgcaatgcctggtgcggcagcattggctatttgagcttttgcggcaacatggataccagtattactatccgcacgctgactgccattaacggacaaattttctgctctgcgggcggtggaattgtcgccgatagccaggaagaagcggaatatcaggaaacttttgataaagttaatcgtatcctgaagcaactggagaacgttcgattcatctgcgtaaacacgctggacaagtggcattccctggaggtgcagtcgatgacacggacgcatcagctatcgccgccgcgctgcgcgaaggacctgcaggcatgcaagttggatctaacatgtaccccgtattaccagggtttttttgacgcactatgccggtttaaggtaaagtttcgagggcatagggaaataccaatccgccctacgtatgtgcgactttcgaccttcgggccggatgtacagcacatccggcccgtgaaatcagacgccgatatttctcaacttctcgcctgccatcagtttgcgttcgatatgttccagcgtgacatttttggtttccggaatgagccagaaagtaatgcccacaaacgcaatgttcagcgcagtgtagagccagaacgtaccggcagcgccaatgctatcaagcagtgtcaggaaggtcgcgccgataatcatattcgacacccagttcgtggtggtcgaacagaacccggtgccgaggtcccaggacccaagacgcccccggcaattccacctggggaagagcgaacccatcctcgaaaaggcggacgaaaatccacgggaacaagcttggaccagatgatgaacagaaaccagtga

SEQ ID NO: 29715 - DNA, 3036 bp, Homo sapiens; identical to SEQ ID NO: 25152
  SIMILAR (2442)..(1822): 981254mologous to Escherichia coli K12 putative dehydrogenase,accession number AE000370,Smith-Waterman Score=1063.

SEQ ID NO: 29716 - DNA, 1014 bp, Homo sapiens
  SIMILAR (429)..(145): 931254mologous to Homo sapiens CSF-1 receptor,accession number U63963,Smith-Waterman Score=470.
ctagacgatccccctttcaggtccttgctcatagccagcactcagtaaatgcagagctgaattgttacgattgttaattttagggcccattgtagtggggcctgccgggtcaggcctcttgggaggaggctcagactcctcacctttgacatagaggtggatggcggcgctgcctcccagggggtctccaggctcagtgcagcgataggtccccgtgttttggaaggtagcgttgttggtgctgaggatgctgctggagccatcagagtacagggtccagtgaggtgatggggggccatcccattccacgctgccattgcccacacatcgcaaggtcaccgttgctcctggcttcacgaccagctcggggacactgggctctatcactgggattccctgaccgcattgctggcgggctgtgctcacgattcgccctgcgttccggtttatgacgatcagggtcgtctggttcacaccaatacctgtatgaaaggcacgactcaggataactgggaaacggctggggctattgccggcggggcagctgctgttgctatcagtgtggccactgcactgcagccatgtcacgttgggctgggggtacccagaggcagcacacaaaagggtgccagagccgttgatgaatgtccatatgacgcttacctctggggggtatcgaagggtgagctcaaacgtcagagctctccagcctcctgggtttctggccaggaaggagtagcggccagcctcagagggcttcaggcggggcagagagagggtgaaggtgtgcatctcgtcggaggcatgggcaggctgggccatgcggtaaccccgtttgatggcattgtagaactgctcgttcatgggcagctctgggtaaggggtgccaccagagggaacgtacttatcgtaaggggccatgtagttggaggactctatgtctgcatatctgacgtctcctttcatgtccagcatgggcacatagtccaccgactcgtccttgctcatgtacat

SEQ ID NO: 29717 - DNA, 381 bp, Homo sapiens
  SIMILAR (268)..(194): 551254mologous to Trichogramma cacoeciae cytochrome P450,accession number AF207951,Smith-Waterman Score=73.
tcagaagagttccaagatcaaggagtattcaatggcagaacttcgatcttgtctcatcactgaatttctgttccagcttaacctagactcagggacttgtttatagcaatccaagaatggcttactaccgaaaattggtactgaggagtggggcattgctataatgataccgcattgctggcgggctgtgctcacgattcgccctgcgttccggtttatgacgatcagggtcgtctggttcacaccaatactcattgctccttcgcgataaacattgtcatcacatgtcatcgtcactagtgtcgatgacatcgtttttatctgagcagggtccaggccatgacgtctggcgatatcaacatattcatgttgaggaagcat

SEQ ID NO: 29718 - DNA, 1002 bp, Homo sapiens
  SIMILAR (726)..(313): 861254mologous to Escherichia coli thioredoxin reductase,accession number J03762,Smith-Waterman Score=586.
tcatgggaccactcggtgggccctcctccgtgccaggcctgtcaagacaaccctccggtccaggtggtccccacgcccgctccgctggtgccgcacttccaggtgcttgttctggaccttctcaaagtgctgcagcagctctgcgtagtcgatgctaggggagtcagctttctgggacttgggggctgcctttagactgtcttttattttccggtttatatttgttggaaatggaacggtaacaattttcccagggaaacagcttagcccgtttttgaatttggggctgggccggggattccttaagattgtttccagttccagctgcccttcgaaaatcgcagtattcgggctgtgaccgatagcaacaaacagaccggcaacgtcgagtgactcgatgttatcgctgttttgcgtatcgcgcagacgaacgccagtgacacccatttgatcgccggtcacttcttccagcgtacggttggtgtgcagaatgatgttgccgttctccactttatccatcaggcgcttaatgaggattttttccgcgcggaaaccgtcacggcggtgaatcagatgcacttccgaagcgatgttagacagatacagcgcctctttaacccgcggtattgccgccggccgatgacccgaacttttctggttgcgatagaagaaaccgtcgcaggttgcacaagcagaaacccccacggcctttaaaggcttcttgttgatatgatcaaaaatgatctcagtttcaaacttggtggcatgttcgtgcatgcgctccattaataacggaccggtcagatcgtttggatcgccaggccagttttccacttccgtggtggtggtcagttggccgcctttttccatgccggtaatcagcacaggttgcaggttggcgcgcgccgcgtagacagcagcggtgtatcccgccgggcctgcgcagagaggcaggctgcgtccaccaagggccggggtggaggatgttattagcgctgacat

SEQ ID NO: 29719 - DNA, 327 bp, Homo sapiens
  SIMILAR (24)..(200): 401254mologous to Homo sapiens low-voltage-activated calcium channel alpha13.2 subunit delta25B splice variant,accession number AF223563,Smith-Waterman Score=85.
atgaattcttacttttataagttcatgatcaaccttctcaagagattcagcagcgaacggaagctcctggagctccaagaagtagcagaagagtggcccaatgtcaccctcaacctggtgaaagctagagcagggcacaaattcctccagcttctacaccaaagccaggtggaggagatttatagagtagtccgtatggcccctaggtgctgtccaacggtggttttcaacccctgcagtgaggatcagagaccttactcaggggtcagcacggaggcactgacagggcttgagcaggggatcaacgtgactggatttctggcttga

SEQ ID NO: 29720 - DNA, 714 bp, Homo sapiens
  SIMILAR (226)..(711): 261254mologous to Pseudomonas aeruginosa translocation protein in type III secretion,accession number AE004596,Smith- Waterman Score=93.
atggtccttttgaagagcctgaatcaaggaggtccagatggttcctgtgactccagcttcagtagcggcatcagtgtcttcactgcagccagtctcggtgtagacgagatccccgctaattaccggttatccacatctcgtaaggttcaccagtcgcgtcgatcgcagagtaaccgcacattcactgaattcccgatgtcgcagagtgcccattctgcttggatcccagtaagcccatgcacattccgagctaatcgaactcgatatgtcccattccgctgtaccatctcagcatttccaatgacggatcccgaaatcccaatcacgttttcgtttgccccttaccgtacaacgaacgagattcgcgtcgcgaggcgcgcagtccacacccggattccagtcagggagccgaaacgcgacccgaatgcgtacagcgttcacgatgcggcatcgaagccgagtcgcattgagttgagttccagtatcgattatattcctaggcgatacgatcgccccccattaggccacgagcattccgtgcgatccagacagatcagagatccccctacgttcgcctccggtcgtcgggtcgatcggggaccacccgacgatcggagtggatcccatggaacactttcaaatccaggacagacggttcccccccccgatccatccgagaaagtgccagtcatagattccaatacgatgggatga

SEQ ID NO: 29721 - DNA, 2276 bp, Homo sapiens
  SIMILAR (164)..(835): 981254mologous to Homo sapiens unnamed protein product,accession number AK025479,Smith-Waterman Score=1128.
ggcacgaggcattaacctgctggattacctgccggagatcctggatggactcttccagatcctgggtgacaatggcaaagagattcgcaaaatgtgtgaggttgttcttggagaattcttaaaagaaattaagaagaacccctccagtgtgaagtttgctgagatggccaacatcctggtgatccactgccagacaacagatgacctcatccagctgacagccatgtgctggatgcgggagttcatccagctggcgggccgcgtcatgctgccttactcctccgggatcctgactgctgtcttgccctgcttggcctacgatgaccgcaagaaaagcatcaaagaagtggccaacgtgtgcaaccagagcctgatgaagctggtcacccccgaggacgacgagctggatgagctgagacctgggcagaggcaggcagagcccacccctgacgatgccctgccaaagcaggagggcacagccagtggaggtccagatggttcctgtgactccagcttcagtagcggcatcagtgtcttcactgcagccagcactgaaagagccccagtgacccttcacctcgacgggatcgtgcaggtcctaaactgccacctcagtgacacggccattgggatgatgaccaggattgcagttctcaagtggctctaccacctctacatcaaaactcctcggaagatgttccggcacacggacagcctctttcccatcctactgcagacgttatcggatgaatcggatgaggtgatcctgaaggacctggaggtgctggcagaaatcgcttcctcccccgcaggccagaacggatgacccaggcccccctcgatggccctgacctccaggccagccactcagagctccaggtgcccacccctggcagagccggcctactgaacacctctggtaccaaaggcttagaatgttctccttcaactcccaccatgaattcttacttttataagttcatgatcaaccttctcaagagattcagcagcgaacggaagctcctggaggtcagaggccctttcatcctcaggcaactgtgcctcctgctgaatgcggagaacatcttccactcaatggcagacatcctgctgcgggaggaggacctcaagttacgcctcgacgatggttccacgccctcaacaccatcctgctgacctccacagagctcttccagctaaggaaccagctgaaggacctgaagaccctggagagccagaacctgttctgctgcctgtaccgattcctggtgccacaacccagtcaccacggtgtccctctgcttcctcacccagaactaccggcacgcctatgacctcatccagaagtttggggacctggaggtcaccgtggacttcctcgcagaggtggacaagctggtgcagctgattgagtgccccatcttcacatatctgcgcctgcagctgctggacgtgaagaacaacccctacctgatcaaggccctctacgggctgctcatgctcctgccgcagagcagcgccttccagctgctctcgcaccggctccagtgcgtgcccaaccctgagctgctgcagaccgaagacagtctaaaggcagcccccaagtcccagaaagctgactcccctagcatcgactacgcagagctgctgcagcactttgagaaggtccagaacaagcacctgggaagtgccgtcccagcggagcgggcgtggggaccacctggaccggaggtctgtcctctgacaggcctggcacggaggaagggcccaccgagtggtcccatgaaacactaaggttcgtcacgctcctcccgaggagctcaaggacctgcctgtcaggaccagggctgggcctgccaacccagggcaagtgttgggggccggaaggctgctgtgtctgccccaagcttcctcttcagagtcccagtcccccaggcctcccagcgctgtcagctgcacccctggcatttcttcacagagcttggcttgcccacccagttggggggatatagcctcacgagaccactcatcctctggaatcaacctctttctaataccctcttggaaaaaagagcttgccccccctccagcacactagagctctggccttgtgtgtactatgtatccatacgtgaacacatgcctgtgtgtgtgtgtgtgtgtgtgtgtacttgtatgcacgtaggcaccagcacaaagatctgaatgatgcaccccacccccaccccaataaagaaataacagaaaaccctcaaaatattaaaaaaaaaaaaaaa

SEQ ID NO: 29722 - DNA, 2139 bp, Homo sapiens; identical to SEQ ID NO: 11167
  SIMILAR (883)..(1584): 881254mologous to Homo sapiens p40,accession number U93564,Smith-Waterman Score=1043.

SEQ ID NO: 29723 - DNA, 1587 bp, Homo sapiens; identical to SEQ ID NO: 2482
  SIMILAR (1090)..(1584): 901254mologous to Homo sapiens putative p150,accession number U93570,Smith-Waterman Score=795.

SEQ ID NO: 29724 - DNA, 743 bp, Homo sapiens
  SIMILAR (741)..(697): 1001254mologous to Homo sapiens putative p150,accession number U93563,Smith-Waterman Score=68.
ctttggtctttgatgatggtgacgtacagatgggcttttggtgtggttgtcctttctgtttgttagttttccttctaacagtcaggagcctcagctgcaggtctgttggagtttgctggaggtccactcgagaccttgtttgcctgggtatcagcagcggaggctgcagaaccgtgaatattgctgaacagcaaatgttgctgcctgattgttcctctggaatctttgtctcagaggggtacctggccgtgtgaggtgtcagtctgcccctactgggtggtgcctcccagttaggcttaggcagtatggccattttcatgatattgattcttcctatccatgagcatggaatgttcttcaatttgtttgtgtcctcttttattttgttgagcagttgtttgtagtcctccttgaagaggtccttcacatcccttgtaatttgggttcctaggtattttattctctttgaagcagttgtgaatgggagttcactcatgatttggatctctgtttgtctcttattgatgtataagaatgcttgtgatttttgtacattgattttgtatcctgagactttgctgaagttgcttatcagcttaaggagattttgggctgagatgatggggttttctaaatatacaatcatgttgtctgcaaacagggccaatttgacttcctcttttcctaattgaatatctttatttctttctcttgcctgattgccctggccagaacttccaaca

SEQ ID NO: 29725 - DNA, 863 bp, Homo sapiens
  SIMILAR (249)..(374): 281254mologous to Salmonella typhimurium ethanolamine ammonia -lyase (eutB),accession number J05518,Smith-Waterman Score=42.
cggacgcaaagcgtttcgtgaagcgctacaagcagagaactgtgacgcagtttcgacgctcaggggctggtaaaaagcgcggcgctggtgacgcgtctggccatggcgtaaagcatggcatggactggcaaaccgctcgcgaacctttagcagcctgttttacaatcatgcggcacataaataccattgacggcacttccagcatgatgccgatcgtggtttgggaatttcgtaaccgatcatctcctcgacttcacgtccggacgttcaatcaggcggcgtgcttcatcaacttcatcgaggcttgtgacctcggcaacagaatattcagcgcggatattcttgcagcagtaccgggttcgattggtcaagaattaccgggtacgatccacgataagcggcctcgatgcagcccggagcttgaatatcggccatcacgacgacgtgagtgcggtcgtggggcggctacaactctacgggccgcaagaaccaagggtagacgatggcaaggcacggtaactacgggctggcgcgtcattacgatccgtttacgtcaacaccgtggtcggctttattgggccggagtatctctacaacgacgccagattatccgtgctggcttagaagatcactttatgggcaagctgagggcatctctatgggctgtgactgctgttataccaaccacgctgacgctgccagaacctcaacgaaaacctgatgatcctgctcgccaccgcaggctgcactacatcatggggatgccgctgggtgatgacatcatgctcaactaccaaccaccgcattccacgataccgccactgtgcgtcagttactcaacctgccccgtcaccggagtttga

SEQ ID NO: 29726 - DNA, 1146 bp, Homo sapiens
  SIMILAR (1074)..(433): 991254mologous to Escherichia coli succinate dehydrogenase small subunit,accession number J01619,Smith-Waterman Score=1137.
tcacttggccactgtgcaaacagcctctcccaagttcaagcagtcctcaaagagctcaatcgccaagaacacgaagaagaagaacagtggacgcgcgcttatggcatagtacaaaggaatgccatcaaactgggctttcaatccgctcgccaggccttcgtacaaacgggtatagggcaagggcattgcacataccacgttgttgatatccacatgagtcagcaatgctttgttatccatctcgaccagataactgccattgcgcccacggcgttcaatccgtatcgctccgcttgattccagcgttttcaacgcggcctgcgtcaggccaacggatgaacggcattcatttgccagctcatctatggttttcaatcgattaccgcacttttcacccaacaaataacgggccagcgtcgtgatgacgacgccttgttgcaacaacatcgacttgatatggccgatggcgcgcgtcgggttcagccccttcggacatacactgacgcagttcatgatgctgtgacagcggaatacgctgaatgcatcactcaaaccgtcgaggcggctgtcagtctcggtatcacggctatcaatcaggaaacgatatgccgctaacaagcctgccgggccgataaacttatcgggattccaccagaaagacggacaagaggttgaacaacatgcgcagagaatacattcatacagcccgtcgagtttttcgcgctgctctggcatctgtaaatgctcgcgagctggcggattttgtccattattcaacaggtaaggcttaattttctcatattgcgcatagaattgtcccatgtctaccaccaaatcgcggatcaccggtaaacctggcagcgggcgaatcacaatcttcttgcccggctggttgagtgccgaaatcggggtaatacaggccagaccattcttgccgttcatgttcagaccgtcggaaccgcacacaccttcacggcaggagcggcggaacgacaggctgggatctttctcttttagctggataagcgcatccagcagcatcatgtcgcgaacttcatccgcttccagggtgtaacctgcataaccgagctcatcacatccggggatagcgagaatgggaactcgagtcccatatcggcgtcgcat

SEQ ID NO: 29727 - DNA, 834 bp, Homo sapiens
  SIMILAR (1)..(291): 1001254mologous to Escherichia coli K12 putative synthetase,accession number AE000181,Smith-Waterman Score=506.
atgccgattgtcagagtcggtgcgcgcttgctgtataactatctggttaaaggcggcgttcaggtttttgagtaccgccgccgcccgctccacggcaaagtggcattgatggacgatcactgggcgacagtagggtccagtaatctcgatccgctcagtttgtcactgaatctcgaagcaaatgtcatcatccacgatcgtcattttaaccagacgctgcgcgataatctgaacggcattattgccgcagattgtcagcaggtggatgaaaccatgctgcccaaacgcacctgcactattcacaatagcaaagagttggaaccaacccaaatgtccatcagtaacagactggataaagaaaatgtggcacataacactggcagttatgttggctacagtaaaagactccttctctctgcaaaaaagcagagaggcagaatgggcagttcaacagaactaagtaggggctttagccttttatgtcctaactttgaaaatcagattcaaggagaagggccaagagtactgggcaaaggaccaacctccccgaatcttgcccaaaacgaaaacaacgtgggtcctcccacctgtgtactggcgcacgtcaccacccagatcgaagcgatccgtcgtggcgcaccgggcgggctgattttccagagtatctgtggcagcgaaaaagggctgaaagagtttggcgtggagctggcgatgctcgacgaagcgcgcgcagtgggcgcggagttcaaccgtatcgccggggaaaactgcctctacttcgaaaccggacaaggctctgcgctatccgctggcgctaacttcggcgcagaccag

SEQ ID NO: 29728 - DNA, 548 bp, Homo sapiens
  SIMILAR (98)..(544): 971254mologous to Escherichia coli K12 ethanolamine ammonia- lyase, heavy chain,accession number AE000331,Smith-Waterman Score= 724.
aggtatcgggcgcgttcggcgtgatgaataccgggcgtgtttaggcaaccaccttacacgacaagggctgtcgatgaaacgggattgttagaatgctgtgaaaaatgccaatcatcgattcttcctgagggaacgacttatgaaactaaagaccacattgttcggcaatgtatatcagtttaaggatgtaaaagaggtgctggctaaagccaacgaactgcgttcgggggatgtgctggcgggcgtcgcagcggcaagctcacaggagcgcgtggcggcaaagcaggtgttgtcggaaatgaccgtagcggacatccgcaataatccggtgattgcctatgaagatgactgcgtgacgcggctgattcaggacgatgttaacgaaacggcctacaaccagattaaaaactggagcatcagcgaactgcgtgagtatgtgctgagcgatgaaaccagcgtggacgacattgcctttacccgcaaagggctgacctcggaagtggtcaagaaggtagcgaagatttgctccaacgcggacctgatcccgg

SEQ ID NO: 29729 - DNA, 2775 bp, Homo sapiens; identical to SEQ ID NO: 18084
  SIMILAR (2775)..(2092): 961254mologous to Escherichia coli methionyl-tRNA formyltransferase,accession number X63666,Smith-Waterman Score= 1122.

SEQ ID NO: 29730 - DNA, 1281 bp, Homo sapiens
  SIMILAR (244)..(876): 971254mologous to Escherichia coli NADH-dependent nitrite reductase (nirB) (AA 1-839),accession number X14202,Smith-Waterman Score=1051.
atggggctctttgccttcaaactgcatcattactcaagtgagagatcaaagaggagatgtgaccattctactcttcacactggtgttcctggtaataatgtttgtgatagcgataggatgtctagttgtaggaaaacaagtttcagggctcccagtgattctaccatatggtatgatgaatatcatcctgaggaggatctgcagcacacggccagtgactttgtggccaaagtggatgaccccaaattggctaattctgaggactgctttgtctatcgcactattgaagacctcaacgccattgaatcctgcgcccgtcgcagcaaacgcggtgccgttgttggtggcggcctgttaggtctggaagccgcaggcgcgctgaaaaacttaggtattgaaacccacgttatcgaatttgcccctatgctgatggcagaacagcttgatcagatgggcggcgagcagctgcgtcgcaaaatcgaaagtatgggcgtgcgcgttcacaccagcaaaaacacccttgagattgtgcaggaaggtgttgaagcgcgtaaaaccatgcgttttgccgacggcagcgaactggaagtcgactttatcgtcttctctaccggtatccgtccgcgcgataagctggcaacccagtgtggtctggacgttgctccgcgtgggggtattgtcattaatgattcctgccagacttccgatccggatatctacgccatcggtgaatgcgcaagctggaacaaccgtgtatttggtctggtagcacctggctacaaaatggcgcaggtcgccgttgaccatattctcggtagcgaaaacgcctttgaaggtgctgaccttagcgccaagctgaaactgctgggcgtagacaacaataaaccgagaataaagcccaacaagactaacagcggaaaccgcgactggatccagcgagagccacggggcagcaacatttgcaggcccgcaccaaacagtagcgcaaaaagcgagaggaatttcacctggccgacgagatcaagaaatgcccaagtccatgcatcccgcggcgtaatagcaccgtaccaggcgggagagagacaagccgccagcggaaggccaaaggcgcggatgagaaagagcaggaccccgagaacggcgacgccgcgaacaaaatggagcgagacgatgcgctccacggaacctgccatggagccagatgagatgacgcacagcgcgcagaaactcgtggcgcgtaacctgactgggtttgaacgacccaccaagagaggacgttga

SEQ ID NO: 29731 - DNA, 2019 bp, Homo sapiens
  SIMILAR (564)..(611): 871254mologous to Escherichia coli K12 uroporphyrinogen III methylase; sirohaeme biosynthesis,accession number AE000412,Smith- Waterman Score=77.
atggataaattcctgggcacctacaccctcccaagactaaaccaggaagaacttgaatccctgaatagaccaataacaggctctgaaattgaggcaataattaatagcttaccaaccaaaaaaactccaggaccagatggattcacagctgaattctaccagaggtacaaggaggagctggcttccgaggcaatcgggcagtctcagtcttcagctgctaagccgagaagatctgggaagaagtcagagaaccttgggccagagttccaggggctctgggagtggctgccaggaaaccagcgtagtgagctcagtagccgtggtgtgtcgctatggataaccagccgtagtgactcagtagcgtggtgtgtccgtaggataacacgtcgtagtgactcagtagcgtgggagtgggccggtgattacggcgatggatacatagtgaccctccgtcaattgacatctgggtctgacccaattgtgcgggccacaactgtggacacggcgtctgtgacaagtcatacacctgggtgttggtgggaatatggcgagccacgaactggcagtgccttctcgacacctgctggctggcgattgcagcgacggatgactgacgcgcttaaccagcgcgtcagcgaagccgctgaagctcgtcgcatcttctgtaacgtggtcgatgcgccgaaagccgccagctttattatgccgtcgattattgaccgctcaccgctcatggtagcggtctcctctggcggcacctctccggttctggcacgcctgttgcgcgaaaaacttgaatcactgctgccgttacatctgggccaggtagcgaaatacgccgggcaattacgcgggcgagtgaaacaacagttcgccacgatgggtgagcgtcgccgtttctgggagaaattgttcgttaacgaccgcctggcgcagtcgctggcaaacaacgatcagaaagccattactgaaacgaccgaacagttaatcaacgaaccgctcgaccatcgcggtgaagtggtgctggttggtgcaggtccgggcgatgccgggctgctgacactgaaaggactgcaacaaattcagcaggcagatgtggtggtctacgaccgtctggtttctgacgatattatgaatctggtacgccgcgatgcggaccgtgttttcgtcggcaaacgcgcgggataccactgcgtaccccaggaagagattaaccagatcctgctgcgggaagcgcaaaaaggcaaacgcgtggtgcggctgaaaggtggcgatccgtttatttttggccgtggtggcgaagagctggaaacactgtgcaacgcgggtattccgttctcggtggttccggccgcgtacggcaaatacggttcagcttttcaggccataataccacgtctttaccctgagcttctgacattcacgggtacagccggagacaccgaacttcattttgtgcggcgtacggatgcctttgtagcggttttccagttccacgccgaggccgacgctgtcgccaacgccgtagcggcaccaggtgctacccacgcaggttttcgccatacgcagtgctttcgcataggcatgaccggtttcgaagccggcttcaatcagctgacgccagatctccggcagatcgtctttctgtgcgccaaacatcgccagacgctgggagccagtgatcttggtgtagagattaaattcacgcgcgatacgacctaccgccatcagcccttccggggtgatttcaccgcccggagaacgcgggatcaccgagtaggtgccgtctttctggatgttagcgaggaagttgtcgttagaatcctgcagcggagtatgttccggcttcagaatgtattcgttccagcaggaggccagcagcgaaccgacggttggtttacaaacttcacaaccgtagcctttgccgtgtttcgccagcagttcttcgaaggttttaatgccttcaacgcggatcaaatggaacagttcctgacgcgaataagcaaagtgttcgcacag

SEQ ID NO: 29732 - DNA, 1911 bp, Homo sapiens
  SIMILAR (1911)..(1081): 1001254mologous to Escherichia coli succinate dehydrogenase large subunit,accession number J01619,Smith-Waterman Score=1447.
tcagatccatctggtgacccggaccggtagcgtaagactgcaggacttaactgcgtcacttggttcaggtcggagatcttgaagagtaacgtgaagcgtctttcgccagacgccggaatattcacgcgtctgagagtggaattgatccgctttgactcccgtaccaggtaactgctggaacgtcgaacgccagttagcgtcaaccgagtcaggatcggttaagaagtcttcatagagctgttctatccagctttcgccgtggatactaccacgcacagtgatgtgcgtgccggggttcacttgcgagctcttgtctacgtagtggctcgcgaaggaacctttaaaaactgtcttagtgtcaggggcagtttttaaagatttcctgcatttctttgttacgcctgatgcgctgcgcttatcaggcctacgggtaatgagttgcaacaacatcgacttgatatggccgatggcgcgcgtcgggttcagccccttcggacatacactgacgcagttcatgatgctgtgacagcggaatacgctgaatgcatcactcaaaccgtcgaggcggctgtcagtctcggtatcacggctatcaatcaggaaacgatatgccgctaacaagcctgccgggccgataaacttatcgggattccaccagaaagacggacaagaggttgaacaacatgcgcagagaatacattcatacagcccgtcgagtttttcgcgctgctctggcatctgtaaatgctcgcgagctggcggattttgtccattattcaacaggtaaggcttaattttctcatattgcgcatagaattgtcccatgtctaccaccaaatcgcggatcaccggtaaacctggcagcgggcgaatcacaatcttcttgcccggctggttgagtgccgaaatcggggtaatacaggccagaccattcttgccgttcatgttcagaccgtcggaaccgcacacaccttcacggcaggagcggcggaacgacaggctgggatctttctcttttagctggataagcgcatccagcagcatcatgtcgcgaccttcatccgcttccagggtgtaatcgcttcggcgcgtcatggattccgactctggcagatacagggagtggcacagccagttttcatcatcacgatccgggaagtcgaagcggctatgcgcgccacggctttcggtacggaagttggcagaaacagccgttgcatacgccgtttccatcaggttatccagttccaggcactcaacgcgctgggtgttgaactcgctggaagtgtcatccagacgggcatttttcagacgctcgcggatcactttcaactgctcaagccctttcgccatcgcatcaccttcacggaagaccgagaagttatgctgcatacattcttgcagcgctttacggatcgccaccggatcttcaccgttacgattattgttccagcggttcaggcgatccagagacgcttcaacatcagactcgctggcatcgcgcagtgcgccctgctcggcgatagactcttgcagatgcagacctgccgcgcgaccaaagaccaccaggtccagcagcgagttgccgcccagacggttagcgccgtgtaccgatacacaagcgatttcaccaacggcaaacagtcccggaacaaccacatcttcgcctttctcattcacagtcagtgcctgaccggtaactttggtcggaataccgcccatcatgtagtgacaggttgggataaccggaatcggctctttcaccggatcgacgtgagcgaaggtacgggaaagctccaggatacccggcagacgggattcgagaacttctttacccaggtgatcgagtttcagtttcgcgtgtggcccccacggaccatcacagccgcgaccttcacggatttcgatcat

SEQ ID NO: 29733 - DNA, 652 bp, Homo sapiens
  SIMILAR (166)..(390): 731254mologous to Homo sapiens Human secreted protein HLYES38, SEQ ID NO:220,accession number Y86305,Smith-Waterman Score =286.
ttcatttcattcatttgatcttcaatcactgatactctttctcctagttgatcgaatcggctactgaagcttatgcattcatcacgtagttcttgtgtcatgtttttcagctccatcaggtcatttaaggacttctctttagtctttgatgatggtgacgtacagatgggattttggtgtggatgtcctttctgtttgttaagttttcctttctaacagtcaggaccctcagctgcaaggtctgttggagtttgctggaggtccactccagaccctgtttgcctgggtgtcagcagcagaggctgccaaacagtgaatattgctgaacagcaaatgttgctgcctgatcgttcctctggaagttttgtctcagaggggtacccggccgtgtgaggtgtcagtctgccccctactcaggggtgcctcccagttaggctactcggggttcagggacccacttgaggagacagtctgtccattctcagatctcaaactctgtgctgggagaaccactactctcttcaaagctgacagacagggacatttaagtctgcagaggtttcttctgccttttgttcagctaggtcctgcccccagaggtggagtctacagaggcaggcagccctccttgagctgcggtggctccacccag

SEQ ID NO: 29734 - DNA, 1656 bp, Homo sapiens
  SIMILAR (1233)..(721): 981254mologous to Escherichia coli KbaZ,accession number AF228498,Smith-Waterman Score=880.
tgcgacatcgggtttcacgccagtagtaatggcaaacgccgtgccgacgatagtaccgataatcacgttaggcggctgtgcgcccgccagcggggccagccccatccacaccagttccagcgtaccgccggttaaaattccggtatgcagatcgccaagtaccagcccgaccaacgggccgaggaccaccgggcggtgcatatgggttaggccgttaaacatatccaggccagcgataaaggcgataatgcccaacgcaaatgccccagcggttttcaggtcgttaaatgctgcgatatcgcccgcatccacagaaaccgttatggcgatttgttgtttgccattggcgtagtgcatatagccaacgttaatgcgattcaccggaacgccacctttcaccagcgtcaggaaatcggcgggtgttttacaaaccagcaggattttctgtcgatcggcggcgcgatgaatgttgtcgataactttttgcagcgtccagaaacgtacggcgatcccttctgccagtaccatttccatcaggttttgttgtaccggatcttcggcaacctcatcgttggctaccagcaccagatttgcccccgcaaatccgacccattgaacgccgacctgaccgtgaatcaagcgttcatcaatccggcttaaaacaatatttggcatagcgtgttcctctttgttttgcttattggccttcacaggctgtgtggtatgcgccaggatgtcctgaatatggttgataatgagttcccgtggcgttggctgcagctcgccggagcgaactttcacgtactgcagcggcagatactggctgatcagcggcagcggaattggtgaatccgccagattacgtaccagatgagcgaaagcgtcatcaatctggctgtccggccagtaatagcgcacgcgatccgagtagctataaccacgcgccagacgacgcgcgttgccgtcaccgtggtagtggctttgccagtattccgggcggtcgagcatcacgtcttccagcacctgacgcagaccagaacaggctttcgctggcaccagttcttcttcaatcgccgccagagagaacagagcttcacgcagggcgaaggtcagcgctgggccaactttcagaatggcaaagtggtcaatcaccagctggcgcagcgattgcggcgtttgataatcggtagagtgcgcttcgaaaatcagcgtttcgtagttttcgaccatctggggctccagcaatgtcataaaccgctcgtgggcatcgcgacagtgcataaataccggcatgtttaaatctgcgccaatgcgtagctgggcaacaaaagcgcgttcttgctcttccggcgtcgaaaagttgcggttaaagtcgagaccacattcaccaatcgccaccacttctggctgcgcggccagctcaataatcgcttcttcagtcgcagcttgccactggctgctgtcgtgagaatgtacgcccgccgttgaccaacaggacgaatactgacgcgccagcttttgcgcctgctggctttcacgcaggttagtgccggtgatgagtagcccattaactcccgcgtcaaaagcgcacgctacaacatcatcacggtctttcgcaaattgcgaactggtcaaattaacgccgatatcaaacat

SEQ ID NO: 29735 - DNA, 3662 bp, Homo sapiens
  SIMILAR (2472)..(3659): 1001254mologous to Escherichia coli ETHANOLAMINE AMMONIA- LYASE HEAVY CHAIN (EC 4.3.1.7) (FRAGMENT),accession number D90873,Smith-Waterman Score=2058.
ggtcggaatccatgacgcgccgaagcgtcaacatgaacccgaaactgcgcccggcattcccgccgaagattcgtccttactaatgcggagacaggaaaatgagactcgagttttcaatttatcgctataacccggatgttgatgatgctccgcgtatgcaggattacaccctggaagcggatgaaggtcgcgacatgatgctgctggatgcgcttatccagctaaaagagaaagatcccagcctgtcgttccgccgctcctgccgtgaaggtgtgtgcggttccgacggtctgaacatgaacggcaagaatggtctggcctgtattcccccgatttcggcactcaaccagccgggcaagaagattgtgattcgcccgctgccagagcacaagcagagtgacgtcgaagcaggagcagatttgcgcgctgtccggcagtttatcaaccccgatagacggcttgccgctacccgagtgtgctggcaggatcagggaatccgggttttccggcagttcgatagcgttcagcaccagttgcagcaggttaccgtagtcgctggtatcgcccaccagtaccgcaccgagcagggttttgttgtcttcgctgacaatcaggcgtttgtagatctctttactttcgtcgaggtaaacgtagctacgtgcgccaggcgtgcgaccgtgcgcatcaccaataccgcctacgtctacgcccagcagtttcagcttggcgctaaggtcagcaccttcaaaggcgttttcgctaccgagaatatggtcaacggcgacctgcgccattttgtagccaggtgctaccagaccaaatacacggttgttccagcttgcgcattcaccgatggcgtagatatccggatcggaagtctggcaggaatcattaatgacaatacccccacgcggagcaacgtccagaccacactgggttgccagcttatcgcgcggacggataccggtagagaagacgataaagtcgacttccagttcgctgccgtcggcaaaacgcatggttttacgcgcttcaacaccttcctgcacaatctcaagggtgtttttgctgaagggatcgccgtacgtatctggacgctgcaaaaagttatcgacaacattcatcgcgccgccgatcgacagaaaatcctgctggtttgtaaaacacccgccgatttcctgacgctggtgaaaggtggcgttccggtgaatcgcattaacgttggcaatatgcactacgccaatggcaaacaacaaatcgccaaaacggtttctgtggatgcgggcgatatcgcagcatttaacgacctgaaaaccgctgggttcaccgcatgggcagatgcaggcatgttaaccctcgtcgaagggccatttgatgaaagccttctcgacacctgctggctggcgattgcagcgacggatgatgacgcgcttaaccagcgcgtcagcgaagccgctgaagctcgtcgcatcttctgtaacgtggtcgatgcgccgaaagccgccagctttattatgccgtcgattattgaccgctcaccgctcatggtagcggtctcctctggcggcacctctccggttctggcacgcctgttgcgcgaaaaacttgaatcactgctgccgttacatctgggccaggtagcgaaatacgccgggcaatgcgctttagagcgcatctcgagtgaatgtgagcctaactgggaggaaccccccagtaggggcagactgacacctcacatggccgggtacccctctgatttagagtcatcgccaactaacctcgtagccgacccggtaacgcagtatatgcagccgccggaaggcgcgggacagacgattgagcccgcgcgtcaggcgatggtctggacgctgtttcactacggcttaaccggctggtcgatgtatgcgctgatgggcatggcgctcggatactttagctatcgttataatttgccgctcaccatccgctcggcgctgtacccgatcttcggtaaacggattaacgggccgataggtcactcagtggatattgcagcggtgatcggcactatcttcggtattgccactacgctcggtatcggtgtggtgcagcttaactatggcttgagcgtactgtttgatattcccgattcgatggcggcgaaagcggcactgatcgccttgtcggtgataatcgccacgatctctgtcacctccggtgtcgataagggcattcgcgtgttatcggagcttaatgtcgcgctggcgctgggattgatcctgttcgtattgtttatgggcgacacttcgttcctgcttaatgcactggtgctgaatgttggcgactatgtgaatcgctttatgggcatgacgctcaacagttttgccttcgaccgtccggttgagtggatgaataactggacgctcttcttctgggcatggtgggtggcatggtcgccgtttgtcggcttgttcctggcgcgtatctcgccggacatccgcaataatccggtgattgcctatgaagatgactgcgtgacgcggctgattcaggacgatgttaacgaaacggcctacaaccagattaaaaactggagcatcagcgaactgcgtgagtatgtgctgagcgatgaaaccagcgtggacgacattgcctttacccgcaaagggctgacctcggaagtggtcgcggcggtagcgaagatttgctccaacgcggacctgatctacggcgcgaagaaaatgccggtaatcaaaaaggccaataccaccatcggtattccgggcacctttagcgcccgtttgcagccaaatgacacccgtgacgacgtgcaaagtatcgccgcgcaaatctacgaagggctttccttcggggtgggcgatgcggtgatcggcgttaacccggtgactgacgacgtggaaaacttaagccgcgtgttggataccatctatggcgtgatcgacaaattcaacatcccaactcagggctgtgtactggcgcacgtcaccacccagatcgaagcgatccgtcgtggcgcaccgggcgggctgattttccagagtatctgtggcagcgaaaaagggctgaaagagtttggcgtggagctggcgatgctcgacgaagcgcgcgcagtgggcgcggagttcaaccgtatcgccggggaaaactgcctctacttcgaaaccggacaaggctctgcgctatccgctggcgctaacttcggcgcagaccaggtaacgatggaagcacgtaactacgggctggcgcgtcattacgatccgtttatcgtcaacaccgtggtcggctttattgggccggagtatctctacaacgaccgccagattatccgtgctggcttagaagatcactttatgggcaagctgagcggcatctctatgggctgtgactgctgttataccaaccacgctgacgctgaccagaacctcaacgaaaacctgatgatcctgctcgccaccgcaggctgcaactacatcatggggatgccgctgggtgatgacatcatgctcaactaccagaccaccgcattccacgataccgccactgtgcgtcagttactcaacctgcgcccgtcaccggagtttgaacgctggctggaaagcatgggcattatggcaaacggtcgcctgaccaaacgggcgggcgatccgtcactgttcttctga

SEQ ID NO: 29736 - DNA, 1230 bp, Homo sapiens
  SIMILAR (1)..(615): 1001254mologous to Escherichia coli Mannose-1-phosphate guanylyltransferase (GDP) (EC 2.7.7.22) (GDP- Mannose pyrophosphorylase) (GMP),accession number D90843,Smith-Waterman Score=1087.
atggatgcgggctggagcgatgttggctcctggtcttcattatgggagatcagcgcccacaccgccgagggcaacgtttgccacggcgatgtgattaatcacaaaactgaaaacagctatgtgtatgctgaatctggcctggtcaccaccgtcggggtgaaagatctggtagtggtgcagaccaaagatgcggtgctgattgccgaccgtaacgcggtacaggatgtgaaaaaagtggtcgagcagatcaaagccgatggtcgccatgagcatcgggtgcatcgcgaagtgtatcgtccgtggggcaaatatgactctatcgacgcgggcgaccgctaccaggtgaaacgcatcaccgtgaaaccgggcgagggcttgtcggtacagatgcaccatcaccgcgcggaacactgggtggttgtcgcgggaacggcaaaagtcaccattgatggtgatatcaaactgcttggtgaaaacgagtccatttatattccgctgggggcgacgcattgcctggaaaacccggggaaaattccgctcgatttaattgaagtgcgctccggctcttatctcgaagaggatgatgtggtgcgtttcgcggatcgctacggacggggtaacgatatgaaaaaattaacctgctttaaagcctatgatattcgcgggaaattaggcgaagaactgaatgaagatatcgcctggcgcattggtcgcgcctatggcgaatttctcaaaccgaaaaccattgtgttaggcggtgatgtccgcctcaccagcgaaaccttaaaactggcgctggcgaaaggtttacaggatgcgggcgttgacgtgctggatattggtatgtccggcaccgaagagatctatttcgccacgttccatctcggcgtggatggcggcattgaagttaccgccagccataatccgatggattataacggcatgaagctggttcgcgagggggctcgcccgatcagcggagataccggactgcgcgacgtccagcgtctggctgaagccaacgactttcctcccgtcgatgaaaccaaacgcggtcgctatcagcaaatcaacctgcgtgacgcttacgttgatcacctgttcggttatatcaatgtcaaaaacctcacgccgctcaagctggtgatcaactccgggaacggcgcagcgggtccggtggtgacgccattgaagcccgctttaaagccctcggcgcgcccgtggaattaa

SEQ ID NO: 29737 - DNA, 1401 bp, Homo sapiens; identical to SEQ ID NO: 9281
  SIMILAR (685)..(1389): 971254mologous to Escherichia coli Mannose-1-phosphate guanylyltransferase (GDP) (EC 2.7.7.22) (GDP- Mannose pyrophosphorylase) (GMP),accession number D90843,Smith-Waterman Score=1215.

SEQ ID NO: 29738 - DNA, 1862 bp, Homo sapiens
  SIMILAR (492)..(1859): 961254mologous to Escherichia coli Phosphomannomutase (EC 5.4.2.8) (PMM),accession number D90843,Smith-Waterman Score=2298.
  misc_feature (1)...(1862): n = a,t,c or g
ggggggagcggatggggcgctcggtagcttcaggatggatcagacacgggcctcggtatgcttggagggacaacatgtttcggannnnnnnnnncgcaccgaagttatatacccggcgtgggggcggcgttgtctgggaggggaaaggcaatgaggagtgatgacatctcccgggcgaaacccacgggttgtttggggcgcggaaagagaccgatccaggtgaccccgggggggtggggaaagcgagtcccataattttccccgggggtaatgcagagctggaaaaacccggagaaatttccgctcgatttaatggaagtgcgctccggctcttatctgaaagaggatgatgtggtgcgtttcgcggatcgttacgaacgggtgtaaacgtcgcatcaggcaatgaatgcgaaaccgcggtgtaaataacgacaaaaataaaattggccgcttcggtcagggccaattattgcctgaaaaagggtaacgatatgaaaaaattaacctgctttaaagcctatgatattcgcgggaaattaggcgaagaactgaatgaagatatcgcctggcgcattggtcgcgcctatggcgaatttctcaaaccgaaaaccattgtgttaggcggtgatgtccgcctcaccagcgaaaccttaaaactggcgctggcgaaaggtttacaggatgcgggcgttgacgtgctggatattggtatgtccggcaccgaagagatctatttcgccacgttccatctcggcgtggattgttgcattgaagttaccgccagccataatgcgagggattataacggcatgaagctggttcgcgagggggctcgcccgatcagcggagataccggactgcgcgacgtccagcgtctggctgaagccaacgactttcctcccgtcgatgaaaccaaacgcggtcgctatcagcaaatcaacctgcgtgacgcttacgttgatcccatgttcggttatatcaatgtcagaaacctcgctccgatcaaggtggtgatcaactccgggaacggcacagcgggtccggtggtgcacaccattgaagaccgctttaaagccctcggcgcgcccgtggaattaatcaaagtgcacaacacgccggacgccaatttccccaacggtattcctaacccactactgccggaatgccgcgacgacacccgcaatgcggtcatcaaacacggcgcggatatgggcattgcttttgatggcgattttgaccgctgtttcctgtttgacgaaaaagggcagtttattgagggctactacattgtcggcctgttggcagaagcattcctcgaaaaaaatcccggcgcgaagatcatccacgatccacgtctctcctggaacaccgttgatgtggtgactgccgcaggtggcacgccggtaatgtcgaaaaccggacacgcctttattaaagaacgtatgcgcaaggaagacgccatctatggtggcgaaatgagcgcccaccattacttccgtgatttcgcttactgcgacagcggcatgatcccgtggctgctggtcgccgaactggtgtgcctgaaagataaaacgctgggcgaactggtacgcgaccggatggcggcgtttccggcaagcggtgagatcaacagcaaactggcgcaacccgttgaggcgattaaccgcgtggaacagcattttagccgtgaggcgctggcggtggatcgcaccgatggcatcagcatgacctttgccgactggcgctttaacctgcgcacctccaataccgaaccggtggtgcgcctgaatgtggaatcgcgcggtgatgtgccgctgatggaagcgcgaacgcgaactctgctgacgttgctgaacgagtaa

SEQ ID NO: 29739 - DNA, 1828 bp, Homo sapiens
  SIMILAR (625)..(804): 681254mologous to Salmonella enterica subsp. indica GDP- mannose pyrophosphorylase,accession number AY012199,Smith-Waterman Score=208.
ttaacctaaatgctcgccgccgcacacgccgtgcacttctgcggtgacgtagctcgactcctgacttgccagataaacatatacaggggccagttccgccggttgccccgcacgtttcatcggcgtttgctgaccaaactgcgggatcttatcctgcgtttgtccgccggaaatttgcagtgctgtccagatcgggcctggcgcgacaatattcacccgaatacctttctccgcgacctgttttgccaagccacggctgtagttcagaatcgccgccttcgtagccgcatagtccagtaaatgcggacttggctggtatgcctggattgacgaagtggtgatgatacttgcacctttcggtagcagggggatcgcttcctgggttagccagaacagcgcgaaaacgttaatggcaaaggtcttttgaaactgttcgctggtgaggtctgcaatatccggaatggcaacctgtttcccggcgaccagcgccataatatccagcccgcctaacgccttgtgcgcttcgtgaaccagcgaacgggcaaatttctcatcgcttaaatcgcctggcagcagaacggtctgggtcgcatcttcaagatcttttccatctgaggggttttcatgctgcaaaccaccatctgccgcctgaacggcgtggagtgcgaaagcccggtggtgatttgcaatgagcagcaccgctttattgtcgcggaacagctgcgtcaactgaacaaacttaccgagaacattattctcgaaccggcagggcgaaacacggcacctgccattgcgctggcggcgtccctctcctccgtccaggtcatccgcgaaacgcaccacatcattttcttcgagataagagccggagcgcacgtcaattaaatcgagcggaattttccccgggttttccaggcaatgcgtcgcccccagcggaatataaatggacgtcgttttcaccaagcagtttgatatcaccatcaatggtgacttttgccgttcccgcgacaaccacccagtgttccgcgcggtgatggtgcatctgtaccgacaagccctcgcccggtttcacggtgatgcgtttcacctggtagcggtcgcccgcgtcgatagagtcatatttgccccacggacgatacacttcgcgatgcacccgatgctcatggcgaccatcggctttgatctgctcgaccacttttttcacatcctgtaccgcgttacggtcggcaatcagcaccgcatctttggtctgcaccactaccagatctttcaccccgacggtggtgaccaggccagattcagcatacacatagctgttttcagttttgtgattaatcacatcgccgtggcaaacgttgccctcggcggtgtgggcgctgatctcccataatgaagaccaggagccaacatcgctccaagcccgcatccatcggcaccacaacagcatctgccgtacgttccatgaccgcgtaatccaccgactcttccgggcaggcgagaaacgcttcttctcacgcgaatacattgagatccggatcgaggggccatcgctttccccgggcagcgtcgcagccagttttgccgcccggcgtttttcttccaccaggcgggatttttgatcgcttaacaggtaatggctggcactgcgcggttccagaacaatatagccgccgagcaaaacgacgggcgcactgtggttgttcagatcgcgacgaatcgtcatctccgaaaccccaagcagggcggcggcgtctttaagatgtaacttatcgctgcgttttaattcttgcagcagctgcccgatacgctcttcgcgacgtgtttccat

SEQ ID NO: 29740 - DNA, 2058 bp, Homo sapiens
  SIMILAR (586)..(1428): 981254mologous to Escherichia coli K12 putative transport system permease protein,accession number AE000305,Smith-Waterman Score=1366.
atgcctgtgatgcctgaaatggatgttgatgttggtgggctgggactacagtggactgcacgctgtatgaatgcccacatctgttggggagctctggaggcagcggcgatttttagcccggtcatcgcaccgctcgccgccgcttcgataaagctttttggcggcgtttcgctggaacgacagattttcaaatgtgacctgcgaaggctcggttgccgggctaagaatacgtgcaaacaaaatcccgcccagggatcgccatcagcgatgccgctaacaggtagtcaattggtacgcccattccggcataaccaattcatcatcgaaccagcaatggacgccatcccggtaccaaattgcggtaaacaactcgttgcgattcatgcgatcgataaacggtttaacgatcgccgggatctcattttgcccgaggaaaatagtagtaaccgcaacaaaagattcgattttgctgatgttgagggctttctggaaaatgctgccaaggatgcgaatcagcagccccatcacgccaatgtagtacagcagactgatgagcgcagtaacgaaaataatcgccggaagtggggatcctctagaaaagcattaaatatcagcaagatcgagtcattcgtcgcggtcaccaccattttcctcgggcaaaacgaaattccggcaatcgtcaaaccctttatcgatcgtctgaatcgcaatgaattatttacagcgatttgtagtggcatggcctcgattgctggttcgacaatgattggttacgccgcactgggcgtgcctgtggaatatctgctggcggcatcattaatggcgatccctggcgggatcttgtttgcccgcctgttaagcccggcaacggaatcttcgcaggtttcctttaataacctctctttcaccgaaacaccgccaaaaagcattattgaagccgctgcgacaggggcaatgaccgggctgaaaatcgccgcaggtgtggcaacagtggtgatggcatttgttgcaataattgcgttgattaacggtattatcggcggcgttggtggctggtttggttttgaacatgcctcgctggagtccattttaggttacctgctggctccactggcgtgggtgatgggtgtggactggagtgatgcgaatcttgccgggagtttgattggacagaaactggcaataaatgaatttgtcgcttatctcaatttctcaccctatctgcaaacggctggcactctcgatgctaaaactgtggcgattatttccttcgcgttgtgcggtttcgctaactttggttctatcggggtggtggtgggggcgttttctgcggttgcgccacaccgtgcgccggaaatcgcccagcttggtttacgggcgctggcggcggcgacgctttccaacttgatgagtgcgaccattgccggctcggtaccgcatattatggatttaatgcgcaaaggccggattaaaggcaaaggttacattctcaccgagcaggaatactgcgtagtggtggggacaatcaatatggatattcgcgggatggcggatatccgttacccgcaatcggcttctcatcccggtacaattcattgctcagcgggcggcgtgggacgcaacatcgcccacaatctggcgctgttaggccgtgacgtccatttgctttcagtgattggcgatgacttttatggcgaaatgctcctggaagaaacgcgccgtgccggcgtgaatgtctccggctgcgttcgtttgcatggtcaaagcacatcgacgtatctggcaattgccaatcgagacgatcaaaccgtgctggcgattaacgatacccatctgctggaacagttgacaccgcaactactgaacgggtcgcgcgatttacttcgtcatgcgggcgtggtactggctgattgcaacctgacagccgaggcgctggaatgggtctttaccctcgctgatgaaatcccggtgtttgtcgataccgtttcagaattcaaagcgggcaaaatcaaacactggctggcgcattggactctagaggatccctcctccgtatga

SEQ ID NO: 29741 - DNA, 2047 bp, Homo sapiens
  SIMILAR (1255)..(2046): 971254mologous to Escherichia coli enterochelin esterase,accession number J04216,Smith-Waterman Score=1392.
atggagttggggaagggatatgattgcagtgtgaggtcgcctctagaggatccccgtcactaccgctttggcgcttccagcctgctggcaagcctgctgaaagcgctgggtcacggcgacgaaattattcgtaaaaaacgtgatggtcatgcgctgagcgatgaagaaattcgtttctttatcaacggtattcgcgacaacactatctccgaagggcagattgccgccctcgcgatgaccattttcttccacgatatgacaatgcctgagcgtgtctcgctgaccatggcgatgcgagattcaggaaccgttctcgactggaaaagcctgcatctgaatggcccgattgttgataaacactccaccggtggcgtcggcgatgtgacttcgctgatgttggggccgatggtcgcagcctgcggcggctatattccgatgatctctggtcgcgggcttagtcatactggcgtcgccattattagccgttccagcgatccgcgtgctgatgtcgattatctgtttgcgcaggtaatcgttcatgagcaacgtgtcgataccacgcctaactgcggcaatatgctgtctggtgttggggcattcgccattgaaaatggtttgattgcagcgacttcgccagttactcgcgtacgtatccgcaacgtcaatacgggtacgttcatcgaagctgatgtgcaaacgccaaatggtgttgtcgagtacgagggtagcgccagaattgacggcgtaccgggtactgccgcaccggttgcgctcactttcctgaatgccgctggaaccaaaaccggaaaagttttcccgactgataatcagattgattattttgacgatgtcccggtgacctgtatcgatatggcgatgccagtcgtcattattccggctgaatatctgggaaaaacaggttatgaattaccggcggaactggatgccgacaaagcattattagcccgcattgaatctatccgtctacaagcgggtaaagcaatgggcttaggtgatgtcagtaatatggttatccctaaacctgtgcttatttctccagcgcagaaaggcggggcaattaatgtgcgttattttatgccgcattcttgccatcgcgcgctggcgataaccggtgctattgctatttccagtagttgtgcattggaaggcaccgtcacccgacaaatcgtcccttctgtaggatacggcaatatcaatattgaacggggatcctctagagtagactctccatgcaaatactcgttgattaaccgtgtatgggtctacatcactggtgtgaccgatcaccatcagaacagccagccccagtcgatgcagcgaattgcaggcactaacgtctggcagtggacgacacaactcaatgccaactggcgcggcagctactgctttattcccaccgaacgcgatgacattttttctgtaccatcccccgatcgcctcgaattgcgcgaaggctggcgaaaactattaccccaggcgatagccgatccgctgaacctacaaagctggaaaggcgggcgagggcacgctgtttctgcactcgaaatgccgcaagcgcctctgcaaccgggatgggattgtccgcaagcgccagaaatacctgccaaagaaattatctggaaaagtgaacggttgaaaaagtcacggcgtgtatggatttttaccaccggcgatgcaacagcagaagaacgcccgctggcagttttgctcgatggcgaattttgggcgcaaagtatgcccgtctggccagtgctgacttcgctgaaccatcgtcagcaactttcttccgccgtgtatgtgttgatcgacgctttcgacaccacgcaccgggcccacgaactgccgtgtaatgcggatttctggctcgcagtacagcaagagttattacccctggtgaaagctattgccccttttagcgatcgtgccgatcgcaccgtggttgccgggcagagttttggtgggctttccgcgctgtatgccggactgcactggcctgaacgctttggctgtgtattaagccagtcaa

SEQ ID NO: 29742 - DNA, 1519 bp, Homo sapiens
  SIMILAR (520)..(1293): 951254mologous to Escherichia coli enterochelin esterase,accession number J04216,Smith-Waterman Score=1296.
atggagcggggcggggcgcagcggggcggggcgggcctggagctgcacctgcttctgggcggacgcaattggcgcgcggcgcgggctgcagacggctgcgaggcgctgggcacagaatgtacagcaccaacggtgaaccctaatgtcaactatgtcaataaaggttcatcagttgcaacaaataggccattttggccacctttagagctttctaaatttggaatacttgatcaagctgaaagtgtcttgatcggctgcattgtaccagatttcttgtatgtcgggtactatgtcgactctagaggatccccttctggaataagtgattatagcaagggtgcaggatgcaagtttaatatacaaaatggctccaccccggtgacaaatctctgctcgggccctgaggtcaaagaaatcctttccatcgaggtggaggcggccgtgctcccacagctcatacagtatgcatacctacagagtcagcaccacatggatgccaccaagatttataacttgcgccctctgagcagtggcccaacctgcacctggtcctgcttgagccacagcttagcgccagaaatacctgccaaagaaattatctggaaaagtgaacggttgaaaaagtcacggcgtgtatggatttttaccaccggcgatgcaacagcagaagaacgcccgctggcagttttgctcgatggcgaattttgggcgcaaagtatgcccgtctggccagtgctgacttcgctgacccatcgtcagcaacttcctcccgccgtgtatgtgttgatcgacgctatcgacaccacgcaccgcgcccacgaactgccgtgtaatgcggatttctggctcgcagtacagcaagagttattacccctggtgaaagctattgccccttttagcgatcgtgccgatcgcaccgtggttgccgggcagagttttggtgggctttccgcgctgtatgccggactgcactggcctgaacgctttggctgtgtattaagccagtcaggatcgtactggtggccgcatcggggcgggcagcaagagggcgtgttacttgaaaagctaaaagctggtgaagttagcgccgaaggtctgcgcattgtgctggaagcgggtattcgcgagccgatgatcatgcgggccaatcaggcgctgtatgcgcaattacaccccataaaagaatccattttctggcgtcaggttgacggcggacatgatgcgctttgttggcgcggtggcttgatgcaggggctaatcgacctctggcaaccacttttccatgacaggagttgaatatggcattcagtaatcccttcgatgatccgcagggagcgttttacatattgcgcaatgcgcaggggcaattcagtctgtggccgcaacaatgcgtcttaccggcaggctgagacattgtgtgtcagccgcagtcacaggcgtactgccagcagtggctggaagcccactggcggactctgacaccgacgaaatttacccagttgcagggaggccaatgagc

SEQ ID NO: 29743 - DNA, 1023 bp, Homo sapiens
  SIMILAR (28)..(564): 891254mologous to Escherichia coli Fe(III)-pyochelin receptor fptA precursor,accession number D90717,Smith-Waterman Score=828.
atgacccggactccaaattcaaaaatgaaattaggagaagagcatgagttctgccaagaagatcgggctatttgcctgtaccgggtgttggtgccccctccgggcggcaacaacttcgcccttgcgcagtctggcagcggtaacagtgccaaccgcaccgattttaaaccgcaaaaagccaacaccagcgagattggcaccaaatggcaggttctggataaacgtctgttgctcaccgccgcgctgttccgcactgatatcgaaaatgaagttgagcaaaatgatgacggaacttactcgcaatacggtaagaaacgcgtcgaaggctatgagatatccgtggccgggaatatcactcccgcgtggcaggtgattggcggctatacccagcaaaaagcaaccatcaaaaacggcaaagatgttgcccaggatggttcctcatcgctgccgtataccccggagcacgccttcaccttatggagccaatatcaggcaaccgacgatatctctgttggcgcgggcgcacgctatatcggcagtatgcataaaggttcagacggcgcgaacaatgaaacctatggtttccatgtggatggcgcagtacgcagccatccacaaaacggctggatgcgtactgacctttctgccacgctgtttttaagcgatccacaaagctacgacggcggcgaactggtcgttaatgacaccttcggacaacatcgggtaaaactcccggcaggcgatctcgtgttgtatccctccagcagcctgcattgcgtgacacccgtaacccgcggcgtacgagtggcatcatttatgtggatccagtcgatgatccgcgatgataaaaagcgcgccatgctgtttgaactggacaacaatattcagtcgctgaaaagccgctacggcgaaagtgaagagatcctgtcgctgcttaatctttatcataatctgctgcgggaatggtgtaaatgtctgttgagcacatcctgtaataagcagggccagcgcagtagcgagtag

SEQ ID NO: 29744 - DNA, 1425 bp, Homo sapiens
  SIMILAR (724)..(1410): 1001254mologous to Escherichia coli DNA mismatch repair protein,accession number M64730,Smith-Waterman Score=1152.
atgagatattttgggtcacagtgtgtctgcctgtccctggggtatagaatacacccagatacacccatctgctgggccaaagttcagcttagcccttccctgttcctgtgtagttacaatctggccctgaagacatccgaggcacttcagacactagtcagggaggacttgggttcgggtggggtgggctggaccctgacatcccagcaagttgtggcccagattgagatggtcgtctattggttccaggccctggccactgcagtcatcccccagtggcagaaggatgaattgcgggagactctcaaatccctaaagaaggtcatggatgacttggaccgagccagcaaagccgatgtccagaaacgaaatgcagccaatcggggcttaaaagccagcgagtgggtgcagcaggtgtcaggcttgatggacggtaaaggtggtggcaaggatgtgtctgcacaggccacaggcaagaacgttggctgcctgcaggaggcgctgcagctggccacttccttcgcccagctgcgcctcggggatctgaaatcacagggcaagggagctggtggggaagacctcattatgctggacatttacgctatcgaagagctccgggcacggggtctggaggtcacagatgattccccaaagtacaattaccatttggactccagtggtagctatgtcaggcaccaaaatcggcgctatacgatggctgctctgccgcatattcgttccatcaccatggaacgtgagcaggacagcatcattatggatgccgcgacgcgtcgtaatctggaaatcacccagaacctggcgggtggtgcggaaaatacgctggcttctgtgctcgactgcaccgtcacgccgatgggcagccgtatgctgaaacgctggctgcatatgccagtgcgcgatacccgcgtgttgcttgagcgccagcaaactattggcgcattgcaggatttcaccgccgggctacagccggtactgcgtcaggtcggcgacctggaacgtattctggcacgtctggctttacgaactgctcgcccacgcgatctggcccgtatgcgccacgctttccagcaactgccggagctgcgtgcgcagttagaaactgtcgatagtgcaccggtacaggcgctacgtgagaagatgggcgagtttgccgagctgcgcgatctgctggagcgagcaatcatcgacacaccgccggtgctggtacgcgacggtggtgttatcgcatcgggctataacgaagagctggatgagtggcgcgcgctggctgacggcgcgaccgattatctggagcgtctggaagtccgcgagcgtgaacgtaccggcctggacacgctgaaagttggctttaatgcggtgcacggctactacattcaaatcagccgtggtgggctcttccgttag

SEQ ID NO: 29745 - DNA, 1701 bp, Homo sapiens; identical to SEQ ID NO: 9196
  SIMILAR (988)..(1698): 991254mologous to Escherichia coli K12 putative enzyme,accession number AE000182,Smith-Waterman Score=1248.

SEQ ID NO: 29746 - DNA, 424 bp, Homo sapiens
  SIMILAR (395)..(210): 961254mologous to Bos taurus pyruvate dehydrogenase phosphatase regulatory subunit precursor; PDPr,accession number AF026954,Smith-Waterman Score=319.
  misc_feature (1)...(424): n = a,t,c or g
gagttcgtcaaggccttttacctgaagaccaatgaccagatggtggtagtgtacttggcctcgctgatccgttccgtggtcgccctnnnnnnnnnnnnnnnnnnnnnnnnnnnnnnnnnnnnnnnnnnnnnnnnnnnnnnnnnnnnnnnnnnnnnnnnnnnnnnnnnnnnnnnnnnnnnnnnnnnnnnnnnnnnnnnnnnnnnnnnnnctatggggatgtagagcatgaatcctggctctcctgtgtgcgtcatgctcatcacccggatcccatttgcatagcccacgctcatctccttgcaaaagaggcttgggaagtggtctggagtcacaggggcataggacaactcagacagcacatccacagctcgagggccaatcagattgagggctgtgtctccagggacgtccgacgcaaggtcga

SEQ ID NO: 29747 - DNA, 1404 bp, Homo sapiens; identical to SEQ ID NO: 29675
  SIMILAR (699)..(82): 951254mologous to Escherichia coli similar to phosphotransferase system enzyme I,accession number U00006,Smith- Waterman Score=984.

SEQ ID NO: 29748 - DNA, 843 bp, Homo sapiens
  SIMILAR (22)..(516): 1001254mologous to Escherichia coli ORF3,accession number X73413,Smith-Waterman Score=905.
atggtgagcaggcgaggacgagaggcatttcatgtgtttattcctgcggatgagtgggatgaacgcctggcgaacgggatgtgggcggtggatttaggcgcttgccctggcggctggacctaccaactggtgaagcgcaacatgtgggtttattccgtcgacaacggcccgatggcgcaaagtctgatggataccggacaggtgacgtggctgcgggaagacggtttcaaattccgtccgacgcgcagcaatatctcctggatggtatgcgatatggttgaaaaaccggcgaaagttgcggcattgatggcgcagtggctggttaatggctggtgccgtgaaaccattttcaacctcaaactgccgatgaaaaaacgctacgaagaagtgtcacacaatctggcgtatattcaggcacagcttgatgaacatggcataaatgctcagattcaggcgcggcagttgtatcacgatcgcgaagaagtgacggtgcacgtccgccgcatctgggctgcgcgcccctttgcggctggtggtatcgcggtcgatacgagaaatgggcacgccggggaacaacggcgcgagcgtctgttcaagctgttcggtgcccagccccacggggaccaggtgcgtggaaccgtccgccgttctgtacaacgacaaagtcatcgcgggcttttgcgggcggtactgcggattgctttacgctgtccgaactgtttgaccgttaactggaaatgcttcagggccactctgttcaaagccgccgttgagctggcaaaagactggcttaccgatcgcttgctgcgcaaacttgaagcatctgttggcagtcgcggatga

SEQ ID NO: 29749 - DNA, 666 bp, Homo sapiens
  SIMILAR (1)..(663): 991254mologous to Escherichia coli K12 putative enzyme,accession number AE000264,Smith-Waterman Score=1139.
atgaaacctgtaaaaccacctcgtattaatggacgagtgccggtcctgtcggcacaggaagcggtgaattatattcccgacgaagcaacactttgtgtgttaggcgctggcggcggtattctggaagccaccacgttaattactgctcttgctgataaatataaacagactcaaacaccacgtaatttatcgattattagtccaacagggcttggcgatcgcgccgaccgtggtattagtcctctggcgcaagaaggtctggtgaaatgggcattatgtggtcactggggacaatcgccgcgtatttctgaactcgcagaacaaaataaaattattgcttataactacccacaaggtgtacttacacaaaccttacgcgccgccgcagcccaccagcctggtattattagtgatattggcatcgggacatttgtcgatccacgccagcaaggcggcaaactgaatgaagtcactaaagaagacctgattaaactggtcgagtttgataacaaagaatatctctattacaaagcgattgcgccagatattgccttcattcgcgctaccacctgcgacagtgaaggctacgccacttttgaagatgaggtgatgtatctcgacgcattggttattgcccaggcggtgcacaataacggcggtatgtga

SEQ ID NO: 29750 - DNA, 439 bp, Homo sapiens
  SIMILAR (417)..(301): 941254mologous to Homo sapiens alanyl-tRNA synthetase,accession number D32050,Smith-Waterman Score=176.
ggaccatatatatacaagggatgagtgaatgttcggaaaggagctgggtaggcgagacgtgagccaattaggtgcggccgagatcacatatattttaaaagactaaacataggaaagctaggagatcttgtgtggtggcaggtttcttctgccactcaggggtaggacactggggcagggggagtggcccagcctgtactttcactctgactgcagcagccacgcagagcagtgtttgctctatggattcgcagactgggctcctcttgccttcttcagataagccacaaaccagcctgacctgctcaccttctgggcctcggcacctgtgacagccacaatcctccggatacccttggcaatggcttcttccgtcacgatcacaaaagctcctgcatgactcgagttccgcaggtgcctgaatggcagaacacaaagt

SEQ ID NO: 29751 - DNA, 714 bp, Homo sapiens
  SIMILAR (76)..(321): 841254mologous to Rattus norvegicus RSS,accession number D89965,Smith-Waterman Score=361.
gggtatcgagtcgacagttcttttgacagctcatcggcggctttgaccagatggccctgatgcatttccagtattacgttcagacagttcgcacagcgtaaaacgatccgcagttccgcccgcaaataccgcgatgactttgtcgttgtacagacggcgaaccttttacacgatgcctttcattacggtattgcccaacgtggcctgaccatcaccagcgatgaccacatgaccgttacggcgtgcgcttactatagttgtcacgagctgtccccttggttacgaatacagagtacaaaagccgtacaaaagtacggggcataatgcaattatagatgggggggattttgagggtttcaaccaccggcggcgaaccgaatgcagtttgtatgaccgaccatcttcaaccgattaagggtgctgtctgcattctctttgccttgcaccggtaccaaagactcacgataccagccattgttggtggtgattttcgaatcaaagacttcaaacgccagctgagcacgtactgacactgcctgttccgcgcctctgaacgatacgcacagaaacgtccagcagctttcgtcttttttctccaccatcaggttttggcgcgcatctggcaccaacaactgcgcagcttctacggctacaactgcgcagtcgtgtcgcaggagtatcagcagtacctctagactccaccccaagcataaa

SEQ ID NO: 29752 - DNA, 527 bp, Homo sapiens
  SIMILAR (103)..(144): 1001254mologous to Homo sapiens Amino acid sequence of pj154_1,accession number Y42386,Smith-Waterman Score=77.
ctgtcatagcattttgtgctcaccacgaaggatggtctctgccttctcttgtcggtgtatgccatctgaacctaggaacacaaagtatattggcctcaaacggagacccagggttgccagttttccgtgggccttcccctcccttgaaatgtctttaattacctccccttcatcgtcaggccacgtgtgacttctgttcttagcactgccagggtcattgacttccatctaagcttgcatcaggaagatgttccttctgtgatcattggtactgaagccagaaaagctctcattcaggaactctgaagagcaaaaagggacaaacactaactgctgagctgggccatttgatctcctttcaccttgcattgctgtcacagcaccttgtatgatggcaggacaggctccagcagagagaactgcacagtgaccactggtatttttcacgctcttccaggggatccctgtcccccgacattgaaggagatctcattcagggccagagacacagagaccacataggccca

SEQ ID NO: 29753 - DNA, 1401 bp, Homo sapiens; identical to SEQ ID NO: 18341
  SIMILAR (315)..(61): 961254mologous to bacteriophage lambda Rz (cell lysis;153),accession number J02459,Smith-Waterman Score=420.

SEQ ID NO: 29754 - DNA, 867 bp, Homo sapiens
  SIMILAR (275)..(406): 681254mologous to Escherichia coli tRNA nucleotidyltransferase,accession number M12788,Smith-Waterman Score =139.
atgagacgatcccatattaagcagcagatccgtcggcagcatatgcacaatggcataggcaacactcagaccacccagcaaaacacccaaaaagttgaataccgccgccataaccacggcgagctgagaacgcatcgcgcgggtatagataacggttgccacggcgttggctgtgtcatggaaaccattgatggcttcgtagaacagcacaaaagccagtcaggcagacgccgggttctgctgatcgataatggtaaaaaaccagggcgcaaaatccttagagatcctgtagagtccagcgacgcactgtttggcgttccggcccctgcccaagtggcatccggaaatcgatacgggtattcataccttaatgacgctctcaatggcggcgatgctgagtccgcagggctgacgccgccagaactctggccgcgtcatcatggtcatggcccggcgggtgttaagttagtggaacaactatgccagcgtctgcgcgtgccaaatgaaattcgcgatttagccagactggtggctgagtttcacgatctcatccacaccttcccaatgctgaacccaaaaaccatcgtcaaattatttgattccatcgatgcctggcgtaaaccgcagcgtgtcgagcaactggcgctgaccagcgaggctgacgtgcgcggcagaaccggttttgaatcagcggactacccgcaaggccgctggttgcgcgaagcctgggaagtggcgcagtcagtgccgacaaaagccgtcgttgaagcgggatttaaaggtgtggagattcgcgaggagctgacccgacggcggattgcggcggtagccagctggaaggaacaacgttgcccaaagcctgaatga

SEQ ID NO: 29755 - DNA, 951 bp, Homo sapiens
  SIMILAR (561)..(4): 951254mologous to Escherichia coli L-histidinol dehydrogenase (AA 1-434),accession number X52656,Smith-Waterman Score=889.
ttaagtcggtagaacgtggttggtgccggaggcgtaatcacctgccgattccggtgaccagtcaccaagaaataccgaaccggcgctggtgatgctatcgaccagttcacgggcgttgcgggtctgaatgatcaggtgctccgggccgtactggttggagatctccacgcactgcgctaaatctttagtcacgatcaggcggctggcgttcagtgcctggcgggcggtttcggcacgcggcagttctgccagttggcgttcgacggcctcggcaacgcgacgcgccatatcagcagcgggcgtcagtaaaatcacctgtgagtccgggccgtgttcagcctgagagagcaaatcagaagccacgaaatccggcgtagcgccgctgtcagcaatcaccagcacttccgacgggcctgcgggcatatcgatcgccgcaccgtccagacgctggctcacctgacgtttcgcttcggtgacaaaggcgttacccggcccgaagattttgtccacttttggcacagattccgtaccaaaggggatcctctgctcaccttctggccctcggcacctgtgacagccacaatcctccggatacccttggccaatggcttcttccgtcacgatcacaagagctcctgcatgactcgagttccgcaggtgccggaagaccctgtgaaatctcatgccccccagcaattttggatccaccacgggaaatggtttgcctggtatgacgtcgccatcgggattccgggcccctttgcgggaagatcctgatgtgattttgctcggagatgcggtacgcgaggtcaccagggtaagcaacgccgtgccggcaaagcggtacatcggcgggtcgccaaggcggggtttcatcaattcctgtaacatgccgggaataattagccctggcgcgtagcagccgcgtaaattctcgctggggatgagcat

SEQ ID NO: 29756 - DNA, 771 bp, Homo sapiens
  SIMILAR (769)..(386): 921254mologous to Bos taurus pyruvate dehydrogenase phosphatase regulatory subunit precursor; PDPr,accession number AF026954,Smith-Waterman Score=644.
  misc_feature (1)...(771): n = a,t,c or g
tcaaacctgctgccagatgtcagcctgcaggagttcgtcaaggccttttacttgaagaccaatgaccagatggtggtagtgtacttggcctcgctgatccgttccgtggtcgccctnnnnnnnnnnnnnnnnnnnnnnnnnnnnnnnnnnnnnnnnnnnnnnnnnnnnnnnnnnnnnnnnnnnnnnnnnnnnnnnnnnnnnnnnnnnnnnnnnnnnnnnnnnnnnnnnnnnnnnnnnnctatggggatgtagagcatgaatcctggctctcctgtgtgcgtcatgctcatcacccggatcccatttgcatagcccacgctcatctccttgcaaaagaggcttgggaagtggtctggagtcataggggcataggacaactcaagacaagcacatccacagctcgagggccaatcagattgagggctgtgtacttccaggtgacgtcctccaggagcaggttgctgtctttcggcatgtgtttcttaagccaggcccaacagtggacctgctggtcggttggagagatcatgaagaaactgcgcttgttcagtcgtgctatgctgcagtcattttcataccctccaccctcgttgagcatgccagtatgcacaatgtggcccacaggcacatccaggtcattggagaagaggtactgtagaacttctaatgcctgatccccagtggttgttatctcaaactctgtgaaagaggacatgtcaatgacacacacagcttccttacagcacttgacttcagactccacgatgtcaa

SEQ ID NO: 29757 - DNA, 4191 bp, Homo sapiens
  SIMILAR (115)..(870): 921254mologous to Escherichia coli glutamate synthase, large subunit,accession number U18997,Smith-Waterman Score=1219.
atgggcccagacgacggaacaagaggaggacagagaggaacgaggaaaaagacgaacgagagaagagagagcaaagaagaaagaaaggagcgacagaaagagaaggagaagaaaatcgcaggctatgacggcggcaccggcgcaagtccgctttcatcggtgaaatacgcaggctgtccgtgggagctggggcttgttgaaacccagcaggcgctggttgctaacggcttgcgtcacaagatccgtttgcaggtcgatggcggcctgaaaacgggtgtcgatatcatcaaggcggcgattctcggcgcagaaagcttcggcttcggcactggcccgatggtggcgctcggctgtaaatatctacgtatttgccatctgaacaactgcgcaacgggtgtagcaactcaggatgacaaactgcgtaagaaccactatcacggcctgccattcaaggtgacgaattactttgagtttatcgcccgtgaaacccgcgagctgatggcacagcttggcgtaacacgtctggtggatctgattggtcgcaccgacctgctgaaagagctggacggtttcaccgccaaacagcagaagctggcgctgtcgaagctgctggagactgccgaaccgcatccaggtaaggcactctactgcaccgaaaacaacccgccgtttgataacggcctgctgaacgcgcagttgctgcaacaggcgaaaccgtttgtcgatgagcgccagagcaaaaccttctggttcgatattcgcaacaccgaccgttctgtcggcgcgtcgctttcaggctatatcgcccaaagcaccgcgatcaagggctgggagccgatcctatcaagaggaagattaggggagggttactgcacaaggatccagagtgagacccacagcgagagttctcagacatctgtgcaaggcaactgcttccatgagtcttaccgcatgacggaagagggcggattccggcgtgaagtgacggctaagacgcagccagatatcactcaacccgtgcgggctgtcatcagcgagctcattttcgtcattattatgggttttaccttcaaacggcacattcagagtgcgacggacaaaacttgctccaccgtcacaggctaccagccactgggctttgactatttcccgctgcccttctgccgttttcaggtgcaaggtcacttcgtcatcttgctgactgaaggcctccagctcgcgggaaaacaagcagcgcacattcggaaaacgcgacaccccttccagcatcaccgcatcgacctgcggctgaataaaggcgttacggcgcggccagccaaattcatcggtcattggctgaatatcagcaaaacagcggcctttcggggtgagaaaacgcatcgcgtgccacggcgtagtgtgcggcagaacatcatcgaccaggccgaccgactgcatggtgcgcagcgcctcgtcatcaataccaatcgcacgcgggtagtcgatcaacttatcgagtttctccaccaccagcacgtcaatgcccatctggccgagatagttcgccatcatcagcccaaccgggccggcaccagcgatcgccacctgaacgctatggttaacagcaggctggatgtcaggcaattccagccagaaaacgaaaccagcgctgcctgggtagtgggtatcgatcaaacgctggtcgatattgaagcgaaagtggatgatgaatttattgagcgttatggattaagcgccgggcattcactggtgattgaggatgatgtagccgaagcgctttatcaggaactaaaacagaaaaacctgattacccatcagtttgcgggtggcaccattggtaacaccatgcacaactactcggtgctcgcggacgaccgttcggtgctgctgggcgtcatgtgcagcaatattgaaattggcagttatgcctatcgttacctgtgtaacacttccagccgtaccgatcttaactatctacaaggcgtggatggcccgattggtcgttgctttacgctgattggcgagtccggggaacgtacctttgctatcagtccaggccacatgaaccagctgcgggctgaaagcattccggaagatgtgattggccggacctccgcactggttctcaactcatatctggtgccttgccagccgggtcaggcaggacgccgggttctgctgatcgataatggtaaaaaaccagggcgcaaaatccttatgtctggcggtgggcgctgcaactttaccaacctttatgtcgaaccaggcgcttatctgagccagaatccgcatttttgtaagtctgcactcgcacgttttacccagtgggatttcattgatctggtcaataaacacggcatcgcctggcacgagaaaacgttagggcaactcttctgcgatgactccgcgcagcagattgtcgacatgctggtggatgagtgcgagaagggcaatgtgaccttcagattgcgtagcgaagtgctgagtgtggcgaaggatgaaacaggcttcacgcttgatctgaacggcatgactgtcggttgcgaaaagctggtcatcgcgactggtgggctgtcaatgccggggctgggcgcgtcgccgtttggttataagattgccgaacaatttggcctcaacgtgctgccgacccgcgcgggtctggtgccattcactctgcataaaccgttgctcgaagagttacaggtgctggcgggcgtggcggtgccttccgtgattaccgctgaaaacggcaccgttttccgtgagaacttactcttcacccaccgcggcttgtctggaccggcggtgttgcagatttcaagctactggccacccgggggatttgtcagctccatctgctccggatgtggactcgaaacttccgaattagcggggctgttccggtacaccgctctcgacggcaacggatgcaatatggcaggatccttcgccgaagatctcgtgaaatgcctgcagaatggcctgaattttagcgggattggtggtcgcacagacaacttggtgcataatcagcattactcagcaaaattaaccgtttcaccagacaaggtatacctagtccgccacggtgaaacgcagtggaacgccgagcgacgtattcagggccagtctgacagcccgctgaccgccaaaggtgagcaacaggcgatgcaggtggcaacccgtgccaaagagcttggcattacgcatatcatcagtagcgatttaggacgcacccggcgtacgcggaaatcatcgcccaggccatgcggctgtgacatcatctctgattctcgcctgcgtgaattaaacatgggtgtgctggaacaacagacattatcggaagttacccttccttggaaccccggacgaacgaacagaaatgggtccgcagcggtcatggaccgtgacgggcgtatcctgaggggtcatggagactcagcgacggtcatgggcctcaacgttatgggcgtccggcatgttcgtaaacgggaaagagtttggtcaggccgcatgacgttgactgaaatcgttgccaaaattgatactggcgcggaaaaacgtgcggcagaagagctgaacaagcgtgatgcttatgacgtattaatcgtcggttccggcccggcgggtgcagcggcagcaatttactccgcacgtaaaggcatccgtaccggtctgatgggcgaacgttttggtggtcagatcctcgataccgttgatatcgaaaactacatttctgtaccgaagactgaagggcagaagctggcaggcgcactgaaagttcacgttgatgaatacgacgttgatgtgatcgacagccagagcgccagcaaactgatcccagcagcagttgaaggtggtctgcatcagattgaaacagcttctggcgcggtactgaaagcacgcagcattatcgtggcgaccggtgcaaaatggcgcaacatgaacgttccgggcgaagatcagtatcgcaccaaaggcgtgacctactgcccgcactgcgacggcccgctgtttaaaggtaaacgcgtagcggttatcggcggcggtaactccggcgtggaagcggcaattgacctggcgggtatcgttgagcacgtaacgctgctggaatttgcgccagaaatgaaagccgaccacgttctgcggggacaaactgcgcaggctgaaaaacgtccaccttatttctga

SEQ ID NO: 29758 - DNA, 669 bp, Homo sapiens
  SIMILAR (138)..(91): 501254mologous to Homo sapiens Human secreted protein, SEQ ID NO: 5559,accession number G01478,Smith-Waterman Score=48.
tttttttttttttttttcttctggacattgagaacaatccaatttgaaggcctcaatgcccaaatctacactcttgttttattctatatccttggtttcttttttttttttgagatggagtctcattctgtcgcccagtagttagggctacctccagtaatcctatttgtccctttactgtttagtgcgtctcgcttgactagaagctccatgaaagcaagagaccctacctgcctccttcgccactagacccccagggcctgggtatgtggtgatcgctcagggcccaattttcttcctttcctcctcctccaagggtgggggaaagagcatcagaaggtctaggtggccccaggcccaaacaatgctcctttaaaaggaaactagattgttacaaaggtcagaggctgaaaagttatttccgccttttatccctctaaattcttcacttcctgaaaaaacaaacaaacaaaaaagccactgagggcccttggactaaatccaggcctgagttgctgggcagaggtcagtcttgtccagacatgggaaaaaaataactcgagtcagacaggtgggtcaccacagaactaatccagcctgcaaatggcctgtgcaatcttcagctctgtacagacaagcctccctctggggatgcctttaaaggtgatg

SEQ ID NO: 29759 - DNA, 1257 bp, Homo sapiens
  SIMILAR (316)..(1020): 351254mologous to Methanothermobacter thermautotrophicus ribonuclease PH,accession number AE000848,Smith-Waterman Score=313.
atgaagtgtgaccccccagccaagggctgccagggcctctttcactatggactttgtgttctgccattcaggcacctgcggaactcgagtcatgcaggagcttttgtgatcgtgacggaagaagccattgccaagggtatccggaggattgtggctgtcacaggtgccgaggcccagaaggtgagcagaccagtggatcgcaaggcgttgggcgaagggttcgcacgccagaaccgccatgcctgggatcaccgccgcatcccgggccctgaagaatcgcagccgcccaagctgtacgcgtccgacgaggaggaggcgcccggcacccgcgacccaacgcggctacggcccgtgtacgcgcgcgccgggctgctgagccaggccaagggctcggcctacctggaggcgggaggcaccaaggtgctgtgtgccgtgtcgggcccgcgacaggccgagggcggcgagcgcggcggcggcccggccggagcaggcggcgaggccccggccgcgctgcgcggtcgcctgctctgcgacttccgccgcgcacccttcgcgggccgccggcgccgcgctcccccgggcggctgcgaggagcgtgagctggcgctggcgctgcaggaggcgctggagccggctgtgcgcctgggccgctacccgcgcgcgcagctcgaggtgtcggcgctgctgctggaggacggtggctcggccctggccgccgcgctcaccgccgccgcgctcgccctggccgacgcgggcgtggagatgtacgacctggtggtgggctgcggcctcagcctcgcgccggggcccgcgcccacctggctcctggaccccacgcggctcgaggaagagcgcgccgccgccggcctcaccgtggcgctcatgcctgtgctgaatcaggtggccgggctgctgggcagcggcgagggcggcctgacagagagctgggcggaggccgtacgcctgggcctcgagggctgccagcgcctctaccccgtgctgcagcagagcctgagaagacactcgccttgtcctcattgtgcctgctaccctcgactaacacaaggacctggcaaagaggaatattttgtgcttgtcaaggactttcctccactctctaccatcagcttggctaaaactcctgagatggagataagtgtgggctatgcaaatgggatccgggtgatgagcatgacgcacacaggagagccaggattcatgctctacatccccatagagaatcatcgagaaacgtaa

SEQ ID NO: 29760 - DNA, 926 bp, Homo sapiens
  SIMILAR (1)..(924): 681254mologous to Homo sapiens alanyl-tRNA synthetase,accession number D32050,Smith-Waterman Score=946.
atgattgaggcagccaaggccgtctatacccaggattgccccctggcagcagcgaaaccatccagggcctacggcatgtgtttgatgagacctatcctgaccctgtgcgagtcgtctccattggggtcccggtgtccgagttgctggatgacccctctgggcctgctggctccctgacttctgttgagttctgtgggggaacgcacctgcggaactcgagtcatgcaggagcttttgtgatcgtgacggaagaagccattgccaagggtatccggaggattcgtggctgtcacaggtgccgaggcccagaaggccctcaaggaaagcagagagcttgaagaaatgtctctctgtcatggaagccaaagtgaaggctcagactgctccaaacaaggaatgtgcagagggaagatcgctgaccttggagaggccctggccactgcagtcatcccccagtggcagaaggatgaattgcgggagactctcaaatccctaaagaaggtcatggatgacttggaccgagccagcaaagccgatgtccagaaacgagtgttagagaagacgaagcagttcatcgacagcaaccccaaccagcctcttgtcatcctggagatggagagcggcgcctcagccaaggccctgaatgaagccttgaagctcttcaagatgcactcccctcagacttctgccatgctcttcacggtggacaatgaggctggcaagatcacgtgcctgtgtcaagtcccccagaatgcagccaatcggggcttaaaagccagcgagtgggtgcagcaggtgtcaggcttgatggacggtaaaggtggtggcaaggatgtgtctgcacaggccacaggcaagaacgttggctgcctgcaggaggcgctgcaactggccacttccttcggccagctgcgcctcggggatgt

SEQ ID NO: 29761 - DNA, 2316 bp, Homo sapiens; identical to SEQ ID NO: 8943
  SIMILAR (1156)..(1488): 951254mologous to Escherichia coli No definition line found,accession number U00039,Smith-Waterman Score=566.

SEQ ID NO: 29762 - DNA, 2689 bp, Homo sapiens
  SIMILAR (1907)..(2686): 1001254mologous to Escherichia coli Putrescine transport system permease protein PotH,accession number D90783,Smith-Waterman Score=1325.
gctgtcttttctggcgcccttgtggttaaccccggcgccgcgcgtcatcacgctttctcccgccaacattgaacttgcctttgccgccgggatcacgccggttggggtcagcagctattccgactatcctccacaagcgcaaaagattgagcaggtttccacctggcaggggatgaatctggaacgcattgtcgcgctgaaacccgatctggtgattgcctggcgtggagggcttatactagggtacgagcaaggtgtatcattaccgctgctgaaaaagatcattcccgatcttaaattcactgccgcttttgggcgtgggcgctacgtttgtcagcgtaatctgacggcgctcgccagtactgaacccacgcaacaggatctgctggcgtttcttgaagacgaactgacgccgaacaatcaggaagagcaaaaacgttgtgcgaagctgaagggcgatctcgatacttataaatgggatggtctgcgcgatcatactgatatcgctatagatgacgatctctggcgtcgtttaagtaccgacaaagccagctgcctcaaccgcaattgttactactatcgtgaatgcccgttttttgtcgctcgtcgggagattcaggaagcggaagtggtggtggcaaaccatgcgctggtgatggcggcgatggaaagcgaagcggtattgcctgacccgaaaaatttactgctggtgctggacgaaggccatcacctgccggatgtggcgcgggatgcgcttgagatgagcgccgaaatcaccgcgccgtggtatcggctacagctggacttgttcacgaaactggtcgctacatgcatggagcagtttcgcccgaagaccatcccaccgctggcgatacctgaacgtttgaatgcgcattgtgaagagttgtatgagcttatcgcctcgttatccaacaatagaaacctgcaggccgctatctcgcaagaggaggtgttggtcggctgggcgttcgtctggccgcatttagcctggcagatagcgagcagggccgtcgatccgcttagccgggaaatttacaacttaaaaaccgatgcagtattagcgggaatgtgggtaggcgtaatgggcgtaaacgtgctgccttccaccgcgatgttgatgattatgtgtctgaatttgatgggggcaggcggcccccgtctgtttgtcgcgggtctggtgttgatggtggtttcctgccttgtcaccctcgagctgacgggcattaccgtgtcgttcaatagtgcgccgctggaatggtggctctcccttcccattattgtcatttatcctctgctgtttggctgggtcagctaccagacggcaaccaaactggcggaacataaacgcaggttgcaggtcatgagtacccgcgacggcatgacgggcgtgtataaccgacgtcattgggaaactatgttacgcaatgaatttgataactgtcggcggcataatcgcgatgcaacgttactgattatcgatatcgaccatttcaagagcatcaacgatacctggggccatgatgtgggcgatgaagcgattgtggcgcttacccgacagttacaaattaccctgcgcggtagcgatgtgattggtcggtttggcggcgatgagtttgcagtaatcatgtccggtacgccagctgagagcgccattaccgccatgttacgggtgcatgaagggctaaatacattacgtttgccgaatacgccacaggtaactttacggattagtgtgggggttgcgccgctgaacccacaaatgagtcactatcgtgagtggttgaaatcggcagatttggcgctttacaaagcaaagaaagccagacggtcatgctcggtacctatgacaggcgaagaactgcctgccacgctcacgcccggacaacagggattttatacttttgacgatttcaccatgtcggtaacgccggaactgacgctggcgaatatccgtgcgctgtttaatccggcgaattacgacatcattctccgcacgctgactatggctgtggcagtcactatcgccagcgccattctggcttttccaatggcgtggtatatggcgcgctataccagcgggaaaatgaaagcgtttttttatattgcggtaatgttgccgatgtgggcgagctacattgttaaagcctatgcctggacgttattgctggcaaaagatggcgtggctcagtggtttttacaacatcttgggctggaaccactgctgactgcgttccttacattacctgcggtgggcggaaatacgctgtcaacttccgggctggggcgctttctggtgtttctctatatctggttgccgttcatgatcctgcccgttcaggcggcgcttgagcgtttgccgccgtcattgttgcaggcgtcggctgatctcggcgcacgtccacgacaaacctttcgctatgtggtgctgccgctggcaatcccgggtattgccgctggctctatctttaccttctcactcacactgggcgattttatcgtcccgcagctggttggtcctccaggatattttatcggcaatatggtttattcccagcagggggcgattggcaatatgccgatggcggcggcattcaccctggtgccgattattctcatcgcactgtacctggcgttcgtgaaacgtctgggagcgttcgatgcactctga

SEQ ID NO: 29763 - DNA, 939 bp, Homo sapiens
  SIMILAR (1)..(321): 1001254mologous to Cloning vector pBACe3.6 levansucrase,accession number U80929,Smith-Waterman Score=554.
atgacgatcgatggtattaactcaaacgatatttacatgcttggttatgtatcaaactctttaaccggcccttacaagccgctgaacaaaacagggcttgtgctgcaaatgggtcttgatccaaacgatgtgacattcacttactctcacttcgcagtgccgcaagccaaaggcaacaatgtggttatcacaagctacatgacaaacagaggcttcttcgaggataaaaaggcaacatttgcgccaagcttcttaatgaacatcaaaggcaataaaacatccgttgtcaaaaacagcatcctggagcaaggacagctgacatggctccaagtagcgaagcgagcaggactgggcggcggccaaagcggtcggacagtgctccgagaacgggtgcgcatagaaattgcatcaacgcatatagcgctagcagcacgccatagtgactggcgatgctgtcggaatggacgatatcccgggtgtgacaatctaaaaacttgtcacacttcacatggatctgtcatggcggaaacagcggttatcaatcacaagaaacgtaaaaatagcccgcgaatcgtccagtcaaacgacctcactgaggcggcatatagtctctcccgggatcaaaaacgtatgctgtatctgttcgttgaccagatcagaaaatctgatggcaccctacaggaacatgacggtatctgcgagatccatgttgctaaatatgctgaaatattcggattgacctctgcggaagccagtaaggatattcggcaggcaccccagagtttcgcggggaaggaagtggttttttatcgccctgaagaggatgccgggggtatcctctaccccaaaaccgggattcatgccccttacggcagaggaaaccagtactctaaaattttcccagctagggtgtatttgaaaaagatgatgcccaattag

SEQ ID NO: 29764 - DNA, 969 bp, Homo sapiens
  SIMILAR (220)..(963): 1001254mologous to unidentified cloning vector 29kD protein essential for the replication of mini F plasmid,accession number AB015619,Smith-Waterman Score=1294.
atgcacttgtttttccccctgcccctgcggatctggttactgacgggcctgaacgccggaggtttctcagcagccacagaagaaactcattgggcgctgagctcctgggtcttgagctacagggtttttaccttcactgcttcccagctggaattcaccaagtgctgccggaagggcccaaaacctgaaaccaaacatgcccagtctagaggatcccccgaaacagcggttatcaatcacaagaaacgtaaaaatagcccgcgaatcgtccagtcaaacgacctcactgaggcggcatatagtctctcccgggatcaaaaacgtatgctgtatctgttcgttgaccagatcagaaaatctgatggcaccctacaggaacatgacggtatctgcgagatccatgttgctaaatatgctgaaatattcggattgacctctgcggaagccagtaaggatatacggcaggcattgaagagtttcgcggggaaggaagtggttttttatcgccctgaagaggatgccggcgatgaaaaaggctatgaatcttttccttggtttatcaaacgtgcgcacagtccatccagagggctttacagtgtacatatcaacccatatctcattcccttctttatcgggttacagaaccggtttacgcagtttcggcttagtgaaacaaaagaaatcaccaatccgtatgccatgcgtttatacgaatccctgtgtcagtatcgtaagccggatggctcaggcatcgtctctctgaaaatcgactggatcatagagcgttaccagctgcctcaaagttaccagcgtatgcctgacttccgccgccgcttcctgcaggtctgtgttaatgagatcaacagcagaactccaatgcgcctctcatacattgagaaaaagaaaggccgccagacgactcatatcgtattttccttccgcgatatcacttccatgacgacgaactag

SEQ ID NO: 29765 - DNA, 678 bp, Homo sapiens; identical to SEQ ID NO: 17222
  SIMILAR (1)..(339): 1001254mologous to unidentified cloning vector 29kD protein essential for the replication of mini F plasmid,accession number AB015619,Smith-Waterman Score=576.

SEQ ID NO: 29766 - DNA, 795 bp, Homo sapiens
  SIMILAR (364)..(792): 971254mologous to Cloning vector pZC320 SopA,accession number U26464,Smith-Waterman Score=731.
atggcggaaacagcggttatcaatcacaagaaacgtaaaaatagcccgcgaatcgtccagtcaaacgacctcactgaggcggcatatagtctctcccgggatcaaaaacgtatgctgtatctgttcgttgaccagatcagaaaatctgatggcaccctacaggaacatgacggtatctgcgagatccatgttgctaaatatgctcccatattcggattgacctctgcggaagccagtaaggatatacggcaggcattgaagagtttcgcggggaaggaagtggttttttatcgccctgaagaggatgccggcgatgaaaaaggctatgaatcttttccttggtttatcaaaccgcgcctaaccttgggtatcggcccgattaatgtcgtatgtgctgctgatgtgctgattgttcccacgcctgttgagttgtttgactacccctccgcactgcagtttttcgatatgcttcgtgatctgctcaagaacgttgatcttaaagggttcgagcctgatgtacgtattttgcttaccaaatacagcaatagtaatggctctcagtccccgtggatggaggagcaaattcgggatgcctggggaagcatggttctaaaaaatgttgtacgtgaaacggatgaagttggtaaaggtcagatccggatgagaactgtttttgaacaggccattgatcaacgctcttcaactggtgcctggagaaatgctctttctatttgggaacctgtctgcaatgaaattttcgatcgtctgattaaaccacgctgggagattagataa

SEQ ID NO: 29767 - DNA, 929 bp, Homo sapiens; identical to SEQ ID NO: 15742
  SIMILAR (868)..(906): 1001254mologous to Cloning vector pZC320 SopB,accession number U26464,Smith-Waterman Score=62.

SEQ ID NO: 29768 - DNA, 969 bp, Homo sapiens
  SIMILAR (43)..(522): 961254mologous to unidentified cloning vector 29kD protein essential for the replication of mini F plasmid,accession number AB015619,Smith-Waterman Score=792.
  misc_feature (1)...(969): n = a,t,c or g
tgtgacaatctaaaaacttgtcacacttcacatggatctgtcatggcggaaacagcggttatcaatcacaagaaacgtaaaaatagcccgcgaatcgtccagtcaaacgacctcactgaggcggcatatagtctctcccgggatcaaaaacgtatgctgtatctgttcgttgaccagatcagaaaatctgatggcaccctacaggaacatgacggtatctgcgagatccatgttgctaaatatgctgaaatattcggattgacctctgcggaagccagtaaggatatacggcaggcattgaagagtttcgcggngaaggaaagtgttttttatcgccctgaagaggatgccggcgatgaaaaaagctatgaatcttttccttggtttatcaaacgtgcgcacagtccatccagagggctttacagtgtacatatcaacccatatctcattcccttctttatcgggttacaagacccggttacgcagtttcggcttagtgaaacaaaagaaatcaccaatcctgttggaagttctggccagggaaatcaggcaggagaagaaataaagggcattcaatttggaaaagaggaagtcaaattgtccctgtttgcagatgacatgattgtatatctagaaaaccccattgtctcagcccaaaatctccttaagctgataagcaacttcagcaaagtctcaggatacaaaatcaatgtgcaaaaatcacaagcattcttatacaccaataacagacaaacagagagccaaatcatgagtgaactcccattcacaattgcttcaaagagaataaaatacctaggaatccaacttacaagggatgtgaaggacctcttcaaggagaactacaaaccactgctcaatgagataaaagaggatacaaacaaatggaagaacattccatgctcatgggtaggaagaatcaatattgtgaaaatggccatactgcccaag

SEQ ID NO: 29769 - DNA, 423 bp, Homo sapiens
  SIMILAR (1)..(411): 891254mologous to unidentified cloning vector 29kD protein essential for the replication of mini F plasmid,accession number AB015619,Smith-Waterman Score=607.
atggcggaaacagcggttatcaatcacaagaaacgtaaaaatagcccgcgaatcgtccagtcaaacgacctcactgaggcggcatatagtctctcccgggatcaaaaacgtatgctgtatctgttcgttgaccagatcagaaaatctgatggcaccctacaggaacatgacggtatctgcgagatccatgttgctaaatatgctgaaatattcggattgacctctgcggaagccagtaaggatatacggcaggcattgaagagtttcgcggggaaggaagtggttttttatcgccctgaagaggatgccggcgatgaaaaaggctatgaatcttttccttggtttatcaaactcccgcaagccaaaggcaacaaagttggttatcccaagctacatgccaaccagaggctctttcgggaataa

SEQ ID NO: 29770 - DNA, 552 bp, Homo sapiens
  SIMILAR (1)..(351): 1001254mologous to unidentified cloning vector 29kD protein essential for the replication of mini F plasmid,accession number AB015619,Smith-Waterman Score=602.
atggcggaaacagcggttatcaatcacaagaaacgtaaaaatagcccgcgaatcgtccagtcaaacgacctcactgaggcggcatatagtctctcccgggatcaaaaacgtatgctgtatctgttcgttgaccagatcagaaaatctgatggcaccctacaggaacatgacggtatctgcgagatccatgttgctaaatatgctgaaatattcggattgacctctgcggaagccagtaaggatatacggcaggcattgaagagtttcgcggggaaggaagtggttttttatcgccctgaagaggatgccggcgatgaaaaaggctatgaatcttttccttggtttatcaaactcgggaaacctgtcgtgccagctgcattaatgaatcggccaacgcgcggggagaggcggtttgcgtattgggcgccagggtggtttttcttttcaccagtgagacgggcaacagctgattgcccttcaccgcctggccctgagagagttgcagcaagcggtccacgctggtttgccccagcaggcgaaaatcctgtttga

SEQ ID NO: 29771 - DNA, 453 bp, Homo sapiens
  SIMILAR (1)..(354): 991254mologous to unidentified cloning vector 29kD protein essential for the replication of mini F plasmid,accession number AB015619,Smith-Waterman Score=603.
atggcggaaacagcggttatcaatcacaagaaacgtaaaaatagcccgcgaatcgtccagtcaaacgacctcactgaggcggcatatagtctctcccgggatcaaaaacgtatgctgtatctgttcgttgaccagatcagaaaatctgatggcaccctacaggaacatgacggtatctgcgagatccatgttgctaaatatgctgaaatattcggattgacctctgcggaagccagtaaggatatacggcaggcattgaagagtttcgcggggaaggaagtggttttttatcgccctgaagaggatgccggcgatgaaaaaggctatgaatcttttccttggtttatcaaacagttgcagcaagcggtccacgctggtttgccccagcaggcgaaaatcctgtttgatggtggttccgaaatcggcaaaatcccttataaatcaaaagaatag

SEQ ID NO: 29772 - DNA, 609 bp, Homo sapiens
  SIMILAR (1)..(480): 1001254mologous to unidentified cloning vector 29kD protein essential for the replication of mini F plasmid,accession number AB015619,Smith-Waterman Score=830.
atggcggaaacagcggttatcaatcacaagaaacgtaaaaatagcccgcgaatcgtccagtcaaacgacctcactgaggcggcatatagtctctcccgggatcaaaaacgtatgctgtatctgttcgttgaccagatcagaaaatctgatggcaccctacaggaacatgacggtatctgcgagatccatgttgctaaatatgctgaaatattcggattgacctctgcggaagccagtaaggatatacggcaggcattgaagagtttcgcggggaaggaagtggttttttatcgccctgaagaggatgccggcgatgaaaaaggctatgaatcttttccttggtttatcaaacgtgcgcacagtccatccagagggctttacagtgtacatatcaacccatatctcattcccttctttatcgggttacagaaccggtttacgcagtttcggcttagtgaaacaaaagaaatcaccaatccgtctgggttaatgagatcacagcagaactccatgcgcctctcatacttggagaaaaaaaaggcccgcgaagactcatatcggatttccttccggataaacttacatgagaaagaccctcgagggatatga

SEQ ID NO: 29773 - DNA, 726 bp, Homo sapiens
  SIMILAR (587)..(724): 891254mologous to unidentified cloning vector 29kD protein essential for the replication of mini F plasmid,accession number AB015619,Smith-Waterman Score=224.
atggctcgcggtaatgccattactttgcctgtatgtggtcgggatgtgaagtttactcttgaagtgctccggggtgatagtgttgagaagacctctcgggtatggtcaggtaatgaacgtgaccaggagctgcttactgaggacgcactggatgatctcatcccttcttttctactgactggtcaacagacaccggcgttcggtcgaagagtatctggtgtcatagaatgtgacaatctaaaaacttgtcacacttcacatggatctgtcatggcggaaacagcggttatcaatcacaagaaacgtaaaaatagcccgcgaatcgtccagtcaaacgacctcactgaggcggcatatagtctctcccgggatcaaaaacgtatgctgtatctgttcgttgaccagatcagaaaatctgatggcaccctacaggaacatgacggtatctgcgagatccatgttgctaaatatgctgaaatattcggattgacctctgcggaagccagtaaggatatacggcaggcattgaagagtttcgcggggaaggaagtggttttttatcgccctgaagaggatgccggcgatgaaaaaggctatgaatcttttcccttggtttatcaaacgtgcgcacagtccatccagagggctttacagtgtacatatcaacccatatctcattcccttctttatcgggttacagaaccggtttacgcagtttcggcttag

SEQ ID NO: 29774 - DNA, 774 bp, Homo sapiens
  SIMILAR (1)..(510): 991254mologous to unidentified cloning vector 29kD protein essential for the replication of mini F plasmid,accession number AB015619,Smith-Waterman Score=881.
atggcggaaacagcggttatcaatcacaagaaacgtaaaaatagcccgcgaatcgtccagtcaaacgacctcactgaggcggcatatagtctctcccgggatcaaaaacgtatgctgtatctgttcgttgaccagatcagaaaatctgatggcaccctacaggaacatgacggtatctgcgagatccatgttgctaaatatgctgaaatattcggattgacctctgcggaagccagtaaggatatacggcaggcattgaagagtttcgcggggaaggaagtggttttttatcgccctgaagaggatgccggcgatgaaaaaggctatgaatcttttccttggtttatcaaacgtgcgcacagtccatccagagggctttacagtgtacatatcaacccatatctcattcccttctttatcggggtacagaaccggtttacgcagtttcggcttagtgaaacaaaagaaatcaccaatccgtatgccatgcggttatacgaatccctgtgcataggcttggttatgccggtactgccgggcctcttgcgggatatcgtccattccgacagcatcgccagtcactatggcgtgctgctagcgctatatgcgttgatgcaatttctatgcgcacccgttctcggagcactgtccgaccgctttggccgccgcccagtcctgctcgcttcgctacttggagccactatcgactacgcgatcatggcgaccacacccgtcctgtggatctacccactagtcaattcaccatcttgttga

SEQ ID NO: 29775 - DNA, 1494 bp, Homo sapiens; identical to SEQ ID NO: 13428
  SIMILAR (1)..(657): 991254mologous to synthetic construct chloramphenicol acetyltransferase,accession number A02739,Smith-Waterman Score= 1193.

SEQ ID NO: 29776 - DNA, 1932 bp, Homo sapiens; identical to SEQ ID NO: 5205
  SIMILAR (418)..(1038): 911254mologous to unidentified cloning vector 29kD protein essential for the replication of mini F plasmid,accession number AB015619,Smith-Waterman Score=970.
  misc_feature (1)...(1932): n = a,t,c or g

SEQ ID NO: 29777 - DNA, 1734 bp, Homo sapiens; identical to SEQ ID NO: 5207
  SIMILAR (799)..(1317): 991254mologous to unidentified cloning vector 29kD protein essential for the replication of mini F plasmid,accession number AB015619,Smith-Waterman Score=897.

SEQ ID NO: 29778 - DNA, 3345 bp, Homo sapiens; identical to SEQ ID NO: 5209
  SIMILAR (2842)..(3342): 991254mologous to Cloning vector pZC320 SopB,accession number U26464,Smith-Waterman Score=816.
  misc_feature (1)...(3345): n = a,t,c or g

SEQ ID NO: 29779 - DNA, 1962 bp, Homo sapiens; identical to SEQ ID NO: 5210
  SIMILAR (559)..(1062): 981254mologous to Cloning vector pZC320 SopA,accession number U26464,Smith-Waterman Score=875.

SEQ ID NO: 29780 - DNA, 1302 bp, Homo sapiens; identical to SEQ ID NO: 5213
  SIMILAR (322)..(741): 1001254mologous to Cloning vector pSacBII SacB,accession number U09128,Smith-Waterman Score=740.

SEQ ID NO: 29781 - DNA, 1560 bp, Homo sapiens; identical to SEQ ID NO: 5216
  SIMILAR (745)..(1329): 1001254mologous to unidentified cloning vector 29kD protein essential for the replication of mini F plasmid,accession number AB015619,Smith-Waterman Score=1020.

SEQ ID NO: 29782 - DNA, 2262 bp, Homo sapiens; identical to SEQ ID NO: 4935
  SIMILAR (1)..(405): 1001254mologous to Cloning vector pZC320 SopA,accession number U26464,Smith-Waterman Score=691.

SEQ ID NO: 29783 - DNA, 1962 bp, Homo sapiens; identical to SEQ ID NO: 4019
  SIMILAR (1)..(681): 961254mologous to Cloning vector pZC320 SopB,accession number U26464,Smith-Waterman Score=1097.

SEQ ID NO: 29784 - DNA, 2280 bp, Homo sapiens; identical to SEQ ID NO: 25859
  SIMILAR (112)..(732): 991254mologous to unidentified cloning vector 29kD protein essential for the replication of mini F plasmid,accession number AB015619,Smith-Waterman Score=1079.

SEQ ID NO: 29785 - DNA, 2421 bp, Homo sapiens; identical to SEQ ID NO: 5218
  SIMILAR (1597)..(2319): 981254mologous to Cloning vector pBACe3.6 levansucrase,accession number U80929,Smith-Waterman Score=1250.

SEQ ID NO: 29786 - DNA, 2031 bp, Homo sapiens; identical to SEQ ID NO: 5220
  SIMILAR (709)..(1071): 951254mologous to unidentified cloning vector 29kD protein essential for the replication of mini F plasmid,accession number AB015619,Smith-Waterman Score=591.

SEQ ID NO: 29787 - DNA, 1653 bp, Homo sapiens; identical to SEQ ID NO: 5221
  SIMILAR (487)..(1101): 1001254mologous to unidentified cloning vector 29kD protein essential for the replication of mini F plasmid,accession number AB015619,Smith-Waterman Score=1075.

SEQ ID NO: 29788 - DNA, 1173 bp, Homo sapiens
  SIMILAR (1)..(738): 951254mologous to unidentified cloning vector 29kD protein essential for the replication of mini F plasmid,accession number AB015619,Smith-Waterman Score=1225.
atggcggaaacagcggttatcaatcacaagaaacgtagaggggggccgcgaatcgaacagtcaaacgacctcactgaggcggcatatagtctctcccgggatcaaaaacgtatgctgtatctgttcgttgaccagatcagaaaatctgatggcaccctacaggaacatgacggtatctgcgagatccatgttgctaaatgtgctgaaatattcggattgacctctgcggaagccagtaaggatatacggcaggcattgaagagtttcgcggggaaggaagtggttttttatcgccctgaagaggatgccggcgatgaaaaaggctatgaatcttttccttggtttatcaaacgtgcgcacagtccatccagagggctttacagtgtacatatcaacccatatctcattcccttctttatcgggttacagaaccggtttacgcagtttcggcttagtgaaacaaaagaaatcaccaatccgtatgccatgcgtttatacgaatccctgtgtcagtatcgtaagccggatggctcaggcatcgtctctctgaaaatcgactggatcatagagcgttaccagctgcctcaaagttaccagcgtatgcctgacttccgccgccgcttcctgcaggtctgtgttaatgagatcaacagcagaactccaatgcgcctctcatacattgagaaaaagaaaggccgccagacgactcatatctttttcgatatgcttcgtgatctgctcaagaacgttgatcttaaagggttcgagcctgatgtacgtattttgcttaccaaatacagcaatagtaatggctctcagtccccgtggatggaggagcaaattcgggatgcctggggaagcatggttctaaaaaatgttgtacgtgaaacggatgaagttggtaaagctgccccgatggtggattcgttaattgcgcgcgtaggagtaatggctcgcggtaatgccattactttgcctgtatgtggtcgggatgtgaagtttactcttgaagtgctccggggtgatagtgttgagaagacctctcgggtatggtcaggtaatgaacgtgaccaggagctgcttactgaggacgcactggatgatctcatcccttcttttctactgactggtcaacagacaccggcgttcggtcgaagatatctggtgtcatag

SEQ ID NO: 29789 - DNA, 1449 bp, Homo sapiens; identical to SEQ ID NO: 5222
  SIMILAR (826)..(1446): 1001254mologous to unidentified cloning vector 29kD protein essential for the replication of mini F plasmid,accession number AB015619,Smith-Waterman Score=1090.

SEQ ID NO: 29790 - DNA, 1194 bp, Homo sapiens
  SIMILAR (1)..(360): 951254mologous to unidentified cloning vector 29kD protein essential for the replication of mini F plasmid,accession number AB015619,Smith-Waterman Score=595.
atggcggaaacagcggttatcaatcacaagaaacgtaaaaatagcccgcgaatcgtccagtcaaacgacctcactgaggcggcatatagtctctcccgggatcaaaaacgtatgctgtatctgttcgctgaccacatcagaaaatctgatggcaccctacacgaacatgacggtatctgcgagatccatgttgctaaatatgctgaaatattcggattgacctctgcggaagccagtaaggatatacggcaggcattgaagagtttcgcggggaaagaagtggttttttatcgccctgaagaggatgccggcgatgaaaaaggctatgaatcttttccttggtttatcaaacaataccactgtggccagctggatctcttgcttgcttacgacgtacgcacaaccatgcaaagtatcctcacagttgtaccaactgagtgtggaagaatcagggctttgtccactaactccaatgtgctgtttaatgatgacagcccggaagcgaggaaaataacccggcgctggagaataggtgaagcagcggatttagttggggtttcttctcatgctatcatagatgccgagaaagcagggcgactaccgcacccggatatggaaattcgaggacgggttgagcaacgtgttggttatacaattgaacaaattaatcatatgcgtgatgtgtttggtacgcgattgcgacgtgctgaagacgtatttccaccggtgatcggggttgctgcccataaaggtggcgtttacaaaacctcagtttctgttcatcttgctcatgatctggctctgaaggggctacgtgttttgctcgtggaagatccccagcattttacccgctgtatcaacaccgccaaattgcctaaatcagttgttgctcttttttctcaccccggtgaactatctgcccggtcaggtgatgcacttcaaaaagcctttacagatgaagaggagttacttaagcagcaggcatctaaccttcatgagcagaaaaaagctggggtgatatttgaagctgaagaagatatcactcttttaacttctgtgcttaaaacgtcatctgcatcaagaactagtttaagctcacgacatcagtttgctcctggagcgacagtattgtgtaagggcgataaaatggtgcttaacctggacaggtctcgtgttccaactgagtgtgtatag

SEQ ID NO: 29791 - DNA, 1896 bp, Homo sapiens; identical to SEQ ID NO: 5224
  SIMILAR (34)..(783): 941254mologous to Cloning vector pSacBII SacB,accession number U09128,Smith-Waterman Score=1243.
  misc_feature (1)...(1896): n = a,t,c or g

SEQ ID NO: 29792 - DNA, 1827 bp, Homo sapiens; identical to SEQ ID NO: 5228
  SIMILAR (1138)..(1806): 961254mologous to Cloning vector pZC320 SopA,accession number U26464,Smith-Waterman Score=1137.

SEQ ID NO: 29793 - DNA, 2823 bp, Homo sapiens; identical to SEQ ID NO: 5230
  SIMILAR (2823)..(2233): 1001254mologous to Cloning vector pZC320 SopA,accession number U26464,Smith-Waterman Score=1035.
  misc_feature (1)...(2823): n = a,t,c or g

SEQ ID NO: 29794 - DNA, 1332 bp, Homo sapiens; identical to SEQ ID NO: 5231
  SIMILAR (1281)..(1331): 1001254mologous to Cloning vector pZC320 SopA,accession number U26464,Smith-Waterman Score=85.
  misc_feature (1)...(1332): n = a,t,c or g

SEQ ID NO: 29795 - DNA, 339 bp, Homo sapiens
  misc_feature (1)...(339): n = a,t,c or g
gaggatctaaaaactataaaaaaaataattataaaaatatccccgtggataagtggataaccccaagggaagttttttcaggcatcgtgtgtaagcagaatatataagtgctgttccctggtnnnnnnnnnnnnnnnnnnnnnnnnnnnnnnnnnnnnnnnnnnnnnnnnnnnnnnnnngctgtaaaagggcagaccacatcatggttctgtgttcaatagggtgttctgtccactgctgacataatccgttccgcttcaaggtaacaccgcacgaaggtttctattgttcgtgaaggcatattcaaatcgttttcgttaccgcctgcaggcctcatct

SEQ ID NO: 29796 - DNA, 647 bp, Homo sapiens
  misc_feature (1)...(647): n = a,t,c or g
tgtctgaccnnnnnnnnnnnnnnnnnnnnnnnnnnnnnnnnnnnttaatctcaggagcctgtgtagcgtttataggaagtagtgttctgtcatgatgcctggaagcggtaacgaaaacgatttgaatatgccttcaggaacaatagaaatcttcgtgcggtgttacgttgaagtggagcggattatgtcagcaatggacagaacaacctaatgaacacagaaccatgatgtggtctgtccttttacagcnnnnnnnnnnnnnnnnnnnnnnnnnnnnnnnnnnnnnnnnnnnnnnnnnnnnnnnnnaccagggaacagcacttatatattctgcttacacacgatgcctgaaaaaacttcccttggggttatccacttatccacggggatatttttataaatattttttttataggttttaaaaccttcttttttagagcgccttgtaggcctttatccatgctgggtttagagaaggtgttgtgacaaattgcctttcagtgtgacaaatcaccctcaaatgacagtcctgtctgtgacaaattgcccttaaccctgtgacaaatngccctcagaagaggcatgtttttcacacagatattcctgcttattgactcttttttatttagngngacaatctacaaact

SEQ ID NO: 29797 - DNA, 651 bp, Homo sapiens
  SIMILAR (1)..(336): 961254mologous to unidentified cloning vector 29kD protein essential for the replication of mini F plasmid,accession number AB015619,Smith-Waterman Score=544.
atggcggaaacagcggttatcaatcacaagaaacgtaaaaatagcccgcgaatcgtccagtcaaacgacctcactgaggcggcatatagtctctcccgggatcaaaaacgtatgctgtatctgttcgttgaccagatcagaaaatctgatggcaccctacaggaacatgacggtatctgcgagatccatgttgctaaatatgctgaaatattcggattgacctctgcggaagccagtaaggatatacggcaggcattgaagagtttcgcggggaaggaagtggttttttatcgccctgaagaggatgccggcgatgaaaaggctatgaatcttttccttggtttatcaaacgtatttattcgcgataagctcatggagcggcgtaaccgtcgcacaggaaggacagagaaagcgcggatctgggaagtgacggacagaacggtcaggacctggattggggaggcgggtgccgccgctgctgctgacggtgtgacgttctctggtgcggtcacaccaaatacgttccgccgattctatgcaaggcacatgctgggatgccgattaagaagtgattttcatctgcttcacattctcaaggatgaaggtactcaagtcaaccattttgtccaggagcctctgaatggatcttga

SEQ ID NO: 29798 - DNA, 891 bp, Homo sapiens
  SIMILAR (1)..(408): 851254mologous to unidentified cloning vector 29kD protein essential for the replication of mini F plasmid,accession number AB015619,Smith-Waterman Score=578.
atggcggaaacagcggttatcaatcacaagaaacgtaaaaatagcccgcgaatcgtccagtcaaacgacctcactgaggcggcatatagtctctcccgggatcaaaaacgtatgctgtatctgttcgttgaccagatcagaaaatctgatggcaccctacaggaacatgacggtatctgcgagatccatgttgctaaatatgctgaaatattcggattgacctctgcggaagccagtaaggatatacggcaggcattgaagagtttcgcggggaaggaagtggttttttatcgccctgaaaaggatgccggcgatgaaaaaggctatgaatcttttcccttggtttatcaaacattccacaaacatcacatcactctctttgtggtttttctcatcctgtacacattaactgtggctggcaatgccatcatcatgaccatcatctgcattgaccgtcacctccacactcccatgtacttcttcctgagcatgctggctagctcaaagacagtgtacacactgttcatcattccacagatgctctccagcttcgtaacccagacccagccaatctccctagccggttgtaccacccaaacgttcttctttgttaccttggccatcaacaattgcttcttgctcacagtgatgggctatgaccactatatggccatctgcaatcccttgagatacagggtcattacgagcaagaagtcatatacctttgacctccctacttgtctgagcaatggcttccacgaggctagtgaggacagaaacccaaacagtagcttgtccatgttcttagcttgggctcttacagcagcagcagtgaccgggatgagggtatcagatagcacaatggttgtgcccacccagcttctaacttag

SEQ ID NO: 29799 - DNA, 814 bp, Homo sapiens; identical to SEQ ID NO: 8939
  SIMILAR (1)..(444): 991254mologous to unidentified cloning vector 29kD protein essential for the replication of mini F plasmid,accession number AB015619,Smith-Waterman Score=761.

SEQ ID NO: 29800 - DNA, 1164 bp, Homo sapiens
  SIMILAR (37)..(531): 1001254mologous to unidentified cloning vector 29kD protein essential for the replication of mini F plasmid,accession number AB015619,Smith-Waterman Score=864.
  misc_feature (1)...(1164): n = a,t,c or g
atggatctgtcatggcggaaacagcggttatcaatgcacaagaaacgtaaaaatagcccgcgaatcgtccagtcaaacgacctcactgaggcggcatatagtctctcccgggatcaaaaacgtatgctgtatctgttcgttgaccagatcagaaaatctgatggcaccctacaggaacatgacggtatctgcgagatccatgttgctaaatatgctgaaatattcggattgacctctgcggaagccagtaaggatatacggcaggcattgaagagtttcgcggggaaggaagtggttttttatcgccctgaagaggatgccggcgatgaaaaaggctatgaatcttttccttggtttatcaaacgtgcgcacagtccatccagagggctttacagtgtacatatcaacccatatctcattcccttctttatcgggttacagaaccggtttacgcagtttcggcttagtgaaacaaaagaaatcaccaatccgtatgccatgcgtttatacgaatccctgtgtcagtatcggtacagcttccctcctgactacttccatgggctggcattgaatgtctgtggcttttccaggtacacggttcaagatgttggtggatctattattcttgggtctggaggacagtggctctcttctcacagctccagcaggcagtgccccanagatccccttcctcatgactatgatgtcatagttattgacagcgcgcctaacctgggtatcggcacgattaatgtcgtatgtgctgctgatgtgctgattgttcccacgcctgctgagttgtttgactacacctccgcactgcagtttttcgatatgcttcgtgatctgctcaagaacgttgatcttaaagggttcgagcctgatgtacgtattttgcttaccaaatacagcaatagtaatggctctcagtccccgtggatggaggagcaaattcgggatgcctggggaagcatggttctaaaaaatgttgtacgtgaaacggatgaagttggtaaaggtcagatccggatgagaactgtttttgaacaggccattgatcaacgctcttcaactggtgcctggagaaatgctctttctatttgggaacctgtctgcaatgaaattttcgatcgtctgattaaaccacgctgggagattagataa

SEQ ID NO: 29801 - DNA, 660 bp, Homo sapiens
  SIMILAR (74)..(436): 951254mologous to unidentified cloning vector 29kD protein essential for the replication of mini F plasmid,accession number AB015619,Smith-Waterman Score=591.
gaaacctgacctacaacaactcgatagccattgtgacaatctaaaaacttgtcacacttcacatggatctgtcatggcggaaacagcggttatcaatcacaagaaacgtaaaaatagcccgcgaatcgtccagtcaaacgacctcactgaggcggcatatagtctctcccgggatcaaaaacgtatgctgtatctgttcgttgaccagatcagaaaatctgatggcaccctacaggaacatgacggtatctgcgagatccatgttgctaaatatgctgaaatattcggattgacctctgcggaagccagtatggatatacggcaggcattgaagagtttcgcggggaaggaagtggttttttatcgccctgaagaagatgccggcgatgaaaaaagctatgaatcttttccttggtttatcaaaccttgtttttcttttaacagtcaggcccctcttctgcagggttgctgcggtttgctggggatccactccagagcctattcacctgggtcccttccacccctggaggtgttaccagtgtatgctgcagaacagcaaagatcggttgcctgctcgttcctctgggatgtctatctcatgaggagcactgacctgatgacagctggaatgctcctgtataaggtgtctggtgacccctg

SEQ ID NO: 29802 - DNA, 345 bp, Homo sapiens
  SIMILAR (82)..(189): 301254mologous to Nicotiana tabacum Avr9/Cf-9 rapidly elicited protein 65,accession number AF211539,Smith-Waterman Score= 66.
aattatcctgagaataaatgccttggcctttatatggaaatgtggaactgagtggatatgctgtttttgtctgttaaacagagaagctggctgttatccactgagaagcgaacgaaacagtcgggaaaatctcccattatcgtagagatccaaaacaagcctggagcctccaaactgaatgggacaggggagaaacccacagaccagaagaacctatggctgtcagttccggatggttaagtgacatgggattgaaatgaaatgtgaagagttaatactataacttatttcttacttgtgaaattatagagttaggctacaagtttttggaggtttttgatatct

SEQ ID NO: 29803 - DNA, 643 bp, Homo sapiens
  SIMILAR (1)..(375): 961254mologous to unidentified cloning vector 29kD protein essential for the replication of mini F plasmid,accession number AB015619,Smith-Waterman Score=609.
atggcggaaacagcggttatcaatcacaagaaacgtaaaaatagcccgcgaatcgtccagtcaaacgacctcactgaggcggcatatagtctctcccgggatcaaaaacgtatgctgtatctgttcgttgaccagatcagaaaatctgatggcaccctacaggaacatgacggtatctgcgagatccatgttgctaaatatgctgaaatattcggattgacctctgcggaagccagtaaggatatacggcaggcattgaagagtttcgcggggaaggaagtggttttttatcgccctgaagaggatgccggcgatgaaaaaggctatgaatcttttccttggtttatcaaacggccccgatgtagtgcttcacggcaccccgaccccaaaaaacttgacggagttatggttcccggagtggaccatcgccgtgacagtcggtgctccgccataggacgacatagagcgcgttcgccaatagcggactctagccccaaaaggaaccgacactcaagccgcgaatgtaggatgcagcgaaagacaggatcgcattatcatttttggcagaatagtactccatgtcgagtaagtacgacattttcgtttgccgttcgtactgatgatcggcacttaggctgcacag

SEQ ID NO: 29804 - DNA, 1075 bp, Homo sapiens
  SIMILAR (395)..(778): 921254mologous to unidentified cloning vector 29kD protein essential for the replication of mini F plasmid,accession number AB015619,Smith-Waterman Score=606.
agatactggaaacaatgagtggaagcagcaggagggactcagtcacaacaattggcttggtcttggatgcctctttggtcctgagacacccattttctacccagcaacactgggtcatacaagcagtatttattatgaaagaaaaaaggaagataagaatggcatgaaggaagagcatgatacaagtgtcgcaatgttctttaccttattcaatttccaaatttctgttgagaacattagaaaaggccccatggtggtaggagagtcaattgctcagagttacctaaatgttgtacaagaaatattcaggtccagaaaccaccagcttctccaggacttaacaagggacttgtgtgacaatctaaaaacttgtcacacttcacatggatctgtcatggcggaaacagcggttatcaatcacaagaaacgtaaaaatagcccgcgaatcgtccagtcaaacgacctcactgaggcggcatatagtctctcccgggatcaaaaacgtatgctgtatctgttcgttgaccagatcagaaaatctgatggcaccctacaggaacatgacggtatctgcgagatccatgttgctaaatatgctgaaatattcggattgacctctgcggaagccagtaaggatatacggcaggcattgaagagtttcgcggggaaggaagtggttttttatcgccctgaagaggatgccggcgatgaaaaaggctatgaatcttttccttggtttatcaaacaacggagtaacctcggtgtgcggttgtatgcctgctgtggattgctgctgtgtcctgcttatccacaacattttgcgcacggttatgtggacaaaatacctggttacccaggccgtgccggcacgttaaccgggctgcatccgatgcaagtgtgtcgctgtcgacgtcaggcaccgtgtatgaaatctaacaatgcgctcatcgtcatcctcggcaccgtcaccctggatgctgtaggcataggcttggttatgccggtactgccgggcctcttgcgggatatcgtccatttccgacagcatcgccagtcactatggcgtgcctgttag

SEQ ID NO: 29805 - DNA, 1170 bp, Homo sapiens; identical to SEQ ID NO: 5226
  SIMILAR (430)..(1053): 901254mologous to unidentified cloning vector 29kD protein essential for the replication of mini F plasmid,accession number AB015619,Smith-Waterman Score=946.
  misc_feature (1)...(1170): n = a,t,c or g

SEQ ID NO: 29806 - DNA, 1695 bp, Homo sapiens
  SIMILAR (355)..(981): 991254mologous to unidentified cloning vector 29kD protein essential for the replication of mini F plasmid,accession number AB015619,Smith-Waterman Score=1085.
atggaatacgcgctccgcccacccagagagaaaaatgggggccacgcgggcagcatcccccctcacacgccccccaagccaaagcttcagccaggccggcaagcaccgcggccggtagtcccaagccccccggcagggcgaggcaggcacaaccccccgaaccccgcaaggggcaagttccaattccgcacaggcgagcgaaaggagcggacgaaaagcggagagccggcgaaacggaaaaacacgggggagagggggccaacaccggacggggaaccccccaaaaacgcgcaagaagaaacaaggcccgcgaggccaggcgggggggcagccggccccggaaggatctgtcaggcggaaacagcggttatcaatcacaagaaacgtaaaaatagcccgcgaatcgtccagtcaaacgacctcactgaggcggcatatagtctctcccgggatcaaaaacgtatgctgtatctgttcgttgcccagatcagaaaatctgatggcaccctacaggaacatgacggtatctgcgagatccatgttgctaaatatgctgaaatattcggattgacctctgcggaagccagtaaggatatacggcaggcattgaagagtttcgcggggaaggaagtggttttttatcgccctgaagaggatgccggcgatgaaaaaggctatgaatcttttccttggtttatcaaacgtgcgcacagtccatccagagggctttacagtgtacatatcaacccatatctcattcccttctttatcgggttacagaaccggtttacgcagtttcggcttagtgaaacaaaagaaatcaccaatccgtatgccatgcgtttatacgaatccctgtgtcagtatcgtaagccggatggctcaggcatcgtctctctgaaaatcgactggatcatagagcgttaccagctgcctcaaagttaccagcgtatgcctgacttccgccgccgcttcctgcagcgcttggtcttcttggcagcatttgttgtgtatttggaaacagaaacactagtgactcgagaagcagttacagaaattcttggcaaaattgccgatgggagtcgccgtcgtaaagctgctgcacttaccgaaagtgattatcgtgttctggttggcgagctggatgatgagcagatggctgcattatccagattgggtaacgattatcgcccaacaagtgcttatgaacgtggtcagcgttatgcaagccgattgcagaatgaatttgctggaaatatttctgcgctggctgatgcggaaaatatttcacgtaagattattacccgctgtatcaacaccgccaaattgcctaaatcagttgttgctcttttttctcaccccggtgaactatctgcccggtcaggtgatgcacttcaaaaagcctttacagataaagaggaattacttaagcagcaggcatctaaccttcatgagcagaaaaaagctggggtgatatttgaagctgaagaagttatcactcttttaacttctgtgcttaaaacgtcatctgcatcaagaactagtttaagctcacgacatcagtttgctcctggagcgacagtattgtataagggcgataaaatggtgcttaacctggacaggtctcgtgttccaactgagtgtatagagaaaattgaggccattcttaaggaacttgaaaagccagcaccctga

SEQ ID NO: 29807 - DNA, 1791 bp, Homo sapiens; identical to SEQ ID NO: 5223
  SIMILAR (751)..(1266): 951254mologous to unidentified cloning vector 29kD protein essential for the replication of mini F plasmid,accession number AB015619,Smith-Waterman Score=852.

SEQ ID NO: 29808 - DNA, 963 bp, Homo sapiens
  SIMILAR (247)..(774): 981254mologous to unidentified cloning vector 29kD protein essential for the replication of mini F plasmid,accession number AB015619,Smith-Waterman Score=897.
atgaaactcatggaaacacttaaccagtgcataaacgctggtcatgaaatgacgaaggctatcgccattgcacagtttaatgatgacagcccggaagcgaggaaaataacccggcgctggagaataggtgaagcagcggatttagttggggtttcttctcaggctatcagagatgccgagaaagcagggcgactaccgcacccgtgtgacaatctaaaagcttggcacacttcacatggatctgtcatggcggaaacagcggttatcaatcacaagaaacgtaaaaatagcccgcgaatcgtccagtcaaacgacctcactgaggcggcatatagtctctcccgggatcaaaaacgtatgctgtatctgttcgttgaccagatcagaaaatctgatggcaccctacaggaacatgacggtatctgcgagatccatgttgctaaatatgctgaaatattcggattgacctctgcggaagccagtaaggatatacggcaggcattgaagagtttcgcggggaaggaagtggttttttatcgccctgaagaggatgccggcgatgaaaaaggctatgaatcttttccttggtttatcaaacgtgcgcacagtccatccagagggctttacagtgtacatatcaacccatatctcattcccttctttatcgggttacagaaccggtttacgcagtttcggcttagtgaaacaaaagaaatcaccaatccgtatgccatgcgtttatacgaatccctgtgtcagtatctcgggaaacctgtcgtgccagctgcattaatgaatcggccaacgcgcggggagaggcggtttgcgtattgggcgccagggtggtttttcttttcaccagtgagacgggcaacagctgattgcccttcaccgcctggccctgagagagttgcagcaagcggtccacgctggtttgccccagcaggcgaaaatcctgtttga

SEQ ID NO: 29809 - DNA, 1385 bp, Homo sapiens
  SIMILAR (730)..(1257): 981254mologous to unidentified cloning vector 29kD protein essential for the replication of mini F plasmid,accession number AB015619,Smith-Waterman Score=905.
atgaatcagcaaaacagccagcactttaacttgcaacctgagcatcccacaggggtcccagccatcgtagtgccagctacatttgctgaagtggtcaccgtcgacagcgacacacttgcatcggatgcagcccggttaacgtgccggcacggcctgggtaaccaggaccagggcttatatcagagagagaaagataatggtaaatgttccatttattctaggagggccaattatgaattggcagagacaattagaacccaatcattagacaatattgttgtcaccaagagtggtcttcgcaacctgcagaccaagagaatccctatggtgctatgccaccaggatcctgagtttcaagcacacagctggatggccatttgggcagacaccaaactagctgcaggagtttttttcataccccagtggcacctggaatgccagagagacagaaccattgactcccctggaaaggggactgaagccagggagccaagtgctgtagcccagcagatctcaccctcatggagtccagcaagaaaggagctactcattttgggtctcctgaaagctgtcctgtcacttaatgaagcttctctccaccttgctcacacacaagttgtcctgtacctcattcttcctggacatgagacaagaacttggacctaccaaatggcaggactgaaagagtgtgacaatctaaaaacttgtcacacttcacatggatctgtcatggcggaaacagcggttatcaatcacaagaaacgtaaaaatagcccgcgaatcgtccagtcaaacgacctcactgaggcggcatatagtctctcccgggatcaaaaacgtatgctgtatctgttcgttgaccagatcagaaaatctgatggcaccctacaggaacatgacggtatctgcgagatccatgttgctaaatatgctgaaatattcggattgacctctgcggaagccagtaaggatatacggcaggcattgaagagtttcgcggggaaggaagtggttttttatcgccctgaagaggatgccggcgatgaaaaaggctatgaatcttttccttggtttatcaaacgtgcgcacagtccatccagagggctttacagtgtacatatcaacccatatctcattcccttctttatcgggttacagaaccggtttacgcagtttcggcttagtgaaacaaaagaaatcaccaatccgtatgccatgcgtttatacgaatccctgtgtcagtatcgtacccaagattgtgttccttcctgtgacgtcagtttgctacctacacctccaagccatcatgaaggcgtttcgatccacaactcttccgaacacctgcatccgttagaaagtctgcatcatgatacgctggcattcag

SEQ ID NO: 29810 - DNA, 1489 bp, Homo sapiens
  SIMILAR (789)..(929): 471254mologous to unidentified cloning vector 29kD protein essential for the replication of mini F plasmid,accession number AB015619,Smith-Waterman Score=94.
atgtggctagtgactactgaactggaaagcacagatacagaacatttctatcatcacagtaagtgctattggcccagagctcatctaggtgaatgcatcctgtccatagaggcagcctgccaagcagctggaggggaagctggaaatggaggcagtgcagtaacgaaagcaacattaggctccaggcagggggcccaacactggaaagccctagccagaacaatcagacaagagaaggaaataaagggcatccaaatcggtaaacaggaagtcaaactgttgccatttgctgatgatatgatcatatacctagaaaactctacagattcctccaaaaagctctcagaactgtgtgacaatctaaaaacttgtcacacttcacatggatctgtcatggcggaaacagcggttatcaatcacaagaaacgtaaaaatagcccgcgaatcgtccagtcaaacgacctcactgaggcggcatatagtctctcccgggatcaaaaacgtatgctgtatctgttcgttgaccagatcagaaaatctgatggcaccctacaggaacatgacggtatctgcgagatccatgttgctaaatatgctgaaatattcggattgacctctgcggaagccagtaaggatatacggcaggcattgaagagtttcgcggggaaggaagtggttttttatcgccctgaagaggatgccggcgatgaaaaaggctatgaatcttttccttggtttatcaaacgtgcgcacaggtccattccagagggcgctttacagttgtaccatatgcaacccataaatcctcattcccttctcttttaatcgggttacagaaccggtttacgcagtttcgggcttagtgaaacaaaagaaatcaccaatcccgtatgcccttgcgtttataccaatccctgtgtcagtatcgaatttaagggctaaggagacaaaggtcatttctggctgggatgacacagtaagacgtcatggagaagatgaggatttggcctggactttgtggactatattaatttcaatagcaaagtttggtggtggggaggtgcaggaagaagaaaatggggagggtgcccccaaacacagaatcagcctgattgacatcggcctggtgatcgagtacctgatgggcggggcttatcgctgcaactacacgcgcaagcgcttccggaccctctaccacaacctcttcggccccaagagggtaattctgggaattctacttcctccttcaattctcagcttggagttcaagaacaaagacgacatgccctatatgtctcaggcccaggaaatccacctccaagagaaggaggcagaagaaccagagaagcccacaaaggaaaaagaggaagaggacatggagctcacaagtgggtaccgagctcgaattcgtaatcatggtcatagctgtttcctgtgtgaaattggtatgcgcggacaattccacacaacatacgagccggaagcataa

SEQ ID NO: 29811 - DNA, 1644 bp, Homo sapiens
  SIMILAR (208)..(963): 901254mologous to unidentified cloning vector 29kD protein essential for the replication of mini F plasmid,accession number AB015619,Smith-Waterman Score=1168.
atgggaagaagattgtcagtactgggagctaccaccagccaagacgccacagccaccaggatggggtatctctacaccagctgggtgtcattcactagctgtttatttaatttaaataactttatctaccccaagaaatctaaacgaggaacagtgcccagcaagtgtgacaatctaaaaacttgtcacacttcacatggatctgtcatggcggaaacagcggttatcaatcacaagaaacgtaaaaatagcccgcgaatcgtccagtcaaacgacctcactgaggcggcatatagtctctcccgggatcaaaaacgtatgctgtatctgttcgttgaccagatcagaaaatctgatggcaccctacaggaacatgacggtatctgcgagatccatgttgctaaatatgctgaaatattcggattgacctctgcggaagccagtaaggatatacggcaggcattgaagagtttcgcggggaaggaagtggttttttatcgccctgaagaggatgccggcgatgaaaaaggctatgaatcttttccttggtttatcaaacgtgcgcacagtccatccagagggctttacagtgtacatatcaacccatatctcattcccttctttatcgggttacagaaccggtttacgcagtttcggcttagtgaaacaaaagaaatcaccaatccgtatgccatgcgtttatacgaatccctgtgtcagtatcgtaagccggatggctcaggcatcgtctctctgaaaatcgactggatcatagagcgttaccagctgcctcaaagttaccagcgtatgcctgacttccgccgccgcttcctgcaggtctgtgttaatgagatcaacagcagaactccaatgcgcgggggatctcacaccccaaccggattcagcacgcaaggcataattaattatttttctttcttcgcggtggcggccgccagagggggagaggcccaaaacgcgcgaaaaacacaatcgcttcgtggaaacaacaacagggcttatgagaggcaaaaatcagagaaacctaggacaaaaatagtgggtatcctctacagtcggctggattcagccagtaggcctttttcttcggtttgcctatttagcgtgctcaccacgaaatgcccagacccccggcgcacaccgtgtgcctggcacactggacaccaactcggacccgccaccacccacaccgccggcaagggcgcgcccacgcggcccccgctggtccagaccgcccgcaacaaacccaatggacaaccccgaagcaccccacacccccaccgcgtacagaaaggcggcgcgcacacgaaccgcacccgcccccgcaagcgcgggccaacgcgccgaacaccgcgaaggaaccgcgacgccaccagagccaccacgcagcccacgccaccaccgggcgcggcagccaggagccgaacgcccccacacacaccaccccgccaacgcaaccgccgcaacgccggcgcaaccgacgccacgaccagcgacggcagccccggagagcccgggcgagcaagggcccacaccaacgcccccccgagagcggccacaccccggcccggccccaaacgaccgcgagagcgaagaaaaaggaaagaaacacgaaacgtggcttga

SEQ ID NO: 29812 - DNA, 1554 bp, Homo sapiens
  SIMILAR (1)..(396): 891254mologous to unidentified cloning vector 29kD protein essential for the replication of mini F plasmid,accession number AB015619,Smith-Waterman Score=611.
atggcggaaacagcggttatcaatcacaagaaacgtaaaaatagcccgcgaatcgtccagtcaaacgacctcactgaggcggcatatagtctctcccgggatcaaaaacgtatgctgtatctgttcgttgaccagatcagaaaatctgatggcaccctacaggaacatgacggtatctgcgagatccatgttgctaaatatgctgaaatattcggattgacctctgcggaagccagtaaggatatacggcaggcattgaagagtttcgcggggaaggaagtggttttttatcgccctgaagaggatgccggcgatgaaaaaggctatgaatcttttccttggtttatcaaacggtttattgagaatatgtttttcgtctcagccaatccctgggtgagtttcaccagttttgatttaaacgtggccaatatggacaacttcttcgcccccgtgtggaccatgggcaaatattatacgcaaggcgacaaggtgctgatgccgctggcgattcaggttcatcatgccgtttgtgatggcttccatgtcggcagaatgcttaatgaattacaacagtactgcgatgagtggcagggcggggcagatgtcacttatgcaggagcgcccacttgctggccagagcttgacattattccttcctgtctggctctgcaccgtattgaaactgagttaatgggcaaatttgatgaaggtaaactgcccaccgatccacacttgatgctcctactggccattgaaactgttgctcatgactatggtggggtagttattgacagcgcgcctaacctgggtatcggcacgatgagggtagtatgtgctgctgatgtactaattgttcccacgcctgctgagttgtttgactacacctccgcactgcagtttttcgatatgcttcgtgatctgctcaagaacgttgatcttaaagggttcgagcctgatgtacgtattttgcttaccaaatacagcaatagtgatggctctcagcccccgtggatagaggagcaaattccggatgcgctgggaagcatggttcttaaaaatgttcaaaatacgtacatcaggctcgaaccctttaagatcaacgttcttgagcagatcacgaagcatatcgaaaaactgcagtgcggaggtgtagtcaaacaactcagcaggcgtgggaacaatcagcacatcagcagcacatacgacattaatcgtgccgatacccacaaccggtttacgcagtttcggcttagtgaaacaaaagaaatcaccaatccgtatgccatgcgtttatacgaatccctgtgtcagtatcgtaagccggatggctcaggcatcgtctctctgaaaatcgactggagcatagagcgttaccagctgcctcaaagttaccagcgtatgcctgacttccgccgccgcttcctgcaggtctgtgttaatgagatcaacagcagaactccaatgcgcctctcatacattgagaaaaagaaaggccgccagacgactcatatcgtattttccttccgcgatatcacttccatgacgacaggatag

SEQ ID NO: 29813 - DNA, 1515 bp, Homo sapiens
  SIMILAR (979)..(1320): 1001254mologous to unidentified cloning vector 29kD protein essential for the replication of mini F plasmid,accession number AB015619,Smith-Waterman Score=587.
tcacccgtcaccctcacggtcacctactacgccagacacacgtcactgtcacggtcacccgtcaccctcacggtcacctactacgccagacacacgtcactgtcacggtcacccgtcaccctcacggtcacctactacgccagacacacgtcactgtcacggtcacccgtcaccctcacggtcacctactacgccagacacacgtcactgtcacggtcacccgtcaccctcacggtcacctactacgccagacacacgtcactgtcacggtcacccgtcaccctcacggtcacctactacgccagacacacgtcactgtcacggtcacccgtcaccctcacggtcacctactacgccagacacacgtcactgtcacggtcacccgtcaccctcacggtcacctactacgccagacacacgtcactgtcacggtcacccgtcaccctcacggtcacctactacgccagacacacaattgcaaatatatttgggtgccaatatgcacaaaactctaaccacttccggaataacatctccagcttttctaatagagatagtatctcctactctaacatccttaccccatgccaggatgttccaggcatcgtcgcctcgccaccacctccattcacgcggggatcctctagagtcaactgcggggtcatgcacctagggaagaagtcatacatgctgggtattgacagtgtggggattggagcagttaaaacagacacagtcggcacagttcccccgactagagattcaaaaggaagcaaatgtgaggcagggagaatttggataaacagggattttgccgatttcggaaccaccatcaaacaggattttcgcctgctggggcaaaccagcgtggaccgcttgctgcaactctctcagggccaggcggtgaagggcaatcagctgttgcccgtctcactgtgtgacaatctaaaaacttgtcacacttcacatggatctgtcatggcggaaacagcggttatcaatcacaagaaacgtaaaaatagcccgcgaatcgtccagtcaaacgacctcactgaggcggcatatagtctctcccgggatcaaaaacgtatgctgtatctgttcgttgaccagatcagaaaatctgatggcaccctacaggaacatgacggtatctgcgagatccatgttgctaaatatgctgaaatattcggattgacctctgcggaagccagtaaggatatacggcaggcattgaagagtttcgcggggaaggaagtggttttttatcgccctgaagaggatgccggcgatgaaaaaggctatgaatcttttccttggttatcaaacgaacttggagtggaggtggattctgtggagaatgaagacagaactagctgcaaatgtgagctcctggcccctctgagcagccatattaaagatcaaagggacaaagcctgtgcattccagatggaatcaggcagcaaagcacagctacgaaagcattcttggctgtcataccctcgagtgccatga

SEQ ID NO: 29814 - DNA, 1525 bp, Homo sapiens
  SIMILAR (770)..(1522): 991254mologous to unidentified cloning vector 29kD protein essential for the replication of mini F plasmid,accession number AB015619,Smith-Waterman Score=1293.
ttaaatacacaaccctcgttttatagcgcgctggagcggctcggctttctttctggagaagataattgcgccgccgccgtaaggcttgtttaaaaaaaaaaatttcccccggggagcggtttcttttccccccgtggggtcggataaaagagaatttatggccgttttttctaacaaaggaggggcgctcctcggaatgttgtcgccgggaggaatattgccttcatcgaaaaaatgctgaacggtccgataagatttttcggccccgcccaaaaacagtttgtggtgttccactccgctgattttgagtggggcatcagaatatgacacacataactgcgccgctgtcaggccttgtttggcgccatgtatatcggcagagacagcgtagaaataaacgaatgttccgtcagaagtaataggtgcggagacagaccaatcctgcgtctgatcttcacgagcggaacgatggcggcgaacatatcgctgtctaggaaggacagagaaagcgcggatctgggaagtgacggacagaacggtcaggacctggattggggaggcggttgccgccgctgctgctgacggtgtgacgttctctgttccggtcacaccacatacgttccggcattcctatgcgatgcacatgctgtatgccggtataccgctgaaagttctgcaaagcctgatgggacataagtccatcagttcaacggaagtctacacgaagtgtgacaatctaaaaacttgtcacacttcacatggatctgtcatggcggaaacagcggttatcaatcacaagaaacgtaaaaatagcccgcgaatcgtccagtcaaacgacctcactgaggcggcatatagtctctcccgggatcaaaaacgtatgctgtatctgttcgttgaccagatcagaaaatctgatggcaccctacaggaacatgacggtatctgcgagatccatgttgctaaatatgctgaaatattcggattgacctctgcggaagccagtaaggatatacggcaggcattgaagagtttcgcggggaaggaagtggttttttatcgccctgaagaggatgccggcgatgaaaaaggctatgaatcttttccttggtttatcaaacgtgcgcacagtccatccagagggctttacagtgtacatatcaacccatatctcattcccttctttatcgggttacagattctttttacgcagtttcggcttagtgaaacaaaagaaatcaccaatccgtatgccatgcgtttatacgaatccctgtgtcagtatcgtaagccggatggctcaggcatcgtctctctgaaaatcgactggatcatagagcgttaccagctgcctcaaagttaccagcgtatgcctgacttccgccgccgcttcctgcaggtctgtgttaatgagatcaacagcagaactccaatgcgcctctcatacattgagaaaaagaaaggccgccagacgactcatatcgtattttccttccgcgatatcacttccatgacgacaggatag

SEQ ID NO: 29815 - DNA, 2021 bp, Homo sapiens
  SIMILAR (375)..(899): 981254mologous to unidentified cloning vector 29kD protein essential for the replication of mini F plasmid,accession number AB015619,Smith-Waterman Score=900.
  misc_feature (1)...(2021): n = a,t,c or g
ctgccccgatggtggattcgttaattgcgcgcgtaggagtaatggctcgcggtaatgccattactttgcctgtatgtggtcgggatgtgaagtttactcttgaagtgctccggggtgatagtgttgagaagacctctcgggtatggtcaggtaatgaacgtgaccaggagctgcttactgaggacgcactggatgatctcatcccttcttttctactgactggtcaacagacaccggcgttcggtcaaagagtatctggtgtcatagaaattgccgattgggaagtcgccgtcgttaagctgctgcactttaccgaagtgattatcgngacatttcgtagaactcccccttgtcacacttcacatggatctgtcatggcggaaacagcggttatcaatcacaagaaacgtaaaaatagcccgcgaatcgtccagtcaaacgacctcactgaggcggcatatagtctctcccgggatcaaaaacgtatgctgtatctgttcgttgaccagatcagaaaatctgatggcaccctacaggaacatgacggtatctgcgagatccatgttgctaaatatgctgaaatattcggattgacctctgcggaagccagtaaggatatacggcaggcattgaagagtttcgcggggaaggaagtggttttttatcgccctgaagaggatgccggcgatgaaaaaggctatgaatcttttccttggtttatcaaacgtgcgcacagtccatccagagggctttacagtgtacatatcaacccatatctcattcccttctttatcgggttacagaaccggtttacgcagtttcggcttagtgaaacaaaagaaatcaccaatccgtatgccatgcgtttatacgaatccctgtgtcagtatcctgccccgatggtggattcgttaattgcgcgcgtaggagtaatggctcgcggtaatgccattactttgcctgtatgtggtcgggatgtgaagtttactcttgaagtgctccggggtgatagtgttgagaagacctctcggtgtgacaatctaaaaacttgtcacacttcacatggatctgtcatggcggaaacagcggttatcaatcacaagaaacgtaaaaatagcccgcgaatcgtccagtcaaacgacctcactgaggcggcatatagtctctcccgggatcaaaaacgtatgctgtatctgttcgttgaccagatcagaaaatctgatggcaccctacaggaacatgacggtatctgcgagatccatgttgctaaatatgctgaaatattcggattgacctctgcggaagccagtaaggatatacggcaggcattgaagagtttcgcggggaaggaagtggttttttatcgccctgaagaggatgccggcgatgaaaaaggctatgaatcttttccttggtttatcaaacgtgcgcacagtccatccagagggctttacagtgtacatatcaacccatatctcattcccttctttatcgggttacagaaccggtttacgcagtttcggcttagtgaaacaaaagaaatcaccaatccgtatgccatgcgtttatacgaatccctgtgtcagtatcacccccttaccattgaaaaagtaatgaagccgctgatcacttcaaacacggtaactgatgaaatcgagcgcgcgaatgttttcaaaatgaacggcaaatggtacttgttcactgattcacgcggttcaaaaatgacgatcgatggtattaactcaaacgatatttacatgcttggttatgtatcaaactctttaaccggcccttacaagccgctgaacaaaacagggcttgtgctgcaaatgggtcttgatccaaacgatgtgacattcacttactctcacttcgcagtgccgcaagccaaaggcaacaatgtggttatcacaagctacatgacaaacagaggcttcttcgaggataaaaaggcaacatttgcgccaagcttcttaatgaacatcaaaggcaataaaacatccgataaactaccgcattaa

SEQ ID NO: 29816 - DNA, 1584 bp, Homo sapiens
  SIMILAR (892)..(1581): 891254mologous to Escherichia coli K12 putative transposase,accession number AE000232,Smith-Waterman Score=1084.
  misc_feature (1)...(1584): n = a,t,c or g
atgggcaaagacttcatgactgaaacaccaaaaacaatggcaacaaaagccaaaattgacaaatgggatctaattaaactcaagagcttctgcacagcaaaagaaactaccatcagagtgaacaggcaacctacagaatgggagaaaattttcacaacctactcatctgacaaagggctaatatccacaatctacaatgaactcaaacaaatttacaagaaaaaaatgaacaaccccatcaaaaagtgggcaaaggatatgaacagacacttctcaaaagaagacatttatgcaaccaacaaacatgaaaaaaagtgtgacaatctaaaaacttgtcacacttcacatggatctgtcatggcggaaacagcggttatcaatcacaagaaacgtaaaaatagcccgcgaatcgtccagtcaaacgacctcactgaggcggcatatagtctctcccgggatcaaaaacgtatgctgtatctgttcgttgaccagatcagaaaatctgatggcaccctacaggaacatgacggtatctgcgagatccatgttgctaaatatgctgaaatattcggattgacctctgcggaagccagtaaggatatacggcaggcattgaagagtttcgcggggaaggaagtggttttttatcgccctgaagaggatgccggcgatgaaaaaggctatgaatcttttccttggtttatcaaacgtgcgcacagtccatccagagggctttacagtgtacatatcaacccatatctcattcccttctttatcgggttacagaaccggtttacgcagtttcggcttagtgaagggtacccaaacccttggaaaatccccccgtttaatatatccccaagggcaatgggaaagaacaattttgagccattccagtccagttgcccaatggaccctaaaacaagccggtccaagtgggatattccggcttttttaaaagnccaattcaatgcattaatggaaagtgaaaaaggacagagccagaacttgtggaaatttgccgtttactcaggacttcgtcacggggaactggcagctctggcgtgggagaatgtggatctcgaaaagggaatagtgaatgtcagaagaaacctgacgatacttgatatgttcggtcccccaaaaacaaatgccgggatccgaacagtaacactactgcagcctgctcttgaagcactgaaggagcaatacaaactgaccgggcatcatcgcaaaagcgaaatcaccttttatcatcgggagtacggcagaaccgaaaagcaaaaactgcattttgttttcatgcccagggtgtgtaacggaaaacaaaaaccttattactcggtaagcagtttgggggcaaggtggaatgcagcagtaaaacgtgctggtattcgccgccgtaatccgtaccatacgcggcatacttttgcctgctggctgttgacggcaggagcgaacccggcatttatagccagccaaatggggcatgaaactgcgcagatggtgtatgaaatttacggtatgtggattgatgacatgaacgccgagcagataaccatgttgaatgcgcggttatcgtag

SEQ ID NO: 29817 - DNA, 867 bp, Homo sapiens
  SIMILAR (241)..(705): 821254mologous to unidentified cloning vector 29kD protein essential for the replication of mini F plasmid,accession number AB015619,Smith-Waterman Score=625.
atgatcaaggcctggcttctgcttggccagctggttggggacgattctgttgctcggagtcagtgtcagggaatgcagaggagcacactggtttgggggatgacgatgagctctattggatgcctgtgggtgtctagaagcagtcagatagatgggctcacggcagagaagtctggcccggagaagcctcatggcacgtgtgacaatctaaaaacttgtcacacttcacatggatctgtcatggcggaaacagcggttatcaatcacaagaaacgtaaaaatagcccgcgaatcgtccagtcaaacgacctcactgaggcggcatatagtctctcccgggatcaaaaacgtatgctgtatctgttcgttgaccagatcagaaaatctgatggcaccctacaggaacatgacggtatctgcgagatccatgttgctaaatatgctgaaatattcggattgacctctgcggaagccagtaaggatatacggcaggcattgaagagtttcgcggggaaggaagtggttttttatcgccctgaagaggatgccggcgatgaaaaaggctatgaatcttttccttggtttatcaaacgcagccaatcgcctcgttgcgaagggaccagcgcagccaatcaggcgtcgttgctacctactttccccttttcccagtccgagtttgacgtcggtctcctggataccaggcagccaatcgcctcgttgcgaagggaccagcgcagccaatcaggcgtcgttgctacctactcgagctacgagcacgactcgagtcaactacacatcgactcacatccgcgcaagtctcggtaccacgagagtaggagttggcaaagtgtgacacttccctattag

SEQ ID NO: 29818 - DNA, 917 bp, Homo sapiens
  SIMILAR (182)..(640): 881254mologous to unidentified cloning vector 29kD protein essential for the replication of mini F plasmid,accession number AB015619,Smith-Waterman Score=673.
cttcctatttagccctttagaaatgcaaatacaacgctttacctccccctcaccagacattccctacagggcaagttcatctaactgtgctccaagagggatctctcctcaagagttgacagtagatttgcagaccaaatgtgacaatctaaaaacttgtcacacttcacatggatctgtcatggcggaaacagcggttatcaatcacaagaaacgtaaaaatagcccgcgaatcgtccagtcaaacgacctcactgaggcggcatatagtctctcccgggatcaaaaacgtatgctgtatctgttcgttgaccagatcagaaaatctgatggcaccctacaggaacatgacggtatctgcgagatccatgttgctaaatatgctgaaatattcggattgacctctgcggaagccagtaaggatatacggcaggcattgaagagtttcgcggggaaggaagtggttttttatcgccctgaagaggatgccggcgatgaaaaaggctatgaatctttttccttggtttatcaaacgtgcgcacagtccaatccagagggcttttacagtgtacatatcaacccatatcttaattcccttttttatggggtacagaaccggtttacgcagtttcggctgaacttcgtgcagaaatctcgcctagtggatctggctctgaaggggctacgtgttttgctcgtggaaggtaacgacccccagggaacagcctcaatgtatcacggatgggtaccagatcttcatattcatgcagaagacactctcctgcctttctatcttggggaaaaggacgatgtcacttatgcaataaagcccacttgctggccggggcttgacattattccttcctgtctggctctgcaccgtattgaaactgagttaatgggcaaatttgatgaag

SEQ ID NO: 29819 - DNA, 1756 bp, Homo sapiens
  SIMILAR (1189)..(1755): 1001254mologous to Cloning vector pSacBII SacB,accession number U09128,Smith-Waterman Score=1002.
atgcctgcaagcggtaacgaaaacgatttgaatatgccttcaggaacaatagaaatcttcgtgcggtgttacgttgaagtggagcggattatggattttgccgatttcggaaccaccatcaaacaggattttcgcctgctggggcaaaccagcgtggaccgcttgctgcaactctctcagggccaggcggtgaagggcaatcagctgttgcccgtctcactggtgaaaagaaaaaccaccctggcgcccaatacgcaaaccgcctctccccgcgcgttggccgattcattaatgcagctggcacgacaggtttcccgactggaaagcgggcatcaggcaccgtgtatgaaatctaacaatgcgctcatcgtcatcctcggcaccgtcaccctggatgctgtaggcataggcttggttatgccggtactgccgggcctcttgcgggatatcgtccattccgacagcatcgccagtcactatggcgtgctgctagcgctatatgcgttgatgcaatttctatgcgcacccgttctcggagcactgtccgaccgctttggccgccgcccagtcctgctcgcttcgctacttggagccactatcgactacgcgatcatggcgaccacacccgtcctgtggatctacccactatgtgacaatctaaaaacttgtcacacttcacatggatctgtcatggcggaaacagcggttatcaatcacaagaaacgtaaaaatagcccgcgaatcgtccagtcaaacgacctcactgaggcggcatatagtctctcccgggatcaaaaacgtatgctgtatctgttcgttgaccagatcagaaaatctgatggcaccctacaggaacatgacggtatctgcgagatccatgttgctaaatatgctgaaatattcggattgacctctgcggaagccagtaaggatatacggcaggcattgaagagtttcgcggggaaggaagtggttttttatcgccctgaagaggatgccggcgatgaaaaaggctatgaatcttttccttggtttatcaaacgtgcgcacagtccatccagagggctttacagtgtacatatcaacccatatctcattcccttctttatcgggttacagaaccggtttacgcagtttcggcttagtgaaacaaaagaaatcaccaatccgtatgccatgcaatccccctacactgactattccggtaaacattacggcaaacaaagcctgacaacagcgcaggtaaatgtgtcaaaatctgatgacacactcaaaatcaacggagtggaagatcacaaaacgatttttgacggagacggaaaaacatatcagaacgttcagcagtttatcgatgaaggcaattatacatccggcgacaaccatacgctgagagaccctcactacgttgaagacaaaggccataaataccttgtattcgaagccaacacgggaacagaaaacggataccaaggcgaagaatctttatttaacaaagcgtactacggcggcggcacgaacttcttccgtaaagaaagccagaagcttcagcagagcgctaaaaaacgcgatgctgagttagcgaacggcgccctcggtatcatagagttaaataatgattacacattgaaaaaagtaatgaagccgctgatcacttcaaacacggtaactgatgaaatcgagcgcgcgaatgttttcaaaatgaacggcaaatggtacttgttcactgattcacgcggttcaaaaatgacgatcgatg

SEQ ID NO: 29820 - DNA, 1656 bp, Homo sapiens
  SIMILAR (655)..(1284): 1001254mologous to unidentified cloning vector 29kD protein essential for the replication of mini F plasmid,accession number AB015619,Smith-Waterman Score=1098.
atggctggaacagcggttatcaatcacaagaaacgtaaaaatagcccgcgaatcgtccagtcaaacgacctcactgaggcggcatatagtctctcccgggatcaaaaacgtatgctgtatctgttcgttgaccagatcagaaaatctgatggcaccctacaggaacatgacggtatctgcgagatccatgttgctaaatatgctgaaatattcggattgacctctgcggaagccagtaaggatatacggcaggcattgaagagtttcgcggggaaggaagtggttttttatcgccctgaagaggatgccggcgatgaaaaaggctatgaatcttttccttggtttatcaaacgtgcgcacagtccatccagagggctttacagtgtacatatcaacccatatctcattcccttctttatcgggttacagaaccggtttacgcagtttcggcttagtgaaacaaaagagatcaccaatccgtatgccatgcgtttatacgaatccctgtgtcagtatcttattaggtccctcgactatagggtcaccgtcgacagcgacacacttgcatcggatgcagcccggttaacgtgccggcacggcctgtgtaaccagtgtgacaatctaaaaacttgtcacacttcacatggatctgtcatggcggaaacagcggttatcaatcacaagaaacgtaaaaatagcccgcgaatcgtccagtcaaacgacctcactgaggcggcatatagtctctcccgggatcaaaaacgtatgctgtatctgttcgttgaccagatcagaaaatctgatggcaccctacaggaacatgacggtatctgcgagatccatgttgctaaatatgctgaaatattcggattgacctctgcggaagccagtaaggatatacggcaggcattgaagagtttcgcggggaaggaagtggttttttatcgccctgaagaggatgccggcgatgaaaaaggctatgaatcttttccttggtttatcaaacgtgcgcacagtccatccagagggctttacagtgtacatatcaacccatatctcattcccttctttatcgggttacagaaccggtttacgcagtttcggcttagtgaaacaaaagaaatcaccaatccgtatgccatgcgtttatacgaatccctgtgtcagtatcgtaagccggatggctcaggcatcgtctctctgaaaatcgactggatcatagagcgttaccagctgcctcaaagttaccagcgtatgcctgacttccgccgccgcttcctgcagccttgggacttggtgccctgcattccacctgctctagccatggcaaaaaggggtcaaggtacagctcagactgttgcttcagagggtgcaagcctcaagccttggcaacttccacatggtgttgggcctgtgggtgcacagaaaacaagaattgaggtttggagacctctgcctagatttcagagggtgtatgccttgaataaacatcagcagcagccacatggtggtggccatgggccttgggtgacccccggtggaagctgcactgatctggaaggcctcaggctttcatggtgttctaatgcagtcaactgtgccgaccacaggactgcaggtatcacccctcccccaactcaaggcagccaagcataa

SEQ ID NO: 29821 - DNA, 2111 bp, Homo sapiens
  SIMILAR (1565)..(1600): 1001254mologous to unidentified cloning vector 29kD protein essential for the replication of mini F plasmid,accession number AB015619,Smith-Waterman Score=60.
ccatggatatccgcgcctgttccggtggacgtggtggagggtgcaatggactctgtgacggttcttagctttggtggtttaatgctctatttttgtgctggttggcctcctgccaggaggtggtgctttccagaaagcatcagctgtggtagtatggagagggaccagtggtgggggctccaagtagcgaagcgagcaggactggccggcggccaaagcggtcggacagtgctccgagaacgggtgcgcatagaaattgcatcaacgcatatagcgctagcagcacgccatagtgactggcgatgctgtcggaatggacgatatcccgcaagaggcccggcagctttgcagaactttcagcggtataccggcatacagcatgtgcatcgcataggaatggcggaacgtatgtggtgtgaccggaacagagaacgtcacaccgtcagcagcagcggcggcaaccgcctccccaatccaggtcctgaccgttcttgtgacaatctaaaaacttgtcacacttcacatggatctgtcatggcggaaacagcggttatcaatcacaagaaacgtaaaaatagcccgcgaatcgtccagtcaaacgacctcactgaggcggcatatagtctctcccgggatcaaaaacgtatgctgtatctgttcgttgaccagatcagaaaatctgatggcaccctacaggaacatgacggtatctgcgagatccatgttgctaaatatgctgaaatattcggattgacctctgcggaagccagtaaggatatacggcaggcattgaagagtttcgcggggaaggaagtggttttttatcgccctgaagaggatgccggcgatgaaaaaggctatgaatcttttccttggtttatcaaacgtgcgcacagtccatccagagggctttacagtgtacatatcaacccatatctcattcccttctttatcgggttacagaaccggtttacgcagtttcggcttagtgaaacaaaagaaatcaccgatccgtatgccatgcgtttatacaaataccctgtgtcagtatcgggctttcgtaaatggggggggagaagaaaaggctcgcggaaagcccatactttgccggtatggggtcgggatgtgaagttaactctgaaagtgctccggggtgatagtgttgagaagacttttcgggtagggtcaggtaatgaacgtgcccagaagctgcttactgaggacgcactggatgatctcatcccttcttttctactgactggtcaacagacaccggcgttcggtcgaagagtatctggtgtcatagaaattgccgatgggagtcgccgtcgtaaagctgctgcacttaccgaaagtgattatcgtgttctggttggcgagctggatgatgagcagatggctgcattatccagattgggtaacgattatcgcccaacaagtgcttatgaacgtggtcagcgttatgcaagccgattgcagaatgaatttgctggaaatactctctgcgctggctgatgcggagtgtgacaatctaaaaacttgtcacacttcacatggatctgtcatggcggaaacagcggttatcaatcacaagaaacgttaaaaatagcccgcgaatcgtccagtcaaacgacctcactgaggcggcatatagtctctcccgggatcaaaaacgtatgctgtatctgttcgttgaccagatcagaaaatctgatggcaccctacaggaacatgacggtatctgcgagatccatgttgctaaatatgctgaaatattcggattgacctctgcggaagccagtaaggatatacggcaggcattgaagagtttcgcggggaaggaagtggttttttatcgccctgaagaggatgccggcgatgaaaaaggctatgaatcttttccttggtttatcaaacgtttgaatctattcaggggaacaggggaccaacctgtgaaagcaggacccgtggtggttgtcctttattccctacggtctgggggcttctcgtgggcctgctgtccctccacatcaagcctgaagccaagaggctccagtgtctactgccaggagccatctcagctccactactggtccaagtacccgatgtga

SEQ ID NO: 29822 - DNA, 3883 bp, Homo sapiens
  SIMILAR (3116)..(3832): 971254mologous to unidentified cloning vector 29kD protein essential for the replication of mini F plasmid,accession number AB015619,Smith-Waterman Score=1217.
  misc_feature (1)...(3883): n = a,t,c or g
atggcggaaacagcggttatcaatcacaagaaacgtaaaaatagcccgcgaatcgtccagtcaaacgacctcactgaggcggcatatagtctctcccgggatcaaaaacgtatgctgtatctgttcgttgaccagatcagaaaatctgatggcaccctacaggaacatgacggtatctgcgagatccatgttgctaaatatgctgaaatattcggattgacctctgcggaagccagtaaggatatacggcaggcattgaagagtttcgcggggaaggaagtggttttttatcgccctgaagaggatgccggcgatgaaaaaggctatgaatcttttccttggtttatcaaacgtgcgcacagtccatccagagggctttacagtgtacatatcaacccatatctcattcccttctttatcgggttacagaaccggtttacgcagtttcggcttagtgaaacaaaagaaatcaccaatccgtatgccatgcgtttatacgaatccctgtgtcagtatcatccccttaaaaatatatcaatcacaatttcctggggtgggggtgggcagttgaggcagtggatgaagagctattggtcaaaggatacgaaatttcagttagaccggagacataagttcaagagccacacgggaacagaaaacggataccaaggcgaagaatctttatttaacaaagcgtactacggcggcggcacgaacttcttccgtaaagaaagccagaagcttcagcagagcgctaaaaaacgcgatgctgagttagcgaacggcgccctcggtatcatagagttaaataatgattacacattgaaaaaagtaatgaagccgctgatcacttcaaacacggtaactgatgaaatcgagcgcgcgaatgttttcaaaatgaacggcaaatggtacttgttcactgattcacgcggttcaaaaatgacgatcgatggtgttaactcaaacgatatttacatgcttggttatgtatcaaactctttaaccggcccttacaagccgctgaacaaaacagggcttgtgctgcaaatgggtcttgatccaaacgatgtgacattcacttactctcacttcgcagtgccgcaagccaaaggcaacaatgtggttatcacaagctacatgacaaacagaggcttcttcgaggataaaaaggcaacatttgcgccaagcttcttaatgaacatcaaaggcaataaaacatccgttgtcaaaaacagcatcctggagcaaggacagctgacatggctccaagtagcgaagcgagcaggactgggcggcggccaaagcggtcggacagtgctccgagaacgggtgcgcatagaaattgcatcaacgcatatagcgctagcagcacgccatagtgactggcgatgctgtcggaatggacgatatcccgcaagaggcccggcagcctccagacctgtgatgggaggggctgctgtgctgtggtgtgagggacttgtgatgagaggggccgcacaggtgattaacattccgtccgcattacttatgcaaatttctgcagctgatttttcacgctccacggcagaccgtcgcgcacggcgtacaccagccgcagaactcacgggcgaaaaactcttccagtttacgcaccagcgacaccatgttgatctcatgtncaaccgccatcgccagcgccgtacccagacggctgcccgctttaccgatactttcgaattccatcggcagatcaaggtgcgcttcgaccatcacgcataccaccggcgtaatcttcgaggatctcgcgtgcggtggtccgaacggcagttcccacagtcccggatttttcacccgaccggagaagcccatcagcttggtgccagcatctttacttttcgagatgttctgataccactccacgccgttagcgaggatcgccggaacgttacacagggtttcgacgttgttgacacagatgtagcgccctgccccggtatggacgaacagttcgaaatcgaaacctgttcccataatgtttttgccaagcagacccgcttcggtggcttcggcaatggcacggcgcagattaactgccgcttcgatatattcgccacgcaggaagatgtagccacgtgtgacaatctaaaaacttgtcacacttcacatggatctgtcatggcggaaacagcggttatcaatcacaagaaacgtaaaaatagcccgcgaatcgtccagtcaaacgacctcactgaggcggcatatagtctctcccgggatcaaaaacgtatgctgtatctgttcgttgaccagatcagaaaatctgatggcaccctacaggaacatgacggtatctgcgagatccatgttgctaaatatgctgaaatattcggattgacctctgcggaagccagtaaggatatacggcaggcattgaagagtttcgcggggaaggaagtggttttttatcgccctgaagaggatgccggcgatgaaaaaggctatgaatcttttccttggtttatcaaacgtgcgcacagtccatccagagggctttacagtgtacatatcaacccatatctcattcccttctttatcgggttacagaaccggtttacgcagtttcggcttagtgaaacaaaagaaatcaccaatccgtaggggatctctagagtcagcgcggttatgcacggattttgccgatttcggaaccaccatcaaacaggattttcgcctgctggggcaaaccagcgtggaccgcttgctgcaactctctcagggccaggcggtgaagggcaatcagctgttgcccgtctcactggtgaaaagaaaaaccaccctggcgcccaatacgcaaaccgcctctccccgcgcgttggccgattcattaatgcagctggcacgacaggtttcccgactggaaagcgggcaggacataagaaggagcccatccctcagtcatttattaccagagcggctcgccgcagccggtaaccgagcaaagcgagcgaactggggagaaagcaaagaagacctgttctgtcagatagctcttacgctcagcgcaagaagaaatatccgccgtgggaaaaactccagggttctgtcaggggggaaacaccggttatcaatcacaaagaacgtaaaaaatagcccgcgaatcgtccagtcaaacgacttccctgaggcggcatatagtctctcccgggatcaaaaacgtatgctgtatctgttcgttgcccagatcagaaaatctgatggcaccctacaggaacatgacggtatctgcgagatccatgttgctaaatatgctgaaatattcggattgacctctgcggaagccagtaaggatatacggcaggcattgaagagtttcgcggggaaggaagtggttttttatcgccctgaagaggatgccggcgatgaaaaaggctatgaatcttttccttggtttatcaaacgtgcgcacagtccatccagagggctttacagtgtacatatcaacccatatctcattcccttctttatcgggttacagaaccggtttacgcagtttcggcttagtgaaacaaaagaaatcaccaatccgtatgccatgcgtttatacgaatccctgtgtcagtatcgtaagccggatggctcaggcatcgtctctctgaaaatcgactggatcatagagcgttaccagctgcctcaaagttaccagcgtatgcctgacttccgccgccgcttcctgcaggtctgtgttaatgagatcaacagcagaactccaatgcgcctctcatacattgagaaaaagaaaggccgccagacgactcatatcgtattttccttccgcgatatcacttccatggggttctttctagagtccccaacgcaggggcttgcaagccctgagtngtag

SEQ ID NO: 29823 - DNA, 1540 bp, Homo sapiens
  SIMILAR (269)..(931): 941254mologous to unidentified cloning vector 29kD protein essential for the replication of mini F plasmid,accession number AB015619,Smith-Waterman Score=1076.
atggtggaaagttggaacctcttacgtgccgatcaacgtctcattttcgccaaaagttggcccagggcttcccggtatcaacagggacaccaggatttatttattctgcgaagtgatcttccgtcacaggtatttattcgcgataagctcatggagcggcgtaaccgtcgcacaggaaggacagagaaagcgcggatctgggaagtgacggacagaacgtgtgacaatctaaaaacttgtcacacttcacatggatctgtcatggcaggaaacagcggttatcaatcacaagaaacgtaaaagtagcccgcgaatcgtccagtcaaacgacctcactgaggcggcatatagtctctcccgggatcaaaaacgtatgctgtatctgttcgttgaccagatcagaaaatctgatggcaccctacaggaacatgacggtatctgcgagatccatgttgctaaatatgctgaaatattcggattgacctctgcggaagccagtaaggatatacggcaggcattgaagagtttcgcggggaaggaagtggttttttatcgccctgaagaggatgccggcgatgaaaaaggctatgaatcttttccttggtttatcaaacgtgcgcacagtccatccagagggctttacagtgtacatatcaacccatatctcattcccttctttatcgggttacagaaccggtttacgcagtttcggcttagtgaaacaaaagaaatcaccattccgtatgccatgcgtttatacgaatccctgtgtcagtatcgtaagccggatggctcaagcatcgtctctctgaaaatcgactggatcatagagcgttaccagctgcctcaaagttaccagcgtatgcctgactttcgccgccgctttctgcagacaaaggccataaataccttgtattcgaagccaacacgggaacagaaaacggataccaaggcgaagaatcctttatttaacaaagcgtactacggcggcggcacgaacttcttccgtaaagaaagccagaagcttcagcagagcgctaaaaaacgcgatgctgagttagcgaacggcgccctcggtatcatagagttaaataatgattacacattgaaaaaagtaatgaagccgctgatcacttcaaacacggtaactgatgaaatcgagcgcgcgaatgttttcaaaatgaacggcaaatggtacttgttcactgattcacgcggttcaaaaatgacgatcgatggtattaactcaaacgatatttacatgcttggttatgtatcaaactctttaaccggcccttacaagccgctgaacaaaacagggcttgtgctgcaaatgggtcttgatccaaacgatgtgacattcacttactctcacttcgccatgccgcaagccaaaggcaacaatgtgggtatcacaagctacatgacaaacaaaagcttctttcaagataaaaaggcaacatttgcgcccagccttctatggacatcaaaggcattaaacctccgtgtcaaaaacagcatccgggagcaggaccgttga

SEQ ID NO: 29824 - DNA, 3653 bp, Homo sapiens
  SIMILAR (3629)..(2919): 981254mologous to Cloning vector pSacBII SacB,accession number U09128,Smith-Waterman Score=1247.
atggaccgagaaagtaccaaggctgtgccaacacataataagaacatctgggtgaaaagtgaaaaagtcaaacacgatgatgcttcagtggttgatactgagtacaaatactcctcaagttacaatgggggttaccttcagataaacccattttcattcatttttaatgttgcatattactctaatgtgtggctgtaccataagtgtgttcattctgctattgatgagcatttagattgtcttggtgttgccaatttttggctctccacaaatagtgcctctatgaaatgtgacaatctaaaaacttgtcacacttcacatggatctgtcatggcggaaacagcggttatcaatcacaagaaacgtaaaaatagcccgcgaatcgtccagtcaaacgacctcactgaggcggcatatagtctctcccgggatcaaaaacgtatgctgtatctgttcgttgaccagatcagaaaatctgatggcaccctacaggaacatgacggtatctgcgagatccatgttgctaaatatgctgaaatattcggattgacctctgcggaagccagtaaggatatacggcaggcattgaagagtttcgcggggaaggaagtggttttttatcgccctgaagaggatgccggcgatgaaaaaggctatgaatcttttccttggtttatcaaacgtgcgcacagtccatccagagggctttacagtgtacatatcaacccatatctcattcccttctttatcgggttacagaaccggtttacgcagtttcggcttagtgaaacaaaagaaatcaccaatccgtatgccatgcgtttatacgaatccctgtgtcagtatcgtaagccggatggctcaggcatcgtctctctgaaaatcgactggatcatagagcgttaccagctgcctcaaagttaccagcattacagtgatgacaactgtaacgatgatggttatgacgggaatatctctaacatcatcatcttcaattttagcatgtggtccttatgttccaggcactgtcctaacaactttgcatatactaacaatccactgagaggcactaggaatgttccccagtgttcgcatgcagatgtcagtagctggcccaaggttatcaaattccctctagggggaatttacagcagggacttagaagttctagttggtttctgtgggatgcctttcgcgagaaagtcttcgaagcctgggctgcggaaccctgtgcctgattctttttggggggaggaagaaaatgtggtggatcgtgcaatgtgtgcggagaggaagaatgctcatcctgggagttgcctttatagctggaggagggcccttgctcggagcttgaagggcggcgtccttctcttagtatcctctgccggtctggcgacgggttgctggcaggctcggacgggtgtggtcgccctgatcgcgtggtcgatagtggcttctagtttcgaagcgagcaggactgtgcggcggccaaagcggtccgacagtgctcccaggacgggtgcgcatagaaattgcatcaacgcatatagcgctagcagcacgccatagtgactggcgatgctgtcggaatggacgatatcccgcaagaggcccggcagtaccggcataaccaagcctatgcctacagcatccagggtgacggtgccgaggatgacgatgagcgcattgttagatttcatacacggtgcctgacatttgccgttcattttgaaaacattcgcgcgctcgatttcatcagttaccgtgtttgaagtgatcagcggcttcattacttttttcaatgtgtaatcattatttaactctatgataccgagggcgccgttcgctaactcagcatcgcgttttttagcgctctgctgaagcttctggctttctttacggaagaagttcgtgccgccgccgtagtacgctttgttaaataaagattcttcgccttggtatccgttttctgttcccgtgttggcttcgaatacaaggtatttatggcctttgtcttcaacgtagtgagggtctctcagcgtatggttgtcgccggatgtataattccgcggatcctctccagcaccgaagtaaggagcttggtggacaacccctgtgccttcttcttccttcacatagttgtcaacaagcacagtgaaagcgccattctctttacactggacttgacagccctgtttggggactctagaagaccccctgctgttgatctcattaacacagacctgcaggaagcggcggcggaagtcaggcatacgctggtaactttgaggcagctggtaacgctctatgatccagtcgattttcagagagacgatgcctgagccatccggcttacgatactgacacagggattcgtataaacgcatggcatacggattggtgatttcttttgtttcactaagccgaaactgcgtaaaccggttctgtaacccgataaagaagggaatgagatatgggttgatatgtacactgtaaagccctctggatggactgtgcgcacgtttgataaaccaaggaaaagattcatagcctttttcatcgccggcatcctcttcagggcgataaaaaaccacttccttccccgcgaaactcttcaatgcctgccgtatatccttactggcttccgcagaggtcaatccgaatatttcagcatatttagcaacatggatctcgcagataccgtcatgttcctgtagggtgccatcagattttctgatctggtcaacgaacagatacagcatacgtttttgatcccgggagagactatatgccgcctcagtgaggtcgtttgactggacgattcgcgggctatttttacgtttcttgtgattgataaccgctgtttccgccatgacagatccatgtgaagtgtgacaagtttttagattgtcacacttggcttcgaatacaaggtatttatggcctttgtcttcaacgtagtgagggtctctcagcgtatggttgtcgccggatgtataattgccttcatcgataaactgctgaacgttctgatatgtttttccgtctccgtcaaaaatcgttttgtgatcttccactccgttgattttgagtgtgtcatcagattttgacacatttacctgcgctgttgtcaggctttgtttgccgtaatgtttaccggaatagtcagtgtagaataaacggatttttccgtcagatgtaaaggttgcagaaccggaccattcttgcgtctgatctttcaggatcggatcgttggcgtcgaacttatcgctgtctttaaagacacggcccgcgtttttccagctgtcgattgagttgtcgccgaccttttgataaaacatgtagattgatgtgtcatcagcgtctttcgggcttcccgcaagagcaaacacaacgtgatagccgttgtattcagctactgttccgtcagcgttttgcagcggccagctgtcccacacatcaagtccttttgcagactcaatatttttaatcgttgattgatcgaattgaggcacttggtatttttcgttttgctgctgtttaaggatctgcagcatatcatggcgtgtaatatgagagacgccgtacgtttctttggatgctttttgggtattttctttcgcgaagcttgagtcgctccttctgccaacgaa

SEQ ID NO: 29825 - DNA, 1860 bp, Homo sapiens
  SIMILAR (889)..(1050): 961254mologous to unidentified cloning vector 29kD protein essential for the replication of mini F plasmid,accession number AB015619,Smith-Waterman Score=256.
atgcccctgcgcttttcgagctctagtaggatcccctattacgttaacttacttcataaagcagcaacagggtttgagaggattgactacaattttgaaacacattcttctctggaaattgctacagatgctctaaccatcagtgaccaccacccttgtgagtcagcagccatcaacgctgagacaagaccttccacggtactggaagaactagccagagcaatcagacaagagaaagagataaaaggaatccaaattggtaaagaggaagtcaaactgtcactgtttgctgatgatatgattatgtaccttgaaaaccctaaagactcctccagaaagctcctagaatggataaaagaatccaacaaagtttctggatacaagactcatgtacacaaatcagtagctcttctatacacgaatagtgaccaagtggagaatcaaatcagaactcaacccttttacaatagctgcgaaaataaaataaaatacttagcaatatacctaaccaaggagtcaaaagacctctacaagagaaactacaaaacactgctgaaagaaatcacagatgacacaaacaaatggaaacacatcccatgctcatggatagttaaggtggcaggagtggaatcttggattcaccacacccaagttgaagtttggacaccccctgaggaaactgcgggatctacagctcatgggtcccaagatcagccagaccagcctcgatacacctgtgaaccattggaggacttgcatctcctatttcagaaagagacatcccacactataaaggcttctaccactgatcctgaggagaaaccccttccaccttataaaagatattgtgacaatctaaaaacttgtcacacttcacatggatctgtcatggcggaaacagcggttatcaatcacaagaaacgtaaaaatagcccgcgaatcgtccagtcaaacgacctcactgaggcggcatatagtctctcccgggatctaaaacgtatgctgtatctgttcgttgaccacatcagaaaatctgatggcaccctacagagaacatgacggtatctgcgagatccatgttgctaaatatgctgaaatattcggattgacctctgcggaagccagtaaggatatacggcaggcattgaagagtttcgcggggaaggaagtggttttttatcgccctgaagaggatgccggcgatgaaaaaggctatgaatcttttccttggtttatcaaacgtgcgcacagtccatccagagggctttacagtgtacatatcaacccatatctcatttcccttttttatcgggttacagaaaccggtttacgcagtttcggcttagtgaaacaaaaatacctgtcatcattcaggaggcaggcctcagtcaaagtgagaaacaggcagccgatgggatccagggggtggcccacccagccttccaggtttgtgatggttgtggttcctctctgcagcacttctttcttctgatgcttgtagattttcagttgccaccgctgctgaacctcagagtattaataatggccactctgttcaccattgcctgctacgtggagctccggggctacatgctccacgccttccagctggtctcattggccatgagccatcttcacctggctcataaccaggatacccacccagccatcagtgatgtgctctgggtttgtgccctcagccactctctggaattccaccgagcgagtgatgtcagagcagatctgagtaatgcttattccgaagaagtcagaaagtttggcttcctgctgtggggtcttgattgtgcctctttacacaggtctgacttcattacctcatctgaaactaagtaccactaa

SEQ ID NO: 29826 - DNA, 2849 bp, Homo sapiens
  SIMILAR (1983)..(2759): 621254mologous to Cloning vector pSacBII SacB,accession number U09128,Smith-Waterman Score=758.
atgctgtatctgttcgttgaccagatcagaaaatctgatggcaccctacaggaacatgacggtatctgcgagatccacggtgctaaatatgccgaaatattcggattgacctctacatgcagcgtgccagtcttctacacagcctcacacgcttttgcggcggggacagtccatccggaggactctgcggtggttcatattcaacccatatactcatttcccttcttctatcgggctaaagagcgggcgttgttcgacctccgggcttcgttgaaaccagaagagaacaacacattcgctatgccatgggtgttcatcggatgccctgcttgtgacaatctaaaaacttgtcacacttcacatggatctgtcatggcggaaacagcggttatcaatcacaagaaacgtaaaaatagcccgcgaatcgtccagtcaaacgacctcactgaggcggcatatagtctctcccgggatcaaaaacgtatgctgtatctgttcgttgaccagatcagaaaatctgatggcaccctacaggaacatgacggtatctgcgagatccatgttgctaaatatgctgaaatattcggattgacctctgcggaacgcagtaaggatatacggcaggcattgaagagtttcgcggggaaggaagtggttttttatcgccctgaagaggatgccggcgatgaaaaaggctatgaatcttttccttggtttatcaaacgtgcgcacagtccatccagagggctttacagtgtacatatcaacccatatctcattcccttctttatcgggttacagaaccggtttacgcagtttcggcttagtaaacaaaagagggtatcctctagactcaactgggaaagcgataagtttgacgcccaccgatccgatcctgaaagatcagaggcaagaatggtccggttctgcaacctttacatctgacggaaaaatccgtttattctacactgactattccggtaaacattacggcaaacaaagcctgacaacagcgcaggtaaatgtgtcaaaatctgatgacacactcaaaatcaacggagtggaagatcacaaaacgatttttgacggagacggaaaaacatatcagaacgttcagcagtttatcgatgaaggcaattatacatccggcgacaaccatacgctgagagaccctcactacgttgaagacaaaggccataaataccttgtattcgaagccaacacgggaacagaaaacggataccaaggcgaagaatctttatttaacaaagcgtactacggcggcggcacgaacttcttccgtaaagaaagccagaagcttcagcagagcgctaaaaaacgcgatgctgagttagcgaacggcgccctcggtatcatagagttaaataatgattacacattgaaaaaagtaatgaagccgctgatcactctcaaacacggtaactgatgaaatcgagcgcgcgaatgttttcaaaatgaacggcaaatggcaggcaccgtgtatgaaatctaacaatgcgctcatcgtcatcctcggcaccgtcaccctggatgctgtaggcataggcttggttatgccggtactgccgggcctcttgcgggatatcgtccattccgacagcatcgccagtcactatggcgtgctgctagcgctatatgcgttgatgcaatttctatgcgcacccgttctcggagcactgtccgaccgctttggccgccgcccagtcctgctcgcttcgctacttggagccactatcgactacgcgatcatggcgaccacacccgtcctgtggatctacccactatgtgacaatctaaaaacttgtcacacttcacatggatctgtcatggcggaaacagcggttatcaatcacaagaaacgtaaaaatagcccgcgaatcgtccagtcaaacgacctcactgaggcggcatatagtctctcccgggatcaaaaacgtatgctgtatctgttcgttgaccagatcagaaaatctgatggcaccctacaggaacatgacggtatctgcgagatccatgttgctaaatatgctgaaatattcggattgacctctgcggaagccagtaaggatatacggcaggcattgaagagtttcgcggggaaggaagtggttttttatcgccctgaagaggatgccggcgatgaaaaaggctatgaatcttttccttggtttatcaaacatcagcaggcaagaaaaggagccaccatcttggcaggagattgttcttcatggtcaggaagcaggactgctactacacaggaaggaaggaaagaatacctttcacaatacattcttctacctccttacccaattttgactgtaaatgtgtcaaaatctgatgacacactcaaaatcaacggagtggaagatcacaaaacgatttttgacggagacggaaaaacatatcagaacgttcagcagtttatcgatgaaggcaattatacatccggcgacaaccatacgctgagagaccctcactacgttgaagacaaaggccataaataccttgtattcgaagccaacacgggaacagaaaacggataccaaggcgaagaatctttatttaacaaagcgtactacggcggcggcacgaacttcttccgtaaagaaagccagaagcttcagcagagcgctaaaaaacgcgatgctgagttagcgaacggcgccctcggtatcatagagttaaataatgattacacattgaaaaaagtaatgaagccgctgatcacttcaaacacgaatcctgagccagggtcgtcgtccaccacccatgcagagtgggccgatcggctaacaggttcatgtgtgtatttgcactttccagattga

SEQ ID NO: 29827 - DNA, 3352 bp, Homo sapiens
  SIMILAR (1906)..(1553): 791254mologous to Cloning vector pZC320 SopA,accession number U26464,Smith-Waterman Score=476.
  misc_feature (1)...(3352): n = a,t,c or g
ttatctaatctcccagcgtggtttaatcagacgatcgaaaatttcattgcagacaggttcccaaatagaaagagcatttctccaggcaccagttgaagagcgttgatcaatggcctgttcaaaaacagttctcatccggatctgacctttaccaacttcatccgtttcacgtacaacattttttagaaccatgcttccccaggcatcccgaatttgctcctccatccacggggactgagagccattactattgctgtatttggtaagcaaaatacgtacatcaggctcgaaccctttaagatcaacgttcttgagcagatcacgaagcatatcgaaaaactgcagtgcggaggtgtagtcaaacaactcagcaggcgtgggaacaatcagcacatcagcagcacatacgacattaatcgtgccgatacccaggttaggcgcgctgtcaataactatgacatcatagtcatgagcaacagtttcaatggccagtcggagcatcaggtgtggatcggtgggcagtttaccttcatcaaatttgcccattaactcagtttcaatacggtgcagagccagacaggaaggaataatgtcaagccccggccagcaagtgggctttattgcataagtgacatcgtccttttccccaagatagaaaggcaggagagtgtcttctgcatgaatatgaagatctggtacccatccgtgatacattgaggctgttccctgggggtcgttaccttccacgagcaaaacacgtagccccttcagagccagatccccctcaggcatacgctggtaactttgaggcagctggtaacgctctatgatccagtcgattttcagagagacgaggcttgagccatccgggcttacgatactgacacagggattcgtataaacgcatggcatacggattggtgatttcttttgtttcactaagccgaaactgcgtaaaccggttctgtaacccgataaagaagggaatgagatatgggttgatatgtacactgtaaagccctctggatggactgtgcgcacgtttgataaaccaaggaaaagattcatagcctttttcatcgccggcatcctcttcagggcgataaaaaaccacttccttccccgcgaaactcttcaatgcctgccgtatatccttactggcttccgcagaggtcaatccgaatatttcagcatatttagcaacatggatctcgcagataccgtcatgttcctgtagggtgccatcagattttctgatctggtcaacgaacagatacagcatacgtttttgatcccgggagagactatatgccgcctcagtgaggtcgtttgactggacgattcgcgggctatttttacgtttcttgtgattgataaccgctgtttccgccatgacagatccatgtgaagtgtgacaagtttttagattgtcacacagcccaccagcaccaacttttacattctcaggaatccttcgagctgaccatacccgagaggtcttctcaacactatcaccccggagcacttcaagagtaaacttcacatcccgaccacatacaggcaaagtaatggcattaccgcgagccattactcctacgcgcgcaattaacgaatccaccatcggggcagctttaccaacttcatccgtttcacgtacaacattttttagaaccatgcttccccaggcatcccgaatttgctcctccatccacggggactgagagccattactattgctgtatttggtaagcaaaatacgtacatcaggctcgaaccctttaagatcaacgttcttgagcagatcacgaagcatatcgaaaaactgcagtgcggaggtgtagtcaaacaactcagcaggcgtgggaacaatcagcacatcagcagcacatacgacattaatcgtgccggggatctngggaagttttaatggctttgatgttccataagaagcctggcgcaaatgtggctttttatcctcgaagaagcttctgtttgtcatgtagcttgtgatacccacattgttgcttttggcttgcggcacatcgatcgtcatttttgaaccgcgtgaatcagtgaacaagtaccatttgccgttcattttgaaaacattcgcgcgctcgatttcatcagttaccgtgtttgaagtgatcagcggcttcattacttttttcaatgtgtaatcattatttaactctatgataccgagggcgccgttcgctaactcagcatcgcgttttttagcgctctgctgaagcttctggctttctttacggaagaagttcgtgccgccgccgtagtacgctttgttaaataaagattcttcgccttggtatccgttttctgttcccgtgttggcttcgaatacaaggtatttatggcctttgtcttcaacgtagtgagggtctctcagcgtatggttgtcgccggatgtataattgccttcatcgataaactgctgaacgttgctggccttgggccaggggaccctcagcgacggggtcaccccaatgttctggaggctgcggttctgcttcctcctggggctgagctgagcaagctctagctctcgggccgagcgcaaggagggcaggagtgatgtctccaactgtgctgaggtctgccctgggtgcaagggccctgtgttttcagcgctgccgtgtggcccatggatgccccaggcccctggacagttgatgcctggggtccacactcctggacagggctctggacagttgatgcctggggtccacactcgctggtaactttgaggcagctggtaacgctctatgatccagtcgattttcagagagacgatgcctgagccatccggcttacgatactgacacagggattcgtataaacgcatggcatacggattggtgatttcttttgtttcactaagccgaaactgcgtaaaccggttctgtaacccgataaagaagggaatgagatatgggttgatatgtacactgtaaagccctctggatggactgtgcgcacgtttgataaaccaaggaaaagattcatagcctttttcatcgccggcatcctcttcagggcgataaaaaaccacttccttccccgcgaaactcttcaatgcctgccgtatatccttactggcttccgcagaggtcaatccgaatatttcagcatatttagcaacatggatctcgcagataccgtcatgttcctgtagggtgccatcagattttctgatctggtcaacgaacagatacagcatacgtttttgatcccgggagagactatatgccgcctcagtgaggtcgtttgactggacgattcgcgggctatttttacgtttcttgtgattgataaccgctgtttccgccat

SEQ ID NO: 29828 - DNA, 6012 bp, Homo sapiens
  SIMILAR (1969)..(1388): 981254mologous to Leishmania major probable levansucrase precursor,accession number AL160371,Smith-Waterman Score=1038.
tcagccacagatacctaagcaggaatggaagtcactttgtttcttctcacatgggtttttctcctcctcctccccttcttctcttctccttctccttcttcttcttcttcttcttccttcttcttcttcttcttgtacttccttcttcttgttcttctccttcttcttcctcttcttctcttctccttcttcctcttcctcctcttcttcttttctccttcttcctattcctccttcttcttcctcctcttttccttcttcctcttcctgttctctgtcttctcttctccttcttcctcttcctcctctttttcttcttcttcttgttcctcttcctctccctttccctattcttctccttctctttctccctctacctctccctctccctctgcctctcctgctccttcttcttattaattgcgttgcgctcactgcccgctttccagtcgggaaacctgtcgtgccagctgcattaatgaatcggccaacgcgcggggagaggcggtttgcgtattgggcgccagggtggtttttcttttcaccagtgagacgggcaacagctgattgcccttcaccgcctggccgctggtaactttgaggcagctggtaacgctctatgatccagtcgattttcagagagacgatgcctgagccatccggcttacgatactgacacagggattcgtataaacgcatggcatacggattggtgatttcttttgtttcactaagccgaaactgcgtaaaccggttctgtaacccgataaagaagggaatgagatatgggttgatatgtacactgtaaagccctctggatggactgtgcgcacgtttgataaaccaaggaaaagattcatagcctttttcatcgccggcatcctcttcagggcgataaaaaaccacttccttccccgcgaaactcttcaatgcctgccgtatatccttactggcttccgcagaggtcaatccgaatatttcagcatatttagcaacatggatctcgcagataccgtcatgttcctgtagggtgccatcagattttctgatctggtcaacgaacagatacagcatacgtttttgatcccgggagagactatatgccgcctcagtgaggtcgtttgactggacgattcgcgggctatttttacgtttcttgtgattgataaccgctgtttccgccatgacagatccatgtgaagtgtgacaagtttttagattgtcacaaagatctatcttgttttcttgacttgcagttacttccactatgaagggctttggggtaccgagctcgaattcgtaatcatggtcataactgtttccatcgcgttttttagcgctctgctgaagcttctggctttctatacggaagaagttcgtgccgccgcccgtagtacgctttgttaaataaagattcttcgccttggtatccgttatctgttcccgtgttggcttcgaacacaaggtatttatggcctgtgtcttcaacgtagtgagggtctctcagcgtatggttgtcgccggatgtataattgccttcatcgataaactgctgaacgttctgatatgtttttccgtctccgtcaaaaatcgttttgtgatcttccactccgttgattttgagtgtgtcatcagattttgacacatttacctgcgctgttgtcaggctttgtttgccgtaatgtttaccggaatagtcagtgtagaataaacggatttttccgtcagatgtaaaggttgcagaaccggaccattcttgcgtctgatctttcaggatcggatcgttggcgtcgaacttatcgctgtctttaaagacacggcccgcgtttttccagctgtcgattgagttgtcgccgaccttttgataaaacatgtagattgatgtgtcatcagcgtctttcgggcttcccgcaagagcaaacacaacgtgatagccgttgtattcagctactgttccgtcagcgttttggcagcggccagctgtcccacacatcaagtccttttgcagactcaatatttttaatcgttgattgatcgaattgaggcagatactgacacagggatttgtataaacgcatggcatacggattggtgatttcttttgtttcaataagccgaaattgtgtaaaccggttctgtaacccgataaagaagggaatgagatatgggttgatatgtacactgtaaagccctctggatggactgtgcgcacgtttgataaaccaaggaaaagattcatagcctttttcatcgccggcatcctcttcagggcgataaaaaaccacttctttccccgcgaaacttttcaatgcctgccgtatatccttactggcttccgcagaggtcaatccgaatatttcagcatatttagcaacatggatctcgcagataccgtcatgttcctgtagggtgccatcagattttctgatctggtcaacgaacagatacagcatacgtttttgatcccgggagagactatatgccgcctcagtgaggtcgtttgactggacgattcgcgggctatttttacgtttcttgtgattgataaccgctgtttccgccatgacagatccatgtgaagtgtgacaagtttttagattgtcacagatatgagtcgtctggcggcctttctttttctcaatgtatgagaggcgcattggagttctgctgttgatctcattaacacagacctgcaggaagcggcggcggaagtcaggcatacgctggtaactttggggcggctggtaacgctctatgatccaggcgattttaatagagacgatgcctgagccatccggctttcgaatactgacacaagggattcctataaccgccccgttgatctcattaacacagacctgcaggaagcggcggcggaagtcaggcgtacgctggtaactttgaggcagctggtaacgctctatgatccagtcgattttcagagagacgatgcctgagccatccggcttacgatactgacacagggattcgtataaacgcatggcatacggattggtgatttcttttgtttcactaagccgaaactgcgtaaaccggttctgtaacccgataaagaagggaatgagatatgggttgatatgtacactgtaaagccctctggatggactgtgcgcacgtttgataaaccaaggaaaagattcatagcctttttcatcgccggcatcctcttcagggcgataaaaaaccacttccttccccgcgaaactcttcaatgcctgccgtatatccttactggcttccgcagaggtcaatccgaatatttcagcatatttagcaacatggatctcgcagataccgtcatgttcctgtagggtgccatcagattttctgatctggtcaacgaacagatacagcatacgtttttgatcccgggagagactatatgccgcctcagtgaggtcgtttgactggacgattcgcgggctatttttacgtttcttgtgattgataaccgctgtttccgcctctagaggatcccccgtataattgccttcatcgataaactgctgaacgttctgatatgtttttccgtctccgtcaaaaatagttttgtgatcttccactccgttgattttgagtgtgtcatcagattttgacacatttacctgcgctgttgtcaggctttgtttgccgtaatgtttaccggaatagtcagtgtagaataaacggatttttccgtcagatgtgaaggttgcagaaccggaccattcttgcgtctgatctttcaggatcggatcgttggcgtcgaacttatcgctgtctttaaagacacggcccgcgtttttccagctgtcgattgagttgtcgccgaccttttgataaaacatgtagattgatgtgtcatcagcgtctttcgggcttcccgcaagagcaaacacaacgtgatagccgttgtattcagctactgttccgtcagcgttttgcagcggccagctgtcccacacatcaagtccttttgcagactcaatatttttaatcgttgattgatcgaattgaggcacttggtatttttcgttttgctgctgtttagggatctgcagcatatcatggcgtgtaatatgagagacgccgtacgtttctttgtatgctttttggttattttctttcgcgaaggcttgagtcgctcctcctgccagaatgcagtcgtaaaagtcagaactgtggcttgttttacaatttttttgatgttcatgttcatgtctccttccagccacttccacagtgggtgtcagagtggctgagggcaccagacctccggtggctgcccccacctgggactctccccctgctccacttgtctctgtgctggacagcttcagcagcagaagcaggtagttcttcagggaatctatgaggccagggtcacagctccggggacctggggtccgcccctccacatctggtgcctgggcgcaggccccctcactgctggtggccatggtttctggtgggtgactctgagtgggggtccccagccccaggtgcagtgttggggcagaactcatcaggacctgatcctcagagggcaggaaggtggctgtgctcccgtgctgagaagtcggggtgctacacggccccgcctttgggctagctgtcagcccagttccaggaagagaaggcatcgtgggtacctcctggctcaggccagctagaggacagccaccctgatccatacacggcactccccctggccgctcctccttggggcactggaacgggctggcctcctgcttggcctcgactgggcctggtgactgtggccctcggcatgtttctccttccgcctggtccacacttcccctctgggggcggctgtgcttgggagcatgaggcgtcctgggtgtctggatggcctccttggcatcaaggctggtggggtctgggatgtcaaaggcagccagaaggtcatcaaaatctggggttttcatatcccccatggctggatgctggcaagggtgcccgctttccagtcgggaaacctgtcgtgccagctgcattaatgaatcggccaacgcgcggggagaggcggtttgcgtattgggcgccagggtggtttttcttttcaccagtgagacgggcaacagctgattgcccttcaccgcctggccctgagagagttgcagcaagcggtccacgctggtttgccccagcaggcgaaaatcctgtttgatggtggttccgaaatcggcaaaatccttgactttctccccaagcagacagtgatttacttgaaaacaggtctgcttttttatctctgtatctttattactcagcagatactgacacagggatttgtataaacgcatggcatacggattggtgatttcttttgtttcactaagccgaaactgcgtagaccggttctgtaacccgataaagaagaggaatgagatatgggttgatatgtacactgtaaagccctctggatggactgtgcgcacgtttgataaaccaaggaaaagattcatagcctttttcatcgccggcatcctcttcagggcgataaaaaaccacttccttccccgcgaaactcttcaatgcctgccgtatatccttactggcttccgcagaggtcaatccgaatatttcagcatatttagcaacatggatctcgcagataccgtcatgttcctgtagggtgccatcagattttctgatctggtcaacgaacagatacagcatacgtttttgatcccgggagagactatatgccgcctcagtgaggtcgtttgactggacgattcgcgggctatttttacgtttcttgtgattgataaccgctgtttccgccatgacagatccatgtgaagtgtgacaagtttttagattgtcacactcttttgatttttcctccttggtaaatcttccaaatttttcaatcatttctgccacaaatataacatccattttgtcagaaaagttggctgcttccacagtgtaagccagtaactgtcgagctgttgccacggcattggtaagattgaggggcat

SEQ ID NO: 29829 - DNA, 6555 bp, Homo sapiens
  SIMILAR (1975)..(3021): 991254mologous to Cloning vector pSacBII SacB,accession number U09128,Smith-Waterman Score=1848.
atggcggaaacagcggttatcaatcacaagaaacgtaaaaatagcccgcgaatcgtccagtcaaacgacctcactgaggcggcatatagtctctcccgggatcaaaaacgtatgctgtatctgttcgttgaccagatcagaaaatctgatggcaccctacaggaacatgacggtatctgcgagatccatgttgctaaatatgctgaaatattcggattgacctctgcggaagccagtaaggatatacggcaggcattgaagagtttcgcggggaaggaagtggttttttatcgccctgaagaggatgccggcgatgaaaaaggctatgaatcttttccttggtttatcaaacgtgcgcacagtccatccagagggctttacagtgtacatatcaacccatatctcattcccttctttatcgggttacagaaccggtttacgcagtttcggcttagtgaaacaaaagaaatcaccaatccgtatgccatgcgtttatacgaatccctgtgtcagtatcgtaagccggatggctcaggcatcgtctctctgaaaatcgactggatcatagagcgttaccagctgcctcaaatcaggctgggagacccaggaagctccagacttagcatggagcacggactcaggagcatcccagcctggacgctggacaagttcatagaggattacctccttcccgacaccacctttggtgctgatgtcaaatcagccgtcaatgtcgtgtgtgatttcctgaaggagagatgcttccaaggtgctgcccacccagtgagggtctccaaggtggtgaaggttgtccgttgcccgaaagtgaaaataagcagccctgaggaccagaagcccacatgcccatgggtgttagaagaagcatatcccatgaactcagagccctttacactgcctggtgctctatctgagccttcgggggacatgggaatgctgctctatgattccagccttgcccatttgaaacaccaccagaaacatgccccttcagcactcacactggacactagcttcccattggaccagaccctgctcttcttgggcctggttctcaccttccggtctgccatgcagtggctccctcatgctgccccgatggtggattcgttaattgcgcgcgtaggagtaatggctcgcggtaatgccattactttgcctgtatgtggtcgggatgtgaagtttactcttgaagtgctccggggtgatagtgttgagaagacctctcgggtatggtcaggtaatgaacgtgaccaggagctgcttactgaggacgcactggatgatctcatcccttcttttctactgactggtcaacagacaccggcgttcggtcgaagagtatctggtgtcatagaaattgccgatgggagtcgccgtcgtaaagctgctgcacttaccgaaagtgattatcgtgttctggttggcgagctggatgatgagcgagcgccttgtaggcctttatccatgctggttctagagaagtgtgacaatctaaaaacttgtcacacttcacatggatctgtcatggcggaaacagcggttatcaatcacaagaaacgtaaaaatagcccgcgaatcgtccagtcaaacgacctcactgaggcggcatatagtctctcccgggatcaaaaacgtatgctgtatctgttcgttgaccagatcagaaaatctgatggcaccctacaggaacatgacggtatctgcgagatccatgttgctaaatatgctgaaatattcggattgacctctgcggaagccacgaattttctggaagccctgccgaggctacccccaccccatgaacgcatccaatgcttttgggaacctgtgctaatctgtcgggtttctgcatatctctttgcccaaccaaagggaccccagaccctgccacctttgtccggaagagctggcctcggagggacagagactctgagcctgcgtcccaggaagaaagtcacaggaggagcgactcaagccttcgcgaaagaaaataaccaaaaagcatacaaagaaacgtacggcgtctctcatattacacgccatgatatgctgcagatccctaaacagcagcaaaacgaaaaataccaagtgcctcaattcgatcaatcaacgattaaaaatattgagtctgcaaaaggacttgatgtgtgggacagctggccgctgcaaaacgctgacggaacagtagctgaatacaacggctatcacgttgtgtttgctcttgcgggaagcccgaaagacgctgatgacacatcaatctacatgttttatcaaaaggtcggcgacaactcaatcgacagctggaaaaacgcgggccgtgtctttaaagacagcgataagttcgacgccaacgatccgatcctgaaagatcagacgcaagaatggtccggttctgcaacctttacatctgacggaaaaatccgtttattctacactgactattccggtaaacattacggcaaacaaagcctgacaacagcgcaggtaaatgtgtcaaaatctgatgacacactcaaaatcaacggagtggaagatcacaaaacgatttttgacggagacggaaaaacatatcagaacgttcagcagtttatcgatgaaggcaattatacatccggcgacaaccatacgctgagagaccctcactacgttgaagacaaaggccataaataccttgtattcgaagccaacacgggaacagaaaacggataccaaggcgaagaatctttatttaacaaagcgtactacggcggcggcacgaacttcttccgtaaagaaagccagaagcttcagcagagcgctaaaaaacgcgatgctgagttagcgaacggcgccctcggtatcatagagttaaataatgattacacattgaaaaaagtaatgaagccgctgatcacttcaaacacggtaactgatgaaatcgagcgcgcgaatgttttcaaaatgaacggcaaatggtacttgttcactgattcacgcggttcaaaaatgacgatcgatgggcattcttatgttaatgatgaagtaaaatatgcaaaagcaaatgtcgacagctatccattctttaagatgggagttgtggaaagagagcatgttaaagggtgggttgtaggggtgagatcagctagtaagtgccctcccttttcggccgcggcgcgtgactggtgtgacaatctaaaaacttgtcacacttcacatggatctgtcatggcggaaacagcgggttatcaatcacaagaaacgtaaaaatagcccgcgaatcgtccagtcaaacgacctcactgaggcggcatatagtctctcccgggatcaaaaacgtatgctgtatctgttcgttgaccagatcagaaaatctgatggcaccctacaggaacatgacggtatctgcgagatccatgttgctaaatatgctgaaatattcggattgaccttcgcggaaagcaataaagaatatccgccaggcattgaagagtttcgcggggaaggaagtggttttttatcgccctgaagaggatgccggcgatgaaaaaggctatgaatcttttccttggtttatcaaacgtgcgcacagtccatccagagggctttacagtgtacatatcaacccatatctcattcccttctttatcgggttacagaaccggtttacgcagtttcggcttagtgaaacaaaagaaatcaccaatccgtatgccatgcgtttatacgaatccctgtgtcagtatcgtaagccggatggctcaggcatcgtctctctgaaaatcgactggatcatagagcgttaccagctggctctaaggtaacaacggatggctggacttccgccgccgcttcttgcgggcttgtgttaatgaaatcaacagcagaacttcaatgcgcctctcatacattgagaaaaagaaaggccgccagacgactcatatcgctatcagagatgccgagaaagcagggcgactaccgcacccggatatggaaattcgaggacgggttgagcaacgtgttggttatacaattgaacaaattaatcatatgcgtgatgtgtttggtacgcgattgcgacgtgctgaagacgtatttccaccggtgatcggggttgctgcccataaaggtggcgtttacaaaacctcagtttctgttcatcttgctcaggatctggctctgaaggggctacgtgttttgctcgtggaaggtaacgacccccagggaacagcctcaatgtatcacggatgggtaccagatcttcatattcatgcagaagacactctcctgcctttctatcttggggaaaaggacgatgtcacttatgcaataaagcccacttgctggccggggcttgacattattccttcctgtctggctctgcaccgtattgaaactgagttaatgggcaaatttgatgaaggtaaactgcccaccgatccacacctgatgctccgactggccattgaaactgttgctcatgactatgatgtcatagttattgacagcgcgcctaacctgggtatcggcacgattaatgtcgtatgtgctgctgatgtgctgattgttcccacgcctgctgagttgtttgactacacctccgcactgcagtttttcgatatgcttcgtgatctgctcaagaacgttgatcttaaagggttcgagcctgatgtttgcaaatttcatttcatcggcgacagcgaatgcaacttgcctttggggcattggggaattgcaattggtattggtattggcattggcattggctggcaaagtgtggtgttgtgtggccaacaaacgacggacaagcaaccaacatcgtcatcttgctccatttgcaaagtgctgtgcccctcaaacaaaatggattggctgtccaccagtgccgagcatatgaactcccacgccatgcactttccctgtctcaaggccaacgctgtaaccaacaacaacaataataacaataataccaataacaacaataataacaacaacaacgaacttaacagcaatcgcgtgctggcctgcaaggactgcaaggattacttggccagccagtgggagaccatggatgcagaacgagttcccctagagcacagaagatacaacattccctcgcccatgctgacctccagttcaccaaacggatctcgccacggcgccatgagtatcaacactccgccctccacaccatccatatcgtcctcgacgcctgccagcacatcaatctactgctatctttgcggcctgcactcggacctaacgttagccagagtgctctatgccagtaaagagggttcgcgtccttatttcccactgttgctcaaacacaattcacttcgcaatgcagagcagttaagaacaattcagccgttagtttgcaccttttgttaccattccatgttgaatcagtggcgaaagtatgaggcccaaagtcccagcgtcaacccagcggatcgtaaatacaattggcacgattacaactgtcacctgtgcggcattacgacttatcggaaaagagttcgggcgttacccgtcaacgagtttccctttgtaaagcaccagaagagcgatgacggcctgctgctggaaaacggagaatacgcggtcgtctgtctggactgctacgagagcttaagtgcccctcctcgacgccgttccctctttcactgcatcttcatcgcctccttctctttacggcagtgtttacatgaagttggcagcgcctacttgccagagtttggccacggtcacttttcccaacacgaacccgatgaacttggaatgatatggccccccgccagttcgtccccactattgattccggatgtgccttctccgtataccccatgtttatcggaaagctgccaacgtatggttatcgtcgggtatgggcgttgcttcgcagacaggcagaacttgatgggtatgcctgcgatcaatgccaaacgtgtttaccggatcatgcgccagaatgcgctgttgcttgagcgaaaacctgctgtaccgccatcgaaacgggcacatacaggcagagtggccgtgaaagaaagcaatcagcgatggtgctctgacgggttcgagttctgctgtgataacggagagagactgcgtgtcacgttcgcgctggactgctgtgatcgtgaggcactgcactgggcggtcactaccggcggcttcaacagtgaaacagtacaggacgtcatgctgggagcggtggaacgccgcttcggcaacgatcttccgtcgtctccagtggagtggctgacggataatggttcatgctaccgggctaatgaaacacgccagttcgcccggatgttgggacttgaaccgaagaacacggcggtgcggagtccggagagtaacggaatagcagagagcttcgtgaaaacgataaagcgtgactacatcagtatcatgcccaaaccagacgggttaacggcagcaaagaaccttgcagaggcgttcgagcattataacgaatggcatccgcatagtgcgctgggttatcgctcgccacgggaatatctgcggcacgggcttgtaatgggttaa

SEQ ID NO: 29830 - DNA, 3096 bp, Homo sapiens
  SIMILAR (664)..(1374): 981254mologous to Cloning vector pZC320 SopB,accession number U26464,Smith-Waterman Score=1158.
atggcggaaacagcggttatcaatcacaagaaacgtaaaaatagcccgcgaatcgtccagtcaaacgacctcactgaggcggcatatagtctctcccgggatcaaaaacgtatgctgtatctgttcgttgaccagatcagaaaatctgatggcaccctacaggaacatgacggtatctgcgagatccatgttgctaaatatgctgaaatattcggattgacctctgcggaagccagtaaggatatacggcaggcattgaagagtttcgcggggaaggaagtggttttttatcgccctgaagaggatgccggcgatgaaaaaggctatgaatcttttccttggtttatcaaacgtgcgcacagtccatccagagggctttacagtgtacatatcaacccatatctcattcccttctttatcgggttacagaacccggttacgcagtttcgggttagtgaaacaaaggaaatcaccattcccgttgccatgcgtttatacgaatccctgtgtcagtatcggactcaggctcagggagatctgaattctgtcctggctggagttattggagatcctggtaggaagccccgcccaataaggaaagatgggtcagaattagacctgaagagccaccctggctgcagaacgccaaagccggatccccctcttgaagtgctccggggtgatagtgttgagaagacctctcgggtatggggaggtaatgaacgagaccaggagctgcttactgaggacgcactggatgatctcatcccttcttttctactgactggtcaacagacaccggcgttcggtcgaagagtatctggtgtcatagaaattgccgatgggagtcgccgtagtaaagctgctgcacttaccgaaagtgattatcgtgttctggttggcgagctggatgatgagcagatggctgcattatccagattgggtaacgattatcgcccaacaagtgcttatgaacgtggtcagcgttatgcaagccgattgcagaatgaatttgctggaaatatttctgcgctggctgatgcggaaaatatttcacgtaagattattacccgctgtatcaacaccgccaaattgcctaaatcagttgttgctcttttttctcaccccggtgaactatctgcccggtcaggtgatgcacttcaaaaagcctttacagataaagaggaattacttaagcagcaggcatctaaccttcatgagcagaaaaaagctggggtgatatttgaagctgaagaagttatcactcttttaacttctgtgcttaaaacgtcatctgcatcaagaactagtttaagctcacgacatcagtttgctcctggagcgacagtattgtataagggcgataaaatgatccctaaacagcagcaaaacgaaaaataccaagtgcctcaattcgatcaatcaacgattaaaaatattgagtctgcaaaaggacttgatgtgtgggacagctggccgctgcaaaacgctgacggaacagtagctgaatacaacggctatcacgttgtgtttgctcttgcgggaagcccgaaagacgctgatgacacatcaatctacatgttttatcaaaaggtcggcgacaactcaatcgacagctggaaaaacgcgggccgtgtctttaaagacagcgataagttcgacgccaacgatccgatcctgaaagatcagacgcaagaatggtccggtttctgcaacctttacatctgacggaaaaaatccggttatttctacacttgactatttccggttaaacattacggccaaacaaagcctgacaacagcgcagtgtgacaatctaaaaacttgtcacactacacatggatctgtcatggcggaaacagcggttatcaatcacaagaaacgtaaaaatagcccgcgaatcgtccagtcaaacgacctcactgaggcggcatatagtctctcccgggatcaaaaacgtatgctgtatctgttcgttgaccagatcagaaaatctgatggcaccctacaggaacatgacggtatctgcgagatccatgttgctaaatatgctgaaatattcgggattgacctctgcggaagccagtaaggatatacggcaggcattgaagagtttcgcggggaaggaagtggttttttatcgccctgaagaggatgccggcgatgaaaaaggctatgaatcttttccttggtttatcaaacgtgcgcacagtccatccagagggctttacagtgtacatatcaacccatatctcattcccttctttatcgggttacagaaccggtttacgcagtttcggcttagtgaaacaaaagaaatcaccaatccgtatgccatgcgtttatacgaatccctgtgtcagtatcgtaagccggatggctcaggcatcgtctctctgaaaatcgactggatcatagagcgttaccagctgcctaaagttcccagcccggaagcgaggaaaataacccggcgctggagaataggtgaagcagcggatttagttggggtttcttctcaggctatcagagatgccgagaaagcagggcgactaccgcacccggatatggaaattcgaggacgggttgagcaacgtgttggttatacaattgaacaaattaatcatatgcgtgatgtgtttggtacgcgattgcgacgtgctgaagacgtatttccaccggtgatcggggttgctgcccataaaggtggcgtttacaaaacctcagtttctgttcatcttgctcaggatctggctctgaaggggctacgtgttttgctcgtggaaggtaacgacccccagggaacagcctcaatgtatcacggatgggtaccagatcttcatattcatgcagaagacactctcctgcctttctatcttggggaaaaggacgatgtcacttatgcaataaagcccacttgctggccggggcttgacattattccttcctgtctggctctgcaccgtattgaaactgagttaatgggcaaatttgatgaaagtaaactgcccaccgatccacacctgatgctccgactggccattgaaactgttgctcatgactatgatgtcatagttattgacagcgcgcctaacctgg

SEQ ID NO: 29831 - DNA, 5800 bp, Homo sapiens
  SIMILAR (1783)..(2637): 971254mologous to Cloning vector pZC320 SopB,accession number U26464,Smith-Waterman Score=1366.
  misc_feature (1)...(5800): n = a,t,c or g
atggcggaaacagcggttatcaatcacaagaaacgtaaaaatagcccgcgaatcgtccagtcaaacgacctcactgaggcggcatatagtctctcccgggatcaaaaacgtatgctgtatctgttcgttgaccagatcagaaaatctgatggcaccctacaggaacatgacggtatctgcgagatccatgttgctaaatatgctgaaatattcggattgacctctgcggaagccagtaaggatatacggcaggcattgaagagtttcgcggggaaggaagtggttttttatcgccctgaagaggatgccggcgatgaaaaaggctatgaatcttttccttggtttatcaaacatagaaaggcaggagagtgtcttctgcatgaatatgaagatctggtacccatccgtgatacattgaggctgttccctgggggtcgttaccttccacgagcaaaacacgtagccccttcagagccagatcctgagcaagatgaacagaaactgagcccgcgaatcgtccagtcaaacgacctcactgaggcggcatatagtctctcccgggatcaaaaacgtatgctgtatctgttcgttgaccagatcagaaaatctgatggcaccctacaggaacatgacggtatctgcgagatccatgttgctaaatatgctgaaatattcggattgacctctgcggaagccagtaaggatatacggcaggcattgaagagtttcgcggggaaggaagtggttttttatcgccctgaagaggatgccggcgatgaaaaaggctatgaatcttttccttggtttatcaaacgtgcgcacagtccatccagagggctttacagtgtacatatcaacccatatctcattcccttctttatcgggttacagaaccggtttacgcagtttcggcttagtgaaacaaaagaaatcaccaatccgtatgccatgcgtttatacgaatccctgtgtcagtatcgtaagccggatggctcaggcatcgtctctctgaaaatcgactggatcatagagcgttaccagctgcctcaaagttaccagcgtatgcctgacttccgccggcgcttcctgcaggtctgtgttaatgagatcaacagcagaacttccatgcgcctctcatacattgagaaaaagaaaggccgccagacgactcatatcgatctggctctgaaggggctacgtgttttgctcgtggaaggtaacgacccccagggaacagcctcaatgtatcacggatgggtaccagatcttcatattcatgcagaagacactctcctgcctttctatcttggggaaaaggacgatgtcacttatgcaataaagcccacttgctggccggggcttgacattattccttcctgtctggctctgcaccgtattgaaactgagttaatgggcaaatttgatgaaggtaaactgcccaccgatccacacctgatgctccgactggccattgaaactgttgctcatgactatgatgtcatagttattgacagcgcgcctaacctgggtatcggcacgattaatgtcgtatgtgctgctgatgtgctgattgttcccacgcctgctgagttgtttgactacacctccgcactgcagtttttcgatatgcttcgtgatctgctcaagaacgttgatcttaaagggttcgagcctgatgtacgtattttgcttaccaaatacagcaatagtaatggctctcagtccccgtggatggaggagcaaattcgggatgcctggggaagcatggttctaaaaaatgttgtacgtgaaacggatgaagttggtaaagctgccccgatggtggattcgttaattgcgcgcgtaggagtaatggctcgcggtaatgccattactttgcctgtatgtggtcgggatgtgaagtttactcttgaagtgctccggggtgatagtgttgagaagacctctcgggtatggtcaggtaatgaacgtgaccaggagctgcttactgaggacgcactggatgatctcatcccttcttttctactgactggtcaacagacaccggcgttcggtcgaagagtatctggtgtcatagaaattgccgatgggagtcgccgtcgtaaagctgctgcacttaccgaaagtgattatcgtgttctggttggcgagctggatgatgagcagatggctgcattatccagattgggtaacgattatcgcccaacaagtgcttatgaacgtggtcagcgttatgcaagccgattgcagaatgaatttgctggaaatatttctgcgctggctgatgcggaaaatatttcacgtaagattattacccgctgtatcaacaccgccaaattgcctaaatcagttgttgctcttttttctcaccccggtgaactatctgcccggtcaggtgatgcacttcaaaaagcctttacagataaagaggaattacttaagcagcaggcatctaaccttcatgagcagaaaaaagctggggtgatatttgaagctgaagaagttatcactcttttaacttctgtgcttaaaacgtcatctgcatcaagaactagtttaagctcacgacatcagtttgctcctggagcgacagtattgtataagggcgataaaatggtgcttaacctggacaggtctnggtgtgacaatctaaaaacttgtcacacttcacatggatctgtcatggcggaaacagcggttatcaatcacaagaaacgtaaaaatagcccgcgaatcgtccagtcaaacgacctcactgaggcggcatatagtctctcccgggatcaaaaacgtatgctgtatctgttcgttgaccagatcagaaaatctgatggcaccctacaggaacatgacggtatctgcgagatccatgttgctaaatatgctgaaatattcggattgacctctgcggaagccagtaaggatatacggcaggcattgaagagtttcgcggggaaggaagtggttttttatcgccctgaagaggatgccggcgatgaaaaaggctatgaatcttttccttggtttatcaaacgtgcgcacagtccatccagagggctttacagtgtacatattaacccatatctcattcccttctttatcgggttacagaaccggtttacgcagtttcggcttagtgaaacacaagagatcaccaatcccctgacttcagcgcaggtaaatgtgtcaaaatctgatgacacactcaaaaatcaacggagtggaggatcacaaaccgatcttggacggaggcggaaaaacatatcagaacgttcagcagtttatcgagaaaggcaattatacatccggcgacaaccatacgctgagagaccctcactacgttgaagacaaaggccataaatacctggtattcgaagccaacacgggaacagaaaacggataccaaggcgaagaatctttatttaacaaagcgtactacggcggcggcacgaacttcttccgtaaagaaagccagaagcttcagcagagcgctaaaaaacgcgatgctgagttagcgaacggcgccctcggtatcatagagttaaataatgattacacattgaaaaaagtaatgaagccgctgatcacttcaaacacggtaactgatgaaatcgagcgcgcgaatgttttcaaaatgaacggcaaatggtacttgttcactgattcacgcggttcaaaaatgacgatcgatggtattaactcaaacgatatttacatgcttggttatgtatcaaactctttaaccggcccttacaagccgctgaacaaaacagggcttgtgctgcaaatgggtcttgatccaaccgatgtgacattcacttactctcacttcgcagtgccgcaagccaaaggggggtcctttagagtccccaaacagggatttagtctgacgtgttttctttttaatatgctgtttcgtacccgttgtcttctaaccaacataggagagacctccattcagattccgattcacacggcaacgcttttgtccaggaccccatgcttggttgtcaggaggcttacttctgaacagatggcagattctgcgtcccaagggcgcttccccccattcggcaaatataaggctggaaaccccatgcgcgtttgttccatcaaaaattggccaccagatgccatagcgcatccccattattttctcatatttgaaatacgcaatagtaaggttctcagtcccgtgggaggaggagcaaattcggaaggccgggacaagcatggttctaaaaattgttgtcgtgaaacggatgaagttgatacttcgttatcgacaccagctgccccgatggtggattcgttaattgcgcgcgtaggagtaatggctcgcggtaatgccattactttgcctgtatgtggtcgggatgtgaagtttactcttgaagtgctccggggtgatagtgttgagaagacctctcgggtatggtcaggtaatgaacgtgaccaggagctgcttactgaggacgcactggatgatctcatcccttcttttctactgactggtcaacagacaccggcgttcggtcgaagagtatctggtgtcatagaaattgccgatgggagtcgccgtcgtaaagctgctgcacttaccgaaagtgattatcgtgttctggttggcgagctggatgatgagcagatggctgcattatccagattgggtaacgattatcgcccaacaagtgcttatgaacgtggtcagcgttatgcaagccgattgcagaatgaatttgctggaaatattctgcgctggctgatgcggaaaatatttcacagctcgtgcagcacgggcctgcgtcagaattatccacgccctctccttgtccacctaccgggcggcggcctggtgcagcccacaggcccagctgcggactccttgcgcgcgttagttgctacacatacggaacactcgcgcccatcgttccgcggcgggggaacggggtgtgacaatctaaaaacttgtcacacttcacatggatctgtcatggcggaaacagcggttatcaatcacaagaaacgtaaaaatagcccgcgaatcgtccagtcaaacgacctcactgaggcggcatatagtctctcccgggatcaaaaacgtatgctgtatctgttcgttgaccagatcagaaaatctgatggcaccctacaggaacatgacggtatctgcgagatccatgttgctaaatatgctgaaatattcggattgacctctgcggaagccagtaaggatatacggcaggcattgaagagtttcgcggggaaggaagtggttttttatcgccctgaagaggatgccggcgatgaaaaaggctatgaatcttttccttggtttatcaaacgtgcgcacagtccatccagagggcttttacagtggacatatcaacccctattctcattcccttctttatcgggttacagaaccggtttacgcatttttcgctttatggaacaaaagaaatcaccatccaaccggtttacgcaggttcggcttagtgaaacaaaagaaatcaccaatccgtatgccatgcgtttatacgaatccctgtgtcagtatcgtaagccggatggctcaagcatcgtctctctgaaaatcgactggatcatagagcgttaccagctgcctcaaagttaccagcgtatgcctgacttccgccgccgcttcctgcaggtctgtgttaatgagatcaacagcagaactccaatgcgcctctcatacattgagaaaaagaaaggccgccagacgactcatatcgtattttccttccgcgatatcacttccatgacgacaggatag

SEQ ID NO: 29832 - DNA, 7215 bp, Homo sapiens
  SIMILAR (3921)..(2278): 931254mologous to Homo sapiens putative p150,accession number U93563,Smith-Waterman Score=2703.
  misc_feature (1)...(7215): n = a,t,c or g
ttatctaatctcccagcgtggtttaatcagacgatcgaaaatttcattgcagacaggttcccaaatagaaagagcatttctccaggcaccagttgaagagcgttgatcaatggcctgttcaaaaacagttctcatccggatctgacctttaccaacttcatccgtttcacgtacaacattttttagaaccatgcttccccaggcatcccgaatttgctcctccatccacggggactgagagccattactattgctgtatttggtaagcaaaatacgtacatcaggctcgaaccctttaagatcaacgttcttgagcagatcacgaagcatatcgaaaaactgcagtgcggaggtgtagtcaaacaactcagcaggcgtgggaacaatcagcacatcagcagcacatacgacattaatcgtgccgatacccaggttaggcgcgctgtcaataactatgacatcatagtcatgagcaacagtttcaatggccagtcggagcatcaggtgtggatcggtgggcagtttaccttcatcaaatttgcccattaagctggtactttgaggcagctggaacgctctagatccagtcgatttcagagagacgatgcctgagccatccggcttacgatactgacacagggattcgtataaacgcatggcatacggattggtgatttcttttgtttcactaagccgaaactgcgtaaaccggttctgtaacccgataaagaagggaatgagatatgggttgatatgtacactgtaaagccctctggatggactgtgcgcacgtttgataaaccaaggaaaagattcatagcctttttcatcgccggcatcctcttcagggcgataaaaaaccacttccttccccgcgaaactcttcaatgcctgccgtatatccttactggcttccgcagaggtcaatccgaatatttcagcatatttagcaacatggatctcgcagataccgtcatgttcctgtagggtgccatcagattttctgatctggtcaacgaacagatacagcatacgtttttgatcccgggagagactatatgccgcctcagtgaggtcgtttgactggacgattcgcgggctatttttacgtttcttgtgattgataaccgctgtttccgccatgacagatccatgtgaagtgtgacaagtttttagattgtcacattgttcaattagcccaacttctgtgctagtctgtaaattccgaacactttttcgtagaatggctgtaaacatgctccatatttctgcttgacatgttacatcacagtgctccaaaagctctgtcatacatgttatactctcagcatcctggataataaagttcatctccaagtcaaattctccaccaaccagcacaatacagtaaagaactgccatttgctcacttggattctgaattttcactgtagaatctggctctggatgtggtttgtgtacgacctgagtacatacttgttctgtcaagatctgaagcattagagcatgtggggaatgcacaaaaattgatgcattctcttttggtgatgattccaggcagagctgagcatcagtggccttagcattatatgtaaaggcaatgctacttgcaagtttcccatcatataacacctgtttatgatgttctgccaaatgaatatcactctcagatttaaacttgaaggtactcttgtagctccattgttttcctttctgtggatttctgtgttgctggncttgccagcgccctagcgcccgctcctttcgctttcttcccttcctttctcgcaacgttcgccggctttccccgtcaagctctaaatcgggggctcctttagggttccgatttagtgctttacggcacctcgaccccaaaaaacttgatttgggtgatggttcacgtagtgggccatcgccctgatagacggtttttcgccctttgacgttggagtccacgtttagtgggtagatccacaggacgggtgtggtcgccatgatcgcgtagtcgatagtggctccaagtagcgaagcgagcaggactgggcggcggccaaagcggtcggacagtgctccgagaacgggtgcgcatagaaattgcatcaacgcatatagcgctagcagcacgccatagtgactggcgatgctgtcggaatggacgatatcccgcaagaggcccggcagtaccggcataaccaagcctatgcctacagcatccagggtgacggtgccgaggatgacgatgagcgcattgttagatttcatacacggtgcctgactgttgtttcctgactttttaatgatcgccattctaactggtgtgagatggtatctcattgtggttttgatttgcatttctttgatgattagtgatgatgagcattttttcatgtgtcttttggctgcaaaaatgtcttcttttgagaagtgtctgttcatgtcctttgcccactttttgatggggttgtttgtttttttcttgtaaatttgtttgagttcattgtagattctggatactagccctttgtcagatgggtagattgcaaaaattttctcccattctgtaggttgcctgttcactctgatggtagtttcttttgctgtgcagaagctctttagtttaattagatcccatttgtcaattttggcttttgttgccattgcttttggtgttttaggcttgaagtccttgcccatgcctatgtcctgaatggtattgcctaggttttcttctagggtttttatggttttaggtctaacatttaagtctttaatccatcttgaattagtttttgtatgaggtgtaaggaagggatccagtttcagcttgctacatatggctagccagttttcccagcaccatttattaaatagggaatcctttccccattgcttgtttttctcaggtttgtcaaagatcagatggttgtagatatgcggcattatttctgaggcctctgttctgttccattggtctatatctctgttttggtaccagtaccatgctgttttggttactgtagccttgtagtacagtttgaagtcaggtagcgtgatgcctccagctttgttcttttggcttagaattgacttggcaatgcaggctcttttttggttccatatgaacttcaaagtagttttttccaattctgtgaagaaagtcattggtagcttgatggggatggcattgaatctataaattaccttgggcagtatggccattttcacgatattgattcttcctacccatgagcatggaatgttcttccatttgtttgtatcctcttttattttgttgagcagtggtttgtagttctccttgaagaggtccttcatgtcccttgtaagttggattcctaggtgttttattctctttgaagcaattgtgaatgggagttcactcgtgatttggctctctgtttgtctgttattggtgtataagaatgcttgtgatttttgcacattgattttgtattctgagactttgctgaagttacctatcagcttaaggagattttgggctgagacaatggggttttctagatatacaatcatgtcatctgcaaacagggacaatttgacttcctcttttcctaactgaataccctttatttccttctcctgcctgattgccctggccagaacttctaacactttgttgaataggagtggtgaaagagggcatccctgtcttgtgccagttttcaaagggaatgcttccagtttttgcccattcagtatgatattggctgtgggtttgtcatagatagctcttattattttgagatacgtcccatcaatacctaatttattgagagtttttagcatgaagcactgttgaattttgtcaaaggccttttccgcatctattgagataatcatatggtttttgtctttggttctgtttatatgctgaagaacagaagatctctggagcaccttctcctgcgctgatgggtacaaaactagtttctccagcagttctttgtgaagtgggtcggactcgagggcttcgtagaatgaaatgtcatgctggctaagaaggctgaacttagactttcggtagaaagtggccaggccttcgtgctgcttgattcgaaacaccccctcgagcccgaaggcctctagggcgggtaccaagctcctgaaacagatgacatcggcgttgtagccggtgagttccttctggataaggttctggcggtagtcgagctccagggcgtagggggcacagtatgggtacagaaccgttcgcgagaactcagtctgcgcgtacgtgtctgccaggatgttgtaagagacagtgcggatgagagcgtcctcagtcaccttcttcgtgtagagatgccggtggtcaaaagtgcaggtgccaggcccagcctctaccacacacacactttccaactcccggctgtgcccaaagcgctgcccatcgcctggggtgcagtgaagcttgagccttagcccgatgtcggcattggacggggtgtagacacgctcctccacatcagtctcagtccaagaagaagaaggtgaggagggagacaatgacgaggggacaccgacctcgggctccgccgctccgggcttggcttccttataccagcggaaaagggagctggcgggatccccaaattcgaggctgagtttggggcacacagggaacccggccatgatgtagcgcggcaactgcagttcggtgaaggcgggcgggttgcgctccaccttgtacttaacatcgccgatctgcagcaccgcgccgtcttgccaggcatccacgttgagcacgtcctcagccactgcctcttcccggtagtacagcttcaccacgggctcgcagaacacagccggctcaggccccggccctgaacaggccgcaccgccgctagcattcggccggctcttcctgctcttcttggcggcggccgccttagcgtgaccctttagggcattggtagcgatgcggctgaggactcgacccagcggctcgctctggtcgcgctgcatgttcttgtggctaccatcagccaaagcgaatgacaggctcagcttgggttccgaaggtacgcagcgcactacagcgcgctccatcgctcccgccgctgtctggctccccgcttcagcccggctcagcttctccaccgccgtccggatcacccgaagcgcggcgcgggcgcctgggagcctccacatgaacctggtggcgtgttccgcttcgttggaggaggtggacacctgtcttggaatcttggctgaccagctctcctccctgcgcccgggactggactgcgctaggacgtggaggcctccacccggattgcgagctttactcgcagtgtggaaggtgttgcccatttcatctccacagctttgccgaccctgatcgctcgtttcggtggcatcaggctcgaaccctttaagatcaacgttcttgagcagatcacgaagcatatcgaaaaactgcagtgcggaggtgtagtcaaacaactcagcaggcgtgggaacaatcagcacatcagcagcacatacgacattaatcgtgccgatacccaggttaggcgcgctgtcaataactatgacatcatagtcatgagcaacagtttcaatggccagtcggagcatcaggtgtggatcggtgggcagtttaccttcatcaaatttgcccattaactcagtttcaatacggtgcagagccagacaggaaggaataatgtcaagccccggccagcaagtgggctttattgcataagtgacatcgtccttttccccaagatagaaaggcaggagagtgtcttctgcatgaatatgaagatctggtacccatccgtgatacattgaggctgttccctgggggtcgttaccttccacgagcaaaacacgtagccccttcagagccagatcctgagcaagatgaacagaaactgaggttttgtaaacgccacctttatgggcagcaaccccgatcaccggtggaaatacgtcttcagcacgtcgcaatcgcgtaccaaacacatcacgcatatgattaatttgttcaattgtataaccaacacgttgctcaacccgtcctcgaatttccatatccgggtgcggtagtcgccctgctttctcggcatctctgatagcctgagaagaaaccccaactaaatccgctgcttcacctattctccagcgccgggttattttcctcgcttccgggctgtcatcattaaactgtgcaatggcgatagccttcgtcatttcatgaccagcgtttatgcactggttaagtgtttccatgagtttcattctgaacatcctgcaggaagcggcggcggaagtcagggcatacgctggtaactttgaggcagctggtaccgctctatgatccagtcgattttccagagagacgatgcttaagccatccggctttcgatactgacacagggattcgtataaacgcatggcatacggattggtgatttcttttgtttcactaagccgaaactgcgtaaaccggttctgtaacccgataaagaagggaatgagatatgggttgatatgtacactgtaaagccctctggatggactgtgcgcacgtttgataaaccaaggaaaagattcatagcctttttcatcgccggcatcctcttcagggcgataaaaaaccacttccttccccgcgaaactcttcaatgcctgccgtatatccttactggcttccgcagaggtcaatccgaatatttcagcatatttagcaacatggatctcgcagataccgtcatgttcctgtagggtgccatcagattttctgatctggtcaacgaacagatacagcatacgtttttgatcccgggagagactatatgccgcctcagtgaggtcgtttgactggacgattcgcgggctatttttacgtttcttgtgattgataaccgctgtttccgccatgacagatccatgtgaagtgtgacaagtttttagattgtcacaaagtatatcttcattttcatttgggtattttagttttagattgccagcagccactaaaacggcttttactgctcgcattccatagtcgtaatgaaattgcgatgagagctgctctgagcaaagcctataggtcattactattttcacagacagaggtcttgcattcaaaaatccgtaagagtagagggagatttctgctataagcgcatagtttggaaccatcatagccactgttctaaaaagaac

SEQ ID NO: 29833 - DNA, 6337 bp, Homo sapiens
  SIMILAR (3761)..(4639): 991254mologous to Cloning vector pZC320 SopA,accession number U26464,Smith-Waterman Score=1524.
atggcggaaacagcggttatcaatcacaagaaacgtaaaaatagcccgcgaatcgtccagtcaaacgacctcactgaggcggcatatagtctctcccgggatcaaaaacgtatgctgtatctgttcgttgaccagatcagaaaatctgatggcaccctacaggaacatgacggtatctgcgagatccatgttgctaaatatgctgaaatattcggattgacctctgcggaagccagtaaggatatacggcaggcattgaagagtttcgcggggaaggaagtggttttttatcgccctgaagaggatgccggcgatgaaaaaggctatgaatcttttccttggtttatcaaacgtgcgcacagtccatccagagggctttacagtgtacatatcaacccatatctcattcccttctttatcgggttacagaaccggtttacgcagtttcggcttagtgaaacaaaagaaatcaccaatccgtatgccatgcgtttatacgaatccctgtgtcagtatcttgtgtttgctcttgcgggaagcccgaaagacgctgatgacacatcaatctacatgttttatcaaaaggtcggcgacaactcaatcgacagctggaaaaacgcgggccgtgtctttaaagacagcgataagttcgacgccaacgatccgatcctgaaagatcagacgcaagaatggtccggttctgcaacctttacatctgacggaaaaatccgtttattctacactgactattccggtaaacattacggcaaacaaagcctgacaacagcgcaggtaaatgtgtcaaaatctgatgacacactcaaaatcaacggagtggaagatcacaaaacgatttttgacggagacggaaaaacatatcagaacgttcagcagtttatcgatgaaggcaattatacatccggcgacaaccatacgctgagagaccctcactacgttgaagacaaaggccataaataccttgtattcgaagccaacacgggaacagaaaacggataccaaggcgaagaatctttatttaacaaagcgtactacggcggcggcacgaacttcttccgtaaagaaagccagaagcttcagcagagcgctaaaaaacgcgatgctgagttagcgaacggcgccctcggtatcatagagttaaataatgattacacattgaaaaaagtaatgaagccgctgatcacttcaaacacgtgtgacaatctaaaaacttgtcacacttcacatggatctgtcatggcggaaacagcggttatcaatcacaagaaacgtaaaaatagcccgcgaatcgtccagtcaaacgacctcactgaggcggcatatagtctctcccgggatcaaaaacgtatgctgtatctgttcgttgaccagatcagaaaatctgatggcaccctacaggaacatgacggtatctgcgagatccatgttgctaaatatgctgaaatattcggattgacctctgcggaagccagtaaggatatacggcaggcattgaagagtttcgcggggaaggaagtggttttttatcgccctgaagaggatgccggcgatgaaaaaggctatgaatcttttccttggtttatcaaacgtgcgcacagtccatccagagggctttacagtgtacatatcaacccatatctcattccccttctttatcgggttacagaaccggtttacgcagtttcggcttagtgaaacaaaagaaatcaccaatccgtatgccatgcgtttatacgaatccctgtgtcagtatcgtaagccggatggctcaagcatcgtctctctgaaaatcgactgggatcatatgagcgttttcgtatcccctttgcggccatggtggaaaggacctcagaccgtcatcctgaccacccccacggctggctggttcaacatacgcaaatcagtaaacgtaatccagcatataaacagaaccaaagataaaaaccgcatgattatctcaccagatgcagaaaaggcctttgacaaaattcaacagcacttcatgctaaaaactctcagtaagctagatattgatgggaactacatgccgccgcctgctgcctactgcgtgattaggtatgcgctcatcgaggagcattactgctttatacctgggtcagcggtctgtgttaatgagatcaacagcagaactccaatgcgcctctcatacattgagaaaaagaaaggccgccagacgactcatatcgtatttattcgcgataagctcatggagcggcgtaaccgtcgcacaggaaggacagagaaagcgcggatctgggaagtgacggacagaacggtcaggacctggattggggaggcggttgccgccgctgctgctgacggtgtgacgttctctgttccggtcacaccacatacgttccgccattcctatgcgatgcacatgctgtatgccggtataccgctgaaagttctgcaaagcctgatgggacataagtccatcagttcaacggaagtctacacgaaggtttttgcgctggatgtggctgcccggcaccggcctgtgtaccaatctgcctttgtactggagttggttattagcattacccttaccatcaacagtactatgccagctgctgaacaaccattctgctatcctatggtcacagtgggctggtggggcaagacatattatcctattttaccaacgaagaatttgaggcttaggaagaaacccaagaggtaccgagaggttcagaaacttgcccacagtgacacaactggcaagttatggagctgggagttgaacccagcagtctggttccagggtccacctctggcaatacacagaaaggatgctaccactccatcaacccctatttcccaaggggtcacaagcccaaaccctaagaaaaagaacttcccactccagcctaaagaggtgcccccaggtttctctggtctgtggtttcccttgctgcagcaagttaataaggccaactttgatagtttcaggaaacccacacttcacatggatctgtcatggtcggaaacagcggttatcaatcacaagaaacgtaaaaatagcccgcgaatcgtccagtcaaacgacctcactgaggcggcatatagtctctcccgggatcaaaaacgtatgctgtatctgttcgttgaccagatcagaaaatctgatggcaccctacaggaacatgacggtatctgcgagatccatgttgctaaatatgctgaaatattcggattgacctctgcggaagccagtaaggatatacggcaggcattgaagagtttcgcggggaaggaagtggttttttatcgccctgaagaggatgccggcgatgaaaaaggctatgaatcttttccttggtttatcaaacgtgcgcacagtccatccagagggctttacagtgtacatatcaacccatatctcattcccttctttatcgggttacagaaccggtttacgcagtttcggcttagtgaaacaaaagagatcaccaatccgtatgccatgcgtttatacgaatccctgtgtcaatatcgtaagccggatggctcaggcatcgtctttctgaaaattgactggatcatagagcgttaccagctgcctgaaagttaccagcgtatgcctgactttcggcggcggttcctgcaggtctgtgttaatgagatcaacagcagaactccaatgcgcctctcatacattgagaaaaagaaaggccgccagacgactcatatcgatgttcagattgaaactgatggaaaactcaaccagtgcataaacgctggtcatgaaatgacgaaggctatcgccattgcacagtttaatgatgacagcccggaagcgaggaaaataacccggcgctggagaataggtgaagcagcggatttagttggggtttcttctcaggctatcagagatgccgagaaagcagggcgactaccgcacccggatatggaaattcgaggacgggttgagcaacgtgttggttatacaattgaacaaattaatcatatgcgtgatgtgtttggtacgcgattgcgacgtgctgaagacgtatttccaccggtgatcggggttgctgcccataaaggtggcgtttacaaaacctcagtttctgttcatcttgctcaggatctggctctgaaggggctacgtgttttgctcgtggaaggtaacgacccccagggaacagcctcaatgtatcacggatgggtaccagatcttcatattcatgcagaagacactctcctgcctttctatcttggggaaaaggacgatgtcacttatgcaataaagcccacttgctggccggggcttgacattattccttcctgtctggctctgcaccgtattgaaactgagttaatgggcaaatttgatgaaggtaaactgcccaccgatccacacctgatgctccgactggccattgaaactgttgctcatgactatgatgtcatagttattgacagcgcgcctaacctgggtatcggcacgattaatgtcgtatgtgctgctgatgtgctgattgttcccacgcctgctgagttgtttgactacacctccgcactgcagtttttcgatatgcttcgtgatctgctcaagaacgttgatcttaaagggttcgagcctgatgtatttattcgcgataagctcatggagcggcgtaaccgtcgcacaggaaggacagagaaagcgcggatctgggaagtgacggacagaacggtcaggacctggattggggaggcggttgccgccgctgctgctgacggtgtgacgttctctgttccggtcacaccacatacgttccgccattcctatgcgatgcacatgctgtatgccggtataccgctgaaagttctgcaaagcctgatgggacataagtccatcagttcaacggaagtctacacgaaggtttttgcgctggatgtggctgcccggcaccggatcagaaaatctgatggcaccctacaggaacatgacggtatctgcgagatccatgttgctaaatatgctgaaatattcggattgacctctgcggaagccagtaaggatatacggcaggcattgaagagtttcgcggggaaggaagtggttttttatcgccctgaagaggatgccggcgatgaaaaaggctatgaatcttttccttggtttatcaaacgtgcgcacagtccatccagagggctttacagtgtacatatcaacccatatctcattcccttctttatcgggttacagaaccggtttacgcagtttcggcttagtgaaacaaaagaaatcaccaatccgtatgccatgcgtttatacgaatccctgtgtcagtatcgtaagccggatggctcaggcatcgtctctctgaaaatcgactggatcatagagcgttaccagctgcctcaaagttaccagcgtatgcctgacttccgccgccgcttcctgcagtgctgctttgcagaccaagatgcctctgcgggaagcccgaaagacgttgatgacacatcaatctacatgttttatcaaaaggtcggcgacaactcaatcgacagctggaaaaacgcgggccgtgtctttaaagacagcgataagttcgacgccaacgatccgatcctgaaagatcagacgcaagaatggtccggttctgcaacctttacatctgacggaaaaatccgtttattctacactgactattccggtaaacattacggcaaacaaagcctgacaacagcgcagatccctaaacagcagcaaacggaaaaataccaagtgcctcaattcgatcaatcaacgattaaaaatattgagtctgcaaaaggacttgatgtgtgggacagctggccgctgcaaaacgctgacggaacagtagctgaatacaacggctatcacgttgtgtttgctcttgcgggaagcccgaaagacgctgatgacacatcaatctacatgttttatcaaaaggtcggcgacaactcaatcgacagctggaaaaacgcgggccgtgtctttaaagacagcgataagttcgacgccaacgatccgatcctgaaagatcagacgcaagaatggtccggttctgcaacctttacatctgacggaaaaatccgtttattctacactgactattccggtaaacattacggcaaacaaagcctgacaacagcgcaggtaaatgtgtcaaaatctgatgacacactcacaatcaacggagtggaagatcacaaaacgatttttgacggagacggaaaaacatatcagaacgttcagcagtttatcgatgaaggcaattatacatccggcgacaaccatacgctgagagaccctcactacgttgaagacattgttccataa

SEQ ID NO: 29834 - DNA, 4228 bp, Homo sapiens
  SIMILAR (2690)..(3229): 971254mologous to Leishmania major probable levansucrase precursor,accession number AL160371,Smith-Waterman Score=925.
atggcggaatcagcggttatcaatcacaagaaacgtaaaaatagcccgcgaatcgtccagtcaaacgacctcactgaggcggcatatagtctctcccgggatcaaaaacgtatgctgtatctgttcgttgaccagatcagaaaatctgatggcaccctacaggaacatgacggtatctgcgagatccatgttgctaaatatgctgaaatattcggattgacctctgcggaagccagtaaggatatacggcaggcattgaagagtttcgcggggaaggaagtggttttttatcgccctgaagaggatgccggcgatgaaaaaggctatgaatcttttccttggtttatcaaacggccaggcggtgaagggcaatcagctgttgcccgtctcactggtgaaaagaaaaaccaccctggcgcccaatacgcaaaccgcctctccccgcgcgttggccgattcattaatgcagctggcacgacaggtttcccgactggaaagcgggcaacaaaaacagcatatccactcagttccacatttccatataaaggccaaggcatttattctcaggataattgtttcagcatcgcaaccgcatcagactccggcatcgcaaactgcacccggtgccgggcagccacatccagcgcaaaaacttcgtggggatcctctagagtcaaaccgcgggggggaaaagtatatgggaatgtggcaagatgatgtgtgtcaagggaatggtgtggtggttacccagtttggattatactacgagggcaactttcaccttaataaaatgatgggaaatggggttttgctttccgaagatgatactatctatgaaggagaattttcagatgactggactcttagtggaaaggatctgaagccagtcccagaacgatgcaaccagtgcagccagctcttgattactatgactgacaaagaagaccatgtgattatatcagacagtcattgttgcccattaggtgtgacactgacagaatctcaggcagaaaaccatgccagcactgctctcagcccctccactgaaacccttgacaggcaggaagaagtatttgagaacactcttgtagcaaatgatcagtctgttgctactgaactgaatgcagtaagtgctcagatcacaagcagcgatgccatgtcctctcaacaaaatgtcatgggaacaactgaaatttcctctgccagaaacataccatcataccctgacacccaagcagtcaatgaatacctacggaaactgtcagatcattcagtaagagaggactcagagcatggtgaaaagccagtgccatctcagaaaaatggaataaaaggaataaaagagggaagggagttaaggaaaaagggaaataagtcaaagggcaaaggaagaaatgaaaacaaggttaagaagcaaggagataatgacactccaacaggtgacaataaaaatggaataaaaggaataaaagagggaagggagttaaggaaaaagggaaataagtcaaagggcaaaggaagaaatgaaaacaaggttaagaagcaaggagataatgacactccaacaggtgacaatgttttgccaaccacgaaagatgcttgttttgcctcagcagtagaatgtctgcagcagatcaggtggccctcctccagccgagcccccgagtcagtcctcatggtgctctccccgcggggctgccccggcgcaaccgccggcggcccgagcccagctccccgcgacgcagcggcctccgggacctgtgggacgccggggcttcgtggcgcctggcgaggcagccgccccctgagccagtgtgacaatctaaaaacttgtcacacttcacatggatctgtcatgccggaaaccgagcgggttatcaattcccaagaaaaggtaaaattagcccgcgaatcgtccagtcaaacgacctcattgagcgggcatatagtctctcccgggatcataaaacgtatgctgtatctgttcgctgaccagatcagaaaatctgatggcacccttacaggaacatgacggtatctgcgagatccatgttgcttaaatatgttgaaatatttcggattggccctctggcgggaagccagtaaggatatacggcaggcattgaagagtttcgcggggaaggaagtggttttttatcgccctgaagaggatgccggcgatgaaaaaggctatgaatcttttcccttggtttatcaaacgtgcgcacagtccatccagagggctttacagtgtacatatcaacccatatctcattcccttctttatcgggttacaaaacccggtttacgccagtttcggcttattggaaacaaagaaaattacccaatccgtatggccatgccgttaatacgaaatccctgggtcaatattcgaaggccggatggctcaggcatgcgtttctctgaaaatcgactggatcataaaagcgttaccagctggctcaaagtacccacagtatgcctgacttccgccgccgcttcctgcaggtctgtgttaatgagatcaacagcagaactccaatgcgcctctcatacattgagaaaaagaaaggccgccagacgactcatatcgtattttccttccgcgaatcccttcctgcaaaggatatctgagtcaattcgggaggatcgaaacggcagatcgcaaaaaacagtacatacagaaggagacatgaacatgaacatcaaaaaaattgtaaaacaagccacagttctgacttttacgactgcacttctggcaggaggagcgactcaagccttcgcgaaagaaaataaccaaaaagcatacaaagaaacgtacggcgtctctcatattacacgccatgatatgctgcagatccctaaacagcagcaaaacgaaaaataccaagtgcctcaattcgatcaatcaacgattaaaaatattgagtctgcaaaaggacttgatgtgtgggacagctggccgctgcaaaacgctgacggaacagtagctgaatacaacggctatcacgttgtgtttgctcttgcgggaagcccgaaagacgctgatgacacatcaatctacatgttttatcaaaaggtcggcgacaactcaatcgacagctgggaaaacgcgggccgtgtctttaaagacagcgataagttcgacgccaacgatccggatcctgaagatcagacgcaagaatggtccggttctgcaacctttacatctgacgggaaaatccgtttatgccttggcgttgctgacctcgcagttgactctagaggatccccctgcccttctttcctctctcccccaaatccccagctccccagtcctcagggtgtagacacaggaaggaggcatctgtgcccagctagcacttctgagctggatgctgcatcctgggggaccacagcgctcaggctcgggtgtgacaatctaaaaacttgtcacacttcacatggatctgtcatggcggaaacagcggttatcaatcacaagaaacgtaaaaatagcccgcgaatcgtccagtcaaacgacctcactgaggcggcatatagtctctcccgggatcaaaaacgtatgctgtatctgttcgttgaccagatcagaaaatctgatggcaccctacaggaacatgacggtatctgcgagatccatgttgctaaatatgctgaaatattcggattgacctctgcggaagccagtaaggatatacggcaggcattgaagagtttcgcggggaaggaagtggttttttatcgccctgaagaggatgccggcgatgaaaaaggctatgaatcttttccttggtttatcaaacgtgcgcacagtccatccagagggctttacagtgtacatatcaacccatatctcattcccttctttatcgggttacagaaccggtttacgcagtttcggcttagtgaaacaaaagaaatcaccaatccgtatgccatgcgtttatacgaatccctgtgtcagtatcatagaaaggcaggagagtgtcttctgcatgaatatgaagatctggtacccatccgtgatacattgaggctgttccctgggggtcgttaccttccacgagcaaaacacgtagccccttcagagccagatcctgagcaagatgaacagaaactgaggttttgtaaacgccacctttatgggcagcaaccccgatcaccggtggaaatacgtcttcagcacgtcgcaatcgcgtaccaaacacatcacgcatatgattaa

SEQ ID NO: 29835 - DNA, 5690 bp, Homo sapiens
  SIMILAR (4937)..(5311): 1001254mologous to Cloning vector pZC320 SopA,accession number U26464,Smith-Waterman Score=650.
atggcccactacgtgaaccatcaccaaaatcaattttttggggtcgaggtgcccaggcagaagaaaattcgtgaagatcataaatcctactatgcgattaacactgtttatgtatatggacaagagaaatacttgttgaggcagaagaaaattcgtgaagatcataaatcctactatgcgattaacactgtttatgtatatggacaagagaaatacttgttgtgccagctgtggaagctgcttgtgatgcgcctggtccagttgcagcctcgcagggagatggtgcccaagctggcatctggagctgcccaccccacagcagcagccggcgtgcctggctgtgcacagaggatagaacacctgggactcaatgtggtgctgcagctgctggtgggggtgcccctggagatggtgcatggagccacccgaattgggcttgtctacgtggccggtgttgtggcaggtaggcagtgtgacaatctaaaaacttgtcacacttcacatggatctgtcatggcggaaacagcggttatcaatcacaagaaacgtaaaaatagcccgcgaatcgtccagtcaaacgacctcactgaggcggcatatagtctctcccgggatcaaaaacgtatgctgtatctgttcgttgaccagatcagaaaatctgatggcaccctacaggaacatgacggtatctgcgagatccatgttgctaaatatgctgaaatattcggattgacctctgcggaagccagtaaggatatacggcaggcattgaatagtttcgcggggaaagaagtggttttttatcgccctgaagaggatgccggcgatgaaaaaggctatgaatcttttccttggtttatcaaactgctgtgctgggcacagtccatgaccatggtcccaggcctcatggagcttacaagtggagacagaagtgtaaaaacagtaaaaaagggtgccatcatagttattttggcacccgtattattccgacattacaaatatggggactggagctttggagaggctgccccgatggtggattcgttaattgcgcgcgtaggagtaatggctcgcggtaatgccattactttgcctgtatgtggtcgggatgtgaagtttactcttgaagtgctccggggtgatagtgttgagaagacctctcgggtatggtcagacaccggcgttcggtcgaagagtatctggtgtcatagaaatttgccgatgggagttccccgtgtaaagcctgcggaccttaccgatagtgattattcgggttcttgtttggcgagctggatgatgagccaaatggatggcattattccgatttggggtaacgattatcgcccaaacaatgtgcttaaggaacgtggttcagcgtttatgcaaagccggattgcagaaatgaattttgcttggaaaaaattttctgctccgggcttgatgttggataatattttccacttgaggacggggcaatcagctgatattgtccttctcacggccttggctattgagagtggtttgcagaggatccccatcgccattgcacagtttaatgatgacagcccggaagcgaggaaaataacccggcgctggagaataggtgaagcagcggatttagttggggtttcttctcaggctatcagagatgccgagaaagcagggcgactaccgcacccggatatggaaattcgaggacgggttgagcaacgtgttggttatacaattgaacaaattaatcatatgcgtgatgtgtttggtacgcgattgcgacgtgctgaagacgtatttccaccggtgatcggggttgctgcccataaaggtggcgtttacaaaacctcagtttctgttcatcttgctcaggatctggctctgaaggggctacgtgttttgctcgtggaaggtaacgacccccagggaacagcctcaatgtatcacggatgggtaccagatcttcatattcatgcagaagacactctcctgcctttctatcttggggaaaaggacgatgtcacttatgcaataaagcccacttgctggccggggcttgacattattccttcctgtctggctctgcaccgtattgaaactgagttaatgggcaaatttgatgaaggtaaactgcccaccgatgcacacctgatgctccgactggccattgaaactgttgctcatgactatgatgtcatagttattgacagcgcgcctaacctgggtatcggcacgattaatgtctggctccaagtagcgaagcgagcaggactgggcggaggacaaagcggtcggacagtgctccgagaacgggtgcgcatagaaattgcatcaacacatatagcgctagcagcacgccatagtgactggcgatgctgtcggaatggacgatatcccgcaagaggcccggcaccaaaggagtctctcctcatggccaccactgccccaggcccatggcgagtactgtctggctaccaccgatattcactcaaggcccaagggctcttcagccagctcatgatgaatgctgccaggcttgaatctctttcttcagggcaacaggttcccctctggctcagggaacagaaaagcacgtttaagagagaagcgtgtgaccaaatgacactcattgatgagtatgaatctaccatatcaagagaagcttttcatcaagacaatggaacaatgaggatgaaggaattttggagattatcagggcttctggcctatcacagaatgattttgaaggaggagttatgggcccctgcagaacctcagtgctctctgtgtgacaccatagcaagaatatgctcatcacattacaatgctgggctcctcagctgccacagtaaatgggtacgaatagagtggggcagtgctgaaaagatacccaaaaatatggaagcgactttggaactgggtaacatacagaggttggaacagtttggaggactcagaagaacacaggaaaattgtgacaatctaaaaaacttgtcacacttcacatggatctgtcatggcggaaacagcggttatcaatcaacaagaaacgtatttatagccctcgaatgcgaacagtaaaaagacggctatcagcaggcatatagcctcccccgggatctaatacttatgctgtatctgttggcgtgaccagatcagaaaatctgatggcaccctacaggaacatgaccggcatcctgccagatccatgttgctaaatatgctgaaatattcggattgacctctggcggaagccagtaaggatatacggcaggcattgaagagtttcgcggggaagggaagtggttttttatcgccctgaagaggatgccggcgatgaaaaaggctatgaatcttttccttggtttatcaaacgtgcgcacagtccatccagagggctttacagtgtacatatcaaccccatatctcattcccttcttttattcggttaccagaacccggttaacgcagtttctgcttatttgaaacaaaagaaatcccccatccgtctgccctggcgttattacaaatccctgttgtcagtatccgtaagcccgggatgggctcaaggcattcgcctctctgaaaatggaatggatccgagaagcggcgccagcggccccagagctaccagcgtatgcctgacttccgccgccgcttcctgcaggtctgtgttaatgagatcaacagcagaactccaatgcgcctctcatacatgagaaaagggatctctagaccgaaccgcagtttgcaacttagcttgaatgtgtctgctctgctcggactggctccagaattgcagccccacccctgtagtgtatacacagcatccacagcgccgggttattttcctcgcttccgggctgtcatcattaaactgtgcaatggcgatagccttcgtcatttcatgaccagcgtttatgcactggttcaccggcagtcccggagcgcaatgaaagacggtgagctggtgatatgggatagtgttcacccttgttacaccgttttccatgagcaaactgaaacgttttcatcgctctggagtgaacaccacgacgatttccggcagtttctacacatatattcgcaagatgtggcgtgttacggtgaaaacctggcctatttccctaaagggtttattgagaatatgtttttcgtctcagccaatccctgggtgagtttcaccagttttgatttaaacgtggccaatatggacaacttcttcgcccccgttttcaccatgggcaaatattatacgcaaggcgacaaggtgctgatgccgctggcgattcaggttcatcatgccgtttgtgatggcttccatgtcggcagaatgcttaatgaattacaacagtactgcgatgagtggcagggcggggcggtcaccgtcgacagcgacacacttgcatcggatgcagcccggttaacgtgccggcacggcctgtgtaaccagtgtgacaatctaaaaacttgtcacacttcacatggatctgtcatggcggaaacagcggttatcaatcacaagaaacgtaaaaatagcccgcgaatcgtccagtcaaacgacctcactgaggcggcatatagtctctcccgggatcaaaaacgtatgctgtatctgttcgttgaccagatcagaaaatctgatggcaccctacaggaacatgacggtatctgcgagatccatgttgctaaatatgctgaaatattcggattgacctctgcggaagccagtaaggatatacggcaggcattgaagagtttcgcggggaaggaagtggttttttatcgccctgaagaggatgccggcgatgaaaaaggctatgaatcttttccttggtttatcaaaccgccgggttattttcctcgcttccgggctgtcatcattaaactgtgcaatggcgatagccttcgtcatttcatgaccagcgtttatgcactgatccccgatgtgctgattgttcccacgcctgctgagttgtttgactacacctccgcactgcagtttttcgatatgcttcgtgatctgctcaagaacgttgatcttaaagggttcgagcctgatgtacgtattttgcttaccaaatacagcaatagtaatggctctcagtccccgtggatggaggagcaaattcgggatgcctggggaagcatggttctaaaaaatgttgtacgtgaaacggatgaagttggtaaaggtcagatccggatgagaactgtttttgaacaggccattgatcaacgctcttcaactggtgcctggagaaatgctctttctatttgggaacctgtctgcaatgaaattttcgatcgtctgattaaagggtaccgagctcgaattcgtaatcatggaaggacagagaaagcgcggatctgggaagtgacggacagaacggtcaggacctggattggggaggcggttgccgccgctgctgctgacggtgtgacgttctctgttccggtcacaccacatacgttccgccattcctatgcgatgcacatgctgtatgccggtataccgctgaaagttctgcaaagcctgatgggacataagtccatcatgttcaacggaagtctacacgaaggtttttgcgctggatgtggctgcccggcaccgggtgcagtttgcgatgccggagtctgatgcggttgcgatgcttaaacaattattctgaaaataaatgccttggcctttatatggg

SEQ ID NO: 29836 - DNA, 6876 bp, Homo sapiens
  SIMILAR (4335)..(3706): 1001254mologous to unidentified cloning vector 29kD protein essential for the replication of mini F plasmid,accession number AB015619,Smith-Waterman Score=1098.
ctaaaaaccctggttcttcctggaaacagagacaacttggcttgcatacccgcttttcgactctagagatccccgaccaagcaggcgtccctgcatggtctgaccccttgaacgtgggtgtataatcagagaggcatccctgcaatgattaaacaccaagggaaggctgccttcccagtccgtgaccggcgccggagtttggggtccacagataaaacgtgtctcttttgtctttgctccttccccagaaaagcgggacttgccgctaagggtgaaggaccaaggcaggcgtccctgcatggtctgacacccttgaaacgtgggtgtataatcagagaggcatcccggatttgaaattggtgagatgtttcttgggctggtaggtctgaggacctgaggtcgtaggtggatctttctcacggagccaagagcaagaggacgggggattgatctcccagggaagtcccccgatcctgtcacagcaccaatttcatgcacgttcctgtgaaagaccaccaacagtcgcttttcgactctagaggatcccccgtataaacgcatggcatacggattggtgatttcttttgtttcactaagccgaaactgcgtaaaccggttctgtaacccgataaagaagggaatgagatatgggttgatatgtacactgtaaagccctctggatggactgtgcgcacgtttgataaaccaaggaaaagattcatagcctttttcatcgccggcatcctcttcagggcgataaaaaaccacttccttccccgcgaaactcttcaatgcctgccgtatatccttactggcttccgcagaggtcaatccgaatatttcagcatatttagcaacatggatctcgcagataccgtcatgttcctgtagggtgccatcagattttctgatctggtcaacgaacagatacagcatacgtttttgatcccgggagagactatatgccgcctcagtgaggtcgtttgactggacgattcgcgggctatttttacgtttcttgtgattgataaccgctgtttccgccatgacagatccatgtgaagtgtgacaagtttttagattgtcacactcaatcaccatgaagctggatcttctaatatcttttactgactgatatgggtttgggttcttgggcctcaccccaatctcatcttgaattggacttcccttattcccatgggggaaggacccagtgggaaaatattgattctggggccggttcccgcgtactggtattaattgcgttgcgctcactgcccgctttccagtcgggaaacctgtcgtgccagctgcattaatgaatcggccaacgcgcggggagaggcggtttgcgtattgggcgccagggtggtttttcttttcaccagtgagacgggcaacagctgattgcccttcaccgcctggccctgagaaagttgcagcaagcggtccacgctggtttgccccagcaggcgaaaatcctgtttgatgggtggttccgaaatcggcaaaatcccatgagacggcacagctgattgccttcccgcctgccctgagaagtgcacaagcgtccagctggttgcccacagcgaaatctgttgagggggtccgaatcgcaaaatccgcggccaccaccttagttgcctcgtagggggcgtctttcattgccatactgaactccggatgagcattcatcaggcgggcaagaatgtgaataaaggccggataaaacttgtgcttatttttctttacggtctttaaaaaggccgtaatatccagctgaacggtctggttatatgtacattgagcaactgactgaaatgcctcaaaatgttgtttgataaaccaaggaaaagattcatagcctttttcatcgccggcatcctcttcagggcgataaaaaaccacttccttccccgagaatctcttcaatggctcacgtatatccttagtggcttccgcagaggtctatccgaatatttcagcatatttagcaacatggatctcgcagataccgtcatgttcctgtagggtgccatcagattttatgatttggtcaacgagcagatacagcatacgtttttgatcccgggagaggctatatgccgcctcagtgaggtcgtttggctggacgattcgcgggctattattacgtttcttgtgattgataaccgctgtttccgccatgacagatccatgtgaagtgtggcaagtttttagattgtcgctctaaataaaaaagagtcaataagcagggataactttgtgaaaaaacagcttcttgtgagggcaatttgtcacagggttaagggcaatttgtcacagacaggactgtcatttgagggtgatttgtcacactgaaagggcaatttgtcacagctccttctctagaaccagcatggataaaggcctacaaggcgctctaaaaaagaagatctaaaaactataaaaaaaataattataaaaatatccccgtggataagtggataaccccaagggaagttttttcaggcatcgtgtgtaagcagaatatataagtgctgttcctgggtgctccctcgctcactcgagggcttcgccctgtcgctggactgcggcgagcactactggctgtaaaaggacagaccacatcatggttctgtgttcattaggttgttctgtccattgctgacataatccgctccacttcaacgtaacaccgcacgaagatttctattgttcctgaaggcatattcaaatcgttttcgttaccgcttgcaggcatcatgacagaccgcaacttcatatagtcggtacacggcctcgtagtatctagtaatgcggatctctacgataatggcaaattttccccgactgtttcggtcgcttctcaaggggataacagcccagcttctctgtttaacagacaaaaacagcatatccactcagttccacatttccatataaagggccaaggcatttattctcaaggataattgtttcagcatcgcagccgcatcagacttcggccattgccaacctgccccccgggtgcccgggcaagccccattccaggcccaaaaacctttggggtagccttcccgttgacctgatgcacttatgtcccatcaagctttgcaaaaactttcagcgggtataccgggctacagccatgggccttgcataagaaagggccgaacctagggggggggacccggaacaagaaaagggccacccggttagcagcagcgcgcggcaaccgcctccccaatccaggtcctgaccgttctgtccgtcacttccccaaatccgcgctttctctgtccttcctgtgcgacggttacgccgctccatgagcttatcgcgaataaatacctgtgacggaagatcacttcgcagaataaataaatcctggtgtccctgttgataccgggaagccctgggccaacttttggcgaaaatgagacgttgatcggcacgtaagaggttccaactttcaccataatgaaataagatcacttcagggcatggtaaccgattagattttggagatgaaggagagacactaccaaaggactctctcagatgacaagtatggataacggggtcatgagctaagattgtgtcaacaggaggtaaaacttttttaatggagaagatgataaatttcattctaaacgtgaagttctgggtgcctttgggacagccagcatgagccagaaaatgctgcaggaagcggcggcggaagtcaggcatacgctggtaactttgaggcagctggtaacgctctatgatccagtcgattttcagagagacgatgcctgagccatccggcttacgatactgacacagggattcgtataaacgcatggcatacggattggtgatttcttttgtttcactaagccgaaactgcgtaaaccggttctgtaacccgataaagaagggaatgagatatgggttgatatgtacactgtaaagccctctggatggactgtgcgcacgtttgataaaccaaggaaaagattcatagcctttttcatcgccggcatcctcttcagggcgataaaaaaccacttccttccccgcgaaactcttcaatgcctgccgtatatccttactggcttccgcagaggtcaatccgaatatttcagcatatttagcaacatggatctcgcagataccgtcatgttcctgtagggtgccatcagattttctgatctggtcaacgaacagatacagcatacgtttttgatcccgggagagactatatgccgcctcagtgaggtcgtttgactggacgattcgcgggctatttttacgtttcttgtgattgataaccgctgtttccgccatgacagatccatgtgactgcaggaagcggcggcggaagtcaggcatacgctggtaactttgaggcagctggtaacgctctatgatccagtcgattttcagagagacgatgcctgagccatccggcttacgatactgacacagggattcgtataaacgcatggcatacggattggtgatttcttttgtttcactaagccgaaactgcgtaaaccggttctgtaacccgataaagaagggaatgagatatgggttgatatgtacactgtaaagccctctggatggactgtgcgcacgtttgataaaccaaggaaaagattcatagcctttttcatcgccggcatcctcttcagggcgataaaaaaccacttccttccccgcgaaactcttcaatgcctgccgtatatccttactggcttccgcagaggtcaatccgaatatttcagcatatttagcaacatggatctcgcagataccgtcatgttcctgtagggtgccatcagattttctgatctggtcaacgaacagatacagcatacgtttttgatcccgggagagactatttgccgcctcagtgagggcgtttgactggacgattcgcgggctatttttacgtttcttgtgattgataaccggtggttccgccctgacggatccttgtgaaagtaggacaagctgagttgctgaatccggtttggcagagtcacacttgggcagccaaggagtgtggcaacagaatttggggagcagagccagtaatgtgaggttgtactgggcagtggtgcccccattctgtcctccacgcccttgtattatgcatttgtgatgggaagggtagccccaaatgatctccaaaatgcctttggggctattttccatttcttgcacagtaagtcctggcttctctgtttgaattcggctgtgaatccgtccagtcctggactttttttggttggtaattattgcctcaatttcagagcctattattggtctattcagggattcaacttcttcctggtttagtattgggatggtgtatgtgtccaggaatttatccttttcttctagattttctagtttatttgcatagaggtgtttatagtattctctgatggtagtttgtattccacgttcataagcacttgttgggcgataatcgttacccaatctggataatgcagccatctgctcatcatccagctcgccaaccagaacacgataatcactttcggtaagtgcagcagctttacgacggcgactcccatcggcaatttctatgacaccagatactcttcgaccgaacgccggtgtctgttgaccagtcagtagaaaagaagggatgagatcatccagtgcgtcctcagtaagcagctcctggtcacgttcattacctgaccatacccgagaggtcttctcaacactatcaccccggagcacttcaagagtaaacttcacatcccgaccacatacaggcaaagtaatggcattaccgcgagccattactcctacgcgcgcaattaacgaatccaccatcggggcagctggtgtcgataacgaagtatcttcaaccggttgagtattgagagtatgttttggaataacaggcgcacgcttcattatccggtgccgggcagccacatccagcgcaaaaaccttcgtgtagacttccgttgaactgatggacttatgtcccatcaggctttgcagaactttcagcggtataccggcatacagcatgtgcatcgcataggaatggcggaacgtatgtggtgtgaccggaacagagaacgtcacaccgtcagcagcagcggcggcaaccgcctccccaatccaggtcctgaccgttctgtccgtcacttcccagatccgcgctttctctgtccttcctgtgcgacggttacgccgctccatgagcttatcgcgaataaatacctggagtttttcccacggtggatatttcttcttgcgctgagcgtaagagctatctgacagaacagttcttctttgcttcctcgccagttcgctcggatactgacacagggattcgtataaacgcatggcatacggattggtgatttcttttgtttcactaagccgaaactgcgtaaaccggttctgtaacccgataaagaagggaatgagatatgggttgatatgtacactgtaaagccctctggatggactgtgcgcacgtttgataaaccaaggaaaagattcatagcctttttcatcgccggcatcctcttcagggcgataaaaaaccacttccttccccgcgaaactcttcaatgcctgccgtatatccttactggcttccgcagaggtcaatccgaatatttcagcatatttagcaacatggatctcgcagataccgtcatgttcctgtagggtgccatcagattttctgatctggtcaacgaacagatacagcatacgtttttgatcccgggagagactatatgccgcctcagtgaggtcgtttgactggacgattcgcgggctatttttacgtttcttgtgattgataaccgctgtttccgccat

SEQ ID NO: 29837 - DNA, 542 bp, Homo sapiens
  SIMILAR (264)..(542): 981254mologous to Escherichia coli K12 orf, hypothetical protein,accession number AE000508,Smith-Waterman Score=491.
agtcatttcattctcctggcttgtcgccaataaaattcaccttgcgagtttgttagtattctaacatctactccgcaacacacttcgatacacatcacaattaaggaaatctacttacaagtttgcatcactgtaatgcgatctggttcaaataattcactttcaaatgaatgcgtcagtggtggcaaacgcatcaggatcaaagtgaacatcacgaaacttcttacaatggcgcatcaccttcggcataaaaggaaaagaagatgcccacttctcatgaaaatgcactgcaacaacgttgccagcaaattgtcaccagcccagtgcttatcccggagcagaagcgccattttctggcactggaagcagaaaacaatctgccttacccacagcttcctgccgaagcccgccgcgcgctggatgaaggtgtaatctgcgatatgtttgaaggtcatgcgccgtacaaaccgcgctatgtcttacccgattacgcccgttttctggcgaacggttccgaatggctggagctggaaggcgcgaaa

SEQ ID NO: 29838 - DNA, 1889 bp, Homo sapiens
  SIMILAR (1889)..(1248): 991254mologous to Escherichia coli Arginine/ornithine antiporter,accession number D90803,Smith-Waterman Score=1069.
cacggtcgtgataaaagcctggcagcagatgcagctctttcagagggctacgtaatctctgataaaaatcaatctgcggttggcgatgcaccacatagtcatcgcctgatatcagaagttgcgtggggagcgtaatcgccgccgcatctctaataatacgttcagacgttttgtagagatcgagcaagatattaacggcaatcgcccgtgtgatcagcggatcattattgaaactcgccccccgttgccgatcgtgggtcaaatagcgtcctttcacataggaattaataaaaaacagaccacgcagacgatgccataacgccagcgcaggacgtgccagcggcacatacaatttaaccttaaaggccggagaagccagcaccagcccgcgaattgcaggtgcataatcatgaatccatgtggcaaccagcactgcgccgacgctttgcgcgatcactaccacctcttccagtccaacctggctgtcgctggcagcaaaacggacaaattcatcgacatcccgcactgaacgcgcaagagatgggctataaccacgcgggcccgaactttttccatgccctcgggcatcccaggcataaaaagcagtatctggcatcgccagttcatcaacgagatgttgtaaacgaccaaaaatgtcatgcccgcgatgaaataagacgatgaccttttcgcccgggtctttttccagcacggcattgaccacatcggtacgcatcatatcgcgaccggtaaatccagtttcaggttgccagccatcaataccaataaatgctttgctgaaatgcacctgttggatgcactggcgtgtcaaagggccaaccatactttcgctttttttctgatacacgccaccgagcaaaataacttcacaaggcgcgtctttcagcaaatgcgcgatgtagctgctgaccgtgatgatagtgacatttttcttctgctcgcccagagtccgggcgagtagggcattgctgctgccattttcgataaagatggtttcgcccggttgaaccagcgacgcggcaaactcggcgagttcacgcttcagcgtatagttgctcatcatacgggtttcgacgtcatcactatcaagcgaaacagcaaagccatgtgcccgggcggaggtaactcagtttttcgagtgtgttgagatcctggcgaatggtaacttcagaaactccagtggcttttgccagatcggttacgctaacctgaccctggtcaatgaccatcgctttatgcagtggacgggttgcgattttcagcaagaacgcgccgaccaggaaatagggcaccagaatcatttctgaggcgatggtcagcaacgtgttgtaatcggaaccggtcagccagatgagtaccagacaaatttgcacgcagatgttggtcaaccacagtgaggcggatggcgcagcttgtgcgttctggcgcgcaaaaatgcgcgggaatgctttatgagtggcggccaggaacggtacttctgctgccatgatggtccagcttaagtacgcgccgcaaacggaaacgatcaaaccggcagcgatgatgatttcgccccatggtcccatcatttccaccatcagaccggccattgacgggttacgaatttcagccagttcaggacgtgccaccacacccagcgaaagcagcgttaccagcaagtaaacgcccagagcggagagaaccgccagcagtgtcgctttgccaacatcacgtttattacgcgcacgcgcagaaacaaccacggtaccttccacaccaatgaaaacccacagggtgatcagcatggtgtttttcacctgttcccaaacgggtacgccaagtgcaagtcctgtgaagtcgagcttgaaggtatccagtttgaacatcat

SEQ ID NO: 29839 - DNA, 1888 bp, Homo sapiens
  SIMILAR (1008)..(631): 851254mologous to Escherichia coli Exoribonuclease II (EC 3.1.13.1) (Ribonuclease II) (RNase II),accession number D90766,Smith-Waterman Score=542.
ctaacacgtcgccattattttgctgcatcgcccatccaatccagcgggccataaaggcttcgcgctgacgattgagcgcatcgccgaaggcgtcgccccgcagttgggcaaaatagtgcgccagcgcagagggtaatgcagtttgctggctttatcttcgaacaagtgatcccacagggtatcgctgttatccatgcgggtggcacgcagcagtaaggcctggctttcatcttgcgtatcaggcgaatcgtcctcttcttcactctgcgcccagcaaggcaaatcgatgaagtaagtttgtgcctgaatgcgacgtgcggcttgtagcgcctgccactccggcgaaaattcagcaaatggcgtccaggcaccacgcccgggggctgcaccgtcctgatactggcaataactgtaaatagctaccggaagctggtgggctaaaaacagttcgtctacccggtcattaaaatcagccgggccttcaatcaacacgtatcgtggccgctggctttcgattaacgatttcaccagccgggcgcaggccggactatgatgccggatgccgacaattaacggctcgctcatgcatctttcctcacggcaggcggtggcgggcttagcagtgtgcagaaaccgtcccagcgtgagcacttgttcggcatcgacatgcagccctgggtgtttcatcatcgctgcaggcgcgtcggcattcgccggatccaagcccatatgcacgttatagatgccaaaaccgagcttatcgcgcagtacgcgggccgcacaaatgttagcggcaatcatcgcttcttcgacgatacggttggccaatgcgacaagggctcggcgacgattatccagcacttcacctttttcaccgagaataaagcggtaatccgggcgatctttaaacaccagtgcgtggttatgacgccactcgccgcggcgttggcaaatttgcgctagcaaacggacttgttcggcaattgcttcactttcaggctgccagtcgaccggtattttccagccagtcagaaacctggtcatacaccagctttgctttggattcgatggtggcggcaaagaattcgatattatcttcaatggtgccatcagcggagagcgtcatgcggcatgccagtaccgggcggacttcattggcgcgcagtgagcagagatcgtcagaaagctcgcgaggcagcatagggatgttgaagccaggcagatagttggtgaatgcgcgaattttcgcggctttgtccagcttgctgccttcagcaatccacgcggtgcgactctgctcatcttgcggttcacttttggcaaccacacttaatcgggtcactgcggatggcgtttcgcctttcgcttctaatgccagttgacgcaaggcctggcagatataataaaagctggcggcatccggctcttgcgactgtttataagcgtcgagctgttcttgcatgatgtcctctctggcttcatcgagcaggttttccatcagatgcgtggtttcctgcaaaacgctgaagccaaaagttcctgcccctcctttgatcgagtgggcagcccgaaagatggcattcaattgttcggcatctggcacttccggctgcaaaaccagcaaatgctgctccatgtcagccaacagttcgtccgcttcatcaaaaaatgtctgataaaaatcgcttatatccatgctcacgctgtcacctcggttcggctgtggtgcaacctcaggtttttccagggcgcttactggctcattctggctttcggcgttttcatgcaaaatggcctgttcggcttgtttgttcagtaccagcaggctgatgcgacggttgacggcatcatcaggtccgcgatcgcttaagcgcatcgttgccgccat

SEQ ID NO: 29840 - DNA, 1793 bp, Homo sapiens
  SIMILAR (141)..(635): 1001254mologous to Escherichia coli L-asparaginase I (EC 3.5.1.1) (L-asparagine amidohydrolase I),accession number D90820,Smith-Waterman Score=871.
gtcggccacattattttttacgtcgactaatcctcttcccgctgtttcgccccatatttcgttatccgcatagtatcaggggcgctccccctgcctcacgtatatacttttgctctttcgatatcattcatatcaatatcatgcaaaagaaatcaatttacgttgcctacacgggcgggaccatcgggatgcagcgttccgagcagggttatataccggtgtcaggtcatctacaacgccaactggcgctgatgccggaattccatcgcccggagatgccagatttcaccattcatgaatatacgccgctgatggattcttcagatatgacgccggaagactggcagcatattgctgaagatattaaagcgcactatgacgactatgatggttttgtcattctgcacggcaccgacacgatggcgtataccgcctctgcgctgtcgttcatgctcgagaatctcggtaaaccggtcattgtgacagggtcacaaatcccgctggctgagttacgctctgacggacaaattaatctgctgaatgcgttgtacgttgcggcgaattatccgatcaacgaagtaacgctctttttcaataaccgattgtatcgcggcaaccgcactaccaaagcccatcaacgctgccagcgcgtcggcattcgccggatcaaagcccatatgcacgttatagatgccaaaaccgagcttatcgcgcagtacgcgggccgcacaaatgttagcggcaatcatcgcttcttcgacgatacggttggcaatgcgacgaggctcggcgacgatatccagcacttcacctttttcaccgagaataaagcggtaatccgggcgatctttaaacaccagctgccagtcaccggtattttccagccagtcagaaacctggtcatacaccagctttgctttggattcgatggtggcggcaaagaattcgatattatcttcaatggtgccatcagcggagagcgtcatgcggcatgccagtaccgggcggacttcattggcgcgcatgatgacgtcgaaacccgtatgatgagcaactatacgctgaagcgtgaactcgccgagtttgccgcgtcgctggttcaaccgggcgaaaccatctttatcgaaaatggcagcagcaatgccctactcgccttagagcacattgattctcgtggcctaaaggaaaagaagatgcccacttctcatgaaaatgcactgcaacaacgttgccagcaaattgtcaccagcccagtgcttagcccggagcagaagcgccattttctggcactggaagcagaaaacaatctgccttacccacagcttcctgccgaagcccgccgcgcgctggatgaaggtgtaatctgcgatatgtttgaaggtcatgcgccgtacaaaccgcgctatgtcttacccgattacgcccgttttctggcgaacggttccgaatggctggagctggaaggcgcgaaagatcttgatgacgcactctctctgctgaccattctttaccaccacgtaccgtcggtcacatcgatgccggtctacctggggccaattaacgagcgccgtatctttcaattaattcgggctgacagaacagccgatatggtccagttacgtcgattacttactcacgccgaacccgtacttgactggccattaatggccaggatgttgggcctggtggggaaagcgcgaacgccagcaacttctggaagattttgtattgaccacaaacaaaaatgcgtaaggaaacctttgtatgtctaactttatcaatattcatgttct

SEQ ID NO: 29841 - DNA, 2299 bp, Homo sapiens
  SIMILAR (1379)..(2008): 1001254mologous to Escherichia coli baiF homolog(PIR:F37844),accession number D10483,Smith-Waterman Score= 1121.
atgaacaaatttattaaagttgcactggtaggtgcagtactggctacgttaactgcatgtactggtcatattgaaaaccgtgataagaactgctcttacgactacctgctgcacccggcaatttctatttctaaaatcattggcggttgcggtcctactgcacacgcttccaccaaaccgcgcaagattgacggtctgggcatcaagcatgttcagttaagcggtgaaggctgggatgcggatcgctgctgggcattctggcaaggttacaaagccccgaaaggcacgcgtaaagtggtgtggccggatctggacgatgcccagcgccaggaactggataaccgcctgatgatcatcgactgggtgcgtgacaccatcaacgcaccggcagaagaattgggaccatcgcaactggcacagcgtgctgttgatctgatcagcaacgtcgcgggcgatcgtgtgacttatcggatcaccaaaggcgaagatctgcgtgacaaggttatatggggctgcacacagtcggacgcggttcagaacgttctccggtattgctggcgctggattacaacccaactggcgataaagaagcgccagtgtacgcgtgcctgcatcaaacagactgcgtttatggactcgatgaagtcggacatgggcggcgcggcaacggttaccggggcgctggcatttgccattacgcgcggactgaacaagcgcgtgaagctgttcctctgcttccgcccggtactggcatgccgcatgacgctctccgctgatggcaccattgaagataatatcgaattctttgccgccaccatcgaatccaaaagcaaaggtggggtaagaccaggtttctgacgggttggaaaattccggtgactggcagcctaaaagtaaagcaatttccgaacaagtccgtttgatagcgcaaatttgccaaccccgcgcagagtggcgtcatacccacgcactggtgtttaaagatcgcccggattcacgctttattttcggtgaaaaaggtgaagtgctggatatcgtcgccgagcctcgtcgcattgccaaccgtatcgtcgaagaagcgatgattgccgttaacatttgtgcggcccgcgtactgcgcgataagctcggtttgggcatctataacgagcatatgggctttgatccggcgaataccgacgcgctggcagcgttgctgaaaacgcacggtctgcatgtcgatgccgaagaagtgctcacgctggacggtttctgcaaactgcgtcgtgaactggacgcgcaaccaactggtttcctcgacagcagcattcgtcgcttccagtcatttgctgaaattagcactgaacccggtcctcactttggcctcgcctcgtaccctatctggatcgagaacgtcgcctgggccgacaccattcgcgttcaaccgaactacccgcaactctcccgccgcaatttgcacgcgctgtcgttaaatattttcaaagatgaaggccgcgaagcgtttctgaaattaatggaaaccaccgatatcttcatcgaagccagtaaaggtccggcctttgcccgtcgtggcattaccgatgaagtactgtggcagcacaacccgaaactggttatcgctcacctgtccggttttggtcagtacggcaccgaggagtacaccaatcttccggcctataacactatcgcccaggcctttagtggttacctgattcagaacggtgatgttgaccagccaatgcctgccttcccgtataccgccgattacttttctggcctgaccgccaccacggcggcgctggcagcactgcataaagtgcgtgaaaccggtaaaggcgaaagtatcgacatcgccatgtatgaagtgatgctgcgtatgggccagtacttcatgatggattacttcaacggcggcgaaatgtgcccgcgcatgagcaaaggtaaagatccctactacgccggttgcggtctgtataaatgtgccgacggctacatcgtgatggaactgcaaagggagcaagtaatgaacaactttaatctgcacaccccaacccgcattctgtttggtaaaggcgcaatcgctggtttacgcgaacaaattcctcacgatgctcgcgtattgattacctacggggggcggcagcgtgaaaaaaaccggcgttctcgatcaagttctggatgccctgaaggcatggacgtgctggaatttggcggtattgagccaaacccggcttcagtaaatgttgtgaaaatagaagcaatgagggaagaaatgagggacactagttctattgggtaa

SEQ ID NO: 29842 - DNA, 490 bp, Homo sapiens; identical to SEQ ID NO: 28973
  SIMILAR (5)..(352): 981254mologous to Escherichia coli IS5 39.3kDa protein,accession number U70214,Smith-Waterman Score=593.

SEQ ID NO: 29843 - DNA, 730 bp, Homo sapiens
  SIMILAR (730)..(209): 981254mologous to Escherichia coli IS5 39.3kDa protein,accession number U70214,Smith-Waterman Score=898.
aaagctggaaaggcctgtggcttgggccctccgtttcctgccgttctttctctcgcttccccgctggatctccccagctcctcctggctttctccttgctgctgctccaatgcaccaagtgcactttagagcactgtagcaggccgtcgaagactgcctctgacagattggtctggcttccacgaaccgaactgtcgcttgatgatccgaaatggtgctccaccctggcccggatgctggcttccatgtattcgatgttgatggccgttttgttcttgcgtggatgctgtttcaaggttcttaccttgccggggcgctcggcgatcagccagtccacatccacctcggccagctcctcgcgctgtggcgccccttggtagccggcatcggctgagacaaattgctcctctccatgcagcagattacccagctgattgaggtcatgctcgttggccgcggtggtgaccaggctgtgggtcaggccactcttggcatcgacaccaatgtgggccttcatgccaaagtgccactgattgcctttcttggtctgatgcatctccggatcgcgttgctgctctttgttcttggtcgagctgggtgcctcaatgatggtggcatcgaccaaggtgccttgagtcatcatgacgcctgcttcggccagccagcgattgatggtcttgaacaattggcgggccagttgatgctgctccagcaggtggcggaaattcat

SEQ ID NO: 29844 - DNA, 812 bp, Homo sapiens; identical to SEQ ID NO: 28976
  SIMILAR (1)..(651): 961254mologous to Escherichia coli IS5 39.3kDa protein,accession number U70214,Smith-Waterman Score=1086.

SEQ ID NO: 29845 - DNA, 1833 bp, Homo sapiens; identical to SEQ ID NO: 28977
  SIMILAR (198)..(803): 381254mologous to Homo sapiens glioma tumor suppressor candidate region protein 1,accession number AF182077,Smith-Waterman Score=251.

SEQ ID NO: 29846 - DNA, 836 bp, Homo sapiens; identical to SEQ ID NO: 28979
  SIMILAR (1)..(618): 1001254mologous to Escherichia coli IS5 39.3kDa protein,accession number U70214,Smith-Waterman Score=1081.

SEQ ID NO: 29847 - DNA, 1822 bp, Homo sapiens; identical to SEQ ID NO: 28981
  SIMILAR (691)..(47): 901254mologous to Escherichia coli D-lactate dehydrogenase,accession number M10038,Smith-Waterman Score=1014.

SEQ ID NO: 29848 - DNA, 2574 bp, Homo sapiens; identical to SEQ ID NO: 28983
  SIMILAR (991)..(1635): 951254mologous to Escherichia coli Adhesin AIDA-I precursor,accession number D90839,Smith-Waterman Score=1025.

SEQ ID NO: 29849 - DNA, 501 bp, Homo sapiens; identical to SEQ ID NO: 28986
  SIMILAR (77)..(415): 631254mologous to Escherichia coli IS5 39.3kDa protein,accession number U70214,Smith-Waterman Score=325.

SEQ ID NO: 29850 - DNA, 2352 bp, Homo sapiens; identical to SEQ ID NO: 28989
  SIMILAR (853)..(1425): 1001254mologous to Escherichia coli hydrogenase isoenzyme hypD,accession number X54543,Smith-Waterman Score=976.

SEQ ID NO: 29851 - DNA, 1596 bp, Homo sapiens; identical to SEQ ID NO: 28993
  SIMILAR (1)..(618): 981254mologous to Escherichia coli IS5 39.3kDa protein,accession number U70214,Smith-Waterman Score=1062.

SEQ ID NO: 29852 - DNA, 2243 bp, Homo sapiens
  SIMILAR (1935)..(1000): 991254mologous to Escherichia coli IS5 39.3kDa protein,accession number U70214,Smith-Waterman Score=1616.
tcagccttccaagtagctgggactataggtgcacaccaccatgcccaggactctagaggatccccgaataactctccggcgcgtattcgccagttgcagaatatgaatatggcacagctccaggcggaaatcgcgaagcatttcccgtcgcgtctgggttacgttacaccgcttgccgctggtgcgtttccgctgacgcgtcgccatgcgttgcagtacgtgcagccagggcttgcgctggtgggcgatgccgcgcataccatccatccgctggcggggcagggagtgaatcttggttatcgtgatgtcgatgccctgattgatgttctggtcaacgcccgcagccgcttcatcaaccactttctcgccatcttccttggagaatgcgcctttttgcgcatctggcagaatttccagcaccacttctgaagggcggcacaggcgagttcccagcggcgtcaccacaatcgggcgattaatcagaatcgggtgggccagcgcagccagcgtcacaaacagcacaggcaggtcatggaccaaacaaaagacctgcaggcatggaagctcgcacctgcgaatttgcccgtcggcaccaatcaccacgttcgcgcgaatcacttcaccgcctttcagctccagctcctgaagatcatcatggcgatgcagcgcaatcagcgagctgtccagcgcctgccacaacgcctgttgcaggacagtgttttccaccatatagccaagcagcggtagcttaagttcagcggcgtcaaacaccacatgcgccgtttcccactcccacgtttccagtctgcggtaaggatggcaacgcatagcctgtactgcatcccagacccctaaccctttaagcaatgataccgaagccgcgctgatcgccgagatccgcacgtccggttggctatcagcgacaaacggcgctggttctgcgtgctcgatcaccgttaccgcaaatccgtgccctggcccaaatggctgctttgatttgaataacatcgccagttggttatcgtttttcagcaaccccttgtatctggctttcacgaagccgaactgtcgcttgatgatgcgaaatgggtgctccaccctggcccggatgctggctttcatgtattcgatgttgatggccgttttgttcttgcgtggatgctgtttcaaggttcttaccttgccggggcgctcggcgatcagccagtccacatccacctcggccagctcctcgcgctgtggcgccccttggtagccggcatcggctgagacaaattgcttctctccatgcagcagattacccagctgattgaggtcatgctcgttggccgcggtggtgaccaggctgtgggtcaggccactcttggcatcgacaccaatgtgggccttcatgccaaagtgccactgattgcctttcttggtctgatgcatctccggatcgcgttgctgctctttgttcttggtagagctgggtgcctcaatgatggtggcatccaccaaggtgccttgggtcatcatgacgcctgcttcggccagccagcgattgatggtcttgaacaattggcgggccagttgatgctgctccagcaggtggcggaaattcatgatggtggtgcggtccggcaaggcgctatccagggataaccgggcaaacagacgcatggaggcgatttcgtacagggcatcttccatggcaccgtcgctcaggttgtaccaatgctgcatgcagtgaatacgcagcatggtctccagcggatagggccgtcggccattgcccgccttgggataaaacggctcgatgacttccaccatgttttgccatggcagaatctgctccatgcgggacaagaaaatctcttttctggtctgacggcgcttactgctgaattcactgtcggcgaaggtaagttgatgactcatgatgaacccttccttagtgaagtcatttttgtcaagcaggttgattttgtaatcaacgaaagtagacatatttttgttgaagtaataggttgcacctacatcaacatatttgactaagtcctgatcgccccatactccaagatccttacctttagattgcaggtaagcaacggacggacgcagaccgaaatcgaactgatattgtgcaacagcttcgaagttttgggctttattagcaacgaagtgatcagcaaatacagtcatattctgggtttcagaataggtagtggccaggtaaatgttgttagcgtcatatttcagac

SEQ ID NO: 29853 - DNA, 1935 bp, Homo sapiens
  SIMILAR (1503)..(886): 931254mologous to Escherichia coli K12 putative protein transport,accession number AE000378,Smith-Waterman Score=997.
ttaaccatgacgccggtgcaggcctgcgcgcttccggcgatccttgccggaagaagatgttcgcgtgcaggcgaaaaccggcagcggcaaaacggcggcttttggcctcggcttgttacagcaaattgatgcgaaaacgtggcgtgccccgagagacacccgggacagggcctcgcgcttatggcgcgcgctcacggtcgccccgatagtccgcccacccgagagccttcgccggggaccaccacctgtgtcgttattacagctattcgaaattacccgtcgtgcacataggttggcgtggtgttctgccacgctgacaataatctcatcgcccggttgcagacgcggatgaatacccagaatctcttttgtttcccgatggaacaaaattttcagcgtgcccacgttcatgccgacgatttgtgcgcgtgccagatgtttaaactgggcgcggcccacttcatatggcactttcattgcggtcagctgctgttcggttttgcccacagagcagcgcctgcgcggaatgcgctgtcgcttgatgatgcgaaatgggtgctccaccctggcccggatgctggctttcatgtattcgatgttgatggccgttttgttcttgcgtggatgctgtttcaaggttcttaccttgccggggcgctcggcgatcagccagtccacatccacctcggccagctcctcgcgctgtggcgccccttggtagccggcatcggtgagacaaattgctcctctccacgccattgcactctgctgcccggtttgaataacatgcggtaactggtgggttttcccttcgcgaatcaaattccccaccgcgggtgtgttaatcagcaattcaaatagcgccacgcgtccttcctgtttatccacttccagcttttgtgacagcactgcccgtaaactacagtgcaaaccaatttcccgctgctggatcaaacatcgctggctggcatagagatattcaacaggatcttccagcgtcagaatatgcgcatcggcatgttgattgagatagccaaccatcgccgccagcgtggtagatttgccactccccgtcgcccccgtcaccagaatcaggccattctcgctcttgagtaattccggcaataccgttggtgcgccaagctgttcgagctgcgggcagtgcgaaggtaacagccgtaacgccagcgaaatgccatgccgttgcgcgaatgcgctgccacgcaatcgctggttttccgccagcgacacggcaaaatccagctgaccattctccagcaatattgcccgctgatcgtcatccagccactcccgcagtagctcttcgacgtccggcgtatcaaacggcgcagcttccattctgccgcgaatgcgccatcgtgcgggccaggcgctgcacaggtgtagatccgagacgttatgctttacactaagggccacaatttcttccatattcatactaagatcctcggaaaatgaacgatattgcgcataaccttccagttctgccgcagcaaccgccgccgccagcgccagtgaaatcggttcagtacatcccagcgccggtgttacttcctcctgaacggcgaggatgtaacgctgccataacggatttaaagtcgaatcaaacatattaaaaaccatgccgaaaatcgggctacagatagaggtgaagctcaacaccggtgcgttcagtacgatggcgctccaggccagcaaaatggcgaaaatcatgatgccgcgctgaacgagattttcgttaatcttctcggcaggcatcttgcgacgcaggatgttcattacgatcccttgcgttgcttcgcgaaagcctaaatagacgccaaagaatgcagtcatgacagcaaagatattgagaatgacgctgaccactttcacccacgctgcgccgtcaccgctaataaactgtgcggccat

SEQ ID NO: 29854 - DNA, 1359 bp, Homo sapiens; identical to SEQ ID NO: 28934
  SIMILAR (541)..(1119): 951254mologous to Escherichia coli K12 putative enzyme,accession number AE000280,Smith-Waterman Score=977.

SEQ ID NO: 29855 - DNA, 2112 bp, Homo sapiens; identical to SEQ ID NO: 28998
  SIMILAR (735)..(25): 951254mologous to Escherichia coli f470,accession number L10328,Smith-Waterman Score=1143.

SEQ ID NO: 29856 - DNA, 1090 bp, Homo sapiens
  SIMILAR (4)..(831): 991254mologous to Escherichia coli K12 IS5 transposase,accession number AE000234,Smith-Waterman Score=1440.
ttctcccgcatggagcagattctgccatggcagaatatgaccgctgtcatcgagccgttttatcccaaggcgggcaatggccgacggccctatccgctggagaccatgctgcgtattcactgcatgcagcattggtacaacctgagcgacggtgccatggaagatgccctgtacgaaatcgcctccatgcgcctgtttgcccgattatccctggatagcgccctgccggatcgcaccaccatcatgaatttccgccacctgctcgagcagcatcaactggcccgtcaattgttcaagaccatcaatcgctggctggccgaagcaggcgtcatgatgacccaaggcactttggtggatgccaccatcattgaggcacccagctctaccaagaacaaagagcagcaacgcgatccggagatgcatcagaccaagaaaggcaatcagtggcactttggcatgaaggcccacattggtgtcgatgccaagagtggcctgacccacagcctggtcaccaccgcggccaacgagcatgacctcaatcagctgggtaatctgcttcatggagagaagcaatttgtctcagccgatgccggctaccaaggagcgccacagcgcgaggagctggccgaggtggatgtggactggctgatcgccgagcgtcccggcaaggtaaaaaccttgaagcagaatccgcgcaagaacaaaacggccatcaacatcgaatacatgaaagccagcatccgtgccagggtggagcacccgtttcgcatcatcaagcggcagttcggcttcgtgaaagccagatacaaggggctgctgaaaaacgatagtgtgtgtcttactggctctaaggataatgtactgctggtgatccatcactacggtgatagtagtgtcgtcatcgtgcgaactgaccatcttgtcatcggcaaggtatttttctttggtatacgggtccgtcacctcctggtattccagtttgatgttatcggcaatacacagcgcattcatcaggggctggacggttttttcctgcatatccacgaggtagtagtaactgccatcctcgcagccatcgggcgactggcgg

SEQ ID NO: 29857 - DNA, 1384 bp, Homo sapiens; identical to SEQ ID NO: 29001
  SIMILAR (487)..(1170): 971254mologous to Escherichia coli IS5 39.3kDa protein,accession number U70214,Smith-Waterman Score=1147.

SEQ ID NO: 29858 - DNA, 1380 bp, Homo sapiens; identical to SEQ ID NO: 28996
  SIMILAR (757)..(1080): 991254mologous to Escherichia coli IS5 39.3kDa protein,accession number U70214,Smith-Waterman Score=547.

SEQ ID NO: 29859 - DNA, 2802 bp, Homo sapiens; identical to SEQ ID NO: 29002
  SIMILAR (1626)..(868): 991254mologous to Escherichia coli IS5 39.3kDa protein,accession number U70214,Smith-Waterman Score=1306.

SEQ ID NO: 29860 - DNA, 4228 bp, Homo sapiens
  SIMILAR (3631)..(3086): 911254mologous to Escherichia coli similar to,accession number D90861,Smith-Waterman Score=810.
gaaggggctggcgcgcttggccaccgagttttccggcaatgtaccggtagtgaatgccggtgatggctccaaccaacatccgacgcaaaccttgctggacttattcactattcaggaaacccaggggcgtctggacaatctccacgtcgcaatggttggtgacctgaaatatggccgcaccgttcactccctgactcaggcgttagcgaagttcgacggcaaccgtttttacttcatcgcgccggacgcgctggcaatgccgcaatacattctggatatgctcgatgaaaaagggatcgcatggagtctgcacagctctattgaagaagtgatggcggaagtagagagcctgtacatgacacgcgtgcaaaaagagcgtctggacgttttccgcctcatcatcgcgcgttaatttcttttcataatcacgctttacaatatccagcgcgcgcagcacggtactggcagggatctgattttcctccagcagcacaatcaaatcgacagccagtttgacatcgtcaggggcattttccagtgacatattctctccattgctgttttcgattttttccagcgcatggcggcagcgtgccaggcgcgcttcataggcttccacttcacgatgcagcgtttgctgttccacgagatcggtcacccgcgccagacgggctctgcgttcggcaaccatctcacgtagccgccgctcaaaatcctgatgctgaatacgtttacgctgccagcgggcaattttcggtggtgcactgtcccactcgcgcaatgaccaggcggaggcttcacgcgcgatggcttccagttgtgccgccagatgttccgccagccaggccacttgcggcagctgttgctgctcaactgcatgacgaagcgcagccagattatcgcccgcctcgtcgagacaagcctgtagggttcttgcacgaggagctaaaaaataggcagtatccgtgtaccgaacaccgttgctgttttccaggcatcgaagggtcaccgcattacgctctggtctggcggaaggtgaaaaggtggtttccagcggcctgttcctgattgattccgaagccaatatttctggcgcactggagcggatgcgctctgaaagtgagtttgacgtctggataaacagaatcgacgtcagggtaaacggcagcgtaataatggcgtttttcaccagcagccccagcggcggtagcgaaccgacgttatacagatgccacattcccaccatcgacacgcccagcgccgcgaccaccagcagcttggtcagcaccatgccggtcgaaattttgaataacaatttctcgccgcgtgaggagatcgccaccagaatgcaaatcagtaccagaccataaaagggactgtctgacagcaacccttccgtcacgccgaaggtatgcaggtaggaagcactatcgttggtgatggcggtggaatagacgaacatccaaatcaccagcattacgaaatagagcgcacctaacaggatgccccagtttttacctaaataaccgctaatgacgctcgggtaatctttacattctggtgattgtatcatttggtccgcccgaaacaggttggccagcgtgaataacatcgccagttggttatcgtttttcagcaaccccttgtatctggctttcacgaagccgaactgtcgcttgatgatgcgaaatgggtgctccaccctggcccggatgctggctttcatgtattcgatgttgatggccgttttgttcttgcgtggatgctgtttcaaggttcttaccttgccggggcgctcggcgatcagccagtccacatccacctcggccagctcctcgcgctgtggcgccccttggtagccggcataggcgccgacaacagcgttgatgttctcggcataacgcgcagatttatctttaaactgcgtcatgcgactcagttcgccgaagtaggtatagcagttcagtgcccagcctaactgtgcatgttccggcacgtgggactgaacaaaaatggtgcttttctcaggatcgataccacaagccagatacaaggccagcgtatccagcgtcgctttacgcagcttctgtgcatcctggcgcacggtgatcgcgtgttggtcaacgatacagtaaatgcaatggtagtcatcctgcatgtttacccactgacgcagcgcacccatgtagttaccaatggtcaattcacctgagggctgtgcgccactaaaaacgatgggcttagtcatttttcgattcctgattgtcgctatgcggaagcccgtgatggcccgatattcaagctccgggctgcatcgaggccgcttatcgtggatcgtaccgcggtaattcttgaccaatcgaacccggtactgctgcaagaatatccgcgtcttcgtacgctggatgtcggagcagataagcagctgccttacatgccgatcagcgaagagaatccatgcctgggttggcgtgggattcgcattacgctcgatcagccggagatcttcttgatccaggtgcgggcgatgctgcgtgctaactgccggggcaacctgaatattctgttgccgatggtcacaagcctcgatgaagttgatgaagcacgccgcctgattgaacgtgccggacgtgaagtcgaggagatgatcggttacgaaattcccaaaccacgtatcggcatcatgtgcgaaggcgtcagctttcagagaagcaccaccaaccagcgcgccgtcgatatccggctgagcaaacagttctgcagcgttagacgcgtttacagagccgccgtactgaatgatcacttgttcagcgatgttagcgtcaactttagcgatgtggtcacggatgaatttgtgaacagcctgtgcctgagccggagttgcagatttgccagtaccgattgcccatacaggttcgtaagcgataaccgcaccttcgaatgccgcagcaccctgagttttcagtaccgcgtcgatctgacgtgcgcaaacttcttcagttttgcccgcttcattttcagcttcggtttcaccgatgcacagatccggaacagaccctgtcgtattgccgttaaggcggaaaccaacgccgatgatgccaatcaccagacccatgtgaagaactggctgcaatttcagccagtcaccaaaggtaaacggacgttgttcaacatcagcctgcttttcacgaaagaagcggtcggactcatgcacgcgtgacagaagaggattctttttcactcgtgaggcgtacaccatggtaaagatcaggccaatcagagtggcgataacccacaccacgatgcgcaacccggagccagaaagcaccggaacgccggcaatcccctgagcaacgaccacacaaaacgggttcatccacgaactggcaaaaccgatttgcgtggcaatataggtcaccaggacggtggtaatactgtcatagcccagccggaccattagcggtgcgatgataatggcaaaggcgacggcctcttctcccataccaaataccgcgccgccaagtgaaaacagaataaacagcgcaggaataaagagaatttcattcccgcgggtatggtgaataaacggcaggatacccttatcaatggttcctgtacgcatcacagaccccatgacctcttcatgagatcttctgagcaagtggattttctttccagagtccagggattccaggttgaatacaaagacttccccaaaaccaacaagaatgaatttgtatctcttatccattgctcctctcagccgcctctgatcagaacacgccataaggaaaaaggcagtataaaaacagcagtaatacccgttaatttccttgctgatatcttctggtgtgatcccgttctgctgaatgtttttgatctgcaggggaacagccagcagaccaccggcgagagcggtggtcagaataaatttcacagagtcaaaggtgtgagcctccagcgcgatatgtttaccatcaagtccccacatgaagctgatgatcattccggcaatcgtcagaaatacgcctgccagccagcgaatatggaacaaccgggttatgcgttcggtgatatagccagccagtaaggccgggccgaacagacacagcaatatgagccctgccagcgcagaagccgtgctgattaatgctctgaacaaaaggcgaagaatggcaaatcctgcgatcagcaggatcagcgcgccgactatctgtaacatggtcat

SEQ ID NO: 29861 - DNA, 1266 bp, Homo sapiens
  SIMILAR (568)..(945): 921254mologous to Escherichia coli IS5 39.3kDa protein,accession number U70214,Smith-Waterman Score=593.
atgcaaccggtgtatgaagaatataaacagtcggtgcatttccagaacgcctccggcgtgcgagctgaatgccatgactgtcatatcccgccggatattccaggcatggtgaagcgcaaactggaagcgagcaatgatatctaccagacctttattgctcactccattgatacacctgaaaaattcgaagccaaacgcgcggaacttgccgagcgtgaatgggcgcgaatgaaagaatactactcggcaacctgccgctcctgccataactacgatgcgatggatcatgcgaagcagcatcctgaagcagcacgtcagatgaaggtggcagcgaaagataatcaatcctgcatcgactgtcataaaggtattgcccaccagttaccggatatgagtagcggcttccgtaagcagttcgatgagctgcgcgccagtgctaatgacagtggtgacacgctgtactctattgatattaagccaatttatgcggcgaaaggcgataaagaagcctctggttctctgctgcctgcttcggaagtgaaagtccttaaacgtgacggcgactacagtgaattcagcagtaagcgccgtcagaccagaaaagagattttcttgtcccgcatggagcagattctgccatggcaaaacatggtggaagtcatcgagccgttttaccccaaggctggtaatggccggcgaccttatccgctggaaaccatgctacgcattcactgcatgcagcattggtacaacctgagcgatggcgcgatggaagatgctctgtacgaaatcgcctccatgcgtctgtttgcccggttatccctggatagcgccttgccggaccgcaccaccatcatgaatttccgccacctgctggagcagcatcaactggcccgccaattgtcaagaccatcaatcgctggctggccgaagcaggccatggtcaccaccgcggccaacgagcatgacctcaatcagctgggtaatctgctgcatggagaggagcaatttgtctcagccgatgccggctaccaaggggcgccacagcgcgaggagctggccgaggtggatgtggactggctgatcgccgagcgccccggcaaggtaagaaccttgaaacagcatccacgcaagaacaaaacggccatcaacatcgaatacatgaaagccagcatccgggccagggtggagcacccatttcgcatcatcaagcgacagttcggcttcgtgaaagccagatacaaggggttgctgaaaaacagataa

SEQ ID NO: 29862 - DNA, 2145 bp, Homo sapiens; identical to SEQ ID NO: 29003
  SIMILAR (559)..(1356): 871254mologous to Escherichia coli K12 IS5 transposase,accession number AE000234,Smith-Waterman Score=1194.

SEQ ID NO: 29863 - DNA, 2466 bp, Homo sapiens; identical to SEQ ID NO: 29004
  SIMILAR (1174)..(1929): 1001254mologous to Escherichia coli IS5 39.3kDa protein,accession number U70214,Smith-Waterman Score=1305.

SEQ ID NO: 29864 - DNA, 1066 bp, Homo sapiens
  SIMILAR (361)..(951): 981254mologous to Escherichia coli K12 IS5 transposase,accession number AE000234,Smith-Waterman Score=1006.
atgtgtagcttcaggtcgcagacgttttgcagcagcagtcgcttcacgttcgctcgcgtatcggtgattcattctgctaaccaccgggtcctcaacgacaggagcacgatcatgcgcacccgtggccaggacccaacgctgcccgagatgcgccgcgtgcggctgctggagatggcggacgcgatggatatgttctgccaagggttgcggtacggcccgttgccagcgcctgtgcgccaacaagctgctatcataataccctgtcatcgggtggtccgtggtgatggcacactttccggttaccgctggggcgtgtcgcgtaaagcgcaactcgtgcgccgcgaagctgaaaatgaggagaggccaatcaatcgctggctggccgaagcaggcgtcatgatgacccaaggcactttggtggatgccaccatcattgaggcacccagctctaccaagaacaaagagcagcaacgcgatccggagatgcatcagaccaagaaaggcaatcagtggcactttggcatgaaggcccacattggtgtcgatgccaagagtggcctgacccacagcctggtcaccaccgcggccaacgagcatgacctcaatcagctgggtaatctgcttcatggagagaagcaatttgtctcagccgatgccggctaccaaggagcgcctcagcgcgaggagctggccgaggtggatgtggactggctgatcgccgagcgtcccggcaaggtaaaaaccttgaagcagaatccgcgcaagaacaaaacggccatcaacatcgaatacatgaaagccagcatccgtgccagggtggagcacccgtttcgcatcatcaagcggcagttcggcttcgtgaaagccagatacaaggggctgctgaaaaacgataaccaactggcgatgttattcaccctggccaacctgtttcgggtggaccaaatgatacccgtctataccgacctgcttgttaactacacgtaccgcatcgcttttgaagccgccgggggtcaggacttcggtctgctggcagcaattgccacgctgatcttcctgctggtgg

SEQ ID NO: 29865 - DNA, 1280 bp, Homo sapiens
  SIMILAR (831)..(283): 741254mologous to Escherichia coli IS5 39.3kDa protein,accession number U70214,Smith-Waterman Score=660.
ctgtagcacaccattattgagcgtagtctggtttgccgcgccacccatttgaacaatttgataaccgtcatttaatactgagtattctgcggcgccattcatttcaatgtactgataccctccgttaatttcagtattattacttacaccaaattcttttatatgctgttctccgccaggattgattttcgtattattggcggtcccataaaccagctggatatctttttccaggacaacaccatcaactgtctcaccatactcaacagttgatgccaatggtatcatttggtccgcccgaaacaggttggccagcgtgaataacatcgccagttggttatcgtttttcagcaaccccttgtatctggctatcacgaagccgaactgtcgcttgatgatgcgaaatgggtgctccacccctggcccgggatgctggctttcatgtattcgatgttgatgggcggtttgttcttgcgtggatgctgcttcaaggttcttaccttgccggggcgctcggcgatcagccagtccacatccacctcggcaagctcctcggcgctgtggcgccctttggtagccggcatcggctgagacaaattgcttctctccatgaagcagattacccagctgattgaggtcatgctcgttggccgcggtggtgaccaggctgtgggtcaggccactcttggcatcgacaccaatgtgggccttcatgccaaagtgccactgattgcctttcttggtctgatgcatctccggatcgcgttgctgctctttgttcttggtcgagctgggtgcctcaatgatggtggcatcgaccaaggttgccttgagtcatcatgacgcctgtcttcggccagccagcgattgatggtcttgaacaattggcgggccagttgatgctgctccagcaggtggcggaaattcatgatggtggtgcggtccggcaaggcgctatccagggataaccgggcaaacagacgcatggaggcgatttcgtacagagcatcttccatcgcgccatcgctcaggttgtaccaatgctgcatgcagtgaatgcgtagcatggtttccagcggataaggtcgccggccattaccagccttggggtaaaacggctcgatgacttccaccatgttttgccatggcagaatctgctccatgcgggacaagaaaatctcttttctggtctgacggcgcttactgctgaattcacccccggccacggtaagttgatgactcatgatgaaccctgttctatggctccagatgacaaacat

SEQ ID NO: 29866 - DNA, 1846 bp, Homo sapiens; identical to SEQ ID NO: 29005
  SIMILAR (1105)..(548): 891254mologous to Escherichia coli K12 putative isomerase,accession number AE000390,Smith-Waterman Score=863.

SEQ ID NO: 29867 - DNA, 2257 bp, Homo sapiens
  SIMILAR (1152)..(1120): 901254mologous to Escherichia coli IS5 39.3kDa protein,accession number U70214,Smith-Waterman Score=47.
  misc_feature (1)...(2257): n = a,t,c or g
ctaacttcctgagcggtcacagatgggaataggtggtgtagagcgtggtcgaaccgttgatatgcgccttactggtaaagcgattaccgttgatttcagtctgcaccggcaggagtttatgcacctgatattccgattcgccggaggtcagcagatcccaggtggcgcgcactttgccaaaggtgactttcaggccatcacgggtggcgctgattttgcgctgatagtcagggtattcgccagcaatggttttatcggaaagcggtttcccttctttcgcttccagtttttccagcagttcgccgtcccacaccagatccagcggtttattgctggtgattttggtttccagtagtgacgtgcgcggcgtggcgaagcgcagagtcatttcgacttgcacatcttttgctgtcagtttttgcaccagcgcaccgggaatactgtatgcctccagcgtaaagtcgactttcttgccgtcctgccagacggtcaggcggtcgaaattgctggccataaagttgatgtactcttccgtcagcagcgcaacgcccggaaagccgcccatggtgttagggccgtctggcaacagatgaccatgccaggctccgagatcgaaaaacggattaaaacgctggtgatcgtcgtaatcgtaatccttcatgtactgcggcgcgccagtacggttaatcacgtttttataattgtcggcgttagcggcatgggcggaaaaacttatcagcagagcgcaacgggcttccagaatatcgaaactgtaatccggatcatcggccatcagtgtttttagcggctggacgatgttttgctccgaccatgtgtcatgacgccagcgaataaacgtcccgccgccgcgtcgactgagcagcacgccttcactcaccagttttgccacgccggtgacgccaccggtggtattggcggcaaccagcaacagatcagagacgccaatttgttgtgctgcggtggctgaacgaagatgaccacttgccttggtgatcaatgtgttactgagctcagccaatttctgcaggacccgctcgtctgaccccaaagtcaaagctgcctcctcctccttctccatccccaacgatgactgttnatcgccagttggtaatcgtttttcagcaacccctttgtatctggctttcacgaagccgaactgtcgcttgatgatgcgaaatgggtgctccaccctggcccggatgctggctttcatgtattcgatgttgatggccgttttgttcttgcgtggatgctgtttcaaggttcttaccttgccggggcgctcggcgatcagccagtccacatccacctcggccagctcctcgcgctgtggcgccccttggtagccggcatcggctgagacaaattgctcctctccatgcagcagattacccagctgattgaggtcatgctcgttggccgcggtggtgaccaggctgtgggtcaggccactcttggcatcgacaccaatgtgggccttcatgccaaagtgccactgattgcctttcttggtctgatgcatctccggatcgcgttgctgctctttgttcttggtcgagctgggtgcctcaatgatggtggcatcgaccaaggtgccttgagtcatcatgacgcctgcttcggccagccagcgattgatggtcttgaacaattggcgggccagttgatgctgctccagcaggtggcggaaattcatgatggtggtgcggtccggcaaggcgctatccagggataaccgggcaaacagacgcatggaggcgatttcgtacagagcatcttccatcgcgccatcgctcaggttgtaccaatgctgcatgcagtgaatgcgtagcatggtttccagcggataaggtcgttctctgtgagcagccttggggtaaaacggctcgatgacttccaccatgttttgccatggcagaatctgctccatgcgggacaagaaaatctcttttctggtctgacggcgcttactgctgaattcacctttaagatcaacgttcttgagcagatcacgaagcatatcgaaaaactgcagtgcggaggtgtagtcaaacaactcagcaggcgtgggaacaatcagcacatcagcagcacatacgacattaatcgtgccgatacccaggttaggcgcgctgtcaataactatgacatcatagtcatgagcaacagtttcaatggccagtcggagcatcaggtgtggatcggtgggcagtttaccttcatcaaatttgcccat

SEQ ID NO: 29868 - DNA, 3973 bp, Homo sapiens; identical to SEQ ID NO: 29009
  SIMILAR (46)..(723): 881254mologous to Escherichia coli similar to glucose transport proteins,accession number L10328,Smith-Waterman Score= 984.

SEQ ID NO: 29869 - DNA, 3177 bp, Homo sapiens; identical to SEQ ID NO: 29011
  SIMILAR (2371)..(3126): 991254mologous to Escherichia coli 100 pct identical to sp:YI5B_ECOLI,accession number AP002527,Smith-Waterman Score=1318.

SEQ ID NO: 29870 - DNA, 763 bp, Homo sapiens
ctaacagcgcatctgcaccgtcaaacaattgccattgccgataatttcgcgtagtgaacccagcacgaacatggcgcagttgcgcccataccaattgaaaagccgtccagtgccgaaagcgccggacttttttggcggcgaaggcttcagcgcggcccacaacgatacagttagtgcaatcagcggaataaaaatccctaatgattgatacaggccaaaggcgtagcgttgatcagcatctgtacagcgctgaccaccgaggcgatgatcatcagtaaatgggaatgcggatctcggctccatgggttcttgggagtgaaactggcatgcgattgcctgacctgggagttgctggatgccacgatgaagacgaactgccttgggaggcgacaccaggcctaaaatttgacggtgatgccttgtggcaagtttgtggatgttgtggaagatgaaaaaggcgatgttgcgatgatgttgaagatgaggaagatgggctgatgaaggctgtgttgcaatgaaaagatgatgatggggatgatgatgttgagatgatgttgagctgagatctggggacgtgatgattggtgatggaagatggaacactaatgctgatgccccgaaatctgcgagggttgacgtttcgaagccggcattacgccttccgttgttaccgaggccgatgacgtgggagccaaaatttaataagccgggacgaatcagccaaatatgattcatcgccaataggacggtgcacggatggtct

SEQ ID NO: 29871 - DNA, 1989 bp, Homo sapiens
  SIMILAR (1021)..(1629): 1001254mologous to Escherichia coli similar to S. typhimurium fimC,accession number U82664,Smith-Waterman Score=1042.
atgctggccaggaaatggttgaggtaccctaagtctgggcacatggtgctgccagccgaacgctataacaatgcgctggcacagagttgctatctggtaactgcgccagagttaggtaaaggtgagcatcgggtttacatcgccaaacaggatgacaaaccggtagccgccgttctggaagcaaccgcgccagatggctattccggtgcgattcagctgctggtgggagccgattttaacggcacggtacttggcacgcgcgtgacagagcaccacgaaacgccagggcttggcgataaaatcgaactgcgcctttctgactggatcacccattttgcgggtaaaaaaatcagtggtgcagatgatgcgcactgggcggtgaagaaagatggtggtgatttcgaccagttcaccggcgcgacgattactccccgcgcggtggttaatgcggggttgtggaaaaacaactctgcgctggtccagttgctcggcctttgtcctctgttggcggtcacgtccactgccactaacgctctgggtttaggacttgcgactacgctggtactgacgctgaccaacctgaccatttcgacgctgcgtcactggacgccagccgagatccgcattcccatttacgtgatgatcatcgcctcggtggtcagcgctgtacagatgctgatcaacgcctacgcctttggcctgtatcaatcattagggatttttattccgctgattgtcactaactgtatcgttgtgggccgcgctgaagccttcgccgccaaaaaaggtccggcgctttcggcactggacggcttttcaattggtatgggcgcaacctgcgccatgttcgtgctgggttcactacgcgaaattatcggcaatggcacattgtttgacggtgcagatgcgctgttaggtagctgggcaaaagtattacgcgtggagattttccacaccgactcccctttcctgctggcgatgctgccaccaggtgcatttattggcctgggactgatacgcgcccatgctgccggagggatcgcattaggtgccacgcgtattatttatcccgctgatgctaaacagactgcggtatggattagaaatagccataccaatgagcgctttctggtcaattcgtggattgaaaacagcagcggtgtaaaagaaaagtcattcatcattacaccgccactgtttgttagtgaacccaaaagcgaaaatactttgcgtattatttacaccggtccaccgctggcagcagatcgtgagtctctgttctggatgaatgttaagacgatcccttcggtagataaaaatgcattgaacggcaggaatgttttgcaactggcgattttatcgcgcatgaaattatttctccgtccaattcaattacaagaattacccgcagaagcgccggacacactcaagttttcgcgatccggtaactatatcaatgttcataatccatcacctttttatgtcaccctggttaacttacaagtgggcagccaaaagttggggaatgctatggctgcacccagagttaattcacaaattcccttaccctcaggagtgcagggaaagctgaaatttcagaccgttaatgattatggttcagtaactccgaggtatacctggtgtctggccggaatttgttattcatctcttgccattttaccctcctttttaagctatgcggaaagttatttcaacccggcatttttattagagaatggcacatccgttgctgatttatcgcgctttgagagaggtaatcatcaacctgcgggcgtgtatcgggtggatctctggcgtaatgatgagttcattggttcgcaggatatcgtatttgaatcgacaacagaaaatacaggtgataaatcaggagagggtatggcgatagccacaactaaacgtcaagtggaaaatctccatagacagttttcgggatatcttcatcgttgtggatctggtgttggagactga

SEQ ID NO: 29872 - DNA, 837 bp, Homo sapiens
  SIMILAR (409)..(834): 991254mologous to Escherichia coli Exodeoxyribonuclease VIII (EC 3.1.11.-) (Exo VIII),accession number D90773,Smith-Waterman Score=770.
atggaaagcgcagaacatccgcacaatgagaatgctgggagcgatgcgcatcgcgattggagtgatgaaactggcgaagtcgcagatcccgtaatcgtagaagacatggagccaggtatttattacggaatttcgaatgagaattaccacgcgggtcccggtatcagggagtctcagctaaatgacattgctgatactccggcactatatttgtggcgtaaaaatgcccccgtggacaccacaaagacaaaaacgctcgatttaggaactgctttccactgccgggtacttgaaccggaagaattcagtaaccgctttatcgtagcacctgaatttaaccgccgtacaaacgccggaaaagaagaagagaaagcgtttctgatggaatgcgcaacacaggaaaaacgcgccggacacgctgaatcatcaatttactgggaagatcctgaaacaggaattttgtgtcggtgccgtccggacaaaattatccctgaatttcactggatcatggacgtgaaaactacggcggatattcaacgattcaaaaccgcttattacgactaccgctatcacgttcaggatgcattctacagtgacggttatgaagcacagtttggagtgcagccaactttcgtttttctggttgccagcacaactattgaatgcggacgttatccggttgaaattttcatgatgggcgaagaagcaaaactggcaggtcaacaggaatatcaccgcaatctgcgaaccctgtctgactgcctgaataccgatgaatggccagctattaagacattatcactgccccgcatggctaaggaatatgcaaatgactaa

SEQ ID NO: 29873 - DNA, 924 bp, Homo sapiens
  SIMILAR (736)..(924): 961254mologous to Homo sapiens dJ71L16.5 (KIAA0267 LIKE putative Na(+)/H(+) exchanger),accession number AL022165,Smith- Waterman Score=303.
cttggcatcttaatgagtggcactctggtggtctgaccgacctccgtaaagcagaaactgctgccaagcatggtaaagatctggaggcgctcttggaatgaagaaatagttccccagattaaggaggggaaatgggtactgattacagcccatggcaacagcttccccggcattgtcaagcatctggagggtctctctgcagagcagaacctgctgactgctattctcgttgtctatgaattggacaagaacttgaagcacatcaggcgcatgcagaccacatctgtaggcatctgaagttgtagctacagatgagtaccagtggctcccatttttcatttcagccatttttctcctgcacccactgtcttcacacaatctagacaagatagcaagcagtgcattttgagacaacattgtcatttaatccttataagtagatcttcttctttggtccccgcaggcctcaggggagcaatggcatttgcgttggccatccgtgacacggcatcctatgctcgccagatgatgttcacgaccacccttctcatttgcccagagctcctggctctcctgttgtccctgtcacactcacgttcccttcttctgcatggctaccatgggccaagctaatacgctctgtttttctctttgtctttctccctggtgactggggttggtgccaaacctggaagatatcagtctctcatttttgttgttgttgttggttgcacttttcagaaccaagagccactgagagaggaagactctgatttcatcctgaccgaaggcgacctgacattgacctacggggacagcacagtgactgcaaatggctcctcaagttcgcacaccgcctccacgagtctggagggcagccggagaacgaagagcagctcggaggaagtgctggagcgagacctg

SEQ ID NO: 29874 - DNA, 665 bp, Homo sapiens
  SIMILAR (68)..(664): 971254mologous to Homo sapiens thymopoietin beta,accession number U09087,Smith-Waterman Score=975.
gctccactaaatgaagaatcctttgggatccagcttgttgaaaatacggagttgaatcctggtccttatggtggaaccacccaggaagctatatgagaaaaagcttttgaaactgagggaacaaggaacagaatcaagatcttctactcctctgccaacaatttcttcttcagcagaaaatacaaggcagaatggaagtagtgattctgacagatacagtgacaatgaagaagactctaaaatagagctcaagcttgagaagagagaaccactaaagggcagagcaaagactccagtaacactcaagcaaagaagagttgagcacaatcagagctattctcaagctggaataactgagactgaatggacaagtggatcttcaaaaggcggacctctgcaggcattaactagggaatctacaagagggtcaagaagaactccaaggaaaagggtggaaacttcagaacattttcgtatagatggtccagtaatttcagagagtactcccatagctgaaactataatggcttcaagcaacgaatccttagttgtcaatagggtgactggaaatttcaagcatgcatctcctattctgccaatcactgaattctcagacatacccagaagagcaccaaagaaaccattgacaagagctgaagtgggag

SEQ ID NO: 29875 - DNA, 4794 bp, Homo sapiens
  SIMILAR (3055)..(4791): 971254mologous to Homo sapiens thymopoietin alpha,accession number U09086,Smith-Waterman Score=2843.
ttcccagtaaattgatgattcagcgtgtccggcgctttcaacaagccattgccccagcggcaaagccataacgctttgatacatgagttcaattttccggccttcttccgcagtgataaccgtttttcctgtgcttgcgcattccatcagaaacgctttctcttcttcttttccggcgtttgtacggcggttaaattcaggtgctacgataaagcggttactgaattcttccggttcaagtacccggcagtggaaagcagttcctaaatcgagcgtttttgtctttgtggtgtccacgggggcatttttacgccacaaatatagtgccggagtatcagcaatgtcatcgagctgagacttactgataccgggacccgcgtggtaattctcattcgaaattccgtaataaatacctggctctatgtcttctacgattacgggatctgcgacttcgccagtttcatcactgcaatcgcgatgcggatcgctgccagcattctcattgtgcggatgttcagcgccttccatttcctccggatcattttccttagcttcaacctgattctcttcatcgaatgtttcctggtatgttgcgtcgcccatcaccgcaccacagtcagggcagttatccccgccagtctggccgcaggcattgcaggctatttccggttcctgttgcactactggctcaggttgattcatatctgggctggttttttccgtttctggctggttctggtacacacaatcgcgagtctggatcccctttacccatttcggatcgttcgggtcgctaattccgtcaacaaattcaccacgtgatgcagcaagcaatttatcgtcatcgacaggattttttgatggaatgtttttccgggcttcatggagttctgcccgcagttcctgatatttcgcatcaacagaatttacctgtgactgagcatccagcggctgcgtgtcctgatgatgttcagttgcgtccggttccattgtttcagcctctccctgttcaactgccgttgttccagatggttgcggtttttcttcatcatcctgttttccttcttctgttactcgctgcggcatcggggcagaggagcgaccgcaggcaatatccacgatttccggatcagggttggcatgatcggtttcagtcagtactttgttcagatattcagtgacgtgcgcggggatgacctcgatcccaattggtgcttcttttacggacgcaaccacgatggcgcgggaataatccagcccgccaggcatggtgatgaatttgtcgcggaaaacagaaaagggcggtttattttcagcgataatttcctcaatgcgtttagcgtgtgccggatgaaggttatagatgtccagatccattgaacgggccagtacgccagtggcttttaagaatgaagctgccggaattatctcagcacctggatactcttcagagaatcgcgcaggtcggcggtgctgctggtccccgggcagaggaggcgtgggcggctccgggaccacggagcctggtgacgcggcgctcccctgcccgggtcgggttgcccaggcgccgccgcggcggctgctgctgctgctgccgctgctgctgggtaggggacttcgagtaacggccgaggcctcggcctcctcctctggggcggcggtcgagaacagcagcgccatggaggagctcgtcactgagaaggaggcggaagagagccaccggccagacagtgtgagcctgctcaccttcatcctgctgctcacgctggccatcctcaccatatggctcttcaagtactgccgggtgcactttctgcatgagaccgggctggccatgatctggggggctcattcgttggggtgatcctgaggtatggtacccctggcaccaggggccgtgacaaattactcaattgcactcaagaagatcaggccttcagcactttagtagtggatgtcagcggtaaattcttcgaatacaccctgaaaagagaaatcagccctggcaagatcaacagcgtaaagcagaatgacatgctagggaagtcagttggcatttttctaggtatatttagtggctgttttaccatgggagctgtgactggtgttgtgactgctttagtgaccaagtttaccaaactggactgctttcccctgctggagacggcgctcttcttcctcatgtcctggagcacgtttctcttggcagaagcttgcggatttacaggcgttgtagctgtccttttctgtggaatcacacaagctcattacaccttcaacaatctgtcggtggaatcaagaagtcgaagcaagcagctctttgaggtgttacatttcctggcagagaacttcatcttctcctacatgggcctggcactggttaccttccagaagcacgttttcagccccattttcatcatcggagcttttgttgccatcttcctgggcagagccgcgcacatctacccgctctccttcttcctcaacttgggcagaaggcataagattggctggaattttcaacacatgatgatgttttcaggcctcaggggagcaatggcatttgcgttggccatccgtgacacggcatcctatgctcgccagatgacgttccccaccacgcctttcatcgtgttcttcaccatctggatcattggaggaggcacgacacccatgttgtcatggcttaatatcagagttagcatcaaggagccctccaaagaggaccacaacgaacaccaccgacagtacttcagagttggtgttgaccctgatcaagatccaccacccaacaatgacagctttcaagtcttacaaggggacagcccagattctgccagaggaaactggacaaaacaggagagcacatggatattcaggcggtgtccccaggtgtacgataaccaagagccactgagagagggaaactctgattttattctgactgaaggcgacctcacattgacctatggggacagcacagtgactgcaaatggcttctcaggttcccacactgcctccacgagtctggagggcagctggagaatgaagagcagctcagaggaagtgctggagcaggacgtgggaatgggaaaccagaaggtttcgagccagggaacaaccaggaagctatatgagaaaaagcttttgaaactgagggaacaaggaacagaatcaagatcttctactcctctgccaacaatttcttcttcagcagaaaatacaaggcagaatggaagtaatgattctgacagatacagtgacaatgaagaaggaaagaagaaagaacacaagaaagtgaagtccactagggatattgttcctttttctgaacttggaactactccctctggtggtggattttttcagggtatttcttttcctgaaatctccacccgtcctcctttgggcagtaccgaactacaggcagctaagaaagtacatacttctaagggagacctacctagggagcctcttgttgccacaaacttgcctggcaggggacagttgcagaagttagcctctgaaaggaatttgtttatttcatgcaagtctagccatgataggtgtttagagaaaagttcttcgtcatcttctcagcctgaacacagtgccatgttggtctctactgcagcttctccttcactgattaaagaaaccaccactggttactataaagacatagtagaaaatatttgcggtagagagaaaagtggaattcaaccattatgtcctgagaggtcccatatttcagatcaatcgcctctctccagtaaaaggaaagcactagaagagtctgagagctcacaactaatttctccgccacttgcccaggcaatcagagattatgtcaattctctgttggtccagggtggggtaggtagtttgcctggaacttctaactctatgcccccactggatgtagaaaacatacagaagagaattgatcagtctaagtttcaagaaactgaattcctgtctcctccaagaaaagtccctagactgagtgagaagtcagtggaggaaagggattcaggttcctttgtggcatttcagaacatacctggatccgaactgatgtcttcttttgccaaaactgttgtctctcattcactcactaccttaggtctagaagtggctaagcaatcacagcatgataaaatagatgcctcagaactatcttttcccttccatgaatctattttaaaagtaattgaagaagaatggcagcaagttgacaggcagctgccttcactggcatgcaaatatccagtttcttccagggaggcaacacagatattatcagttccaaaagtagatgatgaaatcctagggtttatttctgaagccactccactaggaggtattcaagcagcctccactgagtcttgcaatcagcagttggacttagcactctgtagagcatatgaagctgcagcatcagcattgcagattgcaactcacactgcctttgtagctaaggctatgcaggcagacattagtcaagctgcacagattcttagctcagatcctagtcgtacccaccaagcgcttgggattctgagcaaaacatatgatgcagcctcatatatttgtgaagctgcatttgatgaagtgaagatggctgcccataccatgggaaatgccactgtaggtcgtcgatacctctggctgaaggattgcaaaattaatttagcttctaagaataagctggcttccactccctttaaaggtggaacattatttggaggagaagtatgcaaagtaattaaaaagcgtggaaataaacactag

SEQ ID NO: 29876 - DNA, 1278 bp, Homo sapiens
  SIMILAR (334)..(1275): 1001254mologous to Escherichia coli K12 tRNA pseudouridine 5S synthase,accession number AE000397,Smith-Waterman Score=1608.
atggacgaaaaagatagatcctcgcctgggcatgatgaccaccgtttccggtgtcgaaatgtctcgcgacctggcgtatgccaaagtatatgtgacgttcctcaacgacaaagatgaagacgcgggtaaagcgggcatcaaagcgttgcaagaagcttctggtttcatccgcagcctgctggggaaagcgatgcgcctgcgtatcgtgccggaactgaccttcttctacgacaactctctggttgaagggatgcgcatgtcaaacctggtgaccagcggggtcaaacatgacgaagaacgtcgcgttaacccggacgacagcaaggaggactaatgagtcgtcctcgtcgtcgcggtcgcgacattaacggcgttttgttgctggataaacctcagggtatgtccagcaacgatgcgctgcaaaaagtgaaacgtatatataacgccaaccgtgccgggcataccggtgcgctggacccgctggcgaccggcatgttgccgatttgcctcggggaagcgacgaagttttcccagtatctgctggactccgacaaacgctatcgggtcattgcgcgtcttggacagcgtaccgatacttctgatgccgacggacagatcgttgaagaacgtccggtaacctttagcgcagagcagctggcagcggcactggatactttccgtggcgatatcgaacagatcccttcgatgtattcagcactgaaatatcagggcaaaaaactgtacgaatatgcgcgtcagggcattgaagttccgcgtgaagcgcgtccgattaccgtttatgaattgctgtttattcgccatgaaggcaatgagctggagctggaaattcactgctcaaaaggcacttatatccgcaccatcattgatgacctgggtgaaaaactcggctgtggcgcgcatgttatttacctgcgccgtctggcggtaagtaaatatccggttgaacggatggtgaccctggagcacctgcgtgaacttgttgagcaagctgaacagcaggatattccagccgcggagttacttgatccattactgatgccaatggacagtccagcttcggactatccggtggtgaatcttccgttaacgtcttctgtttacttcaaaaatggtaacccggttcgtacatctggtgcgccactggaaggactggttcgcgtcacggaaggtgagaacggcaaatttatcggtatgggcgaaattgacgatgaaggccgcgttgcgcctcgtcgcctggtggttgaatacccggcgtaa

SEQ ID NO: 29877 - DNA, 669 bp, Homo sapiens
  SIMILAR (487)..(537): 761254mologous to Shigella flexneri TnpA,accession number AF141323,Smith-Waterman Score=64.
atagaaacatatggggaaactctacaataatacccccctgaagtgtattgatttgctaaatttagccacctgaatagggggcactccaactatagggcaggatcgtctaccgggggggcagtccacaaaatgggggatgatgtccatcgtttcggtaacctcttcctgatctcaccaagcagcaactcgatacttagtaattattcgccagcagacaagaaaaaattctacgtcgaaacagaacgagcagagagcccaaaacaagccatcatgatgagctataaggagtggggtccggatgggcaaggcatcaacaatatagaaagccatgaacacgcgatgttgacattgctcaaagagcatcgagatatgaccctaccaaccaggaaataatgcgtgcaactgtgttttataatatcaagtgtgattacaatcgctggcggtgccatagtgccatagtgccatagtgccatagtgccatagtgccatagtgcggttggcggtctcagctctgaactatttgaaaaccaaaaccttgattaaggctgtgcctaccttacgttagttggggcagtatgttatataaccaaattagacgtcagggttacaatatttgtggaatcctgaaaagcttgatacctgcgaccgagaatggctgtgaagtattta

SEQ ID NO: 29878 - DNA, 1533 bp, Homo sapiens
  SIMILAR (445)..(1002): 981254mologous to Escherichia coli Phage shock protein A,accession number D90768,Smith-Waterman Score=884.
ggcattcgtcgcgcataccaaccgcacattcacctgcaatggttggctgccgccaacgcgctccagttcaccgtactcaatcacgcgcaataatttctcctgcaccatcatcggtgccgtagcgagttcatcaagaaatagcgtaccgccgtcggcacgttcaaatctccctggatgacgtttttgcgcaccggtaaacgcccccgcttcgtgaccaaacagttcggaatccagcagattttcatttaacgccgcgcagttaagggaaataaacggcccttgccaacgggaggagagataatgcaggcggctggcaatcagctctttaccggtgccgcgttcgccgatgatgagcaccggtttgtccagcggtgcgagatgcgaaacctgttccagcacttcgagaaagctgttcgcctcaccaaaaatcaagaggacaacattatgggtattttttctcgctttgccgacatcgtgaatgccaacatcaacgctctgttagagaaagcggaagatccacagaaactggttcgtctgatgatccaggagatggaagatacactggttgaagtacgttctacttcggcgcgcgcgttggcagaaaagaaacagctgactcgccgtattgaacaagcgtcggcgcgtgaggttgaatggcaggaaaaagccgaactggcgctgctgaaagagagagaggatctggcacgtgcagcgttaattgaaaaacagaaactgaccgatctgattaagtccctggaacatgaagtgacgctggtggacgatacgctggcacgcatgaagaaagagattggcgagctggaaaacaaattgagcgaaacacgcgctcgccagcaggcattgatgttacgtcatcaggcggcaaactcgtcgcgcgatgtgcgtcgtcagctggacagtggcaaactggatgaagcaatggctcgtttcgaatctttcgaacgtcgtattgaccagatggaagcggaagcagaaagccaagccttgagctttccccggctgtggataagggtcttgtccaacaataataatcggacctaccttatattatatcatctatgcaactatgaactctggccaagcagcttcttgtcccctgtgaacacctggattggtttttgcccgtatggtaaacatccgggatttgacctgttccgaacccggtttaaggaattgacacatcggaccaatgataaactgccggatagtcgtccacttgctaaagcataccgagatgcttggcgaggagggggacaacaaaaggctctgggtttcaggacgtggacaagaagtataagagcacctgtttggatcattcgtgtcacgctcaacatgaagaatgttatagtaaccatattagagtccacgggcaacggtatgttcgcaccgaacactcacaatattcagccaccagaccagcaagcaccaatctccattcacatgtggcatgcctctcttgtgtgcaacgtcggccacgcaacccataggactcagcgaccaacagttggagactag

SEQ ID NO: 29879 - DNA, 1644 bp, Homo sapiens
  SIMILAR (234)..(1): 971254mologous to Escherichia coli ferrochelatase,accession number U82664,Smith-Waterman Score=393.
atgtttggcaaaagaagcgcgtacgctgttcgccagtgcattaatgtaatcgtggttatcggcgtaatcacgtataaacgatatccccggaatgctacgtttgcgcgccagaatgcgtgccagttcatcccataccgcaccgaccgtagaacaggagaattgcggataaagcggcagcaccacaatatgatctacatgctctgccaggagttcatctacggcgctttccacggcgagccaccttccatccagacagaggcatacagcttcgccacacgcggcgagcgcagcggcaaaatcacgccgcgcagcaatggccaccataacaaccgtgagagtctctgcaatgtgatcggcgacatcgtagacgcgcagtacaaagcgaaaactctgactcgcctcgcgcaggagtatgaaatcccgctggcgcagaccgtggcgattggcgatggagccaatgacctgccgatgatcaaagcggcagggctggggattgcctaccatgccaagccaaaagtgaatgaaaaggcggaagtcaccatccgtcacgctgacctgatgggggtattctgcatcctctcaggcagcctgaatcagaagggcagtgcagtgcctgtcatgcctggaacgctggcgcgcgcggcggcacgtaaagaactggatgttgaggtcattgaagctgaactggcaaagctcgctgaacaaccgattgagaaagactggcgtagcgccccgctggcagaaatcatcgaccatatcatcgtgcgctaccacgatcgtcaccgcgagcaactgccggagctgattctgcaagcgactaaagtcgagcgcgttcacgccgacaaaccgagcgtgccaaaagggctgacaaaatacctgaccatgctgcatgaagagctttccagccacatgatgaaagaagagcagatcctcttcccgatgatcaaacaaggcatgggcagccaggcaatggggccaatcagcgtaatggaaagcgagcacgatgaagcgggcgaactgctggaagtgattaaacacaccaccaataacgtcacaccgccgccagaagcctgcaccacctggaaagcgatgtataacggcattaatgaactgattgatgacctgatggatcacatcagtctggaaaacaatgtactgttcccacgcgcgctggcgggacgctgtttgcgatacacaaggtacgagcaaaggataatcgtccagacgaacataaacagaatcgcggaaacggttgtaatcatcgcgatgcatagccaggacagcgatctggcgaagcgcgtcatcgaaggcgacaagaacgtcaacatgatggaagtggcgatcgatgaagcctgcgtgcgcattatcgccaaacattattccaccgtggcacgctataacggcaaacctgctgccgggatcgccatcaaactggctgccggagcaaacgccctggatacctcgcgggcagtcaaagaggaactgaaccgcttatcagcctatttcccggcaagtctgaagacggtttatccttacgacaccacgccgtttatcgaaatttctattcctttttctgcatctccactatttcaggccacatcatcttacctcaaaaattggcaacaccttcttattggtctctag

SEQ ID NO: 29880 - DNA, 1140 bp, Homo sapiens
  SIMILAR (1083)..(394): 841254mologous to Escherichia coli dTDP-glucose 4,6- dehydratase (EC 4.2.1.46),accession number D90842,Smith-Waterman Score=1019.
ttaacgccgctgatattccgccattcccgctttgcagtccacgctgacctggtaatgaatatcggcacttttaccacgcacggttagcggtactgaccatttatcatctttaccctgaatgtcctgcaaactgacccaagccacgggatcggcctgaccgacaattttttgatcatctgcccaacgcgccacgcgattttgttgataatcacgttttacgctcgcggcaattccggcagcatccagatcttcacactccataagagctctgtagaccttgctgttttcatcaccaatctcttctagaagtgccttcttcaaactcctgaaactatcaaatttcccatccacgctctcccccggcatcacctcaaagcttattgagactgggggaactccatagcggcgatcgtgtcccggacgatcagcaacataagtgatttgctcacgataagatttctctttcggtacaatctcatccagcaaatcacaaatagtgagcactacatcgatgtttttcttttcgttgtgcccaccaatgttataagtttcacccgctttaccttcggttacgacggtatataacgcacgcgcatgatcttcaacatacaaccagtcgcggatctgatctcctttgccataaataggtaatgccttaccttccagtgcattaagaataaccagtggaataagcttttccgggaaatgataaggaccatagttgttcgagcaattagtcacaattgtcggtaaaccatatgtacgtttccacgcgcggactaaatgatcgctggatgctttggatgcggaataagggctgcttggcgcgtaagctgtcgtctcagtaaataagggtaattcttctgtattatttacttcatctggatgaggcaaatcaccatagacttcgtcagtagaaatatgatgaaaacggaagctatttttcttgtcggaaaattctgcaatgtattgaatttgcacgattttgtaggccggataaggcgttaacgccgcatccggcataaacaaagcgcactttgtcaacaatctgtatacccggtggcgctgtgcctctgcgtgcagcgccatccggcagcaatacttcattccagttgcaagccggaagatgtctgggcggcg

SEQ ID NO: 29881 - DNA, 1218 bp, Homo sapiens
  SIMILAR (933)..(562): 1001254mologous to Escherichia coli Cytochrome c-type protein TorC,accession number D90736,Smith-Waterman Score=651.
ttagtacaacagtttgcgggcatcgaaggcaccggccaaaatgttgcgggctctcaaggtgtcgaacggggtttcgaccagactttggcgacggtaagccgctgcgtggaacaggaactgttcatcgggtttaatttcataggttttgcgcagcagataataaaccgttaagcctttcaggaaggatgccgcagcttgctcaaaagaaattgccgcaggcagaatcgccgccgcagaaacttcccgcgctttgtcgagagtaaacacggtgatgacgtcggtgccctgttcaacggcgtcagcaacctgatgacaagggatttgtaccagatgcccctgatgcgccacaggcaaaccagcgcggcgcatgactcgcgcctctttgtaatccaccgccacaatgccgctgtagcctaatgccagcaatttttccgccagccacggattacgaccaaactgcttggtcatcagatacagttcaatgccgtaaaccaactggcacaagggggcgcccaaggttgcaagtgggggacgcgcgcggaacgggaaagaagcagcgtgctcggcaagttccgcgcgtttggcttcgaatttttcaggtgtatcaatggagtgagcaataaaggtctggtagatatcattgctcgcttccagtttgcgcttcaccatgcctggaatatccggcgggatatgacagtcatggcattcagctcgcacgccggaggcgttctggaaatgcaccgactgtttatattcttcatacaccggttgcatactgtggcaactgacacaaaattcggttgtgctggtgactttgatcccaacgtgtggcaatacaatcagcgcaatgccaatcacaatcccaattgcgaccagcgccagtaccgaccaacgagcactgggtcggcgtagcgcgttccagagtttccgcataataaccccggacgcagcgatcggattgaccgtattgttgggctggaaatgggcgcagacgattacgtcaccaaaccgctggaactgcgcgaactggtagtacgggtgaaaaatctgctctggcgaatcgacctcgcgcgacaagctcaaccgcacactcaggacaactgctatcgctttgccggttattgccgttcggatactcagcaaggaccgacgccgcgtaaagtgaccgatgttctgcaaacgggtcagcaaatctggttcgtcaggttggcgatgcat

SEQ ID NO: 29882 - DNA, 1231 bp, Homo sapiens
  SIMILAR (1231)..(521): 991254mologous to Escherichia coli f772,accession number L10328,Smith-Waterman Score=1243.
ttaacgtctggctgcataaagaaaccgccagtatcgctcttgatctgaggggggatggtttacatctgcgtggctatcgcgatcgtgctggtattgcgccgatcaaagaaaccctggcagccgctattgtgatgcgatccggctggcagccaggaacaccgctgctcgatccgatgtgtggttccggtacgttgctgattgaagcagcgatgctggcgaccgatcgcgcaccaggcttgcaccgtgggcgttggggctttagcggctgggcgcagcatgatgaagctatctggcaggaagtgaaagcggaagcgcaaacaatataggggttaatccagacgcagattttcagtcctttcgctttcaggcggcggatcatcccttccgggtcagggaaagtcagcgggtcccactcaaaatcgcaccactggaaggctttcatccagaaacagtcaaagtggaaaacatgcagcggcagattgcgttccgccataccatcgataaagctgtttaccgtcgcagtaaagcgggtataacgatcaagtaccgctttcggcgtcgggccgtcgataacaaagtattcgagatattcactctcaacgctgaactgcactttggagactttctccgatcccacttcaaaagagacacactggggatgattgaccagtaccccataaccacggttagtcatgtagaacgggatatttttatacgcctgttcagtacttgtgccgccgtcccggttccaggtctctaccgtctggccattgcgcaccagggcagtaaagcgctctcccagaccgtaaactgtttcgccaacgccaagatcaagccgctcaaacatataattgcgttgattattcgtgtcctgcacgtagccattatttttcacctgactaccggtaatacgttcgcagttgcgcagaaaatccagtgaccagaactcacctttgctgacacgcgcgcttaagttgccacttttaaactcagcataacgttctgtgttttcgattgtgaccttcacgtcctgcaaaatattgagcggataatgaggaccgttattcagcgccccctgaaaatgctcaatccgcacaccgacaataccttcctgtggggagaaaaagcgcaacgtaaataaaggcgtatcaagctgccaggtacgttcacgcacatcacggggggcagcatagaccaccatttcattatcctgctgttcaacctcgaacac

SEQ ID NO: 29883 - DNA, 2917 bp, Homo sapiens
  SIMILAR (2086)..(656): 921254mologous to Escherichia coli enterobactin,accession number M60177,Smith-Waterman Score=2307.
tcaacactgtgccgtacggcctttcggcagcggattggtcagttgcgcgacatctttcacctcaaaggtgatcagttcaccaatccccgcaagacgggcgttagtgcgtgcacgttgaatcacccgtgcgtcgctgtccgaaccgtaaaaatgagagctatactcagccaggcctttacgggcgcgagtttgcgcttccgctttcacttcctgccagatagcttcatcatgctgcgcccagccgctaaagccccaacgcccacggtgcaagcctggtgcgcgatcggtcgccagcatcgctgcttcaatcagcaacgtaccggaaccacacatcggatcgagcagcggtgttcctggcagcacgatcgcgataccacgcagatgtaaaccatcaccactcagatcaagagcgatactggcggtttctttatgcagccagacgttaacgcggatatccggcgcatcgcgatcaacatttggacgcggcagatttttccgcgtgaaagcatcgacgatcgcgtctttcactttcatcgcgccgtactgactgttgcggatggtgtcattcaaaccactgaaagtggacagcgaaggtcgcgccaggattaaacatctctgtccagttgattcgctgaacaccgagatagaggtctaaatcgctgtaaacgttacactcgctttcaatggtggtaaacaactccgttgaagtacttccctgctgtgctgccaggaaggcctcgcgttcgcggttaatctccgccagcacttccgggtccagaccattagcttctttttcctgccagttttgcgtttctggcggccaggtatccagcaagccaagaaatgccaccctgcgccacgtaccgccaagggaataccccagcaggtaataagggccatgcggttgttgttcaagtaacgttgccagatgcgcttcgcagacttcatccaggtttgccgccgtctgcatggggccattggggcgcggtgactgaatgccgataatcgaccattgtggatcgagataacgcgagagcacgctgaactgccaggcaaaaccggacgcaggatggaaacaaaacagcgtcgggccattaccttcacgcaacggcagaatggtttcgaatcccatacgccgggtgctgtcttcttcagcatcaataatcgttgccagtttggcgacagttgacgcgaccatcacttgccccggcgtcacctggcgggcaacctgccgacttaactgcgctgccagtttcattgccagtagcgaatgaccgccaagcgcgaagaaatcagcatcggcatcctgcacgtcacaccccagcaacgacgagaatgccgcggcgataatcgtttcactgcccgctttcggcgcacgccctggcgcttgtgccttcagttcaggcaacggtaaggctttgcgatccagcttgccgttggcgctaagtggtaactgtggaagttgcagcagaaccaccggtaccatatgtggtggcaatgtttcacgaagctgcgcctgcaatgcgctggtatccaacggcaggcccgattgcgacaccagatagcccaccaattgacgcgcatcaccaccggtggcagccgcctggttaatcacacaggcgtgggtaacggcttgttcgacatccggcagcgcctgcatcacgcgatcgatttcgcccagttcgatacgctgcccgcgaatttttagctgatcatcactgcgcccgaggtactccaccgcgccgttatccagccagcgggcaacgtctggggcaaaaggatcggcaataaagcggctggcggtcagatcggggcgtccgagatagccctgcgccagttgaatgccagtgagatagagatcacccgccacacccggcggcaccggatgcatcatcgcatcaagaatacgcagacccgtattccataccggataaccaatcggcacactgctgccgcgcacctgtgccagttcctcgccaaaagccggataccagctgacatctaccgccgcttccgtcgggccatatagattatgcaacggcgcgccagttaagaggcaacaatgctgcacatcgacgcacaagtcgtggtcgtacgcatattcgcataatgctgcatacgacggtccggtccttccgtcagcatacagtttgcctcgataacgcagaaaatcacacggaatcaactgaggttttgggccattttttatagcaaagattgaataaggcgcatttttcttcaaagctttattgtacgatctgactaagttatcttttaataattggtattcctgtttattgattatgaagagcagcatattacagccgtatgggtctacttgacagtaaaatttgaagagcattggaagcctgttgaagtcacaatgaccgccgtcgctaccacgaagttgctgccggagcatcggtttaaacgcaggcaccatttctgcaatcagcacaggtgtcgctaccgcggcccctgcggaactggaagcggcaattccggcagtgccatcgccaccgccaatcaatttatcggcgataatcaacggaataccggtcacgataattactgccacacccaacaggatccccagcaaaccagtctgggcaatcacagtcaaatcaatggtattgcccagcgcgaaggcaaagaatggaatcagcgtttgcaccgctttgctgaaaaattctcgcaattcagggtcaaggttccccagggcaaagcccaccaggaacggtaatactgcgccgacgaaaacatgcggttcaaacgaggcaatcccggcagtgcccagaataatcatcgtcatgagcggcccggactccaacgacatcaacacaaatgccccagcttcttcttttgtgccgtactgctgcatgatggaagcgtaaagtccgccattggtcatatccat

SEQ ID NO: 29884 - DNA, 2202 bp, Homo sapiens
  SIMILAR (583)..(948): 951254mologous to Escherichia coli TorCAD response regulator,accession number D90736,Smith-Waterman Score=591.
atgaaagtgaaagacgcgatcgtcgatgctttcacgcggaaaaatctggcgcgtccaaatgttgatcgcgatgcgccggatatccgcgttaacgtctggctgcataaagaaaccgccagtatcgctcttgatctgagtggtgatggtttacatctgcgtggctatcgcgatcgtgctggtattgcgccgatcaaagaaaccctggcagccgctattgtgatgcgatccggctggcagccaggaacaccgctgctcgatccgatgtgtggttccgccattgagctgaaaggtcacaaaatgcagcagttagacagtattatctccgcgaaaggccagacggcgtactcttccgttattctgggtaacgtgggtaatcaactgctgaccatgcaaattacgctgcccgctgacgatcagcaaaaagcgcagaccaccgcagaaaacatcattaatacgctggttattcacgtcgtgcggtccgctcgccgtgtacggccagtgggcggtcccactattcaccccactagcacgttcccacgccggcccggcctcacctcgctgttgcctcagttcccggttgtgctatcccggttctaccgtcaagaggggtataccgtttccgttacggcgagcggtgctgggctacgggaaattatgcagaatcagtcggtagatttaattctgctggatatcaacttacccgatgaaaatggcctgatgttaacccgcgccctgcgagaacgctcaacggtggggattattctggttaccggacgcagcgatcggattgaccgtattgttgggctggaaatgggcgcagacgattacgtcaccaaaccgctggaactgcgcgaactggtagtacgggtgaaaaatctgctctggcgaatcgacctcgcgcgacaagctcaaccgcacactcaggacaactgctatcgctttgccggccgtgaacgtctgctacgtatgctttctgcgcgtcgggtggaaaaccctgacctgcgccccgtcgatgtgttaattcgtcgtttacgtcataaactcagcgcggatttactggtgacgcaacatggggcggatcctactaccacgctcgaccctcgcagcgcatgcaacgcctggcacctcggcccggctcgccctctccaccacacccgctccgccggacctcgggcgacaaaccacctgagcgtcacccaactcaatcgcctcgcagccacactcccccgaatttctgagtctcggtacccgagatttatgacaaacgcaaaactgcctgatgcgctacgcttatcaggcctacgtggatcgatcaatttattgaatttacacaattttgtaggccggataaggcgttcacgccgcatccggcataaactaagcgcactttgtcaacagtctagcccgatgataaatccatcgggctatttttattgtgccccgcgttgttgcaggaacagaatggtggccgccacgcgtccacttgtactccttataacatatggcccttataacatcccatcctccaaaaatcggcgctatacgatggcagtagtcgtgcagttattatttggttatatgatgtggaagaagtgggggagtttggggcagcttggctcactcaccgttctggcaagccactttagcttcacgttagtcatcccgcgtcctatcatcaccgacaaggttattacgcccgtcttttgcaactcctcttataagccgcccagcgttaaattccatggaggaacgtatggtcgtaacgaagtgaccaggggtagcgtggttgcggctgcctggcggaaactggaaatctctagatgttgtaccaccgagcttcccctctcacccactatacgtaaggccgtgggcacctgggtaagcaccgcgtatgcggcataccgttacatgcagcaaggcgtaggcgggtttacagctaatcctatgacgggcggtacccacgggtatgggcaggtccgggggcgcacatactgtggggattcctcggtccgctatctctccctcattctatacatccctcctttattcaatgcccgggtaagacaacaacacagtggcactacgggtagctgccaaataagcataagtaatattcgagccaaatcggcgctatacgaccacacttgggtactccgcccactggtgaatcggcgctacgtgccccggcgctacgccggctaa

SEQ ID NO: 29885 - DNA, 2232 bp, Homo sapiens
  SIMILAR (109)..(1083): 951254mologous to Escherichia coli Sensor protein BaeS (EC 2.7.3.-),accession number D90846,Smith-Waterman Score=1569.
atgaaccattatccgtcagccactccactggagacgacggaagatcgttgccgaagcggcgttctcggtcgccttatacagatcactgtagtgatgcgctggcgagcaatcctgcgttcatttgaacacgataattcggaagataaacccggcccggttctgggtggtataaacaacaaagtgctggttggtccgcgagcgccgattccacctgacggtacacggcgacccattctggtcaacggtgcggaagttggcgcggtgatcgcctcccccgttgagcggttaacgcgcaatactgatatcaatttcgataaacaacagcggcaaaccagctggttgattgtcgccctggcaacgttactcgcggcacttgccacttttctgctggcgcgcggtttactggcaccggtaaaacgacttgtcgatggcacgcacaaactggcggcgggcgatttcactacccgcgtaacgcccaccagtgaagatgaactgggcaaactggcgcaagacttcaaccagcttgccagcacactggagaaaaaccagcaaatgcggcgcgattttatggccgatatttctcacgaactgcgtacgccattagcggtgctgcgcggtgaactggaagccattcaggatggcgtgcgtaaattcacgccggagacggtggcgtctttacaggcggaggtcggtacactgaccaaactggttgacgatctccatcagttgtcgatgtctgatgaaggcgctctcgcctatcaaaaagcaccggtagatttgatcccactgctggaagtggcgggcggcgcatttcgcgaacgattcgccagtcgtggcctgaaactgcaattttccctgccagacagtattaccgtatttggcgatcgcgaccgtttaatgcagttattcaataacttactggaaaacagcctgcgctacactgacagcggcggcagcctgcaaatctctgccgggcagcgcgacaaaacggtgcgcctgacctttgccgacagtgcgccaggtgtcagtgacgatcagctacaaaaattgtttgaacgtttttatcgcaccgaaggttcccgcattgcttgctgcgtaagcccgatgatcgttggtaaacaaatgcagttcttcggtgcgcgtgcaaacctggcgaaaaccatgctgtacgcaatcaacggcggcgttgacgaaaaactgaaaatgcaggttggtccgaagtctgaaccgatcaaaggcgatgtcctgaactatgatgaagtgatggagcgcatggatcacttcatggactggctggctaaacagtacatctcggaccttacgtggattgcatcatgcaagccatacttcatcggcaaacgccatcacaccgtcgttggtcgaaaaatcagcctgaatacactgcgcacctgcattaatcagtccatcaatggctggataagtcgactacagcaggaacaactgggggataagacacgggtaacgctgttgggcgattatgcccatactcatggttatgatgttgttgcctatggtaataccggaacgcaagcgcagacagataacgatggttttttaagtaaaacgctttatggcgcgctggagcataactttactgatgcctggagcggctttgtgcgcggctatggctatgataaccgtaccaattatgacgcgtattattctcccggttcaccgttgctcgatacccgtaaactctatagccaaagttgggacgccgggctgcgctataacggcgaactgattaacgctaaatatacaggagtagtgatgaataattctgaaggtttgaagtcgtttcagcaatcgcttgctgatctgccgcaatgggtatcagagcggcttctgcagcaaattaaccagttaactaactacgagccagtgatcggcattatgggtaaaaccggtgttgggaagagcagtctgtgcaatgccctgtttgccggagatatatcaccggtcagcgatgtggcggcctgtacacgtgagccactgcgctttcgcctgcaagtcggcgaccgctatataacgctgatggatctgcccggcgtgggcgaaagtggcgctcgcgataccgagtatgctgcgctgtaccgcgaacagcttcctcgcctcgacctggtactgtggctgattaaggccgatgaccgggcgctgacggtggatgaacatttttatcatcaggtgacttggagaggtataccggcataa

SEQ ID NO: 29886 - DNA, 888 bp, Homo sapiens
  SIMILAR (625)..(503): 381254mologous to Escherichia coli multidrug resistance-like ATP-binding protein Mdl,accession number U82664,Smith-Waterman Score=47.
tcattctttttctctaatcttgtctttacactttatttcattaatttgatcttcaatctctgatatccttttttccgcttgattgatttggctattgatacttgtatatgcttcacaaagttctcgtgctgtgtttttcagctccatcaggtcatttatgttcttctctaaagtggttattctagttagcaattcatctaacattttttcaaggttcttagcttccttgccttgggttagaacatgctcctttagctcagaggagtttgttattacccaccttctgaagcctacttctgtcaatttgtcaaactcattctctgtacagttttgttcccttgctggtgaggagttgtgatccttcagatggagtttctgagtggatatcctttttgttgatgttgatactattccttcctgtttgttagttttccttctaacagtcagggccctctggtggagctctgctggagtttgctggcagttccctcccgaaccctgtttgcctccggttctcccccggggggtccaaaccggcaaaatgggggcaatctcccccgggaaaattcccccgccagccacattggatgcccaggcaatccgggtaaccgtaatcggcaatatggctaaccgcgcgacatgctcaatctcttgctgggtggcattcgggcaacccagcgcgatgttattcgccacagtgtcagaaaaaaggaatggcgtctggctaactaccgccaggcggctacgccagctatcgagttgtaacttcgtcagaggaatatcatgaaagcgaatatccccctcgctgacgtcggcttgatagttggggcgattccgattgcgcaactgaatttcaacctgcctattgctggaagttaacactgccat

SEQ ID NO: 29887 - DNA, 1209 bp, Homo sapiens
  SIMILAR (502)..(900): 961254mologous to Escherichia coli putative,accession number L08627,Smith-Waterman Score=672.
atgaacgccaacaacagcagtgcggcgaacgtggtgaaatcgctgcgtaatccgtatctacaggtgagcgactggggctggggaattgatccactcggtctgcgtatcaccatgaatatgatgtacgatcgttatcagaagccgctgtttctggtggaaaacggcctgggcgcaaaaaatgaatttgctgccaatggcgagattaacgacgactatcgcattagctacttacgcgaacatatccgcgcaatgggcgaagcgattgcagacggcatttcgctgatgggctacaccacatggggctgtattgatttaatttcccgctttacgggtgaaatgagcaaacgctacggctttgtctttgttgaccgtgaccacgcaagcgacgggacgcttacgcgcacgccaacgaaagactgcgactccccggactatcaggccgggagagtccacttccagctcacctcggagctccgggagcctttcagcacctgcttgctcggtcccctggatgtaaatattcaccagttcacgtatccgcagactgaccatcctgcgctggaaaacgtcaatttcgccctgaaacccggtcagatgctgggtatctgcgggccgactggttccggcaaaagtaccctgttgtcgctcattcagcgtcatttcgacgtcagcgagggggatattcgctttcatgatattcctctgacgaagttacaactcgatagctggcgtagccgcctggcggtagttagccagacgccattccttttttctgacactgtggcgaataacatcgcgctgggttgcccgaatgccacccagcaagagattgagcatgtcgcgcggttagccagcgtacatgacgatattttgcgtctaccgcaaggttacgatacagagtcaacgcggaaatcctcatccttgatgatgcgcttttcggcggtggacggacgcactgagcaccagatcctgcataacctgcgtcagtgggggcaggaaagaacggtaatcatcagtgcccatcgcctttctgcactgacggaagccagtgaaattattgtgatgcagcacggacatatcgcccagcgtggcaatcatgatgtgctggcacaacaaagcggctggtatcgcgatatgtatcgctatcaacaactggaggcggcgctcgacgacgctccggaaaatcgcgaggaggccgtcgatgcgtag

SEQ ID NO: 29888 - DNA, 1158 bp, Homo sapiens
  SIMILAR (496)..(1071): 941254mologous to Escherichia coli glycerol-3-phosphatase transporter (AA 1 - 452, glpT),accession number Y00536,Smith- Waterman Score=973.
atggccaacaatgaaatgacaccagcttcgaaaactgcattaagtgcaccgtctgcaccaccgcctgcccggccaaaacaagccgggccggatggcgagcgtctgcgtttgaaagatggcgcactgtatgacgaggcgctgaaatattgcatcaactgcaaacgttgtgaagtcgcctgcccgtccgatgtgaagattggcgatattatccagcgcgcgcgggcgaaatatgacaccacgcgcccgtcgctgcgtaattttgtgttgagtcataccgacctgatgggtagcgtttccacgccgttcgcaccaatcgtcaacaccgctacctcgctgaaaccggtgcggcagctgcttgatgcggcgttaaaaatcgatcatcgccgcacgctaccgaaatactccttcggcacgttccgtcgctggtatcgcagcgtggcggctcagcaagcacaatataaagaccaggtcgctttctttcacggctgcttcgttaaaaacaaccatccgcagttagcggaacaggagctgccggcgaagcaaatcttcatgcagtacgtactgccgaacaaactgctgtggtatatcgccatcgccaacgtgttcgtttatctgttgcgttacggcatcctcgactggtcaccgacttatctgaaagaggttaagcatttcgcgctagataaatcctcatgggcctacttcctttatgaatatgcaggtattccgggcactctgctgtgcggctggatgtcggataaagtcttccgtggcaaccgtggggcaaccggcgttttctttatgacactggtgaccatcgcgactatcgtttactggatgaacccggcaggtaacccaaccgtcgatatgatttgtatgattgttatcggcttcctgatatacggtcctgtgatgctgatcggtctgcatgcgctggaactggcaccgaaaaaagcggcaggtacggcagcgggctttaccggactgtttggttacctgggcggttcggtggcggcgagcgcgattgttgggtacaccgtggacttcttcggctgggatgtcggctttatgctatcacatgaattatgggagtctgagttcactaaactaaaatacgaatataataattcttgtcctgccagcgtctcaggatggttgtga

SEQ ID NO: 29889 - DNA, 1271 bp, Homo sapiens
  SIMILAR (631)..(759): 671254mologous to Escherichia coli GltL,accession number U10981,Smith-Waterman Score=124.
agctacttgaaaagaaggacagcataatgattaccctgaaaaatgtttcaaaatggtatggtcactttcaggtgctgaccgactgctcaaccgaagtgaaaaaaggcgaagtggtggtggtttgcggcccgtctggttccggcaaatcaacgctgattaaaaccgtcaacggcctcgaaccggtgcagcaaggtgaaatcaccgtcgatggtatcgtggttaacgacaagaaaaccgatctggcaaagctgcgttcccgcgtcgggatggtattccagcatttcgagctgttccctcatctgtcgattatcgaaaacctgaccctggcgcaggtgaaagtgcttaaacgcgataaagcgccggctcgtgaaaaagccctgaaactgctggaacggggtcgggcttttttgctcacgccaataagttttccggcgcagctttccggcggtcagcagcagcgtgtggcaatcgctcgcgcgttgtgtatggatcctattgcgatgctgtttgacgaaccgacatcggcgctggatccggagatgatcaacgaagtactggacgtgatggtggaactggcgaacgaaggaatgaccatgatggtggtgacccacgaaatgggctttgcccgtaaagtggcgaaatcgggtgatctttattggacgagggtaaaattgtcgaaagacttcgccgaaaagacgcttttctttcgatgatccgaaatcggaccgcgcaaaagacttcctcgcgaaaatcctgcattaatcactctggcgcgcatacccaattgcgcgccatctcacgctttatcgtttcgcccctcgtatctgttacatcctggcgttacccttgtcgcaaagaagcacacaacaaggagcaacaatggcactgccaattctgttagattgcgacccaggtcatgacgacgctatcgcaatagttctcgccctcgcctcaccagagcttgatgtcaaagcaattacgtcttccgccggaaaccagacaccagaaaaaaccttacgcaatgttctgcgtatgctgaccttgcttaatcgcaccgatattccggtagcaggcgggcgcggtaaaaccgttaatgcgtgagttgattatcgcggacaatgtgcacggcgaaagcggtctcgacggcccggcattaccggaaccgacattcgcaccgcaaaactgtaccgcggtagagctgatggcgaaaacgctgcgtgaaagtgcggaacctgtcaccattgtgtctaccggaccgcaaacctacgttg

SEQ ID NO: 29890 - DNA, 2113 bp, Homo sapiens
  SIMILAR (735)..(25): 951254mologous to Escherichia coli f470,accession number L10328,Smith-Waterman Score=1143.
tcagacgaggtgccgataaacgcacccgccaccgaacgtgacgctatcaacatacagcgccttattcatattggggaatttaccgttaccatctattaagcccgctttatcagttacaccaattaatgttcctgatgaatcaaataggttgatcagcataaaggagaaaatgataccggcgagttcaagtgttaacgcgccgctcaaatctacttcaccaatgacgccgctaatatcaggcggaatggaatagacgccgctaaaatgaacatcaccgaaaaataatccacagcaagacgtcaccacaatagaaaccagcaccgcggcatgaaaatgacgtgatgacaacacggttataataaaaaaccctaaaatacctaacaacacgccgtgagaacttaaatcgccaatcatcaccagcgtgtctttattggcgacaataacgccagtattttttaatcccattaaggcgataaataatccaattccgctggtgataccaatacgtaaacttaagggaatgttggagatcatccagtaccggatacgaaacagcgtgagcaaaaatagtccaactgcgccccagaatattgcgcccatcccggtctgccaggagatgcccatcggccccacgatcacgaaggcaaagaaggcgttcaggcccattgccggagccagcgccacgggtaagttagcaaatattcccatcgcaatactggcgataccggcaatcaactgaaaatcaaaagcaaaggcttgatccgcggggacaaattgtgaacgtcccggcgcgtcgaataatccggcaaaaacggaagtgctgcaaagtagcaggatcagcgtaaagatgcgttgagccatgagaggtaatctgtgtctccgtgtgtaacaggtaaaaccagaagttccggggtttgatatggatgatgagacttcaggcattccagcagtgccttcccagtaatagagagaggtagcgccggggatcaaggtcgcgcaggccgccacggttttccgccagcactttggcggctaaatcctgggctgtcgcttcatctggtgccgtacatagcaccacgacagacgcggtattcgaacttttttcatcaagcataaacacccgggatgaagaacggatggttgaagacgaatttaccgatacgggtagtacccgtgtcatccatctgtaccgcagcaaccagcgtcgggtaggtcggcagaatgaacagaacagacaacgcagagaaagaagcaaagcgggcagcggggaaacgtcagtgccgggtacgatgcgaatggcccgatggcaaaggggttcccgaatctgtccgcgacaccagagttgcagacgtgaatgttcacgcacagcctgctggagcagcatcaactggcccgccaattgttcaagaccatcaatcgctggctggccgaagcaggcgtcatgatgactcaaggcaccttggtcgatgccaccatcattgaggcagcactcgagttcagtaccatcccagctgtcggcattaaagtaggccgtgacattctgtccttgctgaagagaagtcgcttcatttaccggcactgtggcgcacagtgtttgcccgtcgggtagcgccattaatacttcgcactgctctgcgccgcgctcaatatgactaataatacccggtaattggttgtcagcgttttgcgcgaccgcctcgtcctgagtaatacctacccacggcgcttttagcaatatcaacacttctttgccttcatccagccccagacgcgcgccgctttgtgcggtaattgcgactttcaggcgtgtttttccgtcagccagtaagacatcaacatgctgttgaacgtcatcatgatcgcgggcggtgatggtaccgaaccactggttacgggcgctggtttgcagtgaaaaacgtgagatcgcggccagcaggctgttcagcggcagggcgtcatcgtcacttaacacatcaaaggctttttgctggatttgcgccagtaagtcatagagctgaatcagtcgctgaccatagcgggtcagtactgcgccgacgacacctttaccgcctgttgcgcgctcgaccagaatatgctcacttaactgattcat

SEQ ID NO: 29891 - DNA, 5303 bp, Homo sapiens
  SIMILAR (853)..(1695): 921254mologous to Escherichia coli CG Site No. 946,accession number U00006,Smith-Waterman Score=1394.
atggcctggctgttgattatttacattctgccgttagtcggaattattgcctatcttgccgttggcgagctccatttaggcaaacgccgcgctgaggcccatttgcgattgtggccttccaccgcaaaatggcttaacgaccttaaagcctgtaagcatatcttcgccgaagaaaatagcagtgtcgctgcgccattattcaagctttgcattgcgtcgtcaggggattcgctggaggtcaaagggaatcagctacaactgatgaccgagtcagatgatgtgatgcaggcgttaatccgcgacatccagctcgcgcgccataatattgagatggtgttttatatctggcagcccggcggcatgggcggaccagttcgaataccgcgtctgtcgtggtgctatgtacggcaccagatgaagcgacagccaggatttagccgccaaagtgctggcggaaaaactggcggcctgcgcgaccttgatccccggcgctacctctctctattactgggaagtctcatcatccatatcaaaccccggaacttctggttttacctgttacacacggagacacagattacctctcatggctcaacgcatctttacgctgatcctgctactttgcagcacttccgtttttgccggattattcgacgcgccgggacgttcacaatttgtccccgcgatcaagcctttgcttttgattttcagcaaaaccaacatgaccttaatctgacctggcagatcaaagacggttactacctctaccgtaaacagatccgcattacgccggaacacgcgaaaattgccgacgtgcagctgccgcaacgtcctggcatgaagatgagttttacgcaaaagcaagatttacccgcatcggctgacgcttcccgtcaccatcaaccaggcaatgccggagcacgttttttaagtaaaacgctttatggcgcgctggagcataactttactgatgcctggagcggctttgtgcgcggctatggctatgataaccgtaccaattatgacgcgtattattctcccggttcaccgttgctcgatacccgtaaactctatagccaaagttgggacgccgggctgcgctataacggcgaactgattaaatcacaactcattaccagctatagccatagcaaagattacaactacgatccccattatggtcgttatgattcgtcggcgacgctcgatgagatgaagcaatacaccgtccagtgggcaaacaatgtcatcgttggtcacggtagtattggtgcgggtgtcgactggcagaaacagactacgacgccgggtacaggttatgttgaggatggatatgatcaacgtaataccggcatctatctgaccgggctgcaacaagtcggcgattttacctttgaatgcgcagcacgcagtgacgataactcacagtttggtcgtcatggaacctggcaaaccagcgccggttgggaattcatcgaaggttatcgcttcattgcttcctacgggacatcttataaggcaccaaatctggggcaactgtatggcttctacggaaatccgaatctggacccggagaaaagcaaacagttggaaggcgcgtttgaatgcttaaccgctggggtgaactggcgtatttccggatatcgtaacgatgtcagtgacttgatcgattatgatgatcacaccctggaatatttacaactaagaactcaccccggaagggtttctacggtcaaggttttttactgtcggaactttgaaaaaaactgcgcggaccttacgaacatcatccgaaaaggaggaactatgaaggctgcagttgttacgaaggatcatcatgttgacgttacgtataaaacactgcgctcactgaaacatggcgaagccctgctgaaaatgcagtgttgtggtgtatgtcataccgatcttcatgttaagaatggcgattttggtgacaaaaccggcgtaattctgggccatgaaggcataggtgtggtggcagaagtgggtccaggtgtcacctcattaaaaccaggcgatcgtgccagcgtggcgtggttctacgaaggatgcggtcattgcgaatactgtaacagtggtaacgaaacgctctgccgttcagttaaaaatgccggatacagcgttgatggcgggatggcggaagagtgcatcgtggtcgccgattacgcggtaaaagtgccagatggtctggactcggcggcggccagcagcattacctgtgcgggagtcaccacctacaaagccgttaagctgtcaaaaattcgtccagggcagtggattgctatctacggtcttggcggtctgggtaacctcgccctgcaatacgcgaagaatgtctttaacgccaaagtgatcgccattgatgtcaatgatgagcagttaaaactggcaaccgaaatgggcgcagatttagcgattaactcacacaccgaaagacgccgccaaaaatgtgcaggagaaaaacttgtggcgctcacgctgcggtggtaacagcgttgatgctgtccgtgcaggcggtcgtgttgtggctgtcggtcaccgccggagtctatgagcctggatatccacgtcttgtgctggactgtattgaagtcgtcggtctaattctatgcaatatgatgtctatacccagacggaggtctgtaatggcaaaccatcgaggcggttccggcaattttgcagaagaccgcgaaagagcatcagaagcaggtaaaaaaggtggacagcacagcgtgggtaatttcaagaatgacccgcagcgcgcatctgaagcagctcgtcaaaaagccatcaccgccggttacccggtggttgatactgatgacaaatgtgtcaggcgttacgccacaaaccggaaacacctttccaaacatcacttcaatcccgcccttttcggtcctatgcttccgtatccgggattcttaaattcccattttcagcttacatgcctgcagtacaaaaatgattatccggacgactataacgaaaaagcggaacaggagctgacggcgaacgaaatcttcatgcagtacgtactgccgaacaaactgctgtggtatatcgccatcgccaacgtgttcgtttatctgctgcgttacggcatcctcgactggtcaccgacttatctgaaagaggttaagcatttcgcgctagataaatcctcctgggcctacttcctttatgaatatgcaggtattccgggcactctgcttcttccgtggcaaccgtggggcaaccggcgttttctttatgacactggtgaccatcgcgactatcgtttactggatgaacccggcagtaacccaaccgtcgatatgatttgtatgattgttatcggcttcctgatcaacggtcctgtgatgctgatcggtctgcatgcgctggaactggcaccgaaaaaagcggcaggtacggcagccggctttaccgggctgtttggttacctgggccgttcggtggcgccagcccgatttgttggctacacgtggacttcttcggccgggatggccgctttatggtccatttacaacgtgccgctggttaccatcatcattatgggctttttcttcccgcgcatcccggcgctggcggcaaaagtagcgatggggattggcataatcagctacatcaccatcaactatctggtgaagttcgacttccatttcctctatgtgctggcctgtacgttctgcatcaacgtggtcgtgatgctggtgatcggttttatcaaaccgcgcgccacgccgttcaccttcaaagatgcgtttgcggtggacatgaaaccgtggaaaaacgtcaagatcgcgtcaattggcatcctgttcgcgatgattggcgtctatgccgggctggctgaattcggcggctacggtacgcgctgcggtaaaccgcggaatacgcaaaatattgataatctggccgccgaaggtattcgcttaattccgcctacaccgttcaccggttgtacgcctgaacgggccggactattaccggtatcaagcctaacagttccgcccctggacaacaacttcgcgcagcaaaaacatccccatatggggccctatttaagaaggccgactgaccatcctgcgctggaaaacgtcaatttcgccctgaaacccggtcagatgctgggtatctgcgggccgactggttccggcaaaagtaccctgttgtcgctcattcagcgtcatttcgacgtcagcgagggggatattcgctttcatgatattcctctgacgaagttacaactcgatagctggcgtagcgcctggcggtatgttagccagacgccattccttttttctgacactgtggcgaataacatcgcgctgggttgcccgaatgccacccagcaagagattgagcatgtcgcgcggttagccagcgtacatgacgatattttgcgtctaccgcaagttacggatacagaggtgggcgagcgcggtgtgatgccttccggcgggcaaaaacagcgtatctccattgctcgtgcgttattagtcaacgcggaaatcctcatccttgatgatgcgctttcggcggtggacggacgcactgagcaccagatcctgcataacctgcgtcagtgggggcaaggaagaacggtaatcatcagtgcccatcgcctttctgcactgacggaagccagtgaaattattgtgatgcagcacggacatatcgcccagctggcaatcatgatgtgctggacaacaaagcggctgttccggatggctattgagcagcaaggcaacgttagtttgcggtccggtagacacaatggtgacaggttccgcactttcacgcagcgttttcgccatcagctctaccgccgtacagttttgcggtgcgaatgtcggttccgatcacccgattcgccactttacggcaaagcccatttcgtgggtcaccaccatcatggtcattccttcgttcgccagttccaccatcacgtccagtactcgttgatcatctccggatccagcgccgatgtcgtgcgccggaaacttattggcgtgagcagaaagcccgacacgctccagcagtttcagggctttttcacgagccggcgctttatcgcgtttaagcactttcacctgcgccagggtcaggttttcgataatcgacagatgagggaacagctcgaaatgctggaataccatcccgacgcgggaacgcagctttgccagatcggttttcttgtcgttaaccacgataccatcgacggtgatttcaccttgctgcaccggttcgaggccgttgacggttttaatcagcgttga

SEQ ID NO: 29892 - DNA, 1836 bp, Homo sapiens
  SIMILAR (1677)..(1144): 961254mologous to Escherichia coli INAA PROTEIN,accession number D90855,Smith-Waterman Score=903.
ttaacgcgttgcggaagtcggcgtcttcatgtagcggaagaaatcgctatccgggctcatgaccatcacgtcctgattgccagagaagctgttctcataagcacgcaggctacggatgaatgcgtagaagtccggatctttactgaatgcatcagcaaacagtttggctgcttcggcatcgccttcaccacgcatgatgcggccctgacgctcagcttctgccagcgttctggtcacttcatagtcggcagtcgcgcgcagtttttccgcttcttcctgaccttgtgaacggtgacgacgcgctaccgcttcacgctcggcgcgcatacggttgtagatcgcttcagacacttcggtcggcaggttgatctgcttgatacgcacatcgacaacttcaatacccagccgcggcatactgttcgggttgatgaccggactttgccttcgtctcacttcgttttcacagtcgaattgggtccaaacatttcgcattgataatttgtcatggataccacagtggtaaccgcctgatttcaaaccgggtgtcgctgggttatcgctcgccacgggaatatctgcggcagcgggcttgtaatgggttaagtgataacagatgtgcgcactgccaatttccagcaaagctttatcctgtacccgaataaccccggcaaaccccagagggaattctccgctgattgtcgtatctccattcagatataccgacgactcaccactaacgacaataacgctggtataactatatcctgtgcgcaaggaagtaacctgcgacccatctgcaagcgcgtttttctctccaatcagttcaagtccaccattcatattaacggtattgccatcgccaatcacaaccagacctgacgttttctctgcgctgccatcaaataaattactctcatcctgtttctcgcgatacaccccagcaaaggaggcgttaccaaacgggctaagtaccagacctttgatatcgtaccgataggcctgcaaacgcaatgacgacgccagcggcaaaatgggcaattcctgcgccagaatactctgcgcttcgtcataggcttcaatacgcgccgccagctgctgcgaagagagcgccttacgcaatacgctgtcgaatttcggatcgcaccagtgggcgaggttggtctgctcccagtccgctttggggattggctccagatatttttccagctggcggaagtcatgattaatcgctttatcgcgacgcaagcggcgacgacttttctccaggtcaagaaaaccagcttctgcattaccttctgttttcacatagatatggcgaacataacaacagccatgctgacgattaatgctatgcattttcttaaacgccagcgccactgctttcaacatggcttgccgtacttcgtcagaataaggcgatactgcatgctgggcataccagtcagcaatgctgatgaaccccgccatatcttcagtcaccagcaacgctcgccattcaccctcaattttcaccgcttcaccaaaaacgatcttcggcacgatgacaccggcccgttccagttctttaattaccgcaacctcacggacaatcgttggtcggccgaacggataacgtacggaatgaaacagatgatgcgtcatgcgctttacatacagctttttgccgttgcgctcgacgatcactcgttgtggcgatattttcagcaccgagagcgagtatcttaccggactggatcgcgaaattggcgatgctgaccacgggctaaatatgaaccgaggctttagcaaagtggtggaaaaactccctgctatcgcagataaagatatcggtttcat

SEQ ID NO: 29893 - DNA, 1224 bp, Homo sapiens
  SIMILAR (652)..(1218): 981254mologous to Escherichia coli K12 putative synthetase,accession number AE000181,Smith-Waterman Score=977.
atggaggggagggcagggcaagctgttctgctgacactggatggctcccctccgatcctcctgggtgtgctgctggagccctgggaggagggggttgggcagtcgctggcgctgccgctggtggtccctgtgcttgaagtgccggtggtatcggagtccatgcacccaaggcccagcacccagcaacattctctggcccagcagagggcgttatcccgccacaatgacctgatgatgtcatcatacagccatttttttgcccatctctcccgcctgaaactcattaaccgctggccgctcatgcgcaacgtgcggacggaaaatgtgtccgaacacagtttgcaggtagcgatggtcgcccatgcgctggcagctatcaaaaatcgaaaatttggcggtaatgtcaacgccgaacgtatcgctttactggcgatgtaccacgatgcctcagaagtgctcaccggcgatctccctactccggtgaaatacttcaattcgcaaatcgctcaggagtacaaggctattgaaaaaatcgctcagcaaaaactggtcgatatggttccggaagagctgcgggatatctttgcgccgttaattgacgagcatgcaatgatagatcaaccacaaactgaaaatcaaaagaccctcgccctttttggtatgggcaccaatgtgtttcgccgaatgcatcgcaaaattgtggtgatcgacgcgcgtatagcctttattggcgggttgaattactccgccgagcatatgtccagctacggtccagaggctaaccaggattacgcggtacgccttgaagggccgattgtcgaagatattctccagtttgagctggaaaacctgcctggacaaagcgcggcacgacgctggtggcgacgtcatcacaaagcggaagagaaccgccagccgggagaagcgcaggtattgctggtctggcgcgataacgaagaacatcgcgatgatattgaacgccattatttgaaaatgctcactcaggcgcggcgggaagtgattatcgccaacgcctacttcttccccggctatcgatttttacacgccttgcgtaaagcggcacggcgcggggtgcggatcaaactgatcattcagggcgaaccggatatgccgattgtcagagtcggtgcgcgcttgctgtataactatctggttaaaggcggcgttcaggtttttgagtaccgccgccgcccgctcctttag

SEQ ID NO: 29894 - DNA, 2277 bp, Homo sapiens
  SIMILAR (229)..(861): 991254mologous to Escherichia coli RtoA protein,accession number D90779,Smith-Waterman Score=1043.
atgtctcattgcatcggcggccccattatgagctccggcaacaatagcatccatatcataaccgaactgacggtacggctggtgcaggtgatgcgggttctcctcattaagctggttgccccattcatcatactccccgcgccaagccgtatagccgtcttcgctgatgagcgccagcggcaggccccggtggtcgcagtggtaaaaatgaacttttcgcgccgttgctccaacacgctggcggcaaaagatctaaaagtggtcgggcagaaagcgacgggcataaacgtttctggcgatgcgaatacagtgaatatcactggtaacgttctggttgataaggataaaaccgcagacaatgcggcggaatatttcttcgatccatccgtgggtatcaacgtttacggcagtgataataacgtgacgctggatggaaagttaactgttgtatcagacagtgaggttacttctcgtcagagtaatttatttgatggcagcgcagagaaaacgtcaggtctggttgtgattggcgatggcaataccgttaatatgaatggtggacttgaactgattggagagaaaaacgcgcttgcagatgggtcgcaggttacttccttgcgcacaggatatagttataccagcgttattgtcgttagtggtgagtcgtcggtatatctgaatggagatacgacaatcagcggagaattccctctggggtttgccggggttattcgggtacaggataaagctttgctggaaattggcagtggcgctacgctaacaatgcaggatattgacagttttgaacatcatgggacaagaaccctggatttgcccctatatttccagacatctgttatgtggcggtttacgaagcggtcccaaggatattgtctggcgatagcgggtttttaccgtgcaacgcatagtgccggtgaatggttcgcgatcgacccagtgcaactgctgggcaatcaacccgacagacatcagccgcgggtgttcatggccctgagcgacaaccagaatgttgttttcgacgtctttgtccaccacataccacggttcttcggtaccttctttggtgccaccgatacccagacctttacgctgaccgagagtgtgatacatcagcccctggtgctcaccaatttcatcgccatcgacggtaatgattttgcccggttgcgccgggagataacggcccaggaactcgcggaatttacgttcgccaatgaagcaaatgccggtagagtcttttttcttcgcggtgaccagaccaagatcttcagcaatcttacgcacctgcggtttttccagttcgccgaccgggaacaggctttgcgcaatctgctcatggctgagcgtataaaggaagtagctctggtctttattgctgtccagaccacgcagcaggcggctcttgccatcgacatcggcccgacgtacgtaatgaccgaatatccggattcggcgtgcgaccggctttatattcgggaaggaacagttcgtccagcagcggggactcaggatgaaaaagagaagatgcctcacctggatgaggacccagctcctccattctggcgtttggggcatttgatggcgtgccgctggagctgtaggacagagagagagacacagtcagatttcgggcagttccctaacgtccaattccctgaatccccacaaattcagctccacgttcccgtggccctttcgattcgaagtggccacaggaacctcggagctcatgcagatgagagttggaaaactctccttgggtgtgaggagctggagaaagatgttgagatcccggatcgagcggggcacacaatagtggtaccgtcctgctggtttgcggtggaacgccgcttcggccacgatcttccgtcgtctccagtggagtggctgacggataatggttcatgctaccgggctaatgaaacacgccagttcgcccggatgttgggacttgaaccgaagaacacggcggtgcggagtccggagagtaacggaatagcagagagcttcgtgaaaacgataaagcgtgactacatcagtatcatgcccaaaccagacgggttaacggcagcaaagaaccttgcagaggcgttcgagcattataacgaatggcatccgcatacgccactgccaatttccagcaaagctttatcctgtacccgaataaccccggcaaaccccagagggaattctccgctgattgtcgtatctccattcagatataccgacgactcaccactaacgacaataacgctg

SEQ ID NO: 29895 - DNA, 2916 bp, Homo sapiens
  SIMILAR (553)..(1143): 791254mologous to Escherichia coli matches PS00584: PFKB_KINASES_2; similar to members of the PfkB family of carbohydrate kinases,accession number L19201,Smith-Waterman Score= 781.
  misc_feature (1)...(2916): n = a,t,c or g
atggtgggtaactacctcggatctcagcaacaaacacggattgttcccatcgtcaccctaggtctggaccggaggacacgtgataataacgtgacgctggatggaaagttaactgttgtatcagacagtgaggttacttctcgtcagagtaatttatttgatggcagcgcagagaaaacgtcaggtctggttgtgattggcgatggcaataccgttaatatgaatggtggacttgaactgattggagagaaaaacgcgcttgcagatgggtctcaggttacttccttgcgcacaggatatagttataccagcgttattgtcgttagtggtgagtcgtcggtatatctgaatggagatacgacaatcagcggagaattccctctggggtttgccggggttattcgggtagcgatggtcgcccatgcgctggcagctatcaaaaatcgaaaatttggcggtaatgtcaacgccgaacgtatcgctttactggcgatgtaccacgatgcctcagaagtgctcaccggcgatctccctactccggtgaaatacttcaattcgcaaatcgctcaggagtacaaggctattgaaaaaatcgctcagcaaaaactggtcgatatggttccggaagagctgcgggatatctttgcgccgttaattgacgagcatgcatatagcgatgaagaaaaatcgctgtgggatgttgtgctggcagatgtacgctggcacgacggcgctaaaaaagccttcaccctggcccgtcaggcgggtgtgatgaccgttctggacggggacattacgccgcaggatatcagtgagctggtggcattaagcgatcacgcggccttttcagaaccgggtctggcgcgcttaacgggcgtgaaagagatggccagtgcgctaaaacaggcacaaacgctcacaaatggtcatgtctatgtgacccagggtagcgcaggctgcgactggctggaaaatggtgggcgtcagcatcaaccggccttcaaagttgatgtggtagataccacaggtgcgggtgatgtttttcacggcgctttggcggtggcgctggcaacaagtggggatttagcggagtcagtccgcttcgccagcggtgtagcggcgttaaaatgcacacgtcccggaattttcatgagccttaccgaactaaccggtaacccgcggcacgaccaactcctcatgctgatcgccgagcgtgggtatatgaatattgatgagctggcaaatctgctggatgtctccacgcagacggtccgccgggatattcgtaaattaagcgagcaaggcctgattacgcgccatcacggtggcgcgggtcgggcttccagaatcgttaatacggcgttcgagcagcgtgaggtttcgcaaaccgaggaaaaaaaagcgattgccgaagcggtggcagactatattcctgatggttcaacaatatttatcaccattggtacgactgttgagcatgttgcccgggcgttacttaaccataatcatttgcggataatcaccaacagcctgcgtgtggcgcggattcttcccaaaaacccgcgctttgaagtgatggtgcccggcgcgactggcgagcgggaatccgcgcagacacaagaaggcagacacagtgtagctacagcagagcagaaagcaacagttacaacaacgacagagcactgctctaccaccaacctacagaagcggattaaagcggacaccgacggacgaagcgagagctgtaacgacatgcgtcggtaccttgcacacacggcgaacgaacaagaacacgagcagccaaacggccatagtgccgtaggacaaaccgtcgccaatgaaacgacaggatccccaatttcaacggggagtgagcaagaactgcgacgtaaactcgcggcaccgattatgggcaaaaatggcccagaagagattgatgctacggcagaagattacgagcgcgatattgcctggtgccatgaacatggctatctcgatgacagccgatttgttgcgcgctttatcgccagccgtagccgcaaagggcgcatcgcgtgtgaaggtatttcggtattcggcgaggtgttatggcaaggcaatgatgccgatgccgctcagctcgagcagcttgtcgggcagcccgtgcgggtttccgcgctggcgcggttttcatttgctgaacgtcatgcngttgtcgaacgctttgccgcactgctggaagcaataaagccgattaaccgcgattattgccagagaaacggcacaagttgtagcacctcggcggcacacagaccaccaggccagtcagaggacacgagggacacgccaggacgacggaaagcgacaacggcgcagcagagggaggagcacagacgcgagcagagcacgcacacgcagcgacaggtcgatcgggcggcgagcgcggcccatggcgcagaggatacccccataatagaagtggcgctggtggcgttggcgaatctggcggcggtgcggttgtacggcgaaatcgagttctggttcgcgatgatcaaagtcaccacgattatcgtgatgattgtcatcggcctgggcgtgattttctttggctttggcaatggcgggcagtcgattggagcgaacgagcgagtaaggcacatccattacccaaagttagcgcgagaaaggcgtgtacttgtaactgtcactgctcgttgctttcacgactggcttcattggaagtccgcggctcgtcgccagacagacgacaagatgaggcgaggacgacgagcccacaacgaagcgcgagatactcacaccacacgagactggacagcagcactcgagtccccaaacccactacgagagagcgccggacgtgtaaaagaaacaggctctggctcgcgggctcgacagaatgacaagcgtcacagataa

SEQ ID NO: 29896 - DNA, 3669 bp, Homo sapiens; identical to SEQ ID NO: 15842
  SIMILAR (3057)..(3104): 871254mologous to Escherichia coli yehP,accession number U00007,Smith-Waterman Score=84.

SEQ ID NO: 29897 - DNA, 702 bp, Homo sapiens; identical to SEQ ID NO: 24466
  SIMILAR (40)..(366): 941254mologous to Escherichia coli lambda-integrase,accession number M38257,Smith-Waterman Score=550.

SEQ ID NO: 29898 - DNA, 2160 bp, Homo sapiens
  SIMILAR (1455)..(601): 981254mologous to Escherichia coli methionine synthase,accession number J04975,Smith-Waterman Score=1451.
ttaactcgggtggaagttgtcgtgtggcccgtacaggttggtcggcatgactgagcggtaatcgcgtccgtactggcggttgtatgattcgcacagtttgatcccggcgattttggcaatagcataaggctcgttagtcggctccagcgtgccctgcaacaactcgctttctgccatcggctgttttgccagtttcgggtagatgcaggacgatccgagaaacagcagtttgttcacgtcgttctgatgcgcggcgtgaatgatgttgctctcaatcatcatgttctggtagatgaaatccgccggataggtgttgttggcaacaatgccgcccactttcgccgccgccagatagacctggtcaatacgttcgctggtgggtctgtcgcagaaagtgaagaaattgcgctcgaagcactgaagctcatcgacgttgaatatgaatgtgcttaagccggtaatgtcgatcgacgaagcaactcggcggaagatgcgcctgtcgtgcacgatgaaccggtggtgtatgttgctggtgcgccagatacgtggatgccctggtagttttcgcggatcagctcttcgttgctgaggttctcgcttcggcgcatagccccagtagactttacgcacacgctcatggagatactccgcaaaggcttcggctaaacggtcggcaagcgctttcaccatgattttgttgtaatcatcgtgctgcgcttcaaaggcatcagccagtgcgtcctcttccagcccgccagtcacggcaaatgcgccgatgtaatctgctttaccagaaagcttcggcgcaacgaagtcagcgagacagtagttagcgaagcctgttttttcggtctgttgacgcagatggtggctgacgttgatcacatgggtacgcgtttcgtcacggtagatttcaatgtcatcgcccacacggtttgccgggaacaggcccaccacgccacgcggattcagcgttttctcggcgcttaatttatccagcatgtcgttggcgtctttaaacagccgctgcgcctcaacgcccaccacttcatcttccagaatgcgcggatacttcccggccagcgaccaggtcataaagaacggtgtccagtcgatgtaattacgcagcgtttcgatgctggcttcgacttcctgcacgccgagacggtgcgccaccggcggcgtgtaagcctgccagtcaaaagcgaaatcgttatcgcgcgccgcttccagcgtgaccggtggtgtgcgcggtttcttgcgcccgtgctgaatacgtacggtttcgtactccttgcgggtacgagcgacaaaatcatcacgctgggtatcggaaagcagcgccgccaccacaccaacggtacgcgaggcattctgcacatacaccgtcgggccgctgtagttctgctcgattttcaccgccgtgtgcgcaaggtaagagcgccccacacccccgcccgggtccagggccacatcacgaatgaggtaatttttcagggtaaagcgtgacaggaagcaacctgcggtaatcgccccaccaggacgaccgccaatgttcgccatatcggcaaaattggactccagttgttcctgatactcgtcacccagcggtaagcgccatgcgcggtcaccggattgttcagacgcggcaatcagttcatgggccagcggattatggttcgccatcagaccagtaatatgatgacccagcgcgatcacgcaggcaccggtcagcgtcgccaagattgacacaatccctaactgttcgccatcggcattgtaatcgagtaaatcgtcgatcaactggaaagcagtgccgagaatttccccttttttggcatcttcagcagaaacgttgattcctagaaatacctgcagggctttaaaatccactttttccatatcgatagtcacgttttcctgcgcgtaggtatcggtataggttaatttttcttcaacacccgcgatgtttttgtatttggcgcttaacggctcaagtgtcttggcagcatcttctttgtagacataggtaatggcaatttcagtgccgttcagattggcgctgaatttcttcgattcttctttgtcaccgcagccagcaagagagaaaaccagaacagatgcaacaacgagggaaaacagcttattgaaagccttcat

SEQ ID NO: 29899 - DNA, 554 bp, Homo sapiens; identical to SEQ ID NO: 25696
  SIMILAR (1)..(552): 981254mologous to Escherichia coli K12 B12-dependent homocysteine-N5-methyltetrahydrofolate transmethylase, repressor of metE and metF,accession number AE000475,Smith-Waterman Score=924.

SEQ ID NO: 29900 - DNA, 1755 bp, Homo sapiens; identical to SEQ ID NO: 14854
  SIMILAR (67)..(705): 991254mologous to Escherichia coli K12 diaminopimelate epimerase,accession number AE000457,Smith-Waterman Score=1097.

SEQ ID NO: 29901 - DNA, 4917 bp, Homo sapiens
  SIMILAR (1471)..(2157): 991254mologous to Escherichia coli lambda-integrase,accession number M38257,Smith-Waterman Score=1181.
ttattcaccagatgcctgttgcgcttccggcttgccataaatcagcaacggtttgctttgaccatcaattaccgactcgtcgataaccactttttcgacgtcttccatggacggcagatcgtacatggtatcgagcagtgcggcttctacgatggaacgcaggccacgggcaccggttttacgcgccatcgctttcttagcgatagcatccagcgcctcgtcacggaattccagatccacgccttccagattaaacagcgcctgatactgcttggtcagggcgtttttcggctctttgaggatctgaatcagagcttcttcgctcagttcattcaacgttgcgacaaccggcagacgaccaataaactcagggataagaccaaacttgatcagatcttccggttcaacctgcgccagcagctcgccttcgcttgctttgtcggacttcgcttttaccgtcgcgccaaaatgattctggtaacaggaatgtgattgattataagaacatcccggttccgcgaagccaacaacctgtgcactcaaggccttggccgccgtgtaacgattactatcgctgctgacagcatcgagaccgctgttaaaagcgagctggtcaacgttgcgaaaaaagtacgtattgacggcttccgcaaaggcaaagtgccaatgaatatcgttgctcagcgttatggcgcgtctgtacgccaggacgttctgggtgacctgatgagccgtaacttcattgacgccatcattaaagaaaaaatcaatccggctggcgcaccgacttatgttccgggcgaatacaagctgggtgaagacttcacttactctgtagagtttgaagtttatccggaagttgaactgcagggtctggaagcgatcgaagttgaaaaaccgatcgttgaagtgaccgacgctgacgttgacggcatgctggatactctgcgtaaacagcaggcgacgtgtgccgcatccggtacgcggcaccgtttcgttggtcgagtggcacatggcccgcgccacgttaatcatattcatgttctgcagcgcagtctcaccgccgccagcagtctcgacgatatgctgatgcgctttcaccgctgggcgcgcgatctcggcctggcaggtgcgagtctgcgcctgtttccggatcgctggcgcttaggtgcgccgtcaaacccaaatcatctggcattaagccgtcagtctttcgaaccgctgcgtattcagcgttaggggcaggaacagcactatcttgggccgcttaacggaccagagctgctggtggtgctaccggaagcgaaagcggtgggatcggtggcgatgtcgatgctgggaagcgatgctgatttgggtgtcgtgctgtttaccagtcgcgatgccagtcactatcaacaagggcaaggaacgcagttacttcatgaaattgcgctgatgttgccggagcttctggagcgttggattgaacgccgtcagcttgaggcgatcatcaattttgccagcgaaaacggcctgcaaagctggcagcaatgtgatgtgacgatggtgcgcaattttgctgtacgcagtcgccgtaaagggctgggagcagcaagtctggcgttacggctttctgcgctacgtagcttttttgactggctggtcagccagaacgaactcaaagctaacccggcgaaaggtgtttcggcaccgaaagcgccgcgtcatctgccgaaaaacatcgacgtcgacgatatgaatcggctgctggatattgatatcaatgatcccctcgctgtacgcgaccgtgcaatgctggaagtgatgtacggcgcgggtctgcgtctttctgagctggtggggctggatattaaacacctcgacctggagtctggtgaagtgtgggttatggggaaaggcagcaaagagcgccgcctgccgattggtcgcaacgctgtggcgtggattgagcactggcttgatttgcgcgacctgtttggtagcgaagacgacgcgctttttctgtcgaaactgggcaagcgtatctccgcgcgtaatgtgcagaaacgctttgccgaatggggcataaaacaagggctgaataatcacgttcatccgcataaattacgtcactcgttcgccacgcatatgctggagtcgagcggcgatcttcgtgcgagaggcgcttacctttgtgccaaattattatccggggctgcgcaggttccagaatggagatctgcattcgcctggtttgcccgctgtgccgaacaggcaaggcaaaaccagtacttacaggtcagctcttgcgtacccgccctggaaggctgcgatgttaacggtgccagttttacccttgaacagatgctcgcctggcgggaccatccgcaggttaccggccttgcagaaatgatggactaccctggcgtaattagcgggcagaatgcgctgctcgataaactggatgcatttcgccacctgacgctggacggtcactgcccgggtttgggtggtaaagaacttaacgcctatattactgcgggtattgaaaactgccacgaaagttatcagctggaagaaggacgccggaaattacaactcggcatgtcgttgatgatccgcgaagggtccgctgcccgcaatctcaacgcgctggcaccgttgatcaacgaatttaacagcccgcaatgcatgctctgtaccgatgaccgtaacccgtgggagatcggccatgaaggacacatcgatgccttaattcgccggctgaaatgcattaccgagtttatcgagcaggataccgaagaagcccgccagcaggctacgcgcccgattgaagtgattgaaggcccgttgatggacggcatgaatgtggtcggcgacctgtttggcgaagggaaaatgttcctgccacaggtggtcaaatcggcgcgcgtcatgaaacaggcggtggcctacctcgaaccgtttattgaagccagcaaagagcagggcaaaaccaacggcaagatggtgatcgccaccgtgaagggcgacgtccacgacatcggtaaaaatatcgttggtgtggtgctgcaatgtaacaactacgaaattgtcgatctcggcgttatggtgcctgcggaaaaaattctccgtaccgctaaagaagtgaatgctgatctgattggcctttcggggcttatcacgccgtcgctggacgagatggttaacgtggcgaaagagatggagcgtcagggcttcactattccgttactgattggcggcgcgacgacctcaaaagcgcacacggcggtgaaaatcgagcagaactacagcggcccgacggtgtatgtgcagaatgcctcgcgtaccgttggtgtggtggcggcgctgctttccgatacccagcgtgatgattttgtcgctcgtacccgcaagagtcgaaacccaggcggtacagctaacgcacaatctaccttcgagcaaaaagcggcaaatccctttgataataacaatgatggtctgccggatttaggcatggctcccgaaaatcatgatggggaaaaacactttgctgaaattgtgaaagatttcggcgaaaccagtatgaatgataacgggctggatactggcgagcaggcaaaagctttcgcattgggaaaagtccgcgaatggtggtcgatgccggacaatgacattcgccgccgaagaaccgcaaggcattcacgcctgaaagagaatctgccgctgattacgctaatcgtgatgatggcaatcagctggggtctggagcagttcaatcatccgttcgggcaactggcgtttatcgcgaccacgctggttgggctgtacccgattgctcgtcaggcattacggttgatcaaatccggcagctacttcgccattgaaaccttaatgagcgtagccgctattggtgcactgtttattggcgcaacggctgaagctgcgatggtgttgctgctgtttttgattggtgaacgactggaaggctgggccgccagccgcgcgctgtggcgattaacagccatagcgccacccttgggacagcaactggttggcactctcgcacacgttccgccgttcttcctgatgatggcaggtctggcggtttacgcggtgctgtttgcgggctggtcaagtaacaacaaatactcgttgctgggtgcgatgcgtgcttctgcgcagaccctgagctacgaagtgttcctcgggctttccttgatgggcgtggtggcgcaggccggttcattcaacatgaccgacatcgtcaacagccaggcgcatgtgtggaacgttatcccgcaattctttggttttattacctttgccatcgcgggcgtggcggtatgtcaccgtcacccgtttgaccagccggaagccgagcaggaactggcggatggttaccacattgaatattccggtatgaagttcggtctgttcttcgtgggtgagtacatcgggattgtgaccatctctgcattgatggtgacgctgttcttcggtggctggcaaggcccgttgttaccgccattcatctggttcgcgctgaaaaccgcgttctttatgatgatgttcattttgattcgtaatgtccttcggctggaaaatctgcctgccgctgacgctgatcaacttgctggtaacggcggctgtcattctctggcaggcgcaataaggggcaataagaccatgaccttaaaagaattgttagtaggtttcggcacccaggttcgtagtatctggatgatcggcctgcacgcgttcgccaaacgcgaaacgcgaatgtacccggaagagccggtctatctgccgccccgttatcgtggtcgtatcgttctgacccgcgacccggacggcgaagagcgttgcgtagcctgtaacctctgcgcggtagcctgcccgtcggctgtatctcgatgcaaaagcagaggatag

SEQ ID NO: 29902 - DNA, 1308 bp, Homo sapiens
  SIMILAR (1)..(1143): 951254mologous to Escherichia coli similar to glucose transport proteins,accession number L10328,Smith-Waterman Score= 1857.
  misc_feature (1)...(1308): n = a,t,c or g
gcctacaaaagcggcatgtcggtgatgggctgggaagtgacttcagcggtgacgctgatcttcctcgcgctaatctttttaccgcgctatctgaagcgcggcattgccaccatccccgattttctggaggaacgttatgataaaacgacgcgtattatcatcgacttctgcttcctaattgccaccggcgtctgctttctgccgattgttctctactccggcgcgttggcgctcaacagcctgtttcacgtcggggaatcgctacagatttctcacggtgcggctatctggctactggtaattttgcttggtctggcgggaattttgtatgcggtgatcggcggactgcgcgcaatggcagtggcggactccatcaacggtattgggctggttatcggcgggttgatggtgccggtatttggcctaatcgcgatgggcaagggcagctttatgcagggcattgagcaactcaccaccgttcacgccgagaaattaaactcaatcggtggcccgaccgatcccttgccgattggcgcggcatttaccgggcatcgtgcaacgcacctggcgtcaaaaagcctggcggaagggcaaaagggggcgctgttaacggcggtgctgaaaatgctcgacccgctggtactggtgctgccagggttgattgcgtttcatctgtatcaggatttaccgaaagccgacatggcctacccgacgctggtcaataacgttctgccagtgccaatggtgggtttcttcggcgcggtgttatttggtgcggtgatcagtaccttcaacggctttctgaatagcgccagtacgttattcagtatgggtatttaccgtcgcatcattaaccagaatgccgagccgcagcagctggtcaccgtcgggcgcaaatttggtttctttatcgctatcgtttcggtgctggtcgcgccgtggatcgccaacgcgccgcnagggctgtatagctggatgaaacagctcaacggcatttacaacgtgccgctggttaccatcatcattatgggctttttcttcccgcgcatcccggcgctggcggcaaaagtagcgatggggattggcataatcagctacatcaccatcaactatctggtgaagttcgacttccatttcctctaccggaattgtgaaagaacttgtcgactgctgttgctgaaaggcgatggacctgtaactgtcgaggggaaaacagttgcctctgaccgaaagcgctacagtggcatctcgaaactgaccgtcaacacccgccaacatctgttgagaattacgcaacgcttaccccga

SEQ ID NO: 29903 - DNA, 393 bp, Homo sapiens
  SIMILAR (126)..(260): 351254mologous to Homo sapiens Human presenilin I mutant protein fragment 27,accession number Y20881,Smith-Waterman Score= 65.
catccggcgaatcacataccaggagatgagtaacatggtggtaaagagcgcccacagcagggttaatgcaatgctgatactgccgaaatcgccgcgcacgccttcgcttaacgtatggacacgcaccagcacaccgtcgaaatggtccagacgttcccagctaacatagcgactgtccatacgaatgccgccccgcgtgtcatgttccattgcctgcgccagcaaggccagttcacgaggatcaaaaatattcctgtcatagagctgatactcaccatcgaggtttttatcgatggcgtttcttaaaaattgctgcatagtacgcacgggaatactcatccccagcacgccataccagtagttattactgtctaccggaacactgacggtaac

SEQ ID NO: 29904 - DNA, 695 bp, Homo sapiens
  SIMILAR (486)..(1): 981254mologous to Escherichia coli No definition line found,accession number U00039,Smith-Waterman Score=784.
ccacgctacgcccggcaaaccggttttgacatattccagatgctgctggagtaattccggtgggatacgcgctttgacgcggaacatcagtttcagccgttcatcgctggtttcgacggtttttggcgtgaactgggcgacactggcgacaaaactgatggttgcaggaatacgcagatctggcgcggcatcgaggatcagccgggcttcaccgcccagtttcagcgtgcccgcctgttcggttggcaggaagaaagtcatatagacgtcgctgagatcgaccatattcagcacccgaccgcctgccgccagcacttcgcctggcttggcaacccgatactgcacgcgtccgtcacgcggggctttcagttcgctgtcatcgatatctgcggcaatgcgccgttcagtggcttgtgccgcttcgacgcgggtttgcgcctgaatgatattggtgcgtgccgcttctatagccgctttatggaaggaccacagcatggattctgcccgagagttcttgcctgccagcacccgcacacggtgagctcgccagccccagcgggccaagcagacatcagcagctcggatccgggtccgcgggggcagccaaaatccacagctgccaaggccccggccccagcttcggccagcaccatagacggaaaagcagttgcgctcccccagccccagaagaaacc

SEQ ID NO: 29905 - DNA, 3639 bp, Homo sapiens
  SIMILAR (1639)..(2823): 1001254mologous to Escherichia coli similar to glucose transport proteins,accession number L10328,Smith-Waterman Score= 2005.
atgcctatatctccagccagccgcccactggatttcacctctctgcgtgatgctgtaaccgagttcgaacagcatcgctacgagcacgcctgtaaaatcgaattcaaccgacgacgcactctgccagttaatggtgtgtcggatgcattagtcagcgaggggaatctcctgtctcgcgaaaatgaaagcctcgacaatgaaattaccgctgcactggaagttggttacttgctgcgactagcgcacaactcctcgtcgatggttgaacagacgatgtatgtctcgcgtgccggattttacgtttcgacgcagccgaccttgtttacgcgcaatgttccaacgcgttattacggctatgtcacccaaccctggtttattggccattcacaacgagaaaatcgtcaccgcgcggtacgctggttcacttcgcaaccggaacacgccagcaatactgaaccgcaggttaccgtcagtgttccggtagacagtaataactactggtatggcgtgctggggatgagtattcccgtgcgtactatgcagcaatttttaagaaacgccatcgataaaaacctcgatggtgagtatcagctctatgacagtaagctgagatttttgacctcttccaatcctgaccatccaacagggaatatttttgatcctcgtgaactggccttgctggcgcatgcaatggaacatgacacgcggggcggcattcgtatggacagtcgctatgttagctgggaacgtctggaccatttcgacggtgtgctggtgcgtgtccatacgttaagcgaaggcgtgcgcggcgatttcggcagtatcagcattgcattaaccctgctgtgggcgctctttaccaccatgttactcatctcctggtatgtgattcgccggatggttagcaacatgtatgttctgcaaagctcgttgcagtggcaggcgtggcacgacaccttaacgcgtttatataaccgtggcgcactgttcgaaaaagcccgtccgctcgctaaattgtgtcagacgcaccaacatcctttttctgtcattcaggtcgatcttgaccattttaaagcgattaatgaccgctttggtcatcaggcgggcgaccgtgttctttctcatgctgcaggattaattagcagttccttgcgtaccggttttaaagcggttataaaccggaccgccccaatatctattaagccgaaaacccgctttcaaggcggcaaaagccccttgaaacggcccaattccccgccagattatcggtttgcccagcggaacttgaaaagcccccccgcttttaaccggaaaccgctgttcccatttattcgggggtttgcccaaaggcccaaagggcgaaaaatgttgcttgggccggcacaggcccggttccgggggttgctggaaattaatgatctgcgtattcctgcaaccatcagttttgtcgccagtgtcgcccagttcacgccaaaaaccgtcgaaaccagcgatgaacggctgaaactgatgttccgcgtcaaagcgcgtatcccaccggaattactccagcagcatctggaatatgtcaaaaccggtttgccgggcgtagcgtgggtgcgggtgaatgaagaacttccgtggcctgacgacctcgtggcctacaaaagcggcatgtcggtgatgggctgggaagtgacttcagcggtgacgctgatcttcctcgcgctaatctttttaccgcgctatctgaagcgcggcattgccaccatccccgattttctggaggaacgttatgataaaacgacgcgtattatcatcgacttctgcttcctaattgccaccggcgtctgctttctgccgattgttctctactccggcgcgttggcgctcaacagcctgtttcacgtcggggaatcgctacagatttctcacggtgcggctatctggctactggtaattttgcttggtctggcgggaattttgtatgcggtgatcggcggactgcgcgcaatggcagtggcggactccatcaacggtattgggctggttatcggcgggttgatggtgccggtatttggcctaatcgcgatgggcaagggcagctttatgcagggcattgagcaactcaccaccgttcacgccgagaaattaaactcaatcggtggcccgaccgatcccttgccgattggcgcggcatttaccggtttgattctggtgaacaccttttactggtgtacaaatcagggcatcgtgcaacgcacgctggcgtcaaaaagcctggcggaagggcaaaagggggcgctgttaacggcggtgctgaaaatgctcgacccgctggtactggtgctgccagggttgattgcgtttcatctgtatcaggatttaccgaaagccgacatggcctacccgacgctggtcaataacgttctgccagtgccaatggtgggtttcttcggcgcggtgttatttggtgcggtgatcagtaccttcaacggctttctgaatagcgccagtacgttattcagtatgggtatttaccgtcgcatcattaaccagaatgccgagccgcagcagctggtcaccgtcgggcgcaaatttggtttctttatcgctatcgtttcggtgctggtcgcgccgtggatcgccaacgcgccgcaggggctgtatagctggatgaaacagctcaacggcatttacaacgtgccgctggttaccatcatcattatgggctttttcttcccgcgcatcccggcgctggcggcaaaagtagcgatggggattggcataatcagctacatcaccatcaactatttggtgaagttcgacttccatttcctctaccggaattgtgaaagaacttgtcgactgctgttgctgaaaggcgatggacctgtaactgtcgaggggaaaacagttgcctctgaccgaaagcgctacagtggcatctcgaaactgaccgtcaacacccgccaacatctgttgagaattacgcaacgcttaccccgacttgatgccgaagcgctaattaatctggtgcgccacgtgacgccgcgtctgtattccatcgcctcctcgcagccggaagtcgagaacgaagtacacgtcaccgttggtgtggtgcgttacgacgtggaaggccgcgaacgtgccggtggtgcctccagcttcctcgctgaccgcgtggaagaagagggcgaagtccgcgtatttatcgaacataacgataacttccgcctgccagccaatccagaaaccccggcaccggtacttgcgccgttccgcgcctttatgcagcaacgcgccgccgacgaagcgccaggtaaaaactggctgttctttggtaatccgcactttacggaagacttcctgtaccaggtggagtggcagcgatacgtcaaagatggcgtgctgacacgtatcgatcttgcctggtcgcgcgatcaaaaagaaaaagtttacgtacaagacaaactgcgcgaacagggcgcggagctgtggcgctggatcaatgatggtgcccacatttatgtctgcggcgacgctaatcgcatggcgaaagacgttgagcatacacttgtgagagtaattcgcaaatttagtagcatagattatcctctagagtctacagacaagagtacaacaatacatgggtcacag

SEQ ID NO: 29906 - DNA, 957 bp, Homo sapiens
  SIMILAR (112)..(513): 991254mologous to Escherichia coli similar to H. influenzae HI0293,accession number U82664,Smith-Waterman Score=692.
atgggctttcgacggacgatgccacacatcgtaatttcggcgctggtgggtggtttactgctggtgttcgctgactgcctggcctggacctgcaggcatgataagctcgatgacataagcgatgtagcaaaaattaccggcctgaccagcaaagccattcgcttctatgaagagaaggggctggtgacgccgccgatgcgcagcgaaaacggttatcgcacctacacgcagcagcatctcaacgaactgaccttactgcgccaggcacggcaggtgggctttaacctggaagagagcggcgagctggtgaatctgtttaacgacccgcagcggcacagcgccgacgtcaaacggcgcacgctggagaaggtggcggagatcgaacgacacattgaggagctgcaatccatgcgcgaccagctgctggcactggcgaatgcctgccctggcgatgacagcgccgactgcccgattatcgaaaatctctccggctgctgtcatcatcgggcagggaaatacgtaggcctgataagacgcgtcaagcgtcgcatcaggcatcggtgctggcctattaagactctcagccagcgcgcggtttctgaatttcagcgcctgatacagccaaatcatcagtaccagtcctacacacgccagtgcgccccagaaacggataatcatgccgataactcatataacgcagggctgtttatcgtgaattcactctataccgctgaaggtgtaatggataaacactcgctgtggcagcgttatgtcccgctgatgcgtcacgaagcattgcgcctgcaggttcgactgcccgcgagcgtggaacttgacgatctgctacaggcgggcggcattgggttacttaatgccgtcgaacgctatgacgccctacaaggaacggcatttacaacttacgcagtgcagcgtatccgtaggcgctatgttggatga

SEQ ID NO: 29907 - DNA, 702 bp, Homo sapiens
  SIMILAR (205)..(690): 991254mologous to Escherichia coli RNA polymerase sigma factor for flagellar operon (Sigma-F factor) (Sigma-27) (Sigma- 28),accession number D90832,Smith-Waterman Score=819.
atggccaaggtttcccgggagatctgcccggctggtcctggttaccactactcggcctccgacctccgctacaacaccagacccctgggccaggagccaccccgagtgtcactcagccagcctcgtaccctgccagccacctctcggccatctgcagaaacggataatcatgccgataactcatataacgcagggctgtttatcgtgaattcactctataccgctgaaggtgtaatggataaacactcgctgtggcagcgttatgtcccgctggtgcgtcacgaagcattgcgcctgcaggttcgactgcccgcgagcgtggaacttgacgatctgctacaggcgggcggcattgggttacttaatgccgtcgaacgctatgacgccctacaaggaacggcatttacaacttacgcagtgcagcgtatccgtggcgctatgctggatgaacttcgcagccgtgactgggtgccgcgcagcgtgcgacgcaacgcgcgtgaagtggcacaggcaatagggcaactggagcaggaacttggccgcaacgccacggaaactgaggtagcggaacgtttagggatcgatattgccgattatcgccaaatgttgctcgacaccaataacagccagctcttctcctacgatgagtggcgcgaagagcacggcgatagcatcgaactggttactgacagtctgttctga

SEQ ID NO: 29908 - DNA, 660 bp, Homo sapiens
  SIMILAR (31)..(2): 1001254mologous to Escherichia coli metR,accession number M37630,Smith-Waterman Score=55.
tcactgtgggtgcatcgtaagtgggtcgctccggctcttcacaaacggcagatgatcgcaggcgtgattgcgcgctgagcgaataaacgcttccgtaactggctgacgctgctcgccatcgcgcacggcggcgtacagtcggctccacaagccttcgcccagggttttggtcaccaccagaccctggcgctcaaaactctctactacccaatgcggtagcgcggcaatacccatccgcgcggcaaccatctgaatcaacaataaggtgttatcgacgcttttcagtgacgggctgacgcctgccggctgaagaaaatgccgccagacatccagtcgactacgctgcaccggataaattaatagcgtctcgctggcgagatcttccggtgtaattcgcgttttcgccgccagtggatggtcaggtgctaacaccagacgcacttcatagtcgaacatcggcgaataatgcagcgcactgcgcggcagaatatcggacgtcattaccagatccagctctccgcagtgcagcgtatccgtggcgctatgctggatgaacttcgcagccgtgactgggtgccgcgcagtgcgacgcaacgcgcgtgaagtggcacaggcaatagggcaaatgtcattaccgatgttgcaagtcgcgctgagcat

SEQ ID NO: 29909 - DNA, 1575 bp, Homo sapiens
  SIMILAR (1)..(408): 1001254mologous to Escherichia coli K12 putative transcriptional regulator LYSR-type,accession number AE000403,Smith -Waterman Score=713.
atgccaatggtggtgtgcgccgcgaaaagctatctcacacaatacggcataccggaaaaacccgccgatttgagtagtcattcatggcttgaatacagcgtgcggcccgacaatgaatttgaactgatcgcaccggaagggatctcgactcgcctgatcccacaaggaagatttgtgactaatgatccgatgacgctggtgcgctggctgacggcgggtgccgggatcgcctacgtgccgctgatgtgggtgatcaacgagatcaatcgtggggagctggagatcctgctgccgcgttaccagtcagatccacgcccggtttatgcgttatataccgaaaaagataagctgccgctgaaggtacaggtcgtgatcaactcgctgacggattattttgttgaggtcggggcgaggggaccgttcgtgcacgtagaaagattaattatccttctgaaaatagtgaaattattacgcagtaccggcaacagtcaggtgatcgactttcaacgttggctgggccacgacaagcgggcaactttgttattatggaagctggaggcggccggctcccctctaagaccactgagtgttcaggtgacaacccctcaggaggtggcagaaacggataatcatgccgataactcatataacgcagggctgtttatcgtgaattcactctataccgctgaaggtgtaatggataaacactcgctgtggcagcgttatgtcccgctggtgcgtcacgaagcattgcgcctgcaggttcgactgcccgcgagcgtggaacttgacgatctgctacaggcgggcggcattgggttacttaatgccgtcgaacgctatgacgccctacaaggaacggcatttacaacttacgcagtgcagcgtatccgtggcgctatgctggatgaacttcgcagccgtgactgggtgccgcgcagcgtgcgacgcaacgcgcgtgaagtggcacaggcaatagggcaactggagcaggaacttggccgcaaagccacggaaactgaggtagcggaacgtttagggatcgatattgccgattatcgccaatgttgctcgacaccattacgccagtcttctctacatgaacctcagaggcttcagagacaatgctatgaaagacaaagaagggccaaggacgtgttccagattgaaggagacactaaagagatgacactaaatgagacgtgtgatcctggattggatccacaactgggaaaaaaatgcaataagcaacattattgggagaactgtacccaaagtcaatgcatcaccttctggttgttgagtgccaacccgtcgatcaaccgcggtacgctggagaaagagagccgcaccgtcgcgcaacgtctctccgtgctgcacggcatcaacgcgccggagttcttcgacaaggcggtgttcagttctctggtgctgacactgcgtgatgaagggtatatcagcgatagcggcgatgccgaaccggcagaaacgatgaaggtttatcagttgctggcggagttgattacatcagacgtgcgtttgacgattgagagtgcgacgcagggcgaagggtaa

SEQ ID NO: 29910 - DNA, 3717 bp, Homo sapiens
  SIMILAR (2404)..(3678): 681254mologous to Escherichia coli K12 putative ATP-binding component of a transport system,accession number AE000350,Smith- Waterman Score=1362.
atgataagtgcaaatcgtccgataattaacctcgacctcgatctgctgagaacatttgttgctgttgccgatctgaacacttttgctgccgcagctgccgctgtgtgtcgtactcagtccgccgtaagtcagcaaatgcagcgtctggaacaactcgttgggaaagaactgttcgctcgtcacggtcgcaacaaactgttaactgaacatggcattcaacttcttggttacgccaggaaaatcctgcgttttaatgatgagatcgtgtatccaaccgaattcggactaaccggattgctttggctgacactgatcctgaaggaactgatggctaacgtttcgcgtccgttgcgatcaatgccgaaagcgattgcgaaagaactggagctgaccgcatcagcggaaattttactctgggatgactattttgcacctggctacggcgtgccgaacgacgaaggcatggaagcagtgaaattgctgccgcggctggaaggcattctgcttgatcctgtgtataccggaaaagcgatgcgggggctgattgacggtatcagtcagaaacgcttcaaagatgaagggccgattctgtttattcatacccggcggtgcgcctgcgctgttcgcctatcatccccacgtttagctccggaaacgctcatgcaagaaagtatacaactggttattgattccttgccgttcctgctgaaaggggctgggtatacgctgcaactcagtatcggcggcatgttttttggcttactgctcgggtttattctcgcgctgatgcgtctgtcgccaatctggcccgtgcgctggctggcgcgtttttatatctctatttttcgtggtacgccgctcatcgcacaactgtttatgatctattacggcctgccgcagtttggtatcgaattagatcccattccgtcagcaatgattggtctgtcgttgaacactgccgcctatgctgccgaaacgctgcgcgccgccatttcttctattgataaaggtcagtgggaagcggcagccagtattggtatgacgccgtggcagaccatgcgtcgcgcgattttgccacaggcggcgcgtgtggcgttgccgccgctgtcgaacagctttattagcctggtaaaagatacgtcgctggccgcgacaatccaggtgccggagctgttccgtcaggcgcagttgattacctcgcgtacgctggaggtgttcaccatgtatctggcggcttcgctcatctactggatcatggcgactgtgttatcgacgttgcacagagatcccagtggtagattttgttggccagtggcgcaaggagccggacgctggctggtggcggatgatcgccagtatctgaacttttccagtaacgattatttagcagggggcggacaatttggcatcggtagcggcggctccggtcacgtcagcggttatagcgtggtgcatcaggcactggaagaagagctggccgagtggcttggctattggcgggcactgctgaatatctctggtttcgtcgctaatcaggcagttattgccgcgatgatggcgaaagaggaccgtattgctgccgaccggcttagccatgcctcattgctggaagctgccagtttaagcccgtcgcagcttcgccgttttgctcataacgatgtcactcatttggcgcgattgcttgcttccccctgtccggggcagcaaatggtggtgacagaacgcgtgttcagcatggacggcgatactgcgccactggcggaaatccagcaggtaacgcaacagcacaatcgctggttgatggtcgatgatgcccacggcacgggcgttatcggggagcaggggcgcggcagctgctggctgcaaaagccgtgcgttacaactggcagaaaaactgcgtcagcaaggctgctgggtcacggcgattcgcccgccaaccgtacccgctggtactgcgcgactgcgcttaacgctaacccgatatcgaccgtctgctggaggtgctgcatggcaacggttaataaacaagccattgcagcggcatttggtcgggcagccgcacactatgagcaacatgcagatctacagcgccagagatgtgacgccttactggcaatgcttccacagcgtaaatacacccacgtactggacgcgggttgtggacctggctggatgagccgccactggcgggaacgtcacgcgcaggtgacggccttagatctctcgccgccaatgcttgttcaggcacgccagaaggatgccgcagaccattatctggcgggagatatcgaatccctgccgttagcgactgcgacgttcgatcttgcatggagcaatctcgcagtgcagtgtaaatgggttggcattcaatttccaaagggggatcctctagaatcgactacggcattcactactaatgttattggtgtggtaaacgatgagactgtagatggcaaccaaaaagtggatgaacgaggtacaacaaataacactcatattatcaaccatggccagcagaatgttcatggcggggtatctaatggaagtcttattgaatctggtggatatcaagatataggaagtcataacaattttgtggggcaggctaataatacaaccattaacggtggcagacagtcaattcatgacgggggtatttccacaggtacgacaatcgagagtggcaatcaggacgtttataaagggggtatcagcaatggaacgacaattaagggcggtgcttcacgcgtagagggagggagtgcgaatggaatactcattgatggtggtagccagatagtaaaagttcaagggcatgctgatggtacaacgataaataagtctggctctcaggacgtagtacaaggaagtctggcaacgaacacaaccataaatggtggtcgacagtatgttgaacagagcacagtagaaacaacaaccattaaaaatggcggtgagcaaagagtatatgagagccgtgcgctggacacgacgattgaaggcggaactcagtctctgaatagtaagtcaacggcaaaaaatacgcatatctattctggtggcacgcaaattgttgataacaccagcacctcggatgttattgaagtttattctggtggcgtgcttgatgttaagggtgacataaacgcatatggttcggcaaacaagacgattattaaagataaaggaacaatgtcagttttaaccaatgctaaagctgatgcgacccgaatagataatggcggggttatggatgttgcaggaaacgcgacaaataccataattaatggtggcacacagaatattaataattatggcatagccacaggcaccaatatcaacagcggaacgcaaaatatcaaaagcggcgggaaagctgacacaacaattatatcctccgggagccggcaggttgttgagaaagatggtacggcaattggcagcaatattagcgccggaaaatcgctgattgtctataccggccccattgcacatggggttaaccaggagacgggcagtgctttagttgccaacacgggtgcagggactgatatcgaaggatacaacaagctctctcacttcactattaccggaggggaggctaattatgttgtgctggaaaataccggcgaactgacggtagtggctaaaacctcggcgaaaaatactaccattgatactgagtgcctcagaggatccctaacctccgccatttaa

SEQ ID NO: 29911 - DNA, 1098 bp, Homo sapiens
  SIMILAR (172)..(867): 861254mologous to Escherichia coli RNA polymerase sigma factor for flagellar operon (Sigma-F factor) (Sigma-27) (Sigma- 28),accession number D90832,Smith-Waterman Score=996.
atggcctgctgtggaatgtcctggccgtggttggagtcctgcaaggcagattgtgctttggctcaaccaaaagcaccatttcactccagcagccctcctcagggtgaagaccagtttttagtggtaccgacatcgaatggtatcaactcatataacgcacggctgtttatcgtgaattcactctataccgctgaaggtgtaatggataaacactcgctgtggcagcgttatgtcccgctggtgcgtcacgaagcattgcgcctgcaggttcgactgcccgcgagcgtggaacttgacgatctgctacaggcgggcggcattgggttacttaatgccgtcgaacgctatgacgccctacaaggaacggcatttacaacttacgcagtgcagcgtatccgtggcgctatgctggatgaacttcgcagccgtgactgggtgccgcgcagcgtgcgacgcaacgcgcgtgaagtggcacaggcaatagggcaactggagcaggaacttggccgcaacgccacggaaactgaggtagcggaacgtttagggatcgatattgccgattatcgccaaatgttgctcgacaccaataacagccagctcttctcctacgatgagtggcgcgaagagcacggcgatagcatcgaactggttactgatgatcatcagcgagaaaacccgctacaacaactactggacagtaatctgcgccagcgggtgatggaagccatcgaaacgttgccggagcgcgataaacttgtattagagttgaacactgatcgcgatgagcgaagccgccagatacatggtgaacacctccagcgtacgcgaggtaatcaactgcgcctgacggaacagctccggcacctggattgtcgcggccagcgacgtatcttttaccaggctaataaagctgttcgacagcggcggcaacgccacacgcgccgcctgtggcaaaatcgcgcgacgcatggtctgccacggcgtcataccaatactggctggcgcttcccactgacctttatcaatagaagaaatggcggcgcgcagcgtttcggcagcataggcggcagtgttcaacgacagaccaatcattgctga

SEQ ID NO: 29912 - DNA, 2238 bp, Homo sapiens
  SIMILAR (1447)..(1424): 1001254mologous to Escherichia coli flagellar protein FlhA,accession number U88319,Smith-Waterman Score=41.
ctacattagggtgttgtgtgttgcgtgtatgatggggatattctggtcaaagtgtagcagagagaagtggttggaatgatgacgctcccccatgtggaccccgatttgatccgttccgttccggttttcactggcgtcttcagcagcattcgccacccggtgagcgctctgttccgccaacaggcttcgacctgttccccccatggcagaattcacataactactgtcgccgagcgcaatcacgccataacgcagattcggctggaagcccagactatctttgattccctgaaagagtggcacaatgctatcaggaagttcgccctgcccggtcgtggacgtaaccaccagaacatacttatcctgatagggcagccagtcgcttaattcaggatcttcaaataccgttgctttgtggccctgcgcggtcagaatcgcttccgcttcttcggccactaacagtgaattcccgtacatggtgccgacaaaaataccaatttccgccataccgttttctccctggattaggaacttatctctccatccgcgccagccaaattgtgataacgcctgcatccaggtgtcgtccaggcccgcgtgaatagtcagcggctcgccagtaaaaggatgcgtcaatgacaactgactggcatgtagcattaaccgctggaggccaaaatgctcagcaccgctgcgattctggcgtaaatcgccatgtttgctatcgccaataatcggatgacgcaaatgggcaagatgtcggcgaagctgatgtttgcgtccggttttcggctccagttccaccaggccgtagcgcgtggtcgggtaacgtccggtcgctaccggcatttcgacgctcgccagttgcaaggtgtcgatgcgttgctcttgcaggtatttacttgcgccaagtgccagcgtgtcggttgcgcacagtaaggcggtagtttcaggcgtaatcacttttgcaacgttctcatagccttgcttcatagcaagcccggttgtcacgtcactgtgcggcacgccgagataactgatattacgatgcccctggtcatacagccgttgcatcaggattttgattgccccttcgtcgtcataacagaccgaagcaaagccttttgcgtcacgcgccagcagaaccagcgatgactgccagtgggctaacatttcttctgttatgccagtaaaaccgaacagcactacgccgtcgatattacgccgtttcagcactcccaaatgttcggcaactaattgcggggaaaactgactttccatcatgattgggtcgtaaccttgttcatagaacgctggcagcatggtttgaacggcgagattttctgacaacgaatccagacgggtaacaatgatggcgaccactttatcgcataggttccagcgctggttacccaccatactgcggcgcacccagcatctcctgacggatagcgcttcctgagtttgcgccagtaaacgatccgccagccctggctccagtcctcccccgccctgcagcgcctgtagtaacaaacgttccagcggtgtatcgaggccaataacatggacttcatctttgccaggaaaccactgctgggtaatcgcccgtcccaacgccacgcgcacgacggcggttaattcatgtggatcgctttggatgggcgcatgttccgccagcgtttcgagaatggtgcgcatatcgcgaatcggtactttttcatcgaggagattttgcagcactttatgcagtgtggtgagcgtgacgacgccaggaacgagatcttccgtcagctttggcatctcctgggcgacgcgatccaacagctgttgcgcctcctgacgaccaaacagctctgcggcatgctggctaatgaggtggttaagatgcgttgctaccaccgtgctggcctcaaccactgtgtacccctgaatctgcgcctgttcttttagcgcactttcaatccagatagcattcaggccaaatgccggatcgacggtcgcctcaccaggtaacgtcccggcagcggttccagggttaatcgccagccagcgccccggataagcatcaccactgccaatctccacgcctttcatcaaaatgcgatagcgggcaggttgcagatccatattgtcgcgaatgtgcaccactggcggcagaaatcccatctcctgggcaaatttcttgcggatactgcgtatacggcccaacaactcaccatcctgctggaaatcgaccat

SEQ ID NO: 29913 - DNA, 2044 bp, Homo sapiens
  SIMILAR (1328)..(1984): 951254mologous to Escherichia coli damX,accession number U18997,Smith-Waterman Score=1067.
atggagctactagctcatagtattgtcatagcaacatggcgattacgccagaatcgcagcggtgctgagcattttggcctccagcggttaatgctacatgccagtcagttgtcattgacgcatccttttactggcgagccgctgactattcacgcgggcctggacgacacctggatgcaggcgttatcacaatttggctggcgcggtctgcttcctgaaaatgaaagggttgagttcagtgcgccatcgggtcaggatggagatccaaccttaggtctcatcaaggaagtggcatgtgagctgagtgggatgatgagaaggagccagccatgggaagaggccgaggaaagcattccagacagaggggagagcctgctggaagtgtctgggacaccgaacgcaggctggggtgctgagggccttgcagaacgggaagcgctgctcttatgctgctgttgcgggcccatggggccagaccccctcgggctgggctcccccgggtctgtccggggccgtagccgtttgattcaccacgctattagcggcgaggcgttatggcgaagtcgatccagtcgaaggctctctgagtatggaccggctgcccgccagtttgccattgaaaaaggtgcccccgcccttcgcgctatgacctttatcgaacgtgcggcgatgcttaaagcggtcgctaaacatctgctgagtgaaaaagagcgtttctatgctctttctgcgcaaacaggcgcaacgcgggcagacagttgggttgatattgaaggtggcattgggacgttatttacttacgccagcctcggtagccgggagctgcctgacgatacgctgtggccggaagatgaattgatccccttatcgaaagaaggtggatttgccgcgcgccatttactgacctcaaagtcaggcgtggcagtgcatattaacgcctttaacttcccctgcttggggaatgctggaaaagctggcaccaacgtggtctgggcggaatgccagccatcatcaaaccagctaccgcgacggcccactgactcaggcgatggaatttgaagataaggcgcaacagcgagatgtggaaacggcgaggcacttcacattttttcggattattgcaaatgaggataaaaaaaccgggtttccccggtttcagacaatagtgattacggcttcgcacaaaaccatcgatcgtacacgttatacgtacggagcgtggcgctgttatcggccacttctcactgttgaggagtatcgtgcgacgggaagtctgatcacccaaccgaagttccctcctcataaatcttctgaagttcatcgagtgccgcggaatcagggacgctttgtggcggtcaattccacgttgccgactgaacccgcaacggttgcgcctgttcgcaatggcaatgcatcgcgtgacacggcgaaaacgcaaaccgctgaacgtccgtccactacgcgcccagctcgtcagcaggcggtgattgaaccgaaaaaaccgcaagcaaccgtgaaaacggagccgaagccggtagcacagacgccgaagcgtactgaaccagctgcccctgtggcgagcacgaaggcaccggctgcgacttctacgccagcaccaaaagagacggcgactacggctccagtacagacggcatccccggcgcaaaccacagcaacacccgctgctggggcgaagaccgcaggtaatgttggttcgttgaaatcggcaccgtccagccattacactctgcagctgagcagttcctctaactacgacaacctgaacggttgggcgaagaaagagaatctgaaaaactacgttgtctatgaaacgacgcgtaatggtcagccgtggtatgtcctggtttctggcgtgtacgcttcgaaagaagaggcgaaaaaagcggtatctacattgccagcagatgtccaggccaaaaacccgtgggcgaaaccgctgcgtcagcggcaccgggatcttcggggcgatgaacgaagggatgaccggcgatccgagtattttaatcgccaagtcatttcttga

SEQ ID NO: 29914 - DNA, 761 bp, Homo sapiens
  SIMILAR (243)..(1): 961254mologous to Escherichia coli K12 putative alpha helix protein,accession number AE000341,Smith-Waterman Score=426.
agcacaatccatcgcccgcagccagtatagcggattggtttcggttgatttaccttgcagcgcccagatgtcgctacattcagtagaaagatagtcagccagttgataaaccggaattttttcttctgctggcgtatcaatggctggcttattgtgattctgcacgcaacccagcaatgccagacatggcagccctgccagccacagccgttggtgcaataatcgatgaaaaatgtgtcgcatattcaccagacttaaagcctatcccagtgggcgtaattgttgcagacagtctggacatggacagcgcggagaaaccggagcgtacatatcgaatttatatcgcagccgtggtgatgactaccggcaactctggcacagatggaataatcgatcgccatgaagaatcgcgcaacgccctaaagatattagggtgccagcaaactattcatcttaattttgctgacacccgcgctcatttacagctcaatgatatgatttccgccctggaagacatcattaaaaatcaaattccttctgatgttgaaatcatgcgggtatataccatgcatgatgccgaccgccatcaggatcatcttgctgtttatcaagcttcaatggttgcctgccgaactattccgcaaattctcggctacgaaaccccaagtacctggctttcatttatgcctcaggtttttgaatccgttaaagaagaatatttcacagtcaaacttgctgcattaaaaaaacataaaagctag

SEQ ID NO: 29915 - DNA, 2796 bp, Homo sapiens
  SIMILAR (1432)..(2082): 941254mologous to Escherichia coli hybB,accession number U09177,Smith-Waterman Score=1053.
atggaagcattacttcagcttaaaggcatcgataaagccttcccgggcgtaaaagccctctcgggcgcagcgttaaatgtctatccgggccgcgtgatggcgctggtgggcgaaaacggcgcgggtaaatccaccatgatgaaagtgcttactggcatctatactcgcgatgccggtacgcttttatggctggggaaagaaacgacatttaccgggccaaaatcttcccaggaagccgggattgggattatccatcaggaactgaacctgatcccgcagttgaccattgccgaaaacattttcctcggtcgtgagtttgttaatcgctttggcaaaattgactggaaaaccatgtatgccgaagcggataaattgctggctaaacttaacctgcgctttaaaagcgacgccaaagtttcgttcggcaattcgttcgcccgttgcgtggcaggaggctgcatgaatattcgccgtaaaaaccgcttgtggattgcctgtgccgtgttggcagggctggcgctgactatcggtctggtgctatatgcgctgcgctcgaatatcgatctcttttatacgccgggggaaattctctacggcaagcgtgaaactcagcaaatgccggaagtcggtcagcgtctgcgcgttggcgggatggtgatgccgggtagtgtgcagcgcgatcccaattcgctgaaagtgaccttcaccatttacgatgctgaaggctcagtggatgtctcttacgaaggcattttgccggatctgttccgtgaagggcagggcgttgtggtgcagggcgaactggaaaaaggcaatcatatcctcgcgaaagaagtgctggcgaaacacgatgaaaactatacgccgccagaagttgagaaagcgatggaagctaacctggagcgcaactcaaggagggcacaggggcgagagggccgttgcgaaaccggcagccgctaccaccgcttcacaaccggaaattgcctccgcgcgatgattgttgatctgaataccaacaaagtgatctattcgaaccacccggatctggtgcgtccgattgcgtctatcagcaaattaatgaccgcgatggttgtgctggatgcacgactgccgctggatgaaaaactaaaagtggatatcagccagacgccggagatgaaaggggtctattcgcgcgtacgactgaatagcgaaatcagccgtaaagatatgctgttgctggcgctgatgtcttcagaaaaccgcgcggcggcaagccttgcgcaccattatccctttagagcacatggaaacaaaaaagcacagcctgtagctccgataaagcactgtttcggcaagggggtcatcccgacttaccaacccgatgcaaactgcgaataccggagaatgttatcacgggagacacacggcggcgtctggtgttcggtctggggttctgtctttaccctgaacgccggcttcccgtggggcgtgtggatcgcgtttgacttgctgattggcaccggcttttgcctgtgccggctgggcgctggcgtggcggtatacgtctttaaccgtgggcaataccatccgctggtgcgtccggcgctgttggcgagtctgtttggttactcactgggtggcttgtcgatcactatcgacgtgggtcgctactggaacctgccgtacttctacattccgggtcacttcaacgtgaactcggtactgttcgagacggcggtctgtatgaccatctatatcggcgtgatggcactggagtttgctccggcactgtttgaacgtctggggtggaaggtgtcgctacagcgactaaacaaggtgatgttcttcatcatcgcgctcggtgcgctgctgccgaccatgcaccagtcttcaatggggtcgctgatgatctcggcgggctacaaggtgcatccgttgtggcagagctatgaaatgttgccgctgttctcgctgctgacggcgttcatcatgggcttctcgattgtcatctttgaaggttcgctggtgcaggcgggtctgcgtggcaacggtccggatgaaaagagtctgtttgttaagctgaccaacaccatcagtattgccaaaagtttgatcgcccggcgcttaaaattcgcctttcagaatgcccgcgcgtttgaatatctgatgacccgcttctccacgccggaagaagtttttggtcccctttctattcaggcgctaaaagatgaagggcgctatgaacgtttaaccagcggttacctgccggaagcagaaattgtctttctggatgagatctggaaagcgggcccggcaattcttaataccttgctcaccgccattaacgagcgccagttccgcaacggtgcacacgtagaaaaaatcccgatgcgtctgctggtggcggcctccaacgagctgccggaagcagacagcagtctggaagcgttatatgaccgcatgctgattcgtctgtggttagataaagtctttagagcacactttggcggctggcaaaatatgtatcggcattattcccaatcactgaaatgtgaaatgaatgtcggcgtctatctcccaccaaaagccgcgaatgaaaaattgccggtgctgtactggctttcaggcctgacctgcaacgagcagaatttcattactaaatcggggatgcagcgttacgcggctgagcacaacattattgttgttgcgccggacaccagtccgcgaggcagtcatgtcgcagatgctgaccgttacgatctcgggcaaggtgccgggttttacctgaacgcctttagagcacagtacgggtga

SEQ ID NO: 29916 - DNA, 556 bp, Homo sapiens
  SIMILAR (1)..(360): 991254mologous to Escherichia coli K12 putative hydrolase,accession number AE000394,Smith-Waterman Score=626.
gggcataaagtcgcattgctggacattccggctaatggtgaaattattcgttatggcgaagtgattggttacgccgtgcgtgcaatcccacgcggaagctggatcgacgaatcaatggttgtactaccggaagcgccgccgttacacacgctgccactggcaaccaaagtcccggaacccttaccgccgctggaaggatacacctttgagggctatcgcaatgccgatggcagcgtgggcaccaaaaacctgctcggtatcaccaccagcgtccactgtgtggcaggcgtggtggactatgtagtaaaaatcattgaacgcgatctgctaccgaaatacccgaacgtcgatggcgtgctattgaccagcataggtacgttggccgaagcattccgcggggcttatgacaatatctcccgtgcttcacgtaatatcgccgcgacactggcgattggaatgcgcaacgcgggtcgggcgtttgggctgatcgtcaagtactcaagggttttgttgaccttttcctctgtgacgatggagtacctacgtccagggacag

SEQ ID NO: 29917 - DNA, 2787 bp, Homo sapiens
  SIMILAR (2711)..(2785): 921254mologous to Salmonella typhimurium putative isomerase,accession number AF220438,Smith-Waterman Score=124.
atgattctttccaataacgtgtttgctgatgaaggtcacggtattgttaaatttaaaggtgaagttatctctgctccatgttctattaaaccaggtgacgaagatttaactgtaaatctgggtgaagtagcagataccgtactgaaaagcgatcagaaatctttggctgaacctttcactattcacctgcaggactgcatgctgagtcagggtggaactacttattcaaaagcgaaggttactttcactacagcaaataccatgacgggtcagtctgatcttctgaaaaataccaaagaaactgaaatcggcggcgccactggcgttggcgtacgtattctggacagccagagcggcgaagtaactttaggtactccggtagtaattacgttcaacaataccaacagctatcaggaactgaatttcaaagctccggacaagcacctcacagcccgtcagtacgccagtctgcgcgcagaaaaccggttggatccacggtttgaattcgtggttttccaacgccagactgatggcttcaggcgtgacgatatggtgatagtgattatcattaatatatctgtgactattactccccgtggcggatatgatctccggattgtactgaaagaaaatatcgcgccagaaagcctgtccaaaacgcaaacggggcgcggcatgccaacagcgcaacattgccggcgttatcttgattttgcgccaccgccatcggatatggctgaaatgttcacggcaaagttgccagaccacaacgcatataccacagtggctgacatgataaagccggaggaaacttgcctccggcattactatttacttgcctgtgaccgctgctgccgttcctggcaccatcagctctgtagcaacgataacaatcaccaaaccaacaagcaccggtaccgaggtgcgttttacgacttcaaacggcgagatcttcgccatcccggcaaccgcaacgactacgccagaaacgggcgaaagggtacggccaagcattgtcagaatcaccaataccagcatcaggatgatactcgccgaaccaaacgaggtagcgatagaaatcagactttgaataaagccgatggtgctaagcccctgagcgaataccccagcggcaaccagcagcatcaccacgttagctatgaagtcgttatgaagacatctgataatgaacgtataaaatatgaaattactggccaggcggtgctccagatactgcgcatgaagataaatttttcattgcagactcttattaagcaattactcgtaatgaaatcggctgaggaagatgctttccgacgcgatttaattgacagcataattcgtgattttagcaatagtgattcaggagggccaaaccgaagaacagcgacagctgacaataaaagtatgcttcaatgtcctgcggtaactctggtcaaatatgctggttaccggttcgacgtaaaacctaaagcgaaggccaaaccgaaaacagcgggcatcaaacgtccagtcgttaagatggaaaaaacggcggaaaaaggcggtcgcccggcgtccaacgatgaatatgtcagcgtctcggcgttttcgcccattgtctccccatcgcaagtgccgtggggacagcaagcctttgctgcatatcttgctgaaaataaagatgcctggttggattacgacccggcttctccaggcccttttcgaagctccgggagtgttttggcctttggtcctctcaacggactggtaccccccggccccatggaggaaaacggggaacacagccggcaaatttcgaagaccagtaattgcatagatcacctggtggaggtacggttggttttgggcccctctctcagcacttgctaccagagaggacagctctacaccagagagggaaaaacccccaaaacccgggggccaaaatggggccatgaaacgcggtatgaatacaacatcgccggtgacctgaccgccgtcattgccccggacggcagcagaaacgggacacagtacgatgcgtggggaaaggccgtccgtaccacgcagggcgggctgacgcgcagtatggaatacgatgctgccggacgggtcatccgcctgaccagtgaaaacggcagccacaccaccttccgttacgatgtacttgaccggctgatacaggaaaccggctttgacggaaataatcattatcgcggtaacgaacacttcgatacccagtggaatccgctgccggattacaacaaagataacccggcgcatcgcttccgcgcgttcggaggtacaccaggccactggatcgaatggggccgtttaatgctgcacatccatgctgcactggaagcccgttgcgaacaaccaccagcatggctgctagaagatgccaaaggtctgtttaacgccaccgtgcgcgatgcctgggcacccgatggcgcggacgggattgtttataccgttgactgggaaggaaaaccggtggtccgcgaacgtgtacgttggcctatcgtcgaagcaatgggtacggcctacgcgctctacaccgtcactggcgatcgccagtatgaaacctggtatcaaacatggtgggagtactgcattaagtacctgatggactatgaaaatggttcctggtggcaggagctggatgcggacaataaggtcaccaccaaagtctgggacggcaaacaggatatttatcacctgctgccattgcctggtgatcccgcgtatcccgttagcgcccggcatggctccagcggttgcagcgggtctgctggatattaa

SEQ ID NO: 29918 - DNA, 1976 bp, Homo sapiens
  SIMILAR (966)..(1526): 971254mologous to Escherichia coli similar to E. coli yeiG,accession number U73857,Smith-Waterman Score=978.
atgcaggatcgcaattttgatgatattgcggaaaagttttcccgtaacatttacggcaccaccaaagggcagcttcgacaggctattctgtggcaggatctcgatcgcgtgctggcggaaatgggcccgcaaaaactgcgtgtgctggatgctggcggtggaaaaagggcagaccgcaatcaaaatggccgagcgtgggcatcaggtcattttatgcgatctttctgcgcagatgatcgaccgcgcaaaacaggcggcagaagcaaaagctggcgcgaaggcaataagatccagttgctggaaaacggcgagcaatattatcccgcggtgtttaaggcgattggcgaggcacaagaacgcatcattcttgaaacgtttatctggtttgaggatgacgtcggcaaacaactgcatgcggcactactggcaagcaagccaaacgcgggggttaaaagcggaaagtcttgctggatggctacggttcgccggatctcagcgatgagtttgtcaatgaactgacggcagctggcgtagtgttccgctactacgatccccgccctcgcctttttggtatgcgcaccaatgtgtttcgccggatgcatcgcaaaattgtggtgatcgacgcgcgtatagcctttattggcgggctgaattacttccgccgaggcatatgttccagcttacgttccagaaggctaaaacaggggtttacccggtaccgctttgaagggcccgatttgtccaaggatattccctccggttttgaagcctggaaaaacctgccctggaccagaagcgccggaaacaacgctggttggccaaccttcaatccacaaaagcggaaagagaaacccgccaaccccgggagaaaaccgccgggtatttgctgggtctgggcggccgataaaccagggaaccatccaccgatggatagggcgcagattgcatgcctgcaggtctcgcatgatctgtatcggcattattcgcactcactgaaatatgaaatgaatgtcggcgtctatctcccaccaaaagccgcgaatgaaaaattgccggtgctgtactggctttcaggcctgacctgcaacgagcagaatttcattactaaatcggggatgcagcgttacgcggctgagcacaacattattgttgttgcgccggacaccagtccgcgaggcagtcatgtcgcagatgctgaccgttacgatctcgggcaaggtgccgggttttacctgaacgcgacgcaagcgccgtggaatgaacattacaaaatgtatgactatatccgcaacgagctgccggatttagtgatgcatcattttccggcaacggccaaaaagtctatctctggtcattctatgggcgggctgggcgcgctggtgctggcgttacgtaacccagatgaatatgtcagcgtctcggcgttttcgcccattgtctccccatcgcaagtgccgtggggacagcaagcctttgctgcatatcttgctgaaaataaagatgcctggttggattacggcccggtcattaaaaaagcgctgcatgttgatgtgaaagatgtccccggtgcaggagctgcgggtggtatgggcgcggcgctaatggcgtttcttggtgcggaactgaaaagtggtattgaaatcgtcactacggcgctgaatctggaggaacatattcacgattgtacgctggtgatcaccggtgaagggcgtattgacagccagagtattcacgggaaggtaccgattggtgtcgcaaacgtggcgaagaagtaccataaaccggtgattggcattgcgggtagcctgaccgatgatgttggcgttgtacatcagcatggcattgatgcggtcttcagcgtattgaccagcataggtacgttggacgaagcattccgcggggcttatgacaatatctgccgtgcttcacgtaatatcgccgcgacactggcgattggaatgcgcaacgcggggtga

SEQ ID NO: 29919 - DNA, 470 bp, Homo sapiens
  SIMILAR (3)..(470): 981254mologous to Escherichia coli PUTATIVE PEPTIDASE IN GCVT -SPOIIIAA INTERGENIC REGION (EC 3.4.-.-),accession number D90868,Smith-Waterman Score=795.
gcggtgcagagcatattcgccgctttattcaggcggggatgagcgagcgcgagatagccgctgaactggagtggtttatgcgccagcagggcgcagaaaaagcctcttttgacaccattgtcgccagtggctggcgtggggcgctgccgcacggcaaagccagcgacaagattgttgcagcgggcgagtttgtcactctcgatttcggtgcgctgtatcagggctactgctctgatatgacgcgcaccttgctggtgaatggcgaaggggtgagcgccgaatctcacctgctgtttaacgtctatcaaattgtcctgcaggcacagctcgcaacaatctccgcgattcgccccggcgtgcgctgccagcaggttgacgatgccgcgcgccgggtcattacagaagcaggttatggcgactatttcggacataacaccggtcacgctatcggcattgaaggccatgaagac

SEQ ID NO: 29920 - DNA, 2544 bp, Homo sapiens; identical to SEQ ID NO: 24724
  SIMILAR (1911)..(1432): 961254mologous to Escherichia coli PTS SYSTEM, FRUCTOSE- SPECIFIC IIBC COMPONENT (EIIBC-FRU) (FRUCTOSE- PERMEASE IIBC COMPONENT) (PHOSPHOTRANSFERASE ENZYME II, BC COMPONENT) (EC 2.7.1.69),accession number D90868,Smith-Waterman Score=772.

SEQ ID NO: 29921 - DNA, 476 bp, Homo sapiens
  SIMILAR (10)..(297): 301254mologous to Drosophila melanogaster bZIP transcription factor,accession number Y11837,Smith-Waterman Score=99.
ctggaggctggagggccaagaggcgggaagcttcccgtacgggggccgctgtcacctgcctgtgggagaacccatccagacatgaagagcgccaaaggtattgagaacttggcttttgtcccctccagcccagacatcctgcgccgcttgtctgcgtcgccctcccaaatcgaagtctctgccttgtcctctgacccccaaagagagaattctcagccacaggagcttcagaagccccaggagccccagaagtcaccagagccatctctgccttcagcccctcccaatgtctccgaagagaagctccggtcactgtcgctgtccgagtttgaggaggggtcttacggctggaggaacttccatcctcaatgtctccagcgctgcaacacacctggaggctttctgcttcactactggcctcttggccgtcacgcaaggtattgtagttaatggcctagtaaatattagcattttcc

SEQ ID NO: 29922 - DNA, 1510 bp, Homo sapiens
  SIMILAR (1381)..(1503): 391254mologous to Escherichia coli K12 putative peptidase,accession number AE000326,Smith-Waterman Score=58.
ggctcaaccgccgctgtctggctgggcgcagtgcaatggttcccggagtccgctatctgggcatggcgctggtcactaacctgggcgtctatatggcggggatcgcgctgggggcagtcataactgcgctgatggtggtgttcctgcgtctgatgatgttccgtaaaggcaaattgttaatcgatagcctgtaagaaggaaaatccagatgacattactcgcttcgctgcgcagctggcttaaggcgcaacaactggatgcagtgcttctctcctcacggcagaacaaacagccgcatctggggatctccaccggatcaggttatgtggtgattagccgtgaaagtgcgcacattctggtggattcgcgctattacgttgaggtggaagcccgtgcgcaaggctaccagctgcatttgcttgacgcgacgaacacgcttaccactatcgtcaatcaaatcattgccgatgaacagttgcaaacgctcggttttgagggccagcaggtgagttgggaaaccgcgcaccgctggcagtctgaactcaatgcgaaactggttagcgccacgccggatgtgctgcggcaaatcaaaacgccagaggaggtggagaaaatccgcctcgcctgtgggattgctgatcgcggtgcagagcatattagccgctttattcaggcggggatgagcgagcgcgagatagcccctgaactggagtggtttatgcgccagcagggcgcagaaaaagcatcttttgacaccattgtggggatcctcagagagcttcagaagccccaggagccccagaagtcaccagagccatctctgccttcagcccctcccaatgtctccgaagagaagctccggtcactgtcgctgtccgagtttgaggaggggtcttacggctggaggaacttccatcctcaatgtctccagcgctgcaacacacctggaggctttctgcttcactactgcctcttggccgtcacgcaaggtaaagtccagcgccctcttgaggctcgggccagtggagagcgaggcagagcagtcatcagcatatggggctctcctccgaatcagttgtatgtggtgattaacagtgttagtgtgctcgctatggtgcgtttgcgctattatgttatggtggaagcccgtgtgctagccttccagctgcatttgcctgttcatttgagcaaggtatccactatcgcctatcgaatcatagccgatcatcagttgcatccgttcggtttcatgggccagcagtttagttgtggcaccgtgcacagctgtcagtctttatccatcgctagcatggttcgttcccctcaggatgatctgcggcgcttgttcacgccagagtatgttgtagaatactcctgcctctgcactgtggtgatttgctcgatcgtcgagtgcagatgcatattccccgcttccttcagatgcggatcagccagccccagatcacatctattgcgtagtggcatatgcccctgcagcgcgcgggtatag

SEQ ID NO: 29923 - DNA, 876 bp, Homo sapiens
  SIMILAR (1)..(540): 1001254mologous to Escherichia coli nikB,accession number U00039,Smith-Waterman Score=933.
gtacgtttcatcgcgtttcttggcgtgtcgatgcctaacttctggctggcgtttttactggtgatggcgttttcggtgtatctgcaatggctacccgcgatgggttacggcggctggcagcacatcattttgcctgcggtttccattgcctttatgtcgctggcgattaacgcgcgtttactgcgcgccagtatgctggacgtcgccggtcagcgtcacgtcacctgggcgcgtctgcgcggcctgaacgacaaacagaccgaacgtcgccacatcctgcgcaatgcctcgctgccgatgatcaccgccgtggggatgcatatcggcgaactgattggcgggacgatgattatcgaaaacatctttgcctggccgggcgtcgggcgctatgcggtgtcggcgatttttaaccgtgactatccggtgatccagtgctttacgctgatgatggtggtggtttttgtggtctgtaatttgattgtcgatttgctcaacgccgcgctggacccgcgcattcgtcgtcatgaaggagcgcacgcccagtggtggctgccgtatgacccacaggcgattgatttgccgtcgcgcctgctttcgccggatgcgcagcactggctgggcaccgatcacttaggtcgcgatattttctcgcggctgatggcagcgacccgcgtgtcgctcggttcggtaatggcctgcctgctgctggtgctgacattagggctggttattggcggcagcgccgggttgattggcgggcgcgttgatcaggccaccatgcgcgtcgccgatatgtttatgaccttcccgacctcgattctgtcgttctttatggtttggcgtggctcgggcacccggggcttgacccaaacgtaa

SEQ ID NO: 29924 - DNA, 3474 bp, Homo sapiens
  SIMILAR (3474)..(2623): 971254mologous to Escherichia coli FimD protein,accession number D90732,Smith-Waterman Score=1442.
ttacccgcctaaatacgcacttctcaccgcttcattcgccagcagcgcatcaccagtatcggaaagcactacatggccgttttccagcacgtagccgcgatccgccagctttagcgcctggttggcgttctgctcgacgagaaagatagtcatcccctgctcgcgcagctgctcgatggtgtcgaaaatttgctggatgataatcggcgcaagaccgagcgatggctcatcaagcagtagcaaacgcgggttgctcatcagcgcacgaccaatcgccagcatctgctgttcaccgccggacatggtgcccgcccgctgaatacggcgctcatgcagacgtggaaacagctcatacacccactttatgcgctcctggaactggtcgcgttcagcaaaaaaaccgcccatcgccaggttctcttccaccgtcatccgcgagaagacgcgacgcccttccgggacaatcgccaccgcttcgcgcatgattttcgctgtctgccatgatgaatccccatcgttgcgcgcgttattgcacatcgaggcgtagtgctggttgatttgcagacgcggaatgctgtcactgttgagttctaccgtccagtgaccgttatgcttacgcaccagcacatctggaatgacatactcaggttcgccagtctggatcgactgcccggggcgcggatcgagcgactggatcagattgacggcttctttcagcacatcttctttcagacgcgtgacgcgcattaaagtgcggaagtcgtgattggctaacagatcgagatgatcgctaatgatcagtctggcctcttccagccacggcgtggtcttatcgaattgggagagttggatcagcagacagtcacgcagatcttttgccgccacaccgaccggatcaaaccgttggatccgcttaaggacggcttcaacttcgtcgatgtcgatctcttcatcgcctatactttcgagaatatcttccagcgggacagtcagataaccggtttcatcaacggcatcgacgatagaggtagcaatagcgcggtcagtgtcggaaaacggtgtcagctcaacctgccacatcaggtaatcctgcaaggtctgcgtcgtttcgcccctgaactgggtagcgagtcggtgaacggtacagcttcccgcgaaactgagcgtttctatctcgatgtgcagaagcagttcccgaaagtgaccgcgcagaaagtaatcgtcagcgaagcaggcgcgtcggtttactcggcttccgagctggctgcacaggagttcccggatctcgacgtttcgctgcgtggcgcggtgtctatcgcccgccgtttgcaggatccgctggcggagctggtgaaaatcgatccgaaatctatcggcgtaggtcagtatcagcatgacgtcagccagacgcaactggcccgcaaactggacgcagtagtagaagactgcgtaaacgccgttggcgtcgatctcaacactgcttctgttccggcattcgggcagcaacacagcaggcactgaaagatctgatgggtaacagcagcgaactgcgtaacctgaaagcgtttgacttttactgatgagaaattccgtgtgccgaccgtaaccgacatcatcaaagagctggaaaaaccgggtcgcgatttgcttctgatcaaagaggttaccctgcgtgtaatccgcttcgagatagaatgtgtgctgtttgttatactgtgcactgactcccacgccgttattccagccattacctttgaaactgtacttctcccgggagttgttcaacagatattcggtatcccctgaaaactcgcggatagcgccagtcttcacatagacattcagctggctgttgcctgcggtgatgtcataccccagtatcatgctggcacgccccagcagcgattcgtagtgattccgatgtattggaaaagggtaaaataacggattaacccaagtataaatgagcgagaaacgttgatgtcgaattcttatgactcctccagtatcaaagtcctgaaagggctggatgcggtgcgtaagcgcccgggtatgtatatcggcgacacggatgacggcaccggtctgcaccacatggtattcgaggtggtagataacgctatcgacgaagcgctcgcgggtcactgtaaagaaattatcgtcaccattcacgccgataactctgtctctgtacaggatgacgggcgcggcattccgaccggtattcacccggaagagggcgtatcggcggcggaagtgatcatgaccgttctgcacgcaggcggtaaatttgacgataactcctataaagtgtccggcggtctgcacggcgttggtgtttcggtagtaaacgccctgtcgcaaaaactggagctggttatccagcgcgagggtaaaattcaccgtcagatctacgaacacggtgtaccgcaggccccgctggcggttaccggcgagactgaaaaaaccggcaccatggtgcgtttctggcccagcctcgaaaccttcaccaatgtgaccgagttcgaatatgaaattctggcgaaacgtctgcgtgagttgtcgtcgtttgctgtttccgggtgttccagtgattacgtcatggcgaccaaagatggccgtatgattttgaccgatggaaaacagaaaacgatatgactgacctttatgttcgctttgatctgctagcgtactcttcgcctgggtcgcatcgaacgaaattgctccgaaatcgccgaggttaaatcccagaccaaacatggcggcacggtaatattcagcatattgtccaccaccataccaggtcgttccccacggtccgacccactgcaacgtggcctgggcaaatttgctctcctgctgttcattactattggttctgtatttcgccagtgtcaccgcgtatttgattcgcccctgacgctggagtaatggcacactggagaacggtacgctgtagctattgacgctgccgtccgcttctttgatttcaactaacaaatcaccgctcgacgacgtggaatagagatcactaatttcaaaagcaccaggcgatacataagtttggtaaatggtgtaaccattttgcttaatcgttatctgggcattgcttttggcgataccacgcaccacaggcgcaaaccctttcaggctgtctggcagcatgttgtcatctgacgccagctgcacaccacgaaagctgacactatcgaaaaaatcgcctgcagtataatcatcacctacggtcagttcgcctttcagaggaataaccgcccgttgcaaatagctgctgagattcttccattctgcggtttggccactactacgactccatgttgaattgttgcgcaatctccatgggcctaaattaacgccactgtttaaattcagaaaatagctgtcgccagaatcactgtctgcgctgctatgaatactgttagccccgctaaacgaatatcccagtaatagcgcgtt

SEQ ID NO: 29925 - DNA, 1275 bp, Homo sapiens
  SIMILAR (823)..(1272): 1001254mologous to Escherichia coli outer membrane protein,accession number L37088,Smith-Waterman Score=804.
atggaagaatctcagcagctatttgcaacgggcggttattcctctgaaaggcgaactgaccgcgattttttcgatagtgtcagctttcgtggtgtgcagctggcgtcagatgacaacatgctgccagacagcctgaaagggtttgcgcctgtggtgcgtggtatcgccaaaagcaatgcccagataacgattaagcaaaatggttacaccatttaccaaacttatgtatcgcctggtgcttttgaaattagtgatctctattccacgtcgtcgagcggtgatttgttagttgaaatcaaagaagcggacggcagcgtcaatagctacagcgtaccgttctccagtgtgccattactccagcgtcaggggcgaatcaaatacgcggtgacactggcgaaatacagaatcaatagtaatgaacagcaggagagcaaatttgccagggttgagtacgacgagacgggaaagtgctgcgcatccggcgaaagcaggcgcgacggcaaatcaatcgcctgtgggtcatacggcagccaccactggctgcgcggcctgaacgacaaacagaccgaacgtcgccacatcctgcgcaatgcctcgctgccgatgatcaccgccgtggggatgcatatcggcgaactgattggcgggacgatgattatcgaaaacatctttgcctggccgggcgtcgggcgctatgcggtgtcggcgatttttaaccgtgactatccggtgatccagtgctttacgctgatgatggtggtggtttttgtgcttctggacgggaacgcggatgatatcatgactaaccgtagctcgtaccccgtagctgcgacttctactgtaactggcggttacgcacagagcgacgctcagggccaaatgaacaaaatgggcggtttcaacctgaaataccgctatgaagaagacaacagcccgctgggtgtgatcggttctttcacttacaccgagaaaagccgtactgcaagctctggtgactacaacaaaaaccagtactacggcatcactgctggtccggcttaccgcattaacgactgggcaagcatctacggtgtagtgggtgtgggttatggtaaattccagaccactgaatacccgacctacaaacacgacaccagcgactacggtttctcctacggtgcgggtctgcagttcaacccgatggaaaacgttgctctggacttctcttacgagcagagccgtattcgtagcgttgacgtaggcacctggattgccggtgttggttaccgcttctaa

SEQ ID NO: 29926 - DNA, 617 bp, Homo sapiens
  SIMILAR (3)..(434): 961254mologous to Escherichia coli DNA polymerase III alpha chain,accession number U70214,Smith-Waterman Score=692.
tttgccggctggatggccgttccgggcggctggaagtgatgttgtttcctgacgccctggattaataccagcaattgctggaaaaagcccgcatacttatcgtcagcggacaggtcagctttgatgacttcagcggtgggcttaaaatgaccgctcgcgaagtgatggatattgacgaagcccgggaaaaatatgctcgcgggcttgctatctcgctgacggacaggcaaattgatgaccagcttttaaaccgactccgtcagtctctggaaccccaccgctctgggacaattccagtacatctctactatcagagggcggatgcacgcgcgcggttgcgttttggcgcgacgtggcgtgtctctccgagcgatcgtttattaaacgatctccgtggcctcattggttcggagcaggtggaactggagtttgactaatacaggaatactatgagtctgaatttccttgattttgaacagccgattgcagagctggaagcgaaaatcgattctctgactgcggttagccgtcaggatgagaaactggatattaacatcgatgaagaagtgcatcgtctgcgtgaaaaaagcgtagaactgacacgtaaaatcttcgcc

SEQ ID NO: 29927 - DNA, 392 bp, Homo sapiens
  SIMILAR (392)..(279): 1001254mologous to Escherichia coli f561,accession number L10328,Smith-Waterman Score=180.
tcgacgttggcatagatggaaccgcgcaggacgttctctcttgtgcctggcttctgtggctcgacattgcgtctctgctggtcaccacaccgatgtgcagaccagcggttcccccttctcactgctgaacccgtcccctgcctgaacacctgcagctctgtttcccggcgatggaggctcgctgtcaccagcttgctgccgggccgttcccatgggagtctttgtgtgccatctgttttcatttgggcatttgggtgaagactgagaagcggcacttcaaacagcacgccgccaatacctaatcctatgccgcgaaatttgacgttgccgataaacaaaccgacgactgccaccaaagccagaatactgaccgttaatgctatatcactcat

SEQ ID NO: 29928 - DNA, 1548 bp, Homo sapiens
  SIMILAR (799)..(1326): 1001254mologous to Escherichia coli purine repressor (purR),accession number J04212,Smith-Waterman Score=914.
atgatgcctcttcatgtatttgagcctccgtcggtgctactggcggcgggcgacaagccgattatcttccgcacgatggacatcggcggcgataaaagcattccttatctgaatattccccaggaagagaacccgttcctcggctatcgcgcggtacgtatttacccggaatttgctggcctgttccgcactcaactgcgggccattttgcgcgccgccagtttcggcaacgcccagttgatgatcccgatggttcacagcctcgatcagatcttatgggtgaaaggcgagatccaaaaagcgatcgttgagcttaagcgcgatggcctgcgtcatgcagagacgattacgcttgggatcatggtggaagttccgtcggtgtgctacatcatcgaccacttctgcgatgaggtcgatttcttcagtatcggctccaacgatatgacccagtatctgtatgcggtcgatcgtaataacccgcgcgtatcgccgctatataacccgattacgccatcgttcctgcgcatgttgcagcaaatagttaccactgcgcatcagcggggcaaatggggatatgatgtcaaagcgagttgtcaggccagcaggcaaagcctttcaggcattacgcaggactggagtatcgctgatgggcaatggctggttttttcggatatgaccaataacgccagcggtggggccgtatttttgcaacaaggagcggaattttcactattaccagaaaatgaaactggaatgactctgtttgccaataacattgttggagtccattggagaggacacgtgatcaacaaaacacgtttcgtcgctgaagaaacgcgcaacgccgtgtgggcagcgattaaagaattacactactcccctagcgcggtggcgcgtagcctgaaggttaaccacaccaagtctatcggtttgctggcgaccagcagcgaagcggcctattttgccgagatcattgaagcagttgaaaaaaattgcttccagaaaggttacaccctgattctgggcaatgcgtggaacaatcttgagaaacagcgggcttatctgtcgatgatggcgcaaaaacgcgtcgatggtctgctggtgatgtgttctgagtacccagagccgttgctggcgatgctggaagagtatcgccatatcccaatggtggtcatggactggggtgaagcaaaagctgacttcaccgatgcggtcattgataacgcgttcgaaggcggctacatggccgggcgttatctgattgaacgcggtcatcgcgaaatcggcgtcatccccggcccgctggaacgtaacaccggcgcagggccgccttgccggttttatgaaggcgatggaagaagcgatgatcaagttgatggggacatccagtttttcttttccacgaacaccatcacgggtcgcggtcatttccgtaccatggtcgatggcatctgtccatgtaaagacggaaatctgcgttttaacaggattctcgagcatcgggaaccattctacccccagatcccagctaccttcgcgtacgcctga

SEQ ID NO: 29929 - DNA, 524 bp, Homo sapiens
  SIMILAR (385)..(197): 961254mologous to Escherichia coli prolipoprotein signal peptidase (lsp),accession number K01990,Smith-Waterman Score=322.
gggccatcgtcaagtttaagcgtaacgtgcaccaggacggcggctattgctctgtacagattcaacaatgcaggtttgctcttatatttaaggatttttgccggatgcggcataacggccttatccggcgtacgatttcgcagcaatctgtaggccggataagatgcgtcagcatcgcatccggcagggtttattattgttttttcgctctagaaggcaaaaaaccttccagctcaatcagtgccgcaccgacacagatggcagtatcggcaaggttgaaggtggcgaagtgccagtcgccgacgtagaagtcgatcatatcgacaactaagccgtgccacaggcggtcgaacaggttgcccagcgcgcccccaataatcagcgcgactcgagtgcacagacaaatgcgatacagcaccagcagcggggccgccgctttactatccatcacggttacgccgtcgtgatcaataaaaacgtggtagcgggggatgattttaccattcgccacgtgaactgtgaag

SEQ ID NO: 29930 - DNA, 1562 bp, Homo sapiens
  SIMILAR (1)..(417): 971254mologous to Escherichia coli Aconitate hydratase (EC 4.2.1.3),accession number D90765,Smith-Waterman Score=691.
atgtcgtcaaccctacgagaagccagtaaggacacgttgcaggccaaagataaaacttaccactactacagcctgccgcttgctgctaaatcactgggcgatatcacccgtctacccaagtcactcaaagttttgctcgaaaacctgctgcgctggcaggatggtaactcggttaccgaagaggatatccacgcgctggcaggatggctgaaaaatgcccatgctgaccgtgaaattgcctaccgcccggcaagggtgctgatgcaggactttaccggcgtacctgccgttgttgatctggcggcaatgcgcgaagcggttaaacgcctcggcggcgatactgcaaaggttaacccgctctcaccggtcgacctggtcattgaccactcggtgactttcgatcgtttggccgatgatgtgcatttgaagaacgggcccttcagcatatcatttatggcgccattccctgaacaccgggtgcaaggtgcgttgcagcgcgtcgttttgcgcaagaacataaagacattttggaccataaggcataactgcctgcgcctggcttcagttcagggctttcttcagatgttccgccagctcggcaatgcgtccggcgaatcgttatcgataatgatgtgcttacgttctgtttgcggcggtacgcgaatgccgaccagttcagcaagtggcgcgctctggctccagtcaatatcacttgcctgccactggacctgcaggcagactcgctccctcggtctgacgggttgtgatgataaaaaagccgaaacagaaacgctcccgcctgccaatagtcaacctgccgcaccagctcctgaagcgaaacctactgaagctcctgttgcaaaagcagaagctaaacctgaaacacgtgcgcaaccggtggtcgatgaacaagcggttttcgacgaaaaaatggatgtctatatcaagtgctacaacaagttacagatcccggtacagcgcagtctggcgcgttatgctgactggctgaaagattttaaacaggggcctaccggtgaagagcgtactgtttatggcatctacggcattagtgaatccaccctcgctgagtgtgaaaaaggcgtaaaaagtgctgtggcgttaacgcctgcgctgcaaccaattgatggcgtggcgcgacgggaaaaagctgataatgatatggctccgctccagcaaaagctggtggtggtgagcaacaagcgggaaaaaccgattaacgatcgccgttcgcgccagcaggaagtgactccggcaggcaccagtatacgctatgaggcaagcttcaaaccgcaaagcggaggaatggagcagacgtttcgcctcgacgcccagcagtaccacgccctgacagtgggcgataaaggcgtgtccgccatagggcatcaccattttctggctatcgggcagggcggcatgaagttcactggaacatgctgttggcaccagcagatcatcactggcgcagatgatttgcaccgggcagcggatgcgatccgcatggtgactaaagtcagcgcgtttgagggcgttaagtcgacgca

SEQ ID NO: 29931 - DNA, 1043 bp, Homo sapiens
cgaaagatggcccgcagatgaccaccgccgaaaaggtacggattttccttttcggcgtgtttgaactgctggcctttatcgcccactgtcagggcgtggtactgctgggcgtcgaggcgaaacgtctgctccattcctccgctttgcggtttgaagcttgcctcatagcgtatactggtgcctgccggagtcacttcctgctggcgcgaacggcgatcgttaatcggtttttcccgcttgttgctcaccaccaccagcttttgctggagcggagccatatcattatcagctttttcccgtcgctgttgcataaaacgaaacgatgcggcgacgacatttaagccgtcattgaccagatccgatttaccgctgatctccatgccttccagcagtgccagttctttgccttccactgaaatggtcattttttccagtgacagtttttgatttcctacacgctcaccaaaacttgccagcgtgctggaaccgtcggttttcagattattaaaggtcaactgcactttctggttgtattcgttaactgcgtctatccgaccactttgcgcctccccggaaagggagatggctttgccgtctctgtcagcatttaactggaactcgccgccgctaaaggcgactttttcatccttttgctcgtaattcagtggcttgagcgaaatatcggaactggaatcaccgctgtaaccaatgcgcgagttaatctcaaaaggcgtttcaccttttgccatatcaaacagtggtttgcttacttcgttattaaccagcgtggtttgaattgatgccatcgacgggatcaggttcagttttttaagctgggcaagcgggaagggaccatgatcaaccgattcgttgaagatgacgctctgaccgcttttaatccacggattttctttcccggcaatgggtttcaccaacagttgcaactggctgctgaatacgccgcgatgatagttttgataactcacttccaggttggattcaggagctgtcagtttgagttgcgcgttcgcctgcgcgaccat

SEQ ID NO: 29932 - DNA, 3312 bp, Homo sapiens
  SIMILAR (3201)..(3266): 361254mologous to Homo sapiens geranylgeranyltransferase type I beta-subunit,accession number L25441,Smith-Waterman Score=40.
atgcagagtgatggctgttttagtacttcaggtggaattcgtccttttcatcttcagaactggaagcagaaagttaatcagactaagaaagcagaatttgtacgcacagcagaaaaatttaaaaatcaagtaattaacatggaaaaagataaacacagtcatttctacaaccaaaaaagtgacttcagaattgagcatagtatgctagaagaattggaaaataaattgattcacagcaggaaaacagaaagagcaaaaatccagcaacaattggccaaaatacataataatgtaaagaaacttcagcatcaattaaaagatgtgaagcctacacctgattttgttgagaagctcagagaaatgatggaagaaattgaaaatgcaattaacacttttaaagaagagcagaggttgatatatgaagagctaattaaagaagagaagacaactaataatgagttgagtgccatatcaagaaaaattgacacatgggctttgggtaattcagaaacagagaaagctttcagagcaatctcaagcaaagttcctgtagacaaagtaacaccaagtactcttccagaagaggtactagattttgaaaaattccttcagcaaacaggagggcgacaaggtgcctgggatgattatgatcaccagaactttgtaaaggtgagaaacaaacataaagggaagccaacatttatggaagaagttctagaacaccttcctggaaaaacacaagatgaagttcaacagcatgaaaaatggtatcaaaagtttctggctctagaagaaagaaaaaaagagtcaattcagatttggaaaactaaaaagcagcaaaaaagggaggaaattttcaagttaaaggaaaaggcagacaacacacctgtgctttttcataataaacaagaggataatcaaaagcaaaaagaggaacaaagaaagaaacagaaattggcagttgaagcttggaagaaacagaaaagtatagaaatgtcaatgaaatgtgcttcccagttaaaagaagaagaagagaaagagaaaaaacatcagaaagaacgccagcgccagtttaagttaaaattactactagaaagttatacccagcagaagaaagaacaggaagaatttttgaggcttgaaaaggagataagggaaaaggcagaaaaggcagaaaaaaggaaaaatgctgctgatgaaatttccagatttcaagaaagagatttacataaacttgaactgaaaattctagatagacaggcaaaggaagatgaaaagtcacaaaaacaaagaagactggcaaaattaaaagaaaaggttgaaaacaatgttagtagagatccctctaggctttacaaacccaccaaaggttgggaagaacgaaccaaaaagataggaccaacaggctctgggccacttctacatatcccacatagtttgagagctagagctagaaataaaaccttaatgagggttgcaaacctacatgcccatatgaaccagccaaacaacatgcaggaaggaggttttgaagacgtgccagtgcagaagcagacctgcaccggccagaacaccaggttcaaggcgtttgttgccatcagggacagtggccacactgatctgggtgttaagtgctccaaggaggtggccactgccatctgcggggccatcatcctggccaagctctccgttgtgcccatgcgcagaggctactgggggaacaagatcggcaagccccacaccatcccttgcaaggtgacaggctgccacggctctgtgctggcgcgggtcatccctgcgcccaggagcactggcatcgtctcggcccccatggccaagaagctgctgctgatggcagctatcaatgactgctacacctcagccaggggctgcactgccatcctgggcaacttcgtcatggtcattttttatgccatctctaaggtctacagcaggctgaaccctgacctctggaaggagactgtattcaccaagtctccctatcaggaattcactgaccacctcctcaagacccacaccagagtctccgtgcagaggacccaggctccagcggtggctacaacatcggatataccatcctcaggttctacagagccagaattgtctcaaagcgtacttgatgcttttgaccttgcgcttcccaagataaaaattctgacggagggatttgtggacttgattttcacaaggcctgcgaggtgtttacaagcctcgagggctttgagtagaaaagcacaggagggttctttctctccgcgggcactgattccgggtcgcggcggacgtcgcttccggagcagcatggcggccactgaggatgagaggctagcagggagcggtgagggagagcggctggatttcttacgggatcggcacgtgcgatttttccagcgctgcctccaggttttgccggagcgctattcttcactcgagacaagcaggttgacaattgcattttttgcactctccgggctggatatgttggattccttagatgtggtgaacaaagatgatataatagagtggatttattccctgcaggtccttcccacagaagacagatcaaatctaaatcgctgtggtttccgaggctcttcatacctgggtattccgttcaatccatcaaaggtctcacttcatgctgtattaccttcatctgaattctgggtggtaaaaggaactagatattccaagtggtatcacatagaaccgtcactgagagtggtgactgagcgtctaggagacagattaggccaagagaatgctcctggaacagctcatccttatgatagtggccacattgcaatgacctacactggcctctcatgcttagttattcttggagacgacttaagccgagtaaataaagaagcttgcttagcgggcttgagagcccttcagctggaagatgggagtttttgtgcagtacctgaaggcagtgaaaatgacatgcgatttgtgtactgtgcttcctgtatttgctatatgctcaacaactggtcaggcatggatatgaaaaaagccatcacctatattagaaggagtatgatacatcttcagggtaaatttctggtagtggaattgcctgatcaaaagtcctatgacaatggactggcacagggagctggacttgaatctcatggtgttctcattgttcagttcccacctatgagtgagaacatgcggtgtttggttttctgtccttgcgatagtttgctcagaatggtggtttccagcttcatccgtgtccctacaaaggacgtgaactcatccgtttttatggctacatag

SEQ ID NO: 29933 - DNA, 3390 bp, Homo sapiens; identical to SEQ ID NO: 4901
  SIMILAR (3390)..(2749): 981254mologous to Escherichia coli formylglycineamide ribonucleotide synthetase (EC 6.3.5.3),accession number M19501,Smith-Waterman Score=1123.

SEQ ID NO: 29934 - DNA, 2586 bp, Homo sapiens; identical to SEQ ID NO: 25081
  SIMILAR (1630)..(2283): 1001254mologous to Escherichia coli O157:H7 putative transport protein,accession number AE005600,Smith-Waterman Score= 1090.

SEQ ID NO: 29935 - DNA, 3144 bp, Homo sapiens
  SIMILAR (922)..(1386): 981254mologous to Escherichia coli AccA, alpha subunit of acetyl-coA carboxylase,accession number D49445,Smith-Waterman Score =784.
atgaaactgtcgaaggaaaaatgcgaccaggtcaacgccattgagcgtgataaggcgctggcatgggtggagcgcaatattaaagtaccactgaccgaaccacaaaaagcgggtatcgcgtcattttgtccctataacattggccccggtaagtgtttcccgtcgacgttttataagcggctgaatgctggtgatcgtaaaggtgcatgcgaagcgattcgctggtggattaaggatggcggacgcgattgccgcattcgttcaaataactgttacggtcaggttattcgtcgggaccagtacgcgcttgagccaattaaaatgttatctcaagagaaatggacgatgagtgatatagcattaacgctcagtattctggctttggtggcagtcgtcggtttgtttatcggcaacgtcaaatttcgcggcataggattaggtattggcggcgtgctgtttggtgggatcatcgtcggccattttgtttctcaggcggggatgacattaagtagcgatatgctgcatgttattcaggaatttggcctgatgggaagatcccccggcgcgctcggcaacctgttcgaccgcgtgtggcacggcttcattgtcgatatgatcgacttctacgtcggcgactggcacttcgccaccttcaaccttgccgatactgccatctgtgtcggtgatccagacaccccgggaaacccaaaaacgaacagctttacagtcgcgctatttctgcggcattttgctcgacgacgggcagtcagaagaaccaaagttggagtgcgacaacaaagcaacgcgcggaaaccattgataattacctttccggcgctggtaaccacctttcacgactcaatgcgaccgcttacctcaccaaaaccagtaaatattgctcgggtagcaaattaccccccagacgagccgattgcagagctggaagcgaaaatcgattctctgactgcggttagccgtcaggatgagaaactggatattaacatcgatgaagaagtgcatcgtctgcgtgaaaaaagcgtagaactgacacgtaaaatcttcgccgatctcggtgcatggcagattgcgcaactggcacgccatccacagcgtccttataccctggattacgttcgcctggcatttgatgaatttgacgaactggctggcgaccgcgcgtatgcagacgataaagctatcgtcggtggtatcgcccgtctcgatggtcgtccggtgatgatcattggtcatcaaaaaggtcgtgaaaccaaagaaaaaattcgccgtaactttggtatgccagcgccagaaggttaccgcaaagcactgcgtctgatgcaaatggctgaacgctttaagatgcctatcatcacctttatcgacacgtgtgttagcaggaaccgcgggctttccgttctcaccggcaacgtcggcataaacggcggcaactcaggcgtacgcgaaggtagctgggatctgggggtagaatggttcccgatgctcgagaatcctgttaaaacgcagatttccgtctttacatggacagatgccatcgaccatggtacggaaatgaccgcgacccgtgatggtgttcgtggaaaagaaaaactggatgtccccatcaagtttttatggtgctacgccagtaacacattgatcaatcaacatggcgacatctatcacacccatgaggccaacgcacagcagcagccgcacccgaaagagatgctgtcgacgataatgcagaccttggcctatgtggccgtgatggcgatgcagtgtttgtcacccccgaaaggtctgttgataaacgacctgcaccgccgtgtgcataacagcggtcactggacacaaaacggtgccagcatcagccagtttgagatgcatgtgcgggcgattaccgatctgccgttaccgcaaccagtggtgaataatccgtcggtgatgatcaatctgattggtagcgatgtgaattatgactggctgaaactgccgctggtgcatctgcactggtacgacaaagaagtccgtccggggcgtaaagtggggcatctgaatttgaccgacagcgacacatcgcgtctgactgcgacgctggaagccttaatcccgctgctgccgccggaatatgccagcggcgtgatttgggcgcagagcgtttacgccgcatccggcaacggtgccgactgcctgatgcgacgcttgcgcgtcttatcaggcctacaaattcccgcaccctccgtaggccggataaggcgtttacgccgcatccggcaatggtgccgactgcctgatgcgacgcttgcgcgtcttatcaggcctacaaattcccgcaccctcctctccgagagtcttgagagcctaccttccggcaaaaacgcccgagaagtgatcgccgccgtgaaggacaaactggaaacgctgaaaagtagtctgccggaaggcgtggagatagttacaacatacgatcgcagccagctcattgaccgcgccatcgacaacctcagcggcaagttgctggaagagtttattgtggttgatcaagcaaaaggaggttttgaagacgtgccagtgcagaagcagacctgcaccggccagaacaccaggttcaaggcgtttgttgccatcagggacagtggccacactgatctgggtgttaagtgctccaaggaggtggccactgccatctgcggggccatcatcctggccaagctctccgttgtgcccatgcgcagaggctactgggggaacaagatcggcaagccccacaccatcccttgcaaggtgacaggctgccacggctctgtgctggcgcgggtcatccctgcgcccaggagcactggcatcgtctcggcccccatggccaagaagctgctgctgatggcagctatcaatgactgctacacctcagccaggggctgcactgccatcctgggcaacttcgttgatacgacttcggttgattcgccgtcgatctctgtacacggggatcctcgagagctcagacaattatcagcctttatccggcgttctaaggtgtttatcccactatcacggggctgcagctcgcatgcctgcaggtctcatagcgtatactggtgcctgccggagtcacttcctgctggcgcgaacggcgatcgttaa

SEQ ID NO: 29936 - DNA, 1386 bp, Homo sapiens
  SIMILAR (661)..(930): 1001254mologous to Escherichia coli K12 required for the efficient incorporation of molybdate into molybdoproteins,accession number AE000111,Smith-Waterman Score=454.
atgcgagttgtcatactgggaagtggtgtggtaggcgttgccagcgcctggtacttaaatcaggcaggacatgaggtcaccgtcattgatcgggagccgggggccgccctggaaaccagtgccgcgaatgccgggcaaatctcccccggatatgctgcaccgtgggcggcaccaggtgtgcctttaaaagcgattaaatggatgttccagcgccatgcgccgctggcggttcgtctcgacggtacgcagttccagttgaaatggatgtggcaaatgttacgtaactgcgacaccagccactacatggaaaacaaagggcggtgctttgagctgccagttgctgtgtacgcaggtggtcaggcggtgctggttaagcaatgcaaagccatcggtggccccgatcgcgctccagatacgctcaataccatgcccatttttaaagcgtgtacgcccgacaaccggcgtgccgtctggcgtcatcgggcgcagaccagtccagaaagtcgcctgctcgacatgaccgccgcgtggatagagatcgcgaaccaccatctccagcgtttcacgacgcggttgcaacagctcggtattaaaaccaacaatctccggcattccggcaaaacgaatgcggttattgtatacatgatacaatcgatctcgctggtggatgaaatgagttgccatctggtgctcaccacgggcggaactggcccggcgcgtcgtgacgtaacgcccgatgcgacgctggcagtagcggaccgcgagatgcctggctttggtgaacagatgcgccagatcagcctgcattttgtaccaactgcgatcctttcgcgtcaggtgggcgtgattcgcaaacaggcgctgatccttaacttacccggtcagccgaagtctattaaagagacgctggaaggtgtgaaggacgctgaggcgtaccgtactgcattcagttgctggaagggccatacgttgaaacggcaccggaagtggttgcagcattcagaccgaagagtgcaagacgcgacgttagcgaataaaaaaatccccccgagcggggggatctcaaaacaattagtgggattcaccaatcggcagaacggtgcgaccaaactgctcgttcagtacttcacccatcgccagatagattgcgctggcaccgcagatcagcccaatccagccggcaaagtggatgattgcggcgttaccggcaatgttaccgatcgccagcagggcaaacagcacggtcaggctaaagaaaacgaattgcagaacgcgtgcgcctttcagcgtgccgaagaacataaacagcgtaatcaggcgtttaatcgcaaacagagtgttttgcgggttcgtcactgcctgacgtttagccggctgaccaactag

SEQ ID NO: 29937 - DNA, 730 bp, Homo sapiens
  SIMILAR (123)..(707): 981254mologous to Escherichia coli K12 required for the efficient incorporation of molybdate into molybdoproteins,accession number AE000111,Smith-Waterman Score=978.
tgctgtaatcattcttagcgtgaccgggaagtcggtcacgctacctcttctgaagcctgtctgtcactcccttcgcagtgtatcattctgtttaacgagactgtttaaacggaaaaatcttgatgaatactttacgtattggcttagtttccatctctgatcgcgcatccagcggcgtttatcaggataaaggcatccctgcgctggaagaatggctgacatcggcgctaaccacgccgtttgaactggaaacccgcttaatccccgatgagcaggcgatcatcgagcaaacgttgtgtgagctggtggatgaaatgagttgccatctggtgctcaccacgggcggaactggcccggcgcgtcgtgacgtaacgcccgatgcgacgctggcagtagcggaccgcgagatgcctggctttggtgaacagatgcgccagatcagcctgcattttgtaccaactgcgatcctttcgcgtcaggtgggcgtgattcgcaaacaggcgctgatccttaacttacccggtcagccgaagtctattaaagagacgctggaaggtgtgaaggaccctgacggtaacgttgtggtacacggtatttttgccagcgtaccgtactgcattcagttgctggaagggccatacgttgaaacggcaccggaagtggttgcagcattcagaccgaagagtgcaagacgcgacgttagcgaataaaaaaatccccccgagcgggg

SEQ ID NO: 29938 - DNA, 628 bp, Homo sapiens
  misc_feature (1)...(628): n = a,t,c or g
ttttttgagagacggagtttagctctttcgcccaggctggaatgcagtggcatgatctcggctcactgcaacctccgccttccagtttcaagtgattctcctgcattcttctcaggattccactgcaatgagctggtggaggaataatttctggatcatcttagctgtggccatcattgttgtctctgtgggcctgggcctcatcctgtactgtgtctgtaagtggcagcttagacgaggtaatggccattttacctctccgaatccagctcaggtgaaccaggaaggtgtgctccatgctctgaattatagcactttatttccctcccctcattttcagccatttccagggctacagaaaacggtttcattagggtgccaattacaaatgggaaccaggacnnnnnnnnnnnnnnnnnnnnnnnnnnnnnnnnnnnnnnnnnnnnnnnnnnnnnnnnnnnncgatttctgtgaggtttctggtgagggttctcctcctggctcgcaggcagctgccttcttgaaaagtccccacaaaaagccgttccttggtgcattcaagcccggacccgaccgtgccncgactacggcgctcaacctagtgtctcagttnttttttctttcgcca

SEQ ID NO: 29939 - DNA, 1371 bp, Homo sapiens
  SIMILAR (1060)..(1122): 471254mologous to Bromheadia finlaysoniana extensin,accession number Y13141,Smith-Waterman Score=51.
atgggctggcaaagacattttcagagcagcgccgtgtttatgtcctgtgcccagttgtttgcgctgatgcgttacaagcccctctggtggtcccccgctgactctttggtaaaagtctgctgcatctgccaattcttttacgagtttgccgtgagcattcctggatgtggcaacctcagtctcaagaagagcgacaggacgccagctcccatgcagagacagatccaggattccactgcaatgagctggtggaggaataatttctggatcatcttagctgtggccatcatcgttgtctctgtgggtctgggcctcatcctgtactgtgtctgtaagtggcagcttagacgaggcaagaaatgggaaattgccaagcccctgaaacacaagcaagtagatgaagaaaagatgtatgagaatgttcttaatgagtcgccagttcaattaccgcctctgccaccgaggaattggccttctctagaagactcttccccacaggaagccccaagtcagccgcccgctacatactcactggtaaataaagttaaaaataagaagactgtttccatcccaagctacattgagcctgaagatgactatgacgatgttgaaatccctgcaaatactgaaaaagcatcattttgaaacagccatttcttctttttggcaaaactgaagagggttcacacaacttattttaaaacaatcaagaatggttgaacttcagtaggtctctgggccctgaaagccagtggtgattttatgaagctctataagataaagcacttccccaaaccttagatgaagacaccccctgcgatcggatgactgcagccagaggagacacatgggtgcttcggctctgaggacttaggaggggtcagccttgtgctgtttggagggaaacttttccatgggaaggaccacggggctccatggctcccacctgtgggaaactactcatttcttggcattctttcccccttcattccctttggtttgcatggttctgagtgatattaaatctcagcatttggttgtgcagacccttctaggctcccatccccagcaaggccctcaccaagcatgctggtctttaccctctcaccccacccacctcctgcactgtgaggctgtgggtgagttacagctgagtgctctcgtgcccaggttcccacaccacatcttcgcgagtttgcaagggcagggagtaccttttgttctcgtgaaccctcccttcctagacaccctgcaaaccccagtgcctttatatgatgtaggccaaattgaccatagagatttgagttttcacctaggttttctccccgtgcttgcaagttgtactgtaacaatggacaaaggacaaaagtt

SEQ ID NO: 29940 - DNA, 423 bp, Homo sapiens
  SIMILAR (106)..(2): 971254mologous to Homo sapiens Human secretory protein of clone CS752-3,accession number W75858,Smith-Waterman Score=195.
tggtacaataatgtctccaaaacccaatattgaaacaggcatgaggcacacactcattactgagaaatagatcagttttggtactctgatgactactggcaacttttcattatttccaaaaggtccagctgcgagttcaaccatgatactctcaccattcttgaagttgggcaacttcagtgttttaattaaattcagacagaaagcaatccccaagatatcctgtaaaatccaagcccacctgtcttcatttcgaaacacagcccaaacaacagctactgctatgcacagtccagagagaaaaataagtctcacttccatgtttttgccacgacatgcaatcgtgcattgtccatatggtatcttatgaattagtgcagcaagacagttgtacagactcattgctgatgctatgcagaaaat

SEQ ID NO: 29941 - DNA, 418 bp, Homo sapiens; identical to SEQ ID NO: 4715
  SIMILAR (223)..(369): 461254mologous to Cloning vector pSport1 beta-galactosidase alpha peptide,accession number U12390,Smith-Waterman Score=86.
  misc_feature (1)...(418): n = a,t,c or g

SEQ ID NO: 29942 - DNA, 756 bp, Homo sapiens; identical to SEQ ID NO: 4717
  SIMILAR (90)..(458): 841254mologous to Homo sapiens Human secreted protein encoded by gene 7 clone HLTDE74,accession number Y41314,Smith-Waterman Score=507.
  misc_feature (1)...(756): n = a,t,c or g

SEQ ID NO: 29943 - DNA, 1787 bp, Homo sapiens
  SIMILAR (312)..(1199): 1001254mologous to Homo sapiens mdm2-A,accession number U33199,Smith-Waterman Score=1582.
gcaccgcgcgagcttggctgcttctggggcctgtgtggccctgtgtgtcggaaagatggagcaagaagccgagcccgaggggcggccgcgacccctctgaccgagatcctgctgctttcgcagccaggagcaccgtccctccccggattagtgcgtacgagcgcccagtgccctggcccggagagtggaatgatccccgaggcccagggcgtcgtgcttccgcagtagtcagtccccgtgaaggaaactggggagtcttgagggacccccgactccaagcgcgaaaaccccggatggtgaggagcaggcaaatgtgcaataccaacatgtctgtacctactgatggtgctgtaaccacctcacagattccagcttcggaacaagagaccctggatcttgatgctggtgtaagtgaacattcaggtgattggttggatcaggattcagtttcagatcagtttagtgtagaatttgaagttgaatctctcgactcagaagattatagccttagtgaagaaggacaagaactctcagatgaagatgatgaggtatatcaagttactgtgtatcaggcaggggagagtgatacagattcatttgaagaagatcctgaaatttccttagctgactattggaaatgcacttcatgcaatgaaatgaatcccccccttccatcacattgcaacagatgttgggcccttcgtgagaattggcttcctgaagataaagggaaagataaaggggaaatctctgagaaagccaaactggaaaactcaacacaagctgaagagggctttgatgttcctgattgtaaaaaaactatagtgaatgattccagagagtcatgtgttgaggaaaatgatgataaaattacacaagcttcacaatcacaagaaagtgaagactattctcagccatcaacttctagtagcattatttatagcagccaagaagatgtgaaagagtttgaaagggaagaaacccaagacaaagaagagagtgtggaatctagtttgccccttaatgccattgaaccttgtgtgatttgtcaaggtcgacctaaaaatggttgcattgtccatggcaaaacaggacatcttatggcctgctttacatgtgcaaagaagctaaagaaaaggaataagccctgcccagtatgtagacaaccaattcaaatgattgtgctaacttatttcccctagttgacctgtctataagagaattatatatttctaactatataaccctaggaatttagacaacctgaaatttattcacatatatcaaagtgagaaaatgcctcaattcacatagatttcttctctttagtataattgacctactttggtagtggaatagtgaatacttactataatttgacttgaatatgtagctcatcctttacaccaactcctaattttaaataatttctactctgtcttaaatgagaagtacttggttttttttttcttaaatatgtatatgacatttaaatgtaacttattattttttttgagaccgagtcttgctctgttacccaggctggagtgcagtgggtgatcttggctcactgcaagctctgccctccccgggttcgcaccattctcctgcctcagcctcccaattagcttggcctacagtcatctgccaccacacctggctaattttttgtacttttagtagagacagggtttcaccgtgttagccaggatggtctcgatctcctgacctcgtgatccgcccacctcggcctcccaaagtgctgggattacaggcatgagccaccg

SEQ ID NO: 29944 - DNA, 1553 bp, Homo sapiens
  SIMILAR (312)..(965): 1001254mologous to Homo sapiens mdm2-B,accession number U33200,Smith-Waterman Score=1184.
gcaccgcgcgagcttggctgcttctggggcctgtgtggccctgtgtgtcggaaagatggagcaagaagccgagcccgaggggcggccgcgacccctctgaccgagatcctgctgctttcgcagccaggagcaccgtccctccccggattagtgcgtacgagcgcccagtgccctggcccggagagtggaatgatccccgaggcccagggcgtcgtgcttccgcagtagtcagtccccgtgaaggaaactggggagtcttgagggacccccgactccaagcgcgaaaaccccggatggtgaggagcaggcaaatgtgcaataccaacatgtctgtacctactgatggtgctgtaaccacctcacagattccagcttcggaacaagagaccctggactattggaaatgcacttcatgcaatgaaatgaatcccccccttccatcacattgcaacagatgttgggcccttcgtgagaattggcttcctgaagataaagggaaagataaaggggaaatctctgagaaagccaaactggaaaactcaacacaagctgaagagggctttgatgttcctgattgtaaaaaaactatagtgaatgattccagagagtcatgtgttgaggaaaatgatgataaaattacacaagcttcacaatcacaagaaagtgaagactattctcagccatcaacttctagtagcattatttatagcagccaagaagatgtgaaagagtttgaaagggaagaaacccaagacaaagaagagagtgtggaatctagtttgccccttaatgccattgaaccttgtgtgatttgtcaaggtcgacctaaaaatggttgcattgtccatggcaaaacaggacatcttatggcctgctttacatgtgcaaagaagctaaagaaaaggaataagccctgcccagtatgtagacaaccaattcaaatgattgtgctaacttatttcccctagttgacctgtctataagagaattatatatttctaactatataaccctaggaatttagacaacctgaaatttattcacatatatcaaagtgagaaaatgcctcaattcacatagatttcttctctttagtataattgacctactttggtagtggaatagtgaatacttactataatttgacttgaatatgtagctcatcctttacaccaactcctaattttaaataatttctactctgtcttaaatgagaagtacttggttttttttttcttaaatatgtatatgacatttaaatgtaacttattattttttttgagaccgagtcttgctctgttacccaggctggagtgcagtgggtgatcttggctcactgcaagctctgccctccccgggttcgcaccattctcctgcctcagcctcccaattagcttggcctacagtcatctgccaccacacctggctaattttttgtacttttagtagagacagggtttcaccgtgttagccaggatggtctcgatctcctgacctcgtgatccgcccacctcggcctcccaaagtgctgggattacaggcatgagccaccg

SEQ ID NO: 29945 - DNA, 1295 bp, Homo sapiens
  SIMILAR (312)..(707): 1001254mologous to Homo sapiens mdm2-D,accession number U33202,Smith-Waterman Score=699.
gcaccgcgcgagcttggctgcttctggggcctgtgtggccctgtgtgtcggaaagatggagcaagaagccgagcccgaggggcggccgcgacccctctgaccgagatcctgctgctttcgcagccaggagcaccgtccctccccggattagtgcgtacgagcgcccagtgccctggcccggagagtggaatgatccccgaggcccagggcgtcgtgcttccgcagtagtcagtccccgtgaaggaaactggggagtcttgagggacccccgactccaagcgcgaaaaccccggatggtgaggagcaggcaaatgtgcaataccaacatgtctgtacctactgatggtgctgtaaccacctcacagattccagcttcggaacaagagaccctggttagacaagaaagtgaagactattctcagccatcaacttctagtagcattatttatagcagccaagaagatgtgaaagagtttgaaagggaagaaacccaagacaaagaagagagtgtggaatctagtttgccccttaatgccattgaaccttgtgtgatttgtcaaggtcgacctaaaaatggttgcattgtccatggcaaaacaggacatcttatggcctgctttacatgtgcaaagaagctaaagaaaaggaataagccctgcccagtatgtagacaaccaattcaaatgattgtgctaacttatttcccctagttgacctgtctataagagaattatatatttctaactatataaccctaggaatttagacaacctgaaatttattcacatatatcaaagtgagaaaatgcctcaattcacatagatttcttctctttagtataattgacctactttggtagtggaatagtgaatacttactataatttgacttgaatatgtagctcatcctttacaccaactcctaattttaaataatttctactctgtcttaaatgagaagtacttggttttttttttcttaaatatgtatatgacatttaaatgtaacttattattttttttgagaccgagtcttgctctgttacccaggctggagtgcagtgggtgatcttggctcactgcaagctctgccctccccgggttcgcaccattctcctgcctcagcctcccaattagcttggcctacagtcatctgccaccacacctggctaattttttgtacttttagtagagacagggtttcaccgtgttagccaggatggtctcgatctcctgacctcgtgatccgcccacctcggcctcccaaagtgctgggattacaggcatgagccaccg

SEQ ID NO: 29946 - DNA, 430 bp, Homo sapiens
  SIMILAR (5)..(424): 991254mologous to Homo sapiens Human calcium channel SOC- 2/CRAC-1 C-terminal polypeptide,accession number Y95433,Smith- Waterman Score=747.
cgacgccataatttctttcttcattggatttggactaagatttggagcaaaatggaactttgcaaatgcatatgataatcatgtttttgtggctggaagattaatttactgtcttaacataatattttggtatgtgcgtttgctagattttctagctgtaaatcaacaggcaggaccttatgtaatgatgattggaaaaatggtggccaatatgttctacattgtagtgattatggctcttgtattacttagttttggtgttcccagaaaggcaatactttatcctcatgaagcaccatcttggactcttgctaaagatatagtttttcacccatactggatgatttttggtgaagtttatgcatacgaaattgatgtgtgtgcaaatgattctgttatccctcaaatctgtggtccgtcgacgcggccg

SEQ ID NO: 29947 - DNA, 1863 bp, Homo sapiens
  SIMILAR (312)..(1055): 991254mologous to Homo sapiens mdm2-C,accession number U33201,Smith-Waterman Score=1293.
gcaccgcgcgagcttggctgcttctggggcctgtgtggccctgtgtgtcggaaagatggagcaagaagccgagcccgaggggcggccgcgacccctctgaccgagatcctgctgctttcgcagccaggagcaccgtccctccccggattagtgcgtacgagcgcccagtgccctggcccggagagtggaatgatccccgaggcccagggcgtcgtgcttccgcagtagtcagtccccgtgaaggaaactggggagtcttgagggacccccgactccaagcgcgaaaaccccggatggtgaggagcaggcaaatgtgcaataccaacatgtctgtacctactgatggtgctgtaaccacctcacagattccagcttcggaacaagagaccctggttagaccaaagccattgcttttgaagttattaaagtctgttggtgcacaaaaagacacttatactatgaaagaggttcttgatgctggtgtaagtgaacattcaggtgattggttggatcaggattcagtttcagatcagtttagtgtagaatttgaagttgaatctctcgactcagaagattatagccttagtgaagaaggacaagaactctcagatgaagatgatgaggtatatcaagttactgtgtatcaggcaggggagagtgatacagattcatttgaagaagatcctgaaatttccttagctgactattggaaatgcacttcatgcaatgaaatgaatcccccccttccatcacattgcaacagatgttgggcccttcgtgagaattggcttcctgaagataaagggaaagataaaggggaaatctctgagaaagccaaactggaaaactcaacacaagctgaagagggctttgatgttcctgattgtaaaaaaactatagtgaatgattccagagagtcatgtgttgaggaaaatgatgataaaattacacaagcttcacaatcacaagaaagtgaagactattctcagccatcaacttctagtagcattatttatagcagccaagaagatgtgaaagagtttgaaagggaagaagcgcccagacaaagaagagagtgtggaatctagtttgccccttaatgccattgaaccttgtgtgatttgtcaaggtcgacctaaaaatggttgcattgtccatggcaaaacaggacatcttatggcctgctttacatgtgccaagaagctaaagaaaaggaataagccctgcccagtatgtagacaaccaattcaaatgattgtgctaacttatttcccctagttgacctgtctataagagaattatatatttctaactatataaccctaggaattgagacaacctgaaatttattcacatatatcaaaatgagaaaatgcctcaattcacatagatttcttctctttagtataattgacctactttggtagtggaatagtgaatacttactataatttgacttgaatatgtagctcatcctttacacccccccctaattttaaataatttctactctgtcttaaatgagaagtacttggttttttttttcttaaatatgtatatgacatttaaatgtaacttattattttttttgagaccgagtcttgctctgttacccaggctggagtgcagtgggtgatcttggctcactgcaagctctgccctccccgggttcgcaccattctcctgcctcagcctcccaattagcttggcctacagtcatctgccaccacacctggctaattttttgtacttttagtagagacagggtttcaccgtgttagccaggatggtctcgatctcctgacctcgtgatccgcccacctcggcctcccaaagtgctgggattacaggcatgagccaccg

SEQ ID NO: 29948 - DNA, 2393 bp, Homo sapiens
  SIMILAR (321)..(1808): 911254mologous to Homo sapiens 07-APR-1992 Human MDM2 gene,accession number Q49891_cd1,Smith-Waterman Score=2287.
gcaccgcgcgagcttggctgcttctggggcctgtgtggccctgtgtgtcggaaagatggagcaagaagccgagcccgaggggcggccgcgacccctctgaccgagatcctgctgctttcgcagccaggagcaccgtccctccccggattagtgcgtacgagcgcccagtgccctggcccggagagtggaatgatccccgaggcccagggcgtcgtgcttccgcagtagtcagtccccgtgaaggaaactggggagtcttgagggacccccgactcccaaccgccgaaaaccccggaaggtgaggaaccgggcaatgtgccaataccaaaatgtctgtacctactgatggtgcctgtaaccacctcacagattcccagcttccggaacaagagacccgggttaggaccaaagccattgctttttgaagttattaaagtctgttgggtgcacaaaaagacacttattactatggaaagaggtttctttttaatcttggccagtatatttatggactaaacgattattattgattgaggaagccaccacctatttgtagaattggttcaaatgatcttctaggagatttgtttggcgtgccaagcttctctgtgaaagagcacaggaaaatatataccatgatctacaggaacttggtagtagtcaatcagcaggaatcatcggactcaggtacatctgtgagtgagaacaggtgtcaccttgaaggtgggagtgatcaaaaggaccttgtacaagagcttcaggaagagaaaccttcatcttcacatttggtttctagaccatctacctcatctagaaggagagcaattagtgagacagaagaaaattcagatgaattatctggtgaacgacaaagaaaacgccacaaatctgatagtatttccctttcctttgatgaaagcctggctctgtgtgtaataagggagatatgttgtgaaagaagcagtagcagtgaatctacagggacgccatcgaatccggatcttgatgctggtgtaagtgaacattcaggtgattggttggatcaggattcagtttcagatcagtttagtgtagaatttgaagttgaatctctcgactcagaagattatagccttagtgaagaaggacaagaactctcagatgaagatgatgaggtatatcaagttactgtgtatcaggcaggggagagtgatacagattcatttgaagaagatcctgaaatttccttagctgactattggaaatgcacttcatgcaatgaaatgaatcccccccttccatcacattgcaacagatgttgggcccttcgtgagaattggcttcctgaagataaagggaaagataaaggggaaatctctgagaaagccaaactggaaaactcaacacaagctgaagagggctttgatgttcctgattgtaaaaaaactatagtgaatgattccagagagtcatgtgttgaggaaaatgatgataaaattacacaagcttcacaatcacaagaaagtgaagactattctcagccatcaacttctagtagcattatttatagcagccaagaagatgtgaaagagtttgaaagggaagaaacccaagacaaagaagagagtgtggaatctagtttgccccttaatgccattgaaccttgtgtgatttgtcaaggtcgacctaaaaatggttgcattgtccatggcaaaacaggacatcttatggcctgctttacatgtgcaaagaagctaaagaaaaggaataagccctgcccagtatgtagacaaccaattcaaatgattgtgctaacttatttcccctagttgacctgtctataagagaattatatatttctaactatataaccctaggaatttagacaacctgaaatttattcacatatatcaaagtgagaaaatgcctcaattcacatagatttcttctctttagtataattgacctactttggtagtggaatagtgaatacttactataatttgacttgaatatgtagctcatcctttacaccaactcctaattttaaataatttctactctgtcttaaatgagaagtacttggttttttttttcttaaatatgtatatgacatttaaatgtaacttattattttttttgagaccgagtcttgctctgttacccaggctggagtgcagtgggtgatcttggctcactgcaagctctgccctccccgggttcgcaccattctcctgcctcagcctcccaattagcttggcctacagtcatctgccaccacacctggctaattttttgtacttttagtagagacagggtttcaccgtgttagccaggatggtctcgatctcctgacctcgtgatccgcccacctcggcctcccaaagtgctgggattacaggcatgagccaccg

SEQ ID NO: 29949 - DNA, 3680 bp, Homo sapiens
  SIMILAR (3263)..(2652): 971254mologous to Homo sapiens Human calcium channel SOC- 2/CRAC-1 C-terminal polypeptide,accession number Y95433,Smith- Waterman Score=1037.
gcaccgcgcgagcttggctgcttctggggcctgtgtggccctgtgtgtcggaaagatggagcaagaagccgagcccgaggggcggccgcgacccctctgaccgagatcctgctgctttcgcagccaggagcaccgtccctccccggattagtgcgtacgagcgcccagtgccctggcccggagagtggaatgatccccgaggcccagggcgtcgtgcttccgcagtagtcagtccccgtgaaggaaactggggagtcttgagggacccccgactccaagcgcgaaaaccccggatggtgaggagcaggcaaatgtgcaataccaacatgtctgtacctactgatggtgctgtaaccacctcacagattccagcttcggaacaagagaccctggttagaccaaagccattgcttttgaagttattaaagtctgttggtgcacaaaaagacacttatactatgaaagaggttcttttttatcttggccagtatattatgactaaacgattatatgatgagaagcaacaacatattgtaaatgattgtgctaacttatttcccctagttgacctgtctataagagaattatatatttctaactatataaccctaggaatttagacaacctgaaatttattcacatatatcaaagtgagaaaatgcctcaattcacatagatttcttctctttagtataattgacctactttggtagtgggaatagtgaatacttactataatttgacttgaatatgtaggctcatcctttacaccaactcctaattttaaataatttctactctgtcttaaatgaggaggtacttggtttttttttttcttaaatatggtatatggacatttaaatgtaacttattattttttttgagaccgagtcttgctctgttacccaggctggagtgcagtggcgtgatcttggctcactgcaagctctgccctccccgggttcgcaccattctcctgcctcagcctcccaattagcttggcctacagtcatctgccaccacacctggctaattctttttgtatttttagtagagacggggtttcaccgtgttagccaggatggtctcgatctcctgacctcgtggatccgcccgcctcggcctcccaaagtgttgggatcacaggcgtgagccaccgcgcccggcccaatttgcataattctttacagtaaaacccattcagaaatagtaactacttgtatctaccatcagagctgaaagaaacagatttcgttaaaaaaaagtataggggtgggtcaaggcatttttttttagaaaaatatactgtatatagtacatctcggaaactacacagaccatatgttttatttaatgtgaaggcacaactttaacattaaaagcaaagcgttttagttatttatgatgtaactgtcagtaccagctcataaaaatatatttttgcaagcatatcattgaagactctttcagattgtcaattcaaaaagtcaatttaaaaaagtccgaagtctatttgtagaaaatcaatgacacattatagcagttccacataatattattgctggacaatctgttcaccagatatccacaggggtttcccttcattttgttgcaccaatcccaaaatggtcccatcatctggttagctggttaccctttcccagaactttttcatttcccttacggtctcccaggcaacaaactggaggcagtaataagtgtgcaaggtactaaatagaggagagcaggttgcccctttttcatcagcacccagaacaacaaatgtaagtatcatgccaatagcataggcaactgtagacggaaacatagtatatgtaagaagaaccagtctgaacatcatatcttgtgcaagtatgcaatcaacaggccctggtacaataatgtctccaaaacccaatattgaaacaggcatgaggcacacactcattactgagaaatagatcagttttggtactctgatgactactggcaacttttcattatttcccaaaaggtcccagctgcgagttcaacccatgatactcctcacccattctttgtgatgaatggtgttaggataccaaaaaatccctcatagaggaggagaaggcctagaagtctcacacatgacttgaagttgggccccttcagtgttttgattaaactcagacagaaaagcagtccccaagatatcctgtaaaatccaagcccacctgtcttcatttcgaaacacagcccaaacaacagctactgctatgcacagtccagagagaaaaataagtctcacttccatgtttttgccacgacatgcaatcgtgcattgtccatatggtatcttatgaattagtgcagcaagacagttgtacagactcattgctgatgctatgcagaaaattgctatcataacataaactacaaatgctccaaattctgtattatctccttctgtagctttagagcaaacagtttcttgatctttggttccagtttccaagtggcttttgcaacttggctgagatggtgtactaacaaaaaatttggttggttgggatgacagatgtggtatgctagtagatgaactgcctaatttttgatttttattaaatatttttaagagttctaccccatgtagtctctgtcgcagttctggaggggaaacagcactttgggaataaggcaccagaagaggaaccagcctctggaaaattaaattcttttctctggggtactgcaggtaagtcttgaccaaatatattacactggggatctttgtcatctttcattaaaatattacaatgaaaaggattattactttcaagatcaccttgaggaagagaggagctaagtgtatttacaacaccatgctttttccatacagaaggtcttacaggaccatcatcaataaggttttgagccaagtgtttggaaatgctcagttctcgtgtgatttcattatgaactttgctagcttccgacgctttctgggcagtgagtgtttttaatgtatctaccgtcagggctgaaagatcttgcaaatggccaatttgagaatctaatgattgtaatgatctttttatgtagttgacacgatctccaacttctttaatctgaatgcacatctgttccactctttcaaaagtgacacgaattctctcttcactcccagaatgaaatttgtcatctttttcattgaaatacatttcaacacactgctcttcaaaatcatgaagtttcttttgatcttcttctgttaagaaaagttcatcaatttcgtatgcataaacttcaccaaaaatcatccagtatgggtgaaaaactatatctttagcaagagtccaagatggtgcttcatgaggataaagtattgcctttctgggaacaccaaaactaagtaatacaagagccataatcactacaatgtagaacatattggccaccatttttccaatcatcattacataaggtcctgcctgttgatttacagctagaaaattagcatgaattctttgctgattaatagttttttcaagttctcttctcagtctgacttccgccccatactttccaacagtgccatcatccaccaatatgaaatgggaatgcagattattcaaaacattcaatttgctcagggggttcaataaggtttgataaggagcaaccaccttgaatgttgtcat

SEQ ID NO: 29950 - DNA, 575 bp, Homo sapiens
  SIMILAR (317)..(466): 361254mologous to Arabidopsis thaliana hypothetical protein; 51999-52350,accession number AC021199,Smith-Waterman Score=77.
tttacatgtttttttctctgttttcagtgtggctttggacaggaatatatgaataaatcactgccatacaggttttccaatacacaagtgctagaaaatacacacaattccccaatgcgtaagttgtgctaatgtctttccaagttctgggttgggaagtggagggtggcagcgtttgtttgtgcgcaaccgtccagtcctgttcacagcgaggatttggagtcctccagggtctcatcatgggaattgatttgtcagcggacgcctctgccctgtctggcttcaggagttccagtgatggcttatggcggcccactcactatggtgggctgagtggaagctccttaaccatgtccccagagacactgaggtgctcgctcttttaatgtcctcgtttgttgccgtaagttctttgctaggtttcattttggcatttggcaaatcagcctggaagtctggccccatgacagcaatcactccctccccaccctcctgaagctagaggaagatttgctcagatccattaattaaagcaggaattggtgtgacaatgagctgcatggtttagggagtct

SEQ ID NO: 29951 - DNA, 529 bp, Homo sapiens
  misc_feature (1)...(529): n = a,t,c or g
tcatttctgaaaagtcatgggccactggcaagttaggaaacgaaagtgaaatcagctgatagtgacatcagtcagaacaaatgtaccaaagttcagagagctgtttactaggcacgactgcgaaggcaagggggcaccagctcaggactgcatctgcctgccatttcccttccactcctcctttctggagtctgacattagaaagccagcgagaaggaagattcaaacaaccaaccctgatttcctgcttctccttttcatgagtgttcctgtggtctctgcacctcctttctctccnnnnnnnnnnnnnnnnnnnnnnnnnnnnnnnnnnnnnngtccttggttccctgaccaggaagcgaggtgactgacaagccctgtggagcgtccctgcagaggactccggccagcctgagtgacgcaatccaaagagcgctcccgggtaggaaatggccccggtggaatgccttgccagagcagcgcatagcaggctcccgagaaggattaacactggctgaaccaccggaag

SEQ ID NO: 29952 - DNA, 605 bp, Homo sapiens
  SIMILAR (471)..(358): 401254mologous to Homo sapiens Human secreted protein, SEQ ID NO: 4568,accession number G00487,Smith-Waterman Score=62.
ctgtatgtactgtgccctctcctggctcttgaggctctggagtcccaattgtctgtgttagtcagtgaccaggttccagggaaaatgatgtcatgtggtggtccaactttactggaaccaaagagacagtactttgcaaagaaaaggatcactgccaggtgcactggaattgctacagttttagtccgcatgatcctctcctgaaggaggaagccttgtttcaaaattagtttccatcatggagtctatcaaatgagttcccacctctccagccagcctagaaagcaaacagagctgcccacatgttctctgccctgtctgggaggttgagggccacagtgtatagactggtaagccagacaggcctcctcgccgcaagctgctaactttgcttttacctgtaccttgggtccccgggcagctagctataaagcaagagggacaggagcccaagaagagacactgaggacaagagatcacaccagagtacatgtctctgcctctgttttcagtgtggctttggacaggaatatatgaataaatcactgccatacaggttttccaatacacaagtgctagaaaatacacacaattccccaatgcgt

SEQ ID NO: 29953 - DNA, 2250 bp, Homo sapiens
  SIMILAR (1886)..(1590): 421254mologous to Homo sapiens Human secreted protein encoded by gene 85 clone HSDFV29,accession number W74813,Smith-Waterman Score=112.
gcgatctggctgcgacatctgtcacccattgatcgccagggttgattcggctgatctggctgccgttctgagtgtgcggaaggcaggactcaaaatgagatcccatttgactccctctgtatgtactgtgccctctcctggctcttgaggctctggagtcccaattgtctgtgttagtcagtgaccaggttccagggaaaatgatgtcatgtggtggtccaacttactggaaccaaagagacagtactttgcaaagaaaaggatcactgccaggtgcactggaattgctacagtttagtccgcatgatctctcctgaaggaggaagcctgtttcaaaaatagtttccatcatgagtctatcaatgagctcccacctctccagccagcctagaaagcaaacgagctgcccacagtgtatagactggtaagccagacaggcctcctcccgcaagctgctaccttgctttcacctgtaccttggtctccgggcagctagctataaagcaagagggacaggagcccagaagagacactgaggacaagagatcacaccagagtacatgtctctgcctctgttttcaggggggctttggacaggaatatatgaataaatcactgccatacaggttttccaatacacaagtgctagaaaatacacacaattccccaatgcgtaagttgtgctaatgtctttccaagttctgggttgggaagtggagggtggcatcgtttgtttgtgcgcaaccgtccagtcctgttcacagcgaggatttggagtcctcccagggtctcatcatgggagtgatttgtcagcggacgcctctgccctgtctggcttcaggtccaggggaagctttgaaagcagtcaagccttgtctttgtaccccatgttgtcctgtctttgttgaagtcactcagagatcactcctgggacctctggggttggaagttccaagtgatggctttatggcggcccaactcactatggtgggctgagtggaagctccttaaccatgtccccagagacactgaggtgctcgctcttttaatgtcctcgtttgttgccgtaagttctttgctaggtttcattttggcatttggcaaatcagcctggaagtctggccccatgacagcaatcactccctccccaccctcctgaagctagaggaagatttgctcagatccattaattaaagcaggaattggtgtgacaatgagctgcatggtttagggagtctttgggagccttggaagtcctgaaggacagccaattcttgttacttaagaagttcacagttgccctggctgccccttgctgccccttcggccttctttgacacaggggccccacctcctatggtaggggggttccttccgctggaagcgggagatcagcggtaagtggtaaattagatgggttaaagcaaatgtggccccttttggccatgggtggaacttaacccttgccatccagtaagcccttaagcagctgtcaagctttgtttcagccctttcaggcttcaatggatacacaccattgtctataagccagaggatgagtaaggcctgggccgctgcccaaaagctagaaaacccgggccccggggaggaaaaaccttgccccctttcccccataggaaaagaagggggcccggccggcctgccaccaggccaaagggacacagtcaggaaggccctctgccagccgccacgctctctcatcactgttgcactgggctaggagtagaggctggggggcaaaaagggttgaggaccaagggacccgtacacgccaagcctggccaggcccaggccaacccgaggcaccccccagggctttccagctcagggaactggtgacactgtagggtgctggtgtcctcattcccacaggcagaagttatataagccgattctcaggttgggcaggtcagttaggttgccagcctcccaggagaatagcgtataacatcaggcagatgacctcaatctcgaggcctatgatgctcatgaacagcagctggtcgcgccaccgaggccttgggccggccatctctactgccctctgccgggggacagaaaggaggtgcagagaccacaggaacactcatgaaaaggagaagcaggaaatcagggttggttgtttgaatcttccttctcgctggctttctaatgtcagactccagaaaggaggagtggaagggaaatggcaggcagatgcagtcttgagctggtgcccccttgacgaaa

SEQ ID NO: 29954 - DNA, 467 bp, Homo sapiens
  SIMILAR (156)..(308): 361254mologous to Homo sapiens Human secreted protein fragment encoded from gene 38,accession number Y07781,Smith- Waterman Score=66.
atgactacgccttgcctggccggacggactgacagaagagagtgaaagtgccatggaaagccattcactcctcaatcccaacctgcagcaaggtgaaggagtcctctccagcttccgaaccacgtggacaggagtttgtggaggatctgggcttctggagagtattgctgttgatcttcgtcattgctttgctgtctcttggcattgcttattatgtgagtggggtgctacccttcgtggaaaaccagcctgaactggtgcattaaaggagctcatggaagatgaggcaattaatttcctgtttcctggcttccaatgtttgttctcagtttctcagaatttttcttagcgcaaagcagtgagggcagtacatgttctttttgcatttttaattattgtaatccttttagataatgatgtgttcatttgaactaactacatactatgatcaagtatattgcatccct

SEQ ID NO: 29955 - DNA, 1338 bp, Homo sapiens
  SIMILAR (240)..(407): 331254mologous to Rickettsia prowazekii ANKYRIN, BRAIN VARIANT 2 (ank2),accession number AJ235273,Smith-Waterman Score=99.
ccgcctccttgaagctgccgctgtcgctgctgctcgttcgagtcgcagatccttgccagcacattacagaatatttttgttgaaccttcttgagaattcagagaaactgctgagtgaccactgaacgaaaagatctaatcttaaggcttacgcgtgttccatccaccacatcagaacaatgtcggtatgtttttgtaaatgattcttctcagactaacggtgcccttgctgcaagccttgttattgatggggactttaattattccaagcggcttttggaaagtggctttgacccaaatattcgtgacagcaggggcagaacaggccttcaccttgcagcagctcgagggaatgtagacatctggccagttactggcataaaattcggtgccgattcttctgggccacagatttattcaagggaaacacagctctttcacctctgtgggccatgtgggatactatccaatttttggtttccaatgggactcaaaattgatatttgcaatcatcaaggtgctacccctttagttctgggcaaagcgcagaggagtaaataaagatgtcatccgattgctggaatctttggaagaacacgaggtgaaaggatttaacagaggaacccactcgaaactggagaccatgcaaacagctgagagtgaaagtgccatggaaagccattcactcctcaatcccaacctgcagcaaggtgaaggagtcctctccagcttccgaaccacgtggcaggagtttgtggaggatctgggcttctggagagtattgctgttgatcttcgtcattgctttgctgtctcttggcattgcttattatctcaaaatactccacatggtcctgtggcatactgcagacctcttcaccctgcaagtctttggtctagaataccctgccggacgccagcagcccgcccacaggcctaagctcagggcccaagctcctgagctcctcttccaggcctgtactgacgctggcccagtttcaacacatctcatttgggactggccaaataagtactcagtagccacatggccagtggctggtaccctggacagtgcagtcacagacatatgtcctctgagtattcctggaaggtcccctgagaactatgacgttaagcggtgggcagtggctctgagcacacagctgcagcctagcgaaccagaggcccaggtctgtctgaggtcacgaggcacaaccaaagacaatgaagaagaatccggagcctctctcaattctcccaatcctgggacagggcaggatccctccagatccaccttttctctgtcgtctcctggatcagtctgctcagacctgggctga

SEQ ID NO: 29956 - DNA, 1162 bp, Homo sapiens
  SIMILAR (34)..(543): 291254mologous to Mus musculus M83 protein,accession number AB045293,Smith-Waterman Score=219.
ccggttcgatccacgcgtccgcccacgcgtccggcctgcaatggacccggcttgtctgtgctgtgcttcatgcgtcacgacatcctggagtatttcagtgtctacgggacagccctgagcatgtgggtctcgctgatggcactggccgacttcgacgaacccaagaggtcaacatttgtgatgttcggcgtcctgaccattgctgtgcggatctaccatgaccgatggggctacggggtgtactcgggccccatcggcacagccatcctcatcatcgcggcaaagtggctacagaagatgaaggagaagaagggcctgtacccagacaagagcgtctacacccagcagataggccccggcctctgcttcggggcgctggccctgatgctacgcttcttctttgaggactgggactacacttacgtccacagcttctaccactgtgccctggctatgtcctttgttctgctgctgcccaaggtcaacaagaaggctggatccccggggaccccggccaagctggactgctccaccctgtgctgtgcttgtgtctgatgctgcgcccagcccggctctgagcccctggccctccccagctcacacttggccagagtcccagacaggttctcctcctgcagctcctgctgtccttccctgccctggagcatccaggagaaacatctcttccacaccctgagagggttcccggggtctgtgaagggcccaccatgctgcactaaatgcttcttaagaaactgctaattcccttgtgacggggtgcgcaggacacaactgtgaagataaaaaggttttcttccaggccttgtcacaaccactggcgtgtctggggaaacctaggctgcggatgcccaccccctgggggccggagccagaagtcccaaccgggggccccctgacaggaggggcttccatgacttaattgtatctaggaaacgcgaacacaaatattgtccttggcctcagcatcccgacagccccctattaaaagatctcgcactcgtgtcacctgtacacttacgcaaacccttgtgcgcgcaccgtcagcgggtgcgccggaaagacgctttcaatgataacatagaatgcggcgatgtcggagattaagaaacgaatcataaagggagacgctcttagtgaaccg

SEQ ID NO: 29957 - DNA, 1404 bp, Homo sapiens
  SIMILAR (936)..(1226): 221254mologous to Homo sapiens Human prostate growth- associated membrane protein PGAMP-2,accession number Y52590,Smith- Waterman Score=44.
ctccaccatgcctgcaatggacccggcttgtctgtgctgtgcttcatgcgtcacgacatcctggagtatttcagtgtctacgggacagccctgagcatgtgggtctcgctgatggcactggccgacttcgacgaacccaagaggtcaacatttgtgatgttcggcgtcctgaccattgctgtgcggatctaccatgaccgatggggctacggggactgggactacacttacgtccacagcttctaccactgtgccctggctatgtcctttgttctgctgctgcccaagcaagcagccagcacccccctttcccgcttcgcagcagcagcacatggaaagttggaggcggcaggccactccgagcagggcggcgacgagggccctgccaagcgcgaagggccacactggcaggctcctcactgcagcgatttacgaaggccgcccaaagcctggccaagtctctgcggccacatctggaagacgtttgggcagagttcggcccccgcaccacagcaggctgataagcgtctgctgctggcttggagctccgggaagctgcagcctcagaccaccggccctggctgcctgagccttccagagataagggcgatttcaaactattttatcgccatcatcattattgttctaactggtactgagcccctcactagcccctccaagctgccctcttctgagccgtccctctactcagccctcaccttggggagcgtcccacctccacagggtccacaggagcacgctgaggccgtgttctgcctgggccagggctgtcagacctccatggaagggtcctggggagacacagctggaggtgtctggaagctgcgttcatgtgggccctgctggtccttcaggctcgagaacacgatgtccacaggctcccaggaactgcaaggcagtaggggcagcacgctggactatggtctgcccagagacagagacagaggaagcgtacagccccccggctgccccatcatggacaccgaggcccaggcccccaacactttcctggagcccacattagcagcagctttggcaaggggtgaagaagacccccagagtgggatgagtattcccggcatctgctccccgcctcccaccttcccaagacacggcagccctactgtcccctcggagacctcggccctggtgccaggcctggaatgcagcttggcccgtttccggggaactgggaagctgtcagactggtctggagggacctttgtcaaactgcatcaacgcggccagctgccctccccctgcacggcagcggtgagaactgtcacccatggccctgatgatgatgagaccatccctataaactttataaaattaatcaaggaagaagagaggaggagaaatgagaataaaccaggcttgtag

SEQ ID NO: 29958 - DNA, 850 bp, Homo sapiens
  SIMILAR (845)..(513): 421254mologous to Drosophila melanogaster CG13384 gene product,accession number AE003621,Smith-Waterman Score=244.
  misc_feature (1)...(850): n = a,t,c or g
gccccccaccgctttaaattggtccctaaacccccccccttttnttttttaaaatttgaattatttttttttcaggccgttccagcctgggcttttcatttttatatattgatgaaaatgtcctggccccataatcccaggaaccctgagcggcccccttggaggagtgtggtaaacaacaaccggtctggaaggcaggagtctggttcattcttgtatggccttgcccaagtcccaccccttcctcagcttgtttcctcagctgcaaaatggagatgaaggctactatccttttaggtattgtgattcattatgtcaggcagaccatgacgaggcgaatggacagatccagaggcagtgcccagcgtgttgacacccgggagatggcaaaggggatgatgatttctgcagggacgtagaactgcagggcataggtgcacaggatgccggcaatgtagagaagcttgacagactggtacagccagcagataggcaggctgaggattatgctgcccttggtgtcggtctccaaaccgcaggtagcccagagccgccatgccaatgtatagggaagtgacgatggacattcccaaagacaggatggctgggaagtggcgggcattcttcatcttgttttccagaggcagaaccacaccaatgctttcaaaagaaaaaatggctgttccgaagaagagagggtaggtcttccagcttgctaccagtggcaaccggctggggtctgggatttcctgggtaatgtactgtatgatgatgaccaagctgaccagcatgctgatgttggccagcatggagaagatggtcaagatcctgaggttccggatgaggacca

SEQ ID NO: 29959 - DNA, 1098 bp, Homo sapiens
  SIMILAR (1053)..(805): 601254mologous to Homo sapiens Human breast tumour-associated protein 52,accession number Y48591,Smith-Waterman Score=214.
atggactcgcgactctacatgctctccttcctgcccttcctggtgctgctggtcctcatccggaacctcaggatcttgaccatcttctccatgctggccaacatcagcatgctggtcagcttggtcatcatcatacagtacattacccagattattactatgactgcagtcacaggaatttccaacacccatgaccactgtccattcaaaggtgttcgtgggctcgttgggtcagtgctaatctgtgtcctgagggctcttcagtcagcttttggtgcatgctgcctggcctgggactcacccttcaaggcagtgggctaccctctggcccaggacaggtccagaaatgccatccaagagccaagtcctggaattggggaccccaagagcctacttggtgctctacccctgtggctgagctggtatttatacaaggcaaatgaaagcataaaacttacgtccacaaaaaacgtgtatgcaaatatttatgacaacatgactcataataggccaaaactaaaaaccgtccagagatccatcaactgcaatggaagctccatctctcccttgacagaagaaccacccaaactggctagtgctccttttagtgccaagaacaatgatgggttttgtcatgctgatactggcagccaaccacctttctctcactacctaccacctattatcacacaaccaccgctaaagcccttagctatgtgggcctgtggcttaagtgaggttccggctgggatattaaaagtgcttattgctgaagattctgagtcagtaggcctgcagctcaggaatagggagaaagagttcaagaccaaggaagctgcagccctggaatctcacagcagccttggcactgaagtggcacaggagggtcagaagaagaggaccagcctccagaactacttccagcagaatgggggtgaaggcttggctagtctcttggcttttgtctgtgacacctggacagaaatccatgaaaagtgctgcataaatgaagaagagtgggagaaagaagcgcctgtaccacggattggcattttagatgccctcgaggaatatgcagctcgagatatattcttatga

SEQ ID NO: 29960 - DNA, 984 bp, Homo sapiens
  SIMILAR (598)..(981): 881254mologous to Mus musculus ribosomal protein,accession number M76763,Smith-Waterman Score=578.
atggccgaggtcactcacaggcagactgcagctgcagccctgcatgagcttgatgagctccaagatgagctgatgagtgctgtgatctgcactagccctggaatcaaccagaaaaaggcagactcaccaggctccagagctgagggacattgcagctttgcaacctggtctcttgagatgaccgcatccatccctaagagcttcaaaatcatcagtatgctgccaacgcccaagtttatagctgtagtcaagactttctctgtgaatttccaactcacatatccaactgctgcacttggagacctcaagtttcttctcaaaatccaacatcttatgatcaccatttccccaaaatcaaagaaaaggatttcttttaaatcctacgactatacaagcctccttgatgttcctgctgaagaacccagcactgaatggggtgttaggccctcttgtcagctgctcgtttccatcacccacaccacaggcgaagcactgaaggctgagaccatccctgatggtctccggggatacccgatgtactcagctcggtctacttcggtccacgtccccagcacctttgccatatctgtcaagtggaaaacagcctttaccatccctgccattaagggtgtgggccaaagatatgttcatgtggtgttgaggaaagcagacattgactgcaccaagagggcgggagaactcactgaggatgaggtggaacgtgtgatcaccattatgcagaatccatgccagtacaagatcccagactggttcttgaacacacagaaggatgtaaaggatggaaaatatagccaggtcctagccaatggtctggacaacaagctccatgaagacctggagcgactgaagaagattcgggcccatagagggctgtgccactcctggggccttcatgtccaaagtcagcacaccaagaccactggccgccatggccgcactgtgggtgtgtccaagaagaaataa

SEQ ID NO: 29961 - DNA, 698 bp, Homo sapiens
  SIMILAR (119)..(427): 421254mologous to Mus musculus ribosomal protein,accession number M76763,Smith-Waterman Score=113.
gggggaggggaattgacggcttaatagaccgcctgtagaattcggcatgggcacgccggccgcttgtgctgcagcccatgtctcttagtgatccccttgaaaagttcccagcatatttttgcgagtactcaaccccccaaacctcgatggccggcggaaaatagccctttgcccatcactgcccatttaagggtgtgggcccgaagatatgctccatgtggtgttgaggaaagccgacacttgacctcaccaaagagggcggggagaactcacttgaggatgaggtggaacgtgtgatcacccatttttgcagaatccacgccagtacaaagatcccaagactggttcttgaacaagacaagaaggatgtaaaaggatggaacatacagcccaggtccctagccaattggtctgggacaacaagctcccgtgaaagacctgggagccgactgaaagaagattcgggcccattagagggcctgcgtcactttctgggggcctttcgtgtccgaggccaagcacaccaagaaccactgggccgccgtggccggcacccgtcgggtgtgtccaaggaggaaataaggtctgtagggccttgtcttgttaataaaatagtttatataccaaaaaaaaaaaaaaaaaaaaaaaaagtcgacgcggccgcgaatttagtagtagtagtagtagtaggcggccgc

SEQ ID NO: 29962 - DNA, 1203 bp, Homo sapiens
  SIMILAR (836)..(720): 971254mologous to Homo sapiens GREB1c,accession number AF245390,Smith-Waterman Score=190.
cgacttttaaacatcccatccaattagactgtcactgtcaaccagcttaacgcccgtaacgcaaaggagcattttccatttcataggcctggccttttgcccgtgatgtgtgctgctatgcaggggcctctccccagcatcacaccgacaggcaccacggcccacttgggggcccagcactcccatacctcctccacagccaacctgctcacctgagcctttccaacagattaaaaggtacctttggttaagagtccccttgtgcagtacgggcccaggtaaatacttcaaggtgtttcttgcttcttgggttgagtggtcagtttcagattttatatgattgggagaattccgtgaagtaacagaagcctttctttcctcagccaacacaattcccagagaaaccaagaagagcattgtggccattgtcatctggcaagaacctcttgtcaacggcgcacaccaggagatggtccggcaggctgggggacttgacccccacgaggagaaagcccgcagggacatccatgggctcgttggaaatggagacaaggcgcaggtccttcccggcctggcaaaacccgtctgtggtacagcatccttcaggcagagggtgcagctggaaaggggttggggggccatttgtttccagccctccttctccctcttcttcctcttcctcattgtccactcggctaccaccttctagagcggcaaggctgctgttcagcttccaggtacagctgggaaaagatgggcctgggcaccaggttgttggaccgcagggatgcctcgatggaattgtgcaagacctcttcaaagcgtgtcgtcttcacgctgtccagcgtaagaatttcccatcttcaagaggatggagtcttctgtttaaaatggcatctcagattcggtgcaaaagcctggctccacgcaaggtagaaggtgaaacagctgcaaggaggaagggccgtgtagccttcgctcagcagagacgaagaaagggtggctgtcctcagctgcagctactgaactcactttgttgttttctgctccaaacaaagccagaggggccagaggagagcccttcctatgggcatcaaagtacaagatgtgcgctttgattctttctccatgaacacactgctgctcagccgcgccgtgtctggaattccaccacacggactagggatcaacaatgccgtccaa

SEQ ID NO: 29963 - DNA, 3006 bp, Homo sapiens
  SIMILAR (572)..(724): 571254mologous to Homo sapiens GREB1a,accession number AF245388,Smith-Waterman Score=128.
atgggaaattcttacgctggacagctgaagacgacacgctttgaagaggtcttgcacaattccatcgaggcatccctgcggtccaacaacctggtgcccaggcccatcttttcccagctgtacctggaagctgagcagcagcttgccgctctagaaggtggtagccgagtggacaatgaggaagaggaagaagagggagaaggagggctggaaacaaatggccccccaaaccctttccagctgcaccctctgcctgaaggatgctgtaccacagacggtatcttgtcaaactccgggccccccaaaaaacgccacaaagggtggtctccagaatctccatcagctccagatggtggctgcccccaaggtggtgggaacagagctaagtatggccatgggaacttcccttacctctgtgggaacctgaatgacgtcgtggtcagccccctcttgtacacgtgctaccagaattcccagtctgtctcacgggcatacgagcagtacggcgcctctgccatccagcccatctccgaggagatgcagctcctgcttaccgtctactacctggtccagctggtcgcacctgaccgagatccggcagtaccagcaggcgccgcgcagcccttcccgcccgcgcccagccgctgcacccgtgacctccgcgcactgccctggctggccagcctggccgccagctcctgcaacgacagcgtgcacgtcatcgagtgtgcttactccctggccgagggcctctccgagatgttccggctgttggtcgagggcaagcttgccaagaccaactacgtgcgcgcggccatcgactcctgcatcgccgtcaccggaaaataccaagcccggattctttccgagagccttctcactcctgcggagtaccagaaggaagtcaattacgagctggttacggggaaggtagactcgctgggggccttctttagcaccctctgtccagagggtgacattgacattttgctggacaaatttcaccaggaaaatcaaggccatatttcttcctcactcgctgcctcttctgtcactaaagcagcatccctggatgtcagtgggacaccggtgtgcacaagttacaatctggagccacacagcatccggcccttccagctggcagtagcgcagaagctcctctcccatgtgtgttccattgcggattccagcacccaaaatctggacctgggatcctttgagaaggtggactttctcatttgcattcccccctcagaagtgacctaccagcagactctgctccatgtgtggcattcaggggttttgctggagcttggtctgaagaaagagcacatgacgaagcagagggtggaacagtatgttctgaagctagacacggaggcacagacaaaatttaaggcttttctgcaaaactccttccagaacccgcatacactttttgtcctaatccatgaccatgcgcactgggatcttgtgagtagcactgttcataacctctattctcaaagtgacccgtcggtgggattggtggaccgattgctcaactgcagggaggtgaaggaggcccccaacattgtgacacttcacgtgacctccttcccgtatgcactgcagacacagcacaccctcatcagcccctacaacgagatccactggcctgcctcctgcagtaatggagtggacttatatcatgaaaataagaagtacttcgggctgtcggagtttattgaatccaccctttcaggacacagcctccccttgctcagatacgatagctcctttgaggccatggtcactgcattaggaaaaagagatgacaatgagcggaaatatgctggaatgtggaattatgtttttgagccaatggaggggttttgccaggccgggaaggacctgcgccttgtctccatttccaacgagcccatggatgtccctgcgggctttctcctcgtgggggtcaagtcccccagcctgccggaccatctcctggtgtgcgccgttgacaagaggttcttgccagatgacaatggccacaatgctcttcttgcacactgtgctggaacagccagtcccatcttggcagagaagtacttcctgccttggggctgcaggtttgccatctataaaggggataaagatgtacgcggtttctctgggaattgtgttggctgtggaaagaaaggcttctgttacttcacggaattctccaatcatataaatctgaaactgaccactcaacccaagaagcagaaacacttgaagtattacctggtccgtaatgcacaagggactctaaccaaaggacctttaatctgttggaaaggctcagctttgcccttcatggccacagtcagcaacgcaggtaaatgcctcctgagcccctactacttgccagtcatttctcaggcccagaggctgcagtggttctgccccgtgtgggaccagttcaccgtctttgatcacctgctgggtccaagcacctcagaggttccccacctcactggccgctggggatggcctttcccagaggaggaaataagggtggaagatgagtttagaagccggcagatccccgccagtacttgttccagttccctcttcccagccctggagagcacggctgccttccccagcgagcccgttcctgggacgaaccccagcatcctgatgggagctcagcaggcaggaccagcttctgatcacccctcactaaacgcagcaatgggtccggctgttttcaacggcaaagattccccgaagtgccaacaactggcaaagaataacctgttggccctgccgcgaccatcggctttaggtagctctgcctgtcctggccgtcctggggatcctgctcttctttgggccaaggccagagggggcatgggagctgctgggctggggccgctgagcctcctggagtctgatgtggcttccatgagagtcaggccaggaccacaggtgcctcctgagtccgtgggtctgggcccaggccctggtgctctatga

SEQ ID NO: 29964 - DNA, 1536 bp, Homo sapiens
  SIMILAR (544)..(1422): 911254mologous to Homo sapiens p53 tumor antigen (aa 1- ?),accession number X02469,Smith-Waterman Score=1432.
atgaagctcttagcaaaagcacctctaaatctgttacgcgcctttgaagcggctggtcgtaccggagcttttgcgttggccgcctctgagttggaactgtcacccagtgcgatcagccatgccatccgcaaactggaaaacttgcttgatgtacgcctttttcagcgcagtacgcgagaaattacgctgacgaaagaaggtgaaatactgcttgagcacatacagcggggatttaacgaattacagcaggggttggcattagtgacggctgatgaatccaggcctttgcgccttcatactgcaccgagttttgcccatcaatggcttttaccacgtcttggtcaccggcgatgttgtattcataccgcgtttcatggccctgcgtgtctttcacggcaattaactgtccacggctgtcgtatgcgcggtactgactctagcccttcctcgtcggtgcaccgccgtcatctgcccgaagcggtcatggtcataacgggttacataaccggaacagtcggtgaagctcagcaactgaccgtaacggctccacgtcatggttttccggctgccggtggcatcttccgttgcgcaggcccgggttcgcctgcgtttgcggattcccggggtttccgtctgggcttcttgcattctgggacagccaagtctgtgacttgcacgtactcccctgccctcaacaagatgttttgccaactggccaagacctgccctgtgcagctgtgggttgattccacacccccgcccggcacccgcgtccgcgccatggccatctacaagcagtcacagcacatgacggaggttgtgaggcgctgcccccaccatgagcgctgctcagatagcgatggtctggcccctcctcagcatcttatccgagtggaaggaaatttgcgtgtggagtatttggatgacagaaacacttttcgacatagtgtggtggtgccctatgagccgcctgaggttggctctgactgtaccaccatccactacaactacatgtgtaacagttcctgcatgggcggcatgaaccggaggcccatcctcaccatcatcacactggaagactccagtggtaatctactgggacggaacagctttgaggtgcgtgtttgtgcctgtcctgggagagaccggcgcacagaggaagagaatctccgcaagaaaggggagcctcaccacgagctgcccccagggagcactaagcgagcactgcccaacaacaccagctcctctccccagccaaagaagaaaccactggatggagaatatttcacccttcagatccgtgggcgtgagcgcttcgagatgttccgagagctgaatgaggccttggaactcaaggatgcccaggctgggaaggagccaggggggagcagggctcactccagccaccgaagtccaaaaaagcagtgtaggaccgcctctactattcgggatacagatgttagccaccatggtctgagtccatatattattgatttatcgatctactcactcatactgatttattctccaatgtga

SEQ ID NO: 29965 - DNA, 2652 bp, Homo sapiens
  SIMILAR (1387)..(1971): 991254mologous to Escherichia coli K12 formate dehydrogenase- O, major subunit,accession number AE000464,Smith-Waterman Score= 1053.
atggaaaacttgcgtgatgtacgcctttttcagcgcagtacgcgagaaattacgctgacgaaagaaggtgaaatactgctggagcaatacagcggggataaaccagaggaggaccggtctgtggtggtctgttcgtcattagaagatttcttccagggcctcaaaagtgcttccggaaacatcggtatccacaaccgaccaacaggtttcccagcaaacggggccaagatttccgcatattgggttatacccccccccggaaatgcagctgccggtgttgatgatggaaccattatcgctctgacctgtgtttggctactgctgtcctcttttacagctacgttacccgttcctgcgtggctgatacccgtaacgccagtagttaaacaagatatgactaaggatattgctcatgtggtgatgcgcgatagtgaggcgctaagcgtgttatacggcgtatgggggtacgaggtcccagctgattcggcctggtgcgatcaggcagtaagagcggggctggcatgtaaaagtgggaatgcttctttacaaacattggtagatcagaatttgccctggatcgcatcgcttaaagtcggggacaaaaaattgcctgttgtggtcgttcgcgtcggtgaggctagcgttgatgtcctcgtaggtcagcaaacgtggacgctgacacataaatggtttgagtcggtatggacgggtgattatcttctgttgtggaaaatgtcgccggaaggggagagtaccattacgcgtgatagcagcgaggaagagattctctggctggaaacgatgttaaaccgcgcattgcatatttcgacagaaccttcggcggagtggcgtcccttgttggtagaaaaaataaagcaatttcaaaaaagccaccacttgaaaactgacggtgttgttggcttttcaacgttagtacatctctggcaggtggcccatgctcgtgctgtatgcctcgctggacgcaacactccgttggtgcgccaaaacattcgtacgatggcgatgatccagctgctgctcggcaatatggggatggcaggcggcggcgttaacgccctgcgcggtcactccaatattcaggggctgacggacctggggctgctgtcgcagagcctgccaggttacatgacgctgccaagcgagaagcagaccgatctgcaaacctaccttaccgccaacacgccaaaaccgctgctggaaggccaggtaaactactggggcaactacccgaaattcttcgtctctatgatgaaggccttctttggtgataaagcgacggcggaaaatagctggggctttgactggttgccgaagtgggataaaggctacgacgtcctgcaatacttcgagatgatgaaagagggcaagaaccacggtgagctgaacgaagttgactcgtcgaagatccagaccgaagtgttccgtctgccatcgacctgcttcgcggaagagaacggttctatcgttaactcaggtcgctggttacagtggcactggaaaggtgcggacgccccggggattgcgctgactgacggcgagatcctctccggtatcttcctgcgcttgcgcaagatgtatgccgaacagggtggcgcgaacccggaccaggtgctgaacatgacatggaactacgccattccgcatgagccatcttcagaagaagtggcgatggagagcaacggtaaggcgctggccgatattaccgatccggcaaccggtgcggttatcgtcaagaaaggccaacaacttagttcgttcgcccaattgcgcgatgacggtacaacctcctgtggctgctggattttcgccggtagctggacgccggaaggcaaccagatggcacgccgtgataacgccgatccgtctggcctcggtaacacgctgggctgggcatgggcatggccgcttaaccgccgcattctgtataaccgcgcctccgcagatccgcaggatatattgataactcagaaaccagtaaaatgcaacaagacgcaccacgctgggaaaatcgctgctattcagcagagttttgtatcgatgaatggtggccaggccacttattgctctcgcgtaagcgggtaccgtgacattctgcctgaacttgacctggtactgtggctgattaaagccgatgaccgtgccctgtctgtggatgagtatttctggcgacacatcctgcagtgcggacatcagcaggtgctgtttgtggtgacgcaggccgaccaaacggagccctgccatgaatgggatatggccggtattcagccttctcctgcacaggcacagaatattcgcgaaaaaacggaggcggtattccgtctgttccggcccgtacatccggttgtggccgtatcggcccgcaccggctgggaactggatacgctggtcagtgcgctcatgacagcgcttcccgaccatgccgccagtcccctgatgacccgactgcaggacgagctgcgcacggaatctgtccggtctcaggcccgtgaacagtttaccggtgcggtggaccggatatttgacacggcggagagcgtctgtattgcctctgttgcacgcacggttctgcgtgccgtccgtgacacggtggtctctgttgcccgtgcggtatggaactggattttcttctga

SEQ ID NO: 29966 - DNA, 1065 bp, Homo sapiens
  SIMILAR (849)..(469): 901254mologous to Escherichia coli K12 putative transient receptor potential locus,accession number AE000229,Smith-Waterman Score=598.
tcatccacatttttcggtccggctgacgcgatcgcgaatttccaccaggtcgtacactgggccaaaaacgttttcgagcgtggcgagcgcgaaggtgaccaccatctgcgcctgaaagtgggtaaagaccttggtctgaccgacgaaagcaaatgggcaccgctgtgggttatccgacttcccgatgtttgaagacgacggtgaaggcggcctgacggcaatgcaccatccgttcacctcaccgaagaaaatcatatcgccatcttgcgcggcagtacgatccaggatgtcttcgatgatttctgcattaaggaacttcgctaccgggccagtgcgatcagccatgccatccgcaaactggaaaacttgcttgatgtacgcctttttcagcgcagtacgcgagaaattacgctgacgaaagaaggtgaaatactgcataatccgtgtagctaatagccggtaccgcttgatcatatgatcctgatagcggtttaacggttcgagatacaccacggttccggtacgcgcggcgacctgttccagtacgcgcagggaatcactcaccattttgcggtcgccgtccaggctacgcggcgaggtcatcggcggtaagcggaaggtaaacatgccccacgcagccggaacgacgatgcctttaccgcccacttctgccagcgcttcgagaatgcgctcgatctgctttaagccattaagacgacgctcttcgataaagtcgccaatccatccgtcatagccaccgcaggcggtggtcaccggtaaaccggtttctttgatcgccgctttgacttcctgaacatgggtgttggtgaagcgatcgctgacaaaaaactgctggataacgcagcagcagacctggcagcaatctccggtcaaaaaccgctgatcaccaaagcacgcaaatctgttgcaggcttcaaaatccgtcagggctatccgatcggctgtaaagtaactctgcgtggcgaacgcatgtgggagttctttgagcgcctgatcactattgctgtactcggtacccttcagaatgtctaagattttaatcat

SEQ ID NO: 29967 - DNA, 882 bp, Homo sapiens
  SIMILAR (274)..(444): 1001254mologous to Escherichia coli PerR,accession number U57080,Smith-Waterman Score=296.
atgaaactgatgtttgcatcggacattcatgggtcgttaccggcgacggaacgtgttctggagttgtttgcccaaagcggtgcccagtggctggtgatccttggcgacgtgttgaatcacggcccgcgtaatgctttaccggagggttacgcgccagccaaagtcgctgaacggcttaatgaagtggcacataaggttatcgctgtgcgcggcaactgcgacagcgaagtggatcaaatgctgctgcatttcccgataaccgcgccgtggcaacagttgtaccagtggaaaggatggtttgaggcgaataagatgacgccacccaataattatggccttcgatttgaccgtagctttatggcgattgctgccgcagttgacggcttgggagttgtgcttgaatcaaaactactggctgaacgtgaaatcgctagcggtaaactgagtgctgataaccattccgaaggtccatgtgagccgtttaccttggacttcggggattctctacgagaccttggatcctcctgcaaaatcaagcccttttttcaaccgggataccagtcagctgaaggaacggtactttccaccgggaccggaacggaaagaccgactcccctaaccgtcttccttattcaccgcgcacatgagataccacagacagcacgccacagacacacggcgctgcacagaagcctcaacaaccaccaaacgacaccaggatcaccagcaacacacacgacaagcacatggagccatgagagaaaaaccaacagaaaacaattaaactttgtgttattgttgctggataaaatctatgtatttgagaaaaatatatttcaaagccttttcatctttaaatgttattcagtagttgaaggctag

SEQ ID NO: 29968 - DNA, 1032 bp, Homo sapiens
  SIMILAR (139)..(1029): 991254mologous to Escherichia coli PerR,accession number U57080,Smith-Waterman Score=1523.
aggaaaggagattttggcctggggggaaggttttttttccgctgagcaccccagggtggtccgagggaaggctagacccgctggtcgaggggccaaaattcagtgaaccgcttcatcgctaggaaaaagggttcatgaatgaagctgttagcaaaagcccctgtaaatctgttacgcgcctttgaagcggctggtcgtaccggagcttttgcgttggccgcctctgagttggaactgtcacccagtgcgatcagccatgccatccgcaaactggaaaacttgcttgatgtacgcctttttcagcgcagtacgcgagaaattacgctgacgaaagaaggtgaaatactgcttgagcacatacagcggggatttaacgaattacagcaggggttggcattagtgacggctgatgaatccaggcctttgcgccttcatactgcaccgagttttgcccatcaatggcttttaccacgtcttggtaagttcatacgtgagaacccaagcatcgatctgcgactttcagccagcacagaatatgcacgttttgaacaggatgattttgatctcgatatagtttacggtgaaccccgcccatcaccctatgagaagatcccgcttgctgttgaagaacttacgccactgtgttctccccagctggctgagcggctaaagaaaccagaggatctctatgcgttgacattgattcagtgcgatgtgcagttgtaccagtggaaaggatggtttgaggcgaataagatgacgccacccaataattatggccttcgatttgaccgtagctttatggcgattgctgccgcagttgacggcttgggagttgtgcttgaatcaaaactactggctgaacgtgaaatcgctagcggtaaactggtatgcccacttgtaaacagtaccagcgaaatacattacatcggtcattatttggttttcccccagcaccaacacatgcattctgcgcttgatgtgttcaaaacctggctactgaatgaactcaatctgggtaaaattcgttga

SEQ ID NO: 29969 - DNA, 1566 bp, Homo sapiens
  SIMILAR (864)..(247): 991254mologous to Escherichia coli K12 putative oxidoreductase,accession number AE000373,Smith-Waterman Score=1037.
tcactgcaagcgaatgccggagatgtaataagcatcatcggatcgtcgggatcggggaaaagtacctttctgcgctgcattaacttcctcgaaaaaccgagtgaagggtcgatcgtggtcaatggccagacgatcaatgccgttgccatcagagcagctggttcttggtacagctatattcatatttagtcccaaggtgtagttgctaaatagagctggatttggaaccggattaatggtttgaaacgcctgcccaatatacaaatagatcgccagaaagtggcacacactaccgccgagcacgaagccgtgccagatggcatggttgtatggaatgcgtttgcagacgtagaaaatcaccccgagcgaataaaccacgccgcctaccgccagtaaggtaacgctgcccgccgcgagcttaactgccatttcataaattaccaccagcgacagccagcccatcgccagataggtcaccagagataaaattttgaatcggtgcgcgatggtcagtttaaacagaatacccagcaatgccaggctccagataacaatcatcaacccgcgcgctaacggagaatccagccccaccagcaaaaacggcgtgtaggttccggcaatcaacaggtaaatagcgcaatggtcaaatttcttcagccacatttttgcccgttgatgaggaatggcgtgatagagcgtcgaagcgaggaacagcaagatcatactgccgccatagaggctgtagctggttatcgctgtggcgctggcattaagatccaccggctgaaccagtagcaacaccagcccaacgataccaaacaccaacccaatgccgtgactgacgctgttggctatttcctcactggccagatcttcatcgatgatctgacggataaagttagtcgggcgggcttctgcctcactcatcgtggattcctcaaagcgtaaacaacgtataacggcgtatgattttttgatttcatacagcggtgtttgacccgccacaatatggccctgagctttaatgatcaagccactgaaatcgtcgatattgctgcaaaccaccgggctaatcatcgagcgggcgttagcgttcaggtaatccagatccatttccagaatctgggtgtccggattggtggcgataaaacgtgcaccgttagcgacgaaataggctgctttatgcatcatgtcccagttgtaggaacgcgtttcgccaacaatcacgaaatcagggttcacatcggtaatagtgaaaccggctttgtacagttcataaatcagtgcgccttcgcccaccacatacgctttcttgccttcctggcgacgcaggaaatcggcagtcgccatcgcagaggtataaaacacgctgtcaggtacatcgacacctgcggtggcaaagcggttcgccagatcttgcccagtctgcgaaggatagttggtcagcaacaccagcggcaggcctttatccataatcccgtgcaaaaattccgctgcacccggtacggcgacgttatcgtgcatcagcacgccgtcgatatcgcaaattacatttttaatggtcat

SEQ ID NO: 29970 - DNA, 1650 bp, Homo sapiens
  SIMILAR (730)..(1551): 911254mologous to Escherichia coli Acriflavin resistance protein D,accession number D90845,Smith-Waterman Score=1204.
  misc_feature (1)...(1650): n = a,t,c or g
atgggacacgcggcggaaagttatacgctattgaccattggcgacggtctggtggcacaaattccggcgctggtgatttctaccgccgcgggggtcatcgttacgcgtgtcagcaccgatcaggatgttggcgagcagatggtgaatcagctttccagtaacccaagcgagatctttttgcttgctgaacgggatgcggcaacgttgctggcgctgctgaccagcgatgatgcgccgaccgacgacgtgttaagcgcggagtttgtggtgcgcaatgaacacggcctgcatgctcgtccaggtaccatgctggtcaataccattaaacaatttaacagtgatattaccgtgacaaaccttgatggtaccggcaaaccggcaaacggacgtagtctgatgaaagttgtggcacttggcgttaagaaaggtcatcgcctacgctttaccgcccagggtgcagatgctgaacaggcgctgaaacatatcggcgacgctatcgctgctgggcgcataatgagcagacgtgttgctactatcacccttaatccggcttatgaccttgttggtttctgcccggaaattgaacgcggcgaagtgaacctggtgaaaaccaccggtctgcatgcggcgggtaaaggcatcaacgtggccaaagtattaaaagacctgggaattgatgtcaccgttggcggcttcctgggccaaccagtatcgcgtggtgctggagccaacaccgaaaataccccaggcctcgcggcgctggataccattcgcctgaccagcagcgacggcggcgtggtgccgctaagctcaattgccaaaattgagcagcgttttgcgccgctctccatcaaccatctggatcagttcccggtaacgaccatctcctttaacgtgccggataactattcgctgggcgatgcggtgcaggcgattatggacaccgaaaagacgctgaatctgccggtggatatcaccacgcagttccagggcagcaccctcgccttccagtcggcgctgggcagcactgtctggctgattgtcgcggcggtggtggcgatgtatatcgtgctcggcattctgtacgagagctttattcacccgatcaccattctctcgacgctacccaccgcaggngttggcgcactgctggcgttgctgattgctggtagcgaactggatgtgattgcgattatcggcattattttgctgatcggtatcgtgaagaagaacgccatcatgatgatcgacttcgcgctggctgctgagcgcgacataggcatgtcgccgcgcgaggcaatctaccaggcttgtctgttgcgttttcgtccgatcctgatgaccactctggcggctctgcttggcgcgctgccgctgatgttgagtaccggggtcggcgcggaactgcgtcgtccgttaagtaatcgcatggtcggcggtctgattgtcagccaggtgctgacgctgtttaacacgccggtgatttattttgctgttcgaccgcctggcatttgtggaccaaaagccgctttgccccgtaatgaagaggaagaatccagcgcattaacaccgctttccacgcagccgaagcactggtcgaaaccttcatcgcgcacgtgttcgacgcaccatcgcaaatcatgccgctga

SEQ ID NO: 29971 - DNA, 1206 bp, Homo sapiens
  SIMILAR (1206)..(382): 961254mologous to Escherichia coli 50k outer membrane protein oprK,accession number D90699,Smith-Waterman Score=1317.
  misc_feature (1)...(1206): n = a,t,c or g
tcaggcaggtgatgtggcctttccgggcctcagtttcccgatctgtgaaatggtcagaacttctccaggtgcccgtgaggaccagactggagggaacgcattgcagaagtgtaggtgggcatggacgctcaataaacaacaggagccgcggttaatttctttctctcgcggaagaaaaacacagccaacattgcaaaagaacggctgcagattattgttgctgaacgccgtcgcagcgatgcagaaccgcattatctgccgcagttgcgtaaagatattcttgaggtcatttgtaaatacgtacaaattgatcctgagatggtaaccgtacagcttgagcaaaaagatggcgatatttctattcttgagctgaacgtgaccggaagcagaagagctgaaataagcccgggcngtcgccattaacgcgtgttcagcttccataatatccgggcgctgcaataagatttgcgacgacaatcccgccggtaatttaacgctttgcaggctgtcgctgtttactgtctgcgcttgcggcagcttgccgtagcttcccagcaacagttgcaatgcattattcgcctgcgccagttccccctgacgtttagcgatgtcgctgcgggtactttctatcaccccgcgagcctgttccagcgccagaacattactgctacctgtcaacagttgtttttcgacaaacgcatatgactgctgataattacgcagcgtttcttcggctatttgcaattgcgcatacgccagttgctgattgaaatagctttgcgcgacattagaaaccagcagaatatgcaccgcgcgctgagcttcctcagtggctaaataattttgtcgctcggcttcgctcatgttctttaagcgaccgaaaaaatcgaggtcaaagctggcgttaaggccggtcgaaaactcccgtgtcgtggcggtattccctttaagattaccgctccagctgccgctgccctcgccattgagctgtgggtagcggtcggcatcggtcagacgatattgcgcccgtgcctcctgcactttcagcgtcgccatgcgcaaatcccgattattcaccagcgcctcgctaatcagcgtcttcacctgattatcaacaaaaaaggtgcgccagcccgcgttctgatagttatctgctgcgttaaccaggccgttctggctgagtgagaactgctgcggcacgggcat

SEQ ID NO: 29972 - DNA, 3348 bp, Homo sapiens; identical to SEQ ID NO: 25429
  SIMILAR (2632)..(3327): 991254mologous to Escherichia coli Acyl-CoA dehydrogenase (EC 1.3.99.-),accession number D83536,Smith-Waterman Score=1202.

SEQ ID NO: 29973 - DNA, 3534 bp, Homo sapiens
  SIMILAR (25)..(837): 991254mologous to Escherichia coli Adhesin AIDA-I precursor,accession number D90839,Smith-Waterman Score=1380.
atgccggacagattcatttcacctgccacccgcacagggaagttcgtaccggcaaccctgaaagtgaaaaacctgaacggacagaatggcaccatcagcctgcgtgtacgcccggatatggcacagaacaatgctgacagactggtcattgacggcggcagggcaaccggaaaaaccatcctgaacctggtgaacgccggcaacagtgcgtcggggctggcgaccagcggtaagggtattcaggtggtggaagccattaacggtgccaccacggaggaaggggcctttgtccaggggaacaggctgcaggccggtgcctttaactactccctcaaccgggacagtgatgagagctggtatctgcgcagtgaaaatgcttatcgtgcagaagtccccctgtatgcctccatgctgacacaggcaatggactatgaccggattgtggcaggctcccgcagccatcagaccggtgtaaatggtgaaaacaacagcgtccgtctcagcattcagggcggtcatctcggtcacgataacaatggcggtattgcccgtggggccacgccggaaagcagcggcagctatggattcgtccgtctggagggtgacctgatgagaacagaggttgccggtatgtctgtgaccgcgggggtatatggtgctgctggccattcttccgttgatgttaaggatgatgacggctcccgtgccggcacggtccgggatgatgccggcagcctgggcggatacctgaatctggtacacacgtcctccggcctgtgggctgacattgtggcacagggaacccgccacagcatgaaagcgtcatcggacaataacacttccgcgcccgggttcgacctacagccatttcttaatggcagcatcattggatcaagtgtcatcggctggcaggtgtgccgtgagctggcgggggttgaacgtatctatgcaatgcgcaaaaaagccgttggtctgcttggcaatgccaaaggtgccgctaagccaattccgtttgctgaggatacctgcgtaccgccggaacacctggcggattatattgctgaatttcgcgcgctgctcgacagccacggcttaagctacggtatgttcggtcacgtcgacgcaggtgtcttgcacgtccgtccagcgctggatatgtgcgatcctcaacaagagattttgatgaagcaaatctctgatgacgtggtggcgctgactgcgaaatacggtggtttgttgtggggcgagcacggcaaaggttttcgcgctgaatacagcccggcgtttttcggtgaggaactttttgcagaactgcgcaaagtgaaagcggcatttgacccgcataaccgactcaacccagggaagatttgccctgccagaaggtctcgatgcgccgatgatgaaagtgatcgcgttgaatgcgcggtacattcgatcggcagatccccattgcggtacgccagcagtggcgcgtccgatgtgtccgtcgatgaagatcacccagaaccggattcattcaccgaaagggcgcgcaacgctgctggcatgcgaataaaggcgaatatgacttctcacacgaatgtcaaagaggcgatgtcgggctgtctggcctgtaaagcgtgttcgacccagtgccccatcaaaattgatgtgccggagtttcgctctcgttttctgcagctctatcacacccgttattacgcccgctgcgcgaccacctcgtctgctacggtcgagagctacgcgccgctgatggcacgcgcgccgagaaccataacttgttcatcaaccagccgctggaacaactgtcggtcactgcctgatgtttcgtatttacgcccaacacttcgcatcggtgggcgaaacgttgcatccttcatcgatatcgcatcttcaccaccagcgacggtggaagaacgcatcacatccggtccggcattcagcaccattacgccagcctctgcgcccgcactacacggacaatccacgcgcccgacctttgtactgtggtttcagctctgcgccaatcaacagccccataccgcgaatatcgctaaatacatcgtactgctgatcgatcttctgcagatggtcaacaaaacgctggcgtttcgcctgaatgccttccagcacttcaggcgtattgatgatatcaaacgccgcccccgctactgcacaggccagaggattaccgccgtaggtggaaccctcgcgcaagccctgcaaaaactctggcgtcgctgccgtcacaccgccctcgccctggatcggctcaaccaccaccgcacaggtgtgatcatccatcaccgctttcactgcatggagatcgttaaagggaacgtggatgatgtctgccggtttcggcccaaagccgtcggaatattttggctgcccacccaccgaaacggtaaacagcgagcgaccatgaaaagcgttatggaaggcaataattttggttttgaacgggctatgacgcacacaggcgtaatggcgtgccagtttaaaggcggtttcgttagcttccgtgccggagttcataaacaccacgcgttcggcaaacgttgcctcaatcagtttacgcccaagacgcagcgccggttcattgcgaagcctgcgatacgccgccagcattttgtggctcgattgcgtttcgaagatcacttttcccgcaacacgctcgccgctcataccacttttaccctggtagatcggatgaaaatgggtgtacggcacccaggcagaatcgaagtgaatcgacgggacatccagcgtctgtttgatccagtcggtgttgtagagcaagccatcataggtggagttggtgatcaccgcatgaaccggccattgtgcttgcgtggtagcagcgactttctcttcgatgctgtcgcgagtaaattcacggcgcgggatcccaccaagaatccccaacgcattacgcgtcggtttcagccagactggcactacatcgttcatcatcaacagatgcgccagcgatttatgacaattgcggtcgatcaacagcgtactgccggatggcgcggcgtacatacccacaattttgttcgacgtcgatgttccgttggtaacgatataactctgttccgcgccaaaagtccgcgcgatgtactcttccgcttccaggtgtggcccggtgtggtcgagcaacgaaccaagctcggtgaccgaaatagagacatcagccttaagagtattcccgccgaaaaaatcataaaacagacagccaaccgggcttttttgatatgcggtgccgcccatatgccccggcgtacaaaaggtgtacttccgctctttgacgtagtccctatgcgtttacctgtgcacaataaattaccggctggaagcctgggcgtttattaccgcagatggaatgccctgcaacatgtggggaaacgaaaaatggagctgacgatgaaaccattacttgcctcaccctcgctgccattagtgacttatcctgcgagcgccacggaacagactggagacattcgccatgctgactgcgtgacgggctga

SEQ ID NO: 29974 - DNA, 2991 bp, Homo sapiens
  SIMILAR (931)..(1767): 1001254mologous to Escherichia coli 1- phosphofructokinase,accession number X53948,Smith-Waterman Score= 1441.
atgcccgtgccgcagcagttctcactcagccagaacggcctggttaacgcagcagataactatcagaacgcgggctggcgcaccttttttgttgataatcaggtgaagacgctgattagcgaggcgctggtgaataatcgggatttgcgcatggcgacgctgaaagtgcaggaggcacgggcgcaatatcgtctgaccgatgccgaccgctacccacagctcaatggcgagggcagcggcagctggagcggtaatcttaaagggaataccgccacgacacgggagttttcgaccggccttaacgccagctttgacctcgattttttcggtcgcttaaagaacatgagcgaagccgagcgacaaaattatttagccactgaggaagctcagcgcgcgtccatgaccattaaaaatgtaatttgcgatatcgacggcgtgctgatgcacgataacgtcgccgtaccgggtgcagcggaatttttgcacgggattatggataaaggcctgccgctggtgttgctgaccaactatccttcgcagactgggcaagatctggcgaaccgctttgccaccgcaggtgtcgatgtacctgacagcgtgttttatacctctgcgatggcgactgccgatttcctgcgtcgccaggaaggcaagaaagcgtatgtggtgggcgaaggcgcactgatttatgaactgtacaaagccggtttcactattaccgatgtgaaccctgatttcgtgattgttggcgaaacgcgttcctacaactgggacatgatgcataaagcagcctatttcgtcgctaacggtgcacgttttatcgccaccaatccggacacccacgggcgcggtttttatcccgcttgtggcgcgttgtgtgcagggattgagaaaatctccgggacctgcaggacggcaagattcaattttactatcacccttaatccggcttatgaccttgttggtttctgcccggaaattgaacgcggcgaagtgaacctggtgaaaaccaccggtctgcatgcggcgggtaaaggcatcaacgtggccaaagtattaaaagacctgggaattgatgtcaccgttggcggcttcctgggtaaagacaatcaggatggttttcagcaactgttcagcgagctgggcattgccaaccgtttccaggttgtacaggggcgcacccgaattaacgttaagctgacggaaaaagacggcgaagtgaccgacttcaacttctcgggttttgaagtcacccccgccgactgggaacgctttgtgactgattctctgagctggctcggtcagttcgatatggtctgtgtcagcggaagcttaccgtcaggcgtcagcccggaagcgttcaccgactggatgactcgcctgcgtagtcagtgtccttgcattatctttgatagtagccgtgaagcgttagtagcaggtttgaaagcggcaccgtggctggtgaaacctaaccgccgcgagctggaaatctgggcaggccgtaaactgcctgaaatgaaagatgtgattgaagctgcacatgcgctacgtgaacaaggcatcgcgcatgttgttatttcactgggtgccgaaggcgcgctttgggttaatgcctccggcgaatggatcgccaaaccaccgtcagtcgatgtcgtaagcaccgttggcgcaggggattctatggttggtggcctgatttatggcttgctgatgcgtgaatccagtgaacacacactgcgtctggcgacagctgttgcagccctggcggcacgcgcctatatggcgaagaccctgctgggcgcggcggcgcgaaaagcaaaactggaaatcatcgacaatccgaacgacgctgaaatggggattgttctcggtgattccatcccgaacgacagcgcgctgaacggcatgatcaaccactacggcaccaccccgctcattcgccagtgcgtcacgcccggcatgatggcattgcatgaaggccgcacatatcgcgtctcagcagtcattcaggagcgcaaatgggtctacctgcacaccgacgcagaaatcatccgccttcatgactgcgtgattgacataacaccaatgccggggattctctcgagtcgcgctaagccaattccgtttgctgaggatacctgcgtaccgccggaacacctggcggattatattgctgaatttcgcgcgctgctcgacagccacggcttaagctacggtatgttcggtcacgtcgacgcaggtgtcttgcacgtccgtccagcgctggatatgtgcgatcctcaacaagagattttgatgaagcaaatctctgatgacgtggtggcgctgactgcgaaatacggtggtttgttgtggggcgagcacggcaaaggttttcgcgctgaatacagcccggcgtttttcggtgaggaactttttgcagaactgcgcaaagtgaaagcggcatttgaccctcataaccgacttaaacccaaggaagaattgcccgcccgaaagttctttatcccccaaaaacaaaatggaacccgtgaaagccctgtcatatcattgggagatcccaatggggcctcaggatttccacctaatgcttttgcttatcatttcgtctctgctgaaaattccttccctcaatctgcctatgcccaagcattcttaaaaactaaaaaattgattgaactcgatgcctgcaagcctcatattgatgatatggtcaacggtattctctggctgctggataacgagctgcgcgggccatttaatatggtttcgccctacccggtacgcaatgaacaatttgcccatgcgctcggtcatgcgctgcatcgcccggccattttgcgcgtccccgcgaccgccattcgactgttaatgggcgaatcttcagtactggtattaggtggacaacgcgcgctgcctaaacggctggaagaagcgggttttgcgtttcgctggtacgatttagaagaggcgctggcggatgtcgttcgctga

SEQ ID NO: 29975 - DNA, 3939 bp, Homo sapiens; identical to SEQ ID NO: 24800
  SIMILAR (1765)..(2385): 981254mologous to Escherichia coli K12 putative membrane protein,accession number AE000234,Smith-Waterman Score=980.

SEQ ID NO: 29976 - DNA, 751 bp, Homo sapiens
  SIMILAR (323)..(748): 1001254mologous to Escherichia coli Unknown protein from 2D- page (spots pr25/lm16/2d_000lr3) ,accession number D90701,Smith- Waterman Score=712.
tgccgtaatacgcagaatattattatctgcctgttcaacgcccggatcgggaacattttctacctgaacgtgatgtgggccgcgataagtcaatgctttcatgcaacctccagagacagttcaaaaaagagtcagtctttaaggttagctatcacagcgggaaaacgggcggtaccacaggttttgggagaattcctggtgttcagtgagaatatattcatcacagaaacagttcgtaaggaaaaagaaccagacaaatatcagggataaatattataatcatggcgaatgatttgttcatgattaacagggagaaagggttatgtataagacaatcattatgccagttgatgtatttgaaatggaattgagcgacaaagctgttcgccacgctgaattcctcgcccaggatgacggagttattcatctacttcacgtactacccgggtcagccagcctgagcctgcaccgttttgccgctgatgtgcgtcgttttgaagagcatctgcaacatgaagcacaagaacgtctgcaaacgatggtcagccacttcaccatcgatccttcccgcattaaacaacatgtccgttttggtagcgtgcgggatgaagtcaatgagttggcagaagaactgggggctgatgttgtagttattggttctcgcaacccatcgatttcgacccatctgttaggttctaacgcctcgagcgtgatccgccacgccaatctgccggtgctggttgtgcgttaa

SEQ ID NO: 29977 - DNA, 1341 bp, Homo sapiens; identical to SEQ ID NO: 10326
  SIMILAR (808)..(1332): 981254mologous to Escherichia coli K12 regulator of melibiose operon,accession number AE000484,Smith-Waterman Score=873.

SEQ ID NO: 29978 - DNA, 4343 bp, Homo sapiens
  SIMILAR (268)..(1524): 991254mologous to Escherichia coli Probable ATP-dependent helicase dinG homolog,accession number D90825,Smith-Waterman Score= 2135.
atgacccgcgacaacccagtcatcccacgctttattcatcgccgcgaagtcgtttttatcggccaggaaaatggtggcatccagaatgctcgatttattgctgccctgtttttccagcacggcgtcaatctgtgccagcgtgttggcggtttgctcaaaggcatcggcgtcgaggttttccggtacaccagtgtagtagagcgtgttgttgtggattactacatcagaccagcgggcttcagcatcgatacgaacgataggggtagtgtgacggacgattttgcaccagacggtcagctggcgaaagcgataccaggctttaagccgcgagaaccacagcgacagatggcggtagccgtcacccaggcgatagaaaaaggccagccgctggtggtggaagcaggaaccggtacgggcaaaacctacgcttacctggctcctgcgctgcgggcgaaaaagaaagtcattatctcgaccggctcaaaagcgttgcaggatcagctctacagccgcgatttgccaacagtctcaaaggcattgaaatatacgggcaacgtggcgctgctgaaagggcgctcaaactacctctgcctcgaacgtctcgaacagcaggcgctggcggggggcgatctgccggtacaaatcttaagcgatgtgatcctgctgcgctcctggtctaatcaaacagtcgatggtgatatcagcacctgcgtcagcgtggcggaagattcacaggcgtggccgctggtcaccagcaccaacgacaactgtcttggcagcgactgcccgatgtataaagattgctttgtggtcaaagcacgtaaaaaagcgatggacgccgatgtggtggtggtaaaccatcatctctttctggcggatatggtggttaaagagagtggatttggcgaactgatcccggaagcggacgtcatgatcttcgacgaagcccaccagctaccggacattgccagccagtattttggtcagtcactctccagtcgacaactgctcgacctggcaaaagacatcaccatcgcctaccgcaccgaattaaaagacacccagcagttacaaaagtgcgctgatcgtcttgcccagagtgcgcaggattttcgtctgcaactcggtgagccaggttatcgcggtaacctgcgtgagctgttagctaatccgcaaattcagcgggcatttttactgctcgatgacaccctggaactttgttatgacgtggcgaaactgtcactggggcgttccgccttgctggatgcggcatttgagcgcgccacgttgtatcgcacacggctgaagcggctaaaagagatcaatcagccgggctacagctactggtacgaatgcacttcgcgccattttactctggctctcacgccgctcagcgtggcggataaattcaaagagttaatggcgcaaaaacccggtagctggatcttcacctcagcaacgctgtcggtgaacgacgatctgcatcatttcacctcgcggcttggcatcgaacaggccgatagctgttctataggaaacagctatgtttttagactagtcattggagaacagatgattgatgtcttagggccggagaaacgcagacggcgtaccacacaggaaaagatcgcaattgttcagcagagctttgaaccggggatgacggtctccctcgttgcccggcaacatggtgtagcagccagccagttatttctctggcgtaagcaataccaggaaggaagtcttactgctgtcgccgccggagaacaggttgttcctgcctctgaacttgctgccgccatgaagcagattaaagaactccagcgcctgctcggcaagaaaacgatggaaaatgaactcctcaaagaagccgttgaatatggacgggcaaaaaagtggatagcgcacgcgcccttattgcccggggatggggaacgaaccgatgactggatggatggccgccgcagtcgtcacactgatgatacggatgtgcttctccgtatacaccatgttatcggagagctgccaacgtatggttatcgtcgggtatgggcgctgcttcgcagacaggcagaacttgatggtatgcctgcgatcaatgccaaacgtgtttaccggatcatgcgccagaatgcgctgttgcttgagcgaaaacctgctgtaccgccatcgaaacgggcacatacaggggcagaaggttgtggcccggttgaacaaggcaacagccaattccagcgaaatgcactgcactgggcggtcactaccggcggcttcaacagtgaaacagtacaggacgtcatgctgggagcggtggaacgccgcttcggcaacgatcttccgtggtctccagtggagtgcctgacggatattggttcatgctaccggcctaatgaaacacgccagttcgcccggatgttgggacttgaaccgaagaacacggcggtgcggagtccggagagtaacggaatagcagagagcttcgtgaaaacgataaagcgtgactacatcagtatcatgcccaaaccagacgggttaacggcagcaaagaaccttgcagaggcgttcgagcattataacgaatggcatccgcatagggcaaatccagatgccaacgtagtcagcgaagatgtgctgcgtgagagcgtcggtaagtcggtcgttaaccttattcacggcgtgcgtgatatggcggcgatccgccagctgaaagcgacgcacactgattctgtttcctccgaacaggtcgataacgttcgccggatgttattggcgatggtcgatgattttcgctgcgtagtcatcaaactggcggagcgtattgcttatctgcgcgaagtaaaagatgcgccggaagatgaacgtgtactggcggcaaaagagtgtaccaacatctacgcaccgctggctaaccgtctcggaatcggacaactgaaatgggaactggaagattactgcttccgttacctccatccaaccgaatacaaacgaattgccaaactgctgcatgaacggcgtctcgccgccctgttcatccggcgggccgtaaaccgggatcggatcgccaacgccccagcgcagcggaaacagcccctggacgtgatccatatgataatgcgtcagcaaaaactgctggaacgatccgggcgaccagcgatcggcgagatcgtgcagcccggcgtcgatcagggtgattgcgtcgttaaacttcactacgccgctgcacggttggcggcgatactgcggcgagcgccgcgctctggcgcaggccgcacactcgcagccccatgccggaacgccctgtgcgccgccggtgccgttgacatgatgcagatgaaactgcaaatgcaggccgatcatgccgacaacttcgccatcaagcagcgccagatggtagcgcatgtttgggtcgcgcagattggcgttaaaacccacgcgaaacgcgtggtggaaagagagccatccatgaatacagatacgtttatgtgcagcagcgacgaaaaacagacccgcagcccgctgtcgctgtattcggaataccagcggatggagattgagtttcgcgcaccgcatatcatgcccaccagccactggcatggtcaggtcgaagtgaatgtgcctttcgatggcgatgtggaatacctgatcaacaatgaaaaagtgaatatcaatcagggtcatatcacgctgttctgggcctgtacaccgcaccaactaacagataccggaacctgtcagagcatggcgatttttaatctgccgatgcatctgtttctctcctggccgctggataaagacctgattaaccacgtcactcacggcatggtgatcaaatcactggccacacagcaacttagcccgtttgaagtgcgccgctggcagcaggaattaaacagtccgaacgagcaaattcgccagctcgccattgatgaaattggcctgatgctcaagcgatttagcctctctggctgggaaaccgaatctgggcaataaaaacctcgcgcacacacaaaaacagcgtctcgcgccatgcgcaattttatgttagccagatgctgggctttattgccgaaaactatgatcaggcgctgaccatcaacgatgtggctgagcacgtcaaacttaacgccaactatgcaatggggatattccagcgggtcatgcaattgacgatgaaacagtacattaccgcgatgcgcatcaaccacgttcgcgcgttactgagcgataccgataaaagtattctcgatattgccctgacggcaggctttcgttcaagtagtcgtttttacagcacgttcggcaaatatgtcggcatgtcgccgggatcctctagatcgacctga

SEQ ID NO: 29979 - DNA, 1026 bp, Homo sapiens
  SIMILAR (388)..(1023): 1001254mologous to Escherichia coli K12 regulator of melibiose operon,accession number AE000484,Smith-Waterman Score= 1087.
atgaacaccaccggacacaacaaacacaaacccaaccagaggaccgacaacacgtacacacccacacaccacaagcaggccgcgcaccgatacgccagcagaagccaaccgcccgaccaagagagcatgacaaacccgcgaccagccggcggacagaacgggaacgacgaggggagaaagacctccctcatcaggtccagcgaccctccgcaccaagcagcgcgccagaaagggacagccgccccctccccgccgcaccgccgaacagaagacgtgcacgccgaggacccggcagtgcacgcctcctgtctacaggtcgactctagagcatcccctttcgatggcgatgtggaatacctgatcaacaatgaaaaagtgaatatcaatcagagcatggcgatttttaatctgccgatgcatctgtttctctcctggccgctggataaagacctgattaaccacgtcactcacggcatggtgatcaaatcactggccacacagcaacttagcccgtttgaagtgcgccgctggcagcaggaattaaacagtccgaacgagcaaattcgccagctcgccattgatgaaattggcctgatgctcaagcgatttagcctctctggctgggaaccgattctggtcaataaaacctcgcgcacacacaaaaacagcgtctcgcgccatgcgcaattttatgttagccagatgctgggctttattgccgaaaactatgatcaggcgctgaccatcaacgatgtggctgagcacgtcaaacttaacgccaactatgcaatggggatattccagcgggtcatgcaattgacgatgaaacagtacattaccgcgatgcgcatcaaccacgttcgcgcgttactgagcgataccgataaaagtattctcgatattgccctgacggcaggctttcgttcaagtagtcgtttttacagcacgttcggcaaatatgtcggcatgtcgccgcaacaataccgcaaacttagccaacagcgccgccagacgtttcccggctaa

SEQ ID NO: 29980 - DNA, 4809 bp, Homo sapiens; identical to SEQ ID NO: 17730
  SIMILAR (3834)..(3652): 1001254mologous to Escherichia coli L-rhamnose isomerase,accession number L19201,Smith-Waterman Score=323.

SEQ ID NO: 29981 - DNA, 752 bp, Homo sapiens
  SIMILAR (123)..(683): 941254mologous to Escherichia coli FIMBRIA A PROTEIN PRECURSOR,accession number D90864,Smith-Waterman Score=917.
  misc_feature (1)...(752): n = a,t,c or g
gcgtgaggtcgcctctagaggatcgcatgccgtattcaatggctgggataaacattggctattgactgaatcaatgtattgcaatgtttatattttaattatttatagtttaaggacaaataatgagtaagtttgttaaaacagctattgctgcggcaatggtgatgggcgcgttcacctctacggcaacaatcgctgcgggtaacaacggtactgcacgtttttacggcaccattgaagactcagtgtgttctatcgttccggacgatcacaaactggaagttgatatgggtgatatcggtgccgaaaaactgaaaaataacggcaccaccacgccgaaaaatttccagattcgcctgcaagattgcgtatttgatactcaggaaacaatgaccactacctttactggtaccgtttcttctgcaaatagcggcaattattacaccattttcaataccgataccggtgcggcatttaacaatgttagcctggcgatcggtgactctctgggtacctcttacaaaagcggcatgggtattgaccagaaaatcgcgacagatactgccactaataaaggcaaagcgaacgagaatgtgaactttaaagcctggatggtcggcgcacgtgatgcgcangatatgggtaatttcgaagcaaataccaccttccagattacttacctgtangcatacccccataacgaactgcgatgcngnatttaaatcgactatgagcgaaacaagaccaagacg

SEQ ID NO: 29982 - DNA, 1356 bp, Homo sapiens
  SIMILAR (1)..(594): 881254mologous to Escherichia coli K12 putative enzyme,accession number AE000183,Smith-Waterman Score=931.
atgaaagatacctggacggtcactgccgttaagccgaagtatcagacctatgtggtggtgatcggtgaaagcgcgcgtcgcatgccctcggtgcctttgcgcgttaacggtttgatatttgctgactacattgccgccagtggctccacgcagaaatcgcttggcttaacgctcaatcgcgttgtcgatggcaaaccacagtttcaggataactttgtcaccctggcaaatcgcgcgggcttccagacctggtggttttccaaccagggtcaaatcggcgaatacgataccgctatcgccagcatcgccaaacgagcagatgaagtgtacttcctgaaagaaggtaattttgaagcagataaaaacaccaaagacgaagcgttactggatatgaccgctcaagtgctggcgcaagagcactcgcaaccgcagctgattgttctacatctgatgggctcacatccgcaggcctgcgacaggacacaaggaaaatacgaaacctttgtgcaatcgaaagaaacgtcgtgctatctctataccatgacgcacacggatgatttactgggccagctgtacgatcagttacataaggcctgcaggcatgaagtgttcgccgcccaaaacctaaagctgagtaccgtgacaaccagcggggtgaatttatcccgcacctggcaggaagtaaaaggcagcgacgatgcctggttttacaccgtttttcagcttagtggtcaggcaataatggagcaggatgagcgtcaggagtcttctaaacagatttcattacttttgccacgcactctgctggaacaatattttccccatcaaaaacctatctgcgcagaaagactggacgctgacttacccatggtgcaactcagtcatcgcctgttacaggagagcatgaataatccggcactttctgaaacagaaagtgaactgcgctacaggcgatggaatgcagaggcggcgggaagatatgcccttaatgccactgaaaaactacataatctgtacagcaataaaaaggaattgtttgatggctaccacgtcactggcgtggttcttcttcgctggcaacttcttagtgccgtaatgatgtttctggccagcacactcaacatccgttttcgtcggtctgattatgtgacgtgtgatgggtgcccgatccgatccctcgcccgcaacccatgcctgacccaccacccgatgaagaaccgattaaattgtcgcatcgtgagcgtagatctgcgaggatacgcgcctgctaactttgcgtcgatgaccacgagaatagattgtgaccgctttttctaccctgaatgttttgcctcccgcccaactcacgaaccttaa

SEQ ID NO: 29983 - DNA, 2685 bp, Homo sapiens; identical to SEQ ID NO: 25792
  SIMILAR (1321)..(1752): 1001254mologous to Escherichia coli alternate name ygiM; ORF_o206,accession number U28379,Smith-Waterman Score=731.

SEQ ID NO: 29984 - DNA, 1707 bp, Homo sapiens
  SIMILAR (576)..(28): 1001254mologous to Escherichia coli phnI protein,accession number J05260,Smith-Waterman Score=933.
tcattcatcattctgaaagcagcaagccggcacaatcgacacgtcgatatagccgctgcggatctcgcctgcgaacgggtgattgcgcccgtaaccgcgttgggtggagtaggccagcgccagcaaatagccttcgtcgccgcgcatcaactgctgcaaacgggaggagcgtgagcaggggtaaaccggcggcgtgcgggtgatgtcatccggctgtgcgccgctatcctcttcaaacttcgccagcccctgacgcgccagcaggctgaaaacgtgcggcgacggctgctgttcgctgtcggcggtggtcagcgtcggcgcttcgccgtttgccagcagggtaaaatcgagcaggcgatgggtgtagtcgtaggttgggccaagcagctggccgccgggaatgtctttataaacggcggagatacggcgttcgagacgcatcccggtggtgtcgagcggctcgcttaccgccagcttcgccaacgtggtgcggtaggcgcgcagcaggaaaatcgcttcaacgttatcgccgctggcctgtttcagcgccagcgccgccagttcgcggtcggcaatggggatcctcacgccaataaactgaatatgcgttgataatagcacgactgccggatgcggcgtgaacgccttatccggcctacacttcgcccgtaagccgtaggcctgataagacgcgcaaagcgtcgcatcaggcatggcgcacgactgccggatgcggcgtgaacgccttatccggtctacacttcgcccataaaccgtaggccacatcaaatcatcaggcactttgaagtcggcatacgggtcgtcttcatcctgctcttcggcgctgagcgcgctgtgcaacactatactgctggcatcgcgctgagcaattttatcggcaacgctggcgggaataatggcgtattcaccttcgcagaaaatcattgatatggccatgaatggcgttggatgccgggcaaccgcccgcattatgggcgttggcctcaacacgattttccgccatttaaaaaactcaggccgcagtcggtaacctcgcgcatacagccgggcagtgacgtcatcgtctgcgcggaaatggacgaacagtggggatacgtcggggctaaatcgcgccagcgctggctgttttacgcgtatgacaggctccggaagacggttgttgcgcacgtattcgggcattcgctgccgctggtgagcatcatcggcaaaggggacgagcaggtgggctacttcggcgccatgtgcgtgctggggctgagcggcgtggtgctgctctacgtctgcttcttcacgaccaaagagcgctacacctttgaggtgcagccgggctcgtcggtggcgaaagaccttaagctgctgctgggcaacagccagtggcgcatcatgtgcgcgttcaagatgatggcgacctgctccaacgtggtgcgcggcggggcgacgctctacttcgtgaaatacgtgatggatcacccggagttggcgacccagtttttactttacggcagcctcgccaccatgttcggcccgctttgctcctcacgcctgctgggccgcttcgagccgcgtcaccgccttcaagtggatcatcgtcgcctactcgctgatcagcctgctgattttcgtcaccccggcggagcacatcgcgctcatttttgccctcaacatcctgttcctgttcgtctttaa

SEQ ID NO: 29985 - DNA, 987 bp, Homo sapiens
  SIMILAR (628)..(984): 991254mologous to Escherichia coli cysB regulatory protein,accession number M15041,Smith-Waterman Score=595.
atgcgtgtcatcaccctggcgggtagtcctcgctttccttctcgctccagctccttgctggaatatgcgcgggaaaaactaaatggcctggatgtagaggtttatcactggaatctgcaaaacttcgccccggaagatctactttatgctcgtttcgatagtccggcactcaagaccttcaccgaacagctgcaacaggccgatgggcctgattgtcccccccgccgtgttacatatgcgttcaccgaatacgtgcgcaacaaccgtcttccggagactgtcatacgcgtaaaacagccagcgctggcgcgatttagccccgacatagccccactgttcgtccatttccgcgcagacgatgacgtcactgcccggctgtatgcgcgagccagagtgtaccacgcctcccgtgaacaacgccgcgctgtccagggcatcggctcttttcagaggaattgtttgatggctaccctcaccactggcgtggttcttcttcgctggcaacttcttagtgccgtaatgatgtttctggccagcacactcaacatccgttttcgtcggtctgattatgtcgggcttgcggtgatcagcagcggtctgggctttagattatcgcagtgtgctctaaagctggatactgcctttaatcgcgcagggttaacgccgcgtatcgttttcacggcaacggatgctgacgtcattaaaacttacgtccggttagggctgggggtaggggtcattgccagcatggcggtggatccggtcgccgatcccgaccttgtgcgtgttgatgctcacgatatcttcagccacagtacaaccaaaattggttttcgccgtagtactttcttgcgcagttatatgtatgatttcattcagcgttttgcaccgcatttaacgcgtgatgtcgttgatgcggctgtcgcattgcgctctaatgaagaaattgaggtcatgtttaaagatataaaactgccggaaaaataa

SEQ ID NO: 29986 - DNA, 429 bp, Homo sapiens
  SIMILAR (1)..(429): 891254mologous to Escherichia coli similar to fructose- specific phosphotransferase enzyme II,accession number L19201,Smith -Waterman Score=680.
atgtccgacctcatgggcgggctgctccacttcctgaataccattcctccatcaatgaagtttgcggcagcgtttctggtcggtgcgatgctggcgttcgatatgggcggccccatcaataaaaccgcctggttcttctgcttctcactgctggaaaaacacatttatgactggtacgccatcgtcggcgttgtcgcgctgatgcgcccgtcgcggcgggaaaaagaggctgccagtagtgccattgtggtcggtgccacagtcgcaaccgaaccggctattccttacgctctggcagctccgttgccgatgattaccgccaatacgctggcgggcggcattaccggcgtgctggtgatcgctttcggaatcaaacgtctggcacctggtttgggtatctttgacccgctgatcggcctgatgtcgccg

SEQ ID NO: 29987 - DNA, 523 bp, Homo sapiens
  SIMILAR (1)..(345): 961254mologous to Escherichia coli K12 putative GTP-binding factor,accession number AE000399,Smith-Waterman Score=555.
atgctgctggctgacgtcggtatgttggggatgccaaacgcgggtaaatcgacctttattcgtgcggtatcggcggctaaaccgaaagtggcggattatccgtttaccactctggtgccaagtctgggtgtggtacgaatggacaacgaaaagagcttcgttgttgccgatattccaggactgattgaaggcgctgcggaaggcgcaggtctgggcattcgcttcctgaagcacctggaacgttgccgcgtcctgttgcacctcatcgatatcgatccgattgacggcaccgatccggttgaaaacgcgcgtattattatcagcgagctggacaacaattaccagccaggatctggcgacgaaaccgcgttggctgaagaagcgaaacagccagagaaagtcgaattcatgtgggatgattatcatcgccagcagcttgaagagattgctgaagaggatgatgaagactgggatgacgactgggacgaagacgacgaagaaggcgttgagttcatttacaagc

SEQ ID NO: 29988 - DNA, 705 bp, Homo sapiens
  SIMILAR (115)..(603): 721254mologous to Haemophilus influenzae Rd GTP-binding protein (yhbZ),accession number U32769,Smith-Waterman Score=594.
gattccgaccttgacagtgtcaagcaggcctgtcatggcgtctgtagagcgtccctcacgttgggtccgtctggtgtttcctcgcaattagactgggtgatgggttttgggaagacgcccacagagaggatccccctgctggagctgatgctgctggctgacgtcggtatgttggggatgccaaacgcgggtaaatcgacctttattcgtgcggtatcggcggctaaaccgaaagtggcggattatccgtttaccactctggtgccaagtctgggtgtggtacgaatggacaacgaaaagagcttcgttgttgccgatattccaggactgattgaaggcgctgcggaaggcgcaggtctgggcattcgcttcctgaagcacctggaacgttgccgcgtcctgttgcacctcatcgatatcgatccgattgacggcaccgatccggttgaaaacgcgcgtattattatcagcgagctggaaaaatacagccaggatctggcgacgaaaccgcgttggttagtgttcaacaagatcgatctgctggataaggctgaagaagcgaaacagccagagaaagtcgaattcatgtgggatgattatcatcgccagcagcttgaagagattgctgaagaggatgatgaagactgggatgacgactgggacgaagacgacgaagaaggcgttgagttcatttacaagcgttaa

SEQ ID NO: 29989 - DNA, 421 bp, Homo sapiens
  SIMILAR (1)..(375): 961254mologous to Escherichia coli RNA polymerase (rpoC),accession number M38305,Smith-Waterman Score=612.
atgatggataacctgcaaactgaacccgtgattaaccgtgacggtcaggaagagaagcaggtgggcttcaacagcatctacatgatggccgactccggtgcgcgtggttctgcggcacagattcgtcagcttgctggtatgcgtggtctgatggcgaagccggatggctccatcatcgaaacgccaatcaccgcgaacttccgtgaaggtctgaacgtactccagtacttcatctccacccacggtgctcgtaaaggtctggcggataccgcactgaaaactgcgaactccggttacctgactcgtcgtctggttgacgtggcgcaggacctggtggttaccgaaaacgattgtggtacccatgaaggtatcattgatgactccggttatcgagggtggtgacgttaaagagccgctgcgc

SEQ ID NO: 29990 - DNA, 2470 bp, Homo sapiens
  SIMILAR (323)..(643): 841254mologous to Escherichia coli Unknown protein from 2D- page (spots pr25/lm16/2d_000lr3) ,accession number D90701,Smith- Waterman Score=455.
tgccgtaatacgcagaatattattatctgcctgttcaacgcccggatcgggaacattttctacctgaacgtgatgtgggccgcgataagtcaatgctttcatgcaacctccagagacagttcaaaaaagagtcagtctttaaggttagctatcacagcgggaaaacgggcggtaccacaggttttgggagaattcctggagttcagtgagaatatattcattacagaaacagttcgtaagggaaaagaaccagacaaatatcagggataaatattataatcatggcgaatgaactgttcatgagtaacagggagaaagggttatgtataagacaatcattatgccagttgatgtatttgaaatggaattgagcgacaaagctgttcgccacgctgaattcctcgcccaggatgacggagatattcatctacttcacgtactacccgggtcagccagcctgagcctgcaccgttttgccgctgatgcgcgtcgttttgaagagcatctgcgacatgaagcacatgaacgtctgcaaacgatggtcagccacttcaccatcgatccttcccgcattaaacaacatgtccgtttttcacttactagtattaggaccatgcaagttctggaacacctggggcaggatcagtgcctgaaaaacaaaagtctattcccgattccatggggaagcttctacgcagcaccattgttactgttgacgctgattaccctggcgttgctcccactcttcctgtacattacctatcgagtcggcaccattcgtcgcgagatctccaagagcacgcagcgcagcctggcggatatgagtgcgctgaccgaggaaacgctctcggtgtctggtatgttgctgaccaaggcattcggacggcagacacgtcataacaagtctgtgcaggattatctgaaagtgcttaaggaaaaaaatgcgcagcagccttcagctgaatccgcccccggcgtcgctatcgcacctggcggcagaccggtctgcacttacgcgcaaacgaaagtctactcctttggtttgccaagtattttcaccttcatgcaaaccatcccgtcaacgggaattgatttcaccgtctgggccagcgttattggcggtgtcattgccatcggttgcgcatttgtcgttgcgctgtaccgttatcgctttcgtggtaagccgttcgttagcggaatgctgtttgtggtgatgatgtcaccagatatcgtgatggcgatttcgctgctggtgctgtttatgctgctgggtattcagcttggcttctggtcgctgctgttctcgcatatcaccttctgtcactcgagtctctctataagcagcgaggcatcgccagcaccagataacgaacccacggatcaggccgatcaggtagatccaaccaggtgccacgtgattccgaaagcgatcaccagcacgccggtatgccgccccagtatggcggtaatcatcggcaacggagctgccagagccctctttttcctgtcgggtaaacagtttgggcgcaatgaacgtcgcaagacccgccgcgacgggcggcatcagcgcgacaacgccgacgatggcgtaccagtcataaatgtgtttttccagcatgagaagcagaagaaccaggcggttttattgatggggccgcccatatcgaacgccagcatcgcaccgaccagaaacgctgccgcaaacttcattgatggaggaatgatagcaaaccagaaacgccggagcgaaagccggtttatcggcaatcgacgaggcaatataagcgcccatgatggggatcataaaggtgaagccaaggtaaccgatggattcaactacccagtcttcacggaagttcgcggtgattggcgtttcgatgatggagccatccggcttcgccatcagaccacgcataccagcaagctgacgaatctgtgccgcagaaccactgctgcacctctgttagacgcgtacactagaccctgcgttatcctatgtctggtgaaaacgctagtcgatagccgaggctgtcgattgactgcaagtctggtcgcaatcgcctgctggggcagcacggcagggtttagccgtattaggcgcgcgtctatccagctatccgtcgacgtcactagacttcgacttgcgcctacggtacgattcgagcttgcggacgaggcgggtatcagactcacatcaagagcgcggctaagtacgcgtgtatccatcagaactcacggggcatacacgcagcgaaacgaaccatttgaagccaaagtaccagttgatccgctgaaaaagaaaatcgccagtgtgtttcttgaatcttttttgttctattccggtttagccgccgataccgcacgaataaaggtcgatttacccgcgtttggcatccccaacataccgacgtcagccagcagcatcagctccagcagcagctcgcgcttatcgatagcgatatcaccgtaa

SEQ ID NO: 29991 - DNA, 879 bp, Homo sapiens
  SIMILAR (580)..(852): 841254mologous to Bacteriophage S13 D gene,accession number M14428,Smith-Waterman Score=391.
atggagaaggcaggcctggctccaggcagcacagaggcactgggtgccagccagcacctgggccaggcgccaggcggaagcgctctggcagatcagccccgcacccccaacagccccacagggggcccatccagggccacacacctgcccccaggagcaggacgtcctggccatgccatcggccacctgctcgtcttgtccgtgaggccttcccagctggccgggctcaccccgcggctcctgcacctgtgcctgcccggggaatctggggccatttcccactcttcaaccgtcagcgacatcttgggccttcttttccagacaggcaagtttaaccttcaacttccttcatttgatgagcaggtgatcccagccaggctcccgaagacggagatgagggcagaagagcccaaagaagcaacggaggtgaaagaccaggtagagacccaggggcaggaggacaataaaaggggcccctgtagcaatggggaagcggcctccacctctaggcccctggagactcagggaaacctcacttcctcctggtacaatcccaggaccttggagggaaatgtccacctcaagagcttgacagaaaacaaccagactgacaaggcccaggtgcatgcactcattcaggcttctgccgttttggatttaaccgaagatgatttcgattttctgacgagtaacaaagtttggattgctactgaccgctctcgtgctcgtcgctgcgttgaggcttgcgtttatggtacgctggactttgtaggataccctcgctttcctgctcctgttgagtttattgctgccgtcattgcttattatgttcatcccgtcaacattcaaacggggcccaactttgactgcatgctttga

SEQ ID NO: 29992 - DNA, 2649 bp, Homo sapiens
  SIMILAR (721)..(1701): 971254mologous to Homo sapiens Polycystic kidney disease 1 (PKD1) polypeptide,accession number W00870,Smith-Waterman Score= 1644.
atgaccgacctgtacgcacttgcccaagagtgttccctgtatgatctggatgcaagccgatactgcatggatgacctgcaggtgctctctgtctccacagtcgcctctgcagtgggagctcgggtgccccacattcccaactgctgcagacacaaccaaagcctccccatcccttcccccacccctgccggcaatcgcgtacaggagcacgttctgaacgcccgagtgcgggagcaacggatgcaggtgggaaagggcaaggccccgggtgctcctatattttacatcagtgaaccaagcacctaccaagtccctcgatgtgcccagtcctggaccccagcatttgcgagacagcagcagacccagcactactctctgccatccaggcactgttatgatccccgcctagcagacctaactattcagcgctacccttgcctgcttcagattctgaaagcatctcccagtgttcttgctaaagaggctctggaagggctccatataatgccagtcattcacctgcaaggagggtcaaagagaggcatctacggtccttgggaagcacctcctgtgggtggagcacaaatgaggggcttgagagatggagcccaggcccctgtgagtcagacgggctgctgcaagtgtgcagacctgctgtggggcaccgtggggccgccgcagcagccttccaccaccagccccggctcaggcaggcctctaggaggcaaaggtccttcaccccgatcccaggtgctgatccggagtggccgggtgcccattgtgtccttggagtgtgtgtcctgcaaggcacaggccgtgtacgaagtgagccgcagctcctacgtgtacttggagggccgctgcctcaattgcagcagcggctccaagcgagggcggtgggctgcacgtacgttcagcaacaagacgctggtgctggatgagaccaccacatccacgggcagtgcaggcatgcgactggtgctgcggcggggcgtgctgcgggacggcgagggatacaccttcacgctcacggtgctgggccgctctggcgaggaggagggctgcgcctccatccgcctgtcccccaaccgcccgccgctggggggctcttgccgcctcttcccactgggcgctgtgcacgccctcaccaccaaggtgcacttcgaatgcacgggctggcatgacgcggaggatgctggcgccccgctggtgtacgccctgctgctgcggcgctgtcgccagggccactgcgaggagttctgtgtctacaagggcagcctctccagctacggagccgtgctgcccccgggtttcaggccacacttcgaggtgggcctggccgtggtggtgcaggaccagctgggagccgctgtggtcgccctcaacaggtctttggccatcaccctcccagagcccaacggcagcgcaacggggctcacagtctggctgcacgggctcaccgctagtgtgctcccagggctgctgcggcaggccgatccccagcacgtcatcgagtactcgttggccctggtcaccgtgctgaacgagtacgagcgggccctggacgtggcggcagagcccaagcacgagcggcagcaccgagcccagatacgcaagaacatcacggagactctggtgtccctgagggtccacactgtggatgacatccagcagatcgctgctgcgctggcccagtgcatgctcattcaggcttctgccgttttggatttaaccgaagatgatttcgattttctgacgagtaacaaagtttggattgctactgaccgctctcgtgctcgtcgctgcgttgaggcttgcgtttatgcaaaacacagcaatcttgagatggcagagatggtcaccaaagctggccatggtgtcaggactaagttgggcgaccgccaccatagtgattcagcgtctgtcgtcgtcacgggacacccttgcgatgatcatcaactctatacacagacggccacagtggtcttcggcggcgcccattgcgacaagaagctaagaactttgataacaggttacaggaactggccaactagaataaccagtttagagaagaatataaatgacctgatggagctgaaaaacacagcacgagaacttcgtgaagcatacacaagtatcgatagccgaattgatcaagcagaagaaaaaatatcagagattgaagatcaacttaatgaaataaagcgtgaagagaagattagagaagaaagaatgaaaaggaatgaacaaagcctccaagaaatacgggactatgtgaaaagaccaaacctacatttgactggtgtacctgaaagtgactgggagaatggaaccaatttggaaaacacaattcaggatattatccaggagaacttccccaacatagcaagacaggccaacattcaaattcagaaaattcggagaacatcacaaagacacttcttgagaagagcaagacacataatcatcagattcaccaaggttgaaatgaaggaaaaaatgttaagggcagccagaaagaaaggtcaggttacccacaaagggaagtccattaggctatcagcagatttctctgcagagaccctacaagccagaagagagtggggaccaatattcaacatgatgaacaggagttcttattcgacatag

SEQ ID NO: 29993 - DNA, 953 bp, Homo sapiens
  SIMILAR (854)..(774): 811254mologous to Escherichia coli K12 putative enzyme,accession number AE000375,Smith-Waterman Score=97.
ttaaccagactggccatcgggtgccagtgccgatgcttcaatgacggcaacatcaaggttccccggagaaccgtaatggaccatttgcgccacttcgctcaaatgcaggtcaacgaaactcaccgcgccctgattgatctttttacgtaaaccggacgatgtttgatatggcgcccccccaggaaacagcatcggcgtcagaaagtacatcgtcagcggcggcgctgattgacgcacccgtcagaaggcgaatttgatacggctttttggcctcatgctgttcgttagctctgcgggcaatcgcggtgggtagggctttcggcgaacccgccggggtaaagccgctaaatgccaccatgtcgttatgctggataatttctgccgcttcattggcggtcatccttgtccactgagtttccatttttactcgtttttcgaggaaagcgttcatcccttcctggtaatcttcgctgtcatacaccgcgcggcgcatcccctgaatacgttcaaattcatcggagttcatggtgtgtgcttcgcccagtacacgcagctcttctttgataacggcaatggctaacggcgctttctcagagatgtggtgcgccatttgtaaggtgaaatcttccagttcttccacttccacaacatggttgaggatgccgacagccagcgcgcgctgggcggtgattggcgaagcggtaaaaatcagctctttgacaatgtggaagcccgcgtcgcgggtcaggttgtgaatgccgaccaggttatacgggacacacaaggtttacaggcgtcattgagaaggttgaggtactggcggcgatgatcagatcggaactccttgacctttcagcaggaactgaaggtagagcacgttcgaagactgccaagtccaggacataccttttgcagacaattacaacaaacttggctccttggctttctgccat

SEQ ID NO: 29994 - DNA, 1486 bp, Homo sapiens
  SIMILAR (949)..(671): 791254mologous to Bacteriophage S13 D gene,accession number M14428,Smith-Waterman Score=393.
ttagccattgccgttatcaaagaagagctgcgtgtactgggcgaagcacacaccatgaactccgatgaatttgaacgtattcaggggatgcgccgcgcggtgtatgacagcgaagattaccaggaagggatgaacgctttcctcgaaaaacgtaaacctaatttcgttggtcattaatccctcatccacggctttcagcagatcagctccctgcggcacatctttaacaaacatgtcgcgaacctgattccccagtgcgtcgctaaaggctttgcggtcgagatcggtgatacttccacgcccgcttctttatgccgtcgatatttattgctgatcggtaccgagctgacgagctgatgttatttggctccggttttgctaccaaaaagctggtaagcaacgagcgtaatcgtgggtccgagggtcccgccggctccaccgggaacccgaaggttgccgaaaggtcaagaagacttaagcgaaggggggaaccatggcggaggacggcgaacacaaagggggccccaagctgtgttctggggactagcaacagcagcagcatcggagagcctggctggaggatcaaatctttaatcatgttccctgcctcatttctttgatcatgcatgctgcatctaactattcctgggccccagttcattcctcttcctatggctttgtccagctgtttcttaactgaatgccggtaccgagccgcctggacggccgtttgaatgttgacgggatgaacataataagcaatgacggcagcaataaactcaacaggagcaggaaagcgagggtatcctacaaagtccagcgtaccataaacgcaagcctcaacgcagcgacgagcacgagagcggtcagtagcaatccaaactttgttactcgtcagaaaatcgaaatcatcttcggttaaatccaaaacggcagaagcctgaatgaggtaatcgggcagaagctccggtatcgtcgtcaggaatggtggcatcgggctttacatcgtacagcgccccctctacctgatcaatcaaccgctgttggtcattttgcgccatattgcgaagcattgcagtgacgataatctccaaagcttctacctgcgcacacagttctttcgactcttcttctttttgggcaagcttaaataacaactcagcaatgagatttttcatgtctgtatttccttatccaaagtatggagaagttaacattatgtttcacaacttcatagtgtctggaagtattatttttatgacaaaggaaatactttgcgcaaatattttttgtttgattaccagcgaaacgtttctcttatttaaataattacccacacaaaatataggcttttaattatcaacctttattataaataaaagttatgaaatatattctcttcgttaacttataattaagagaaaaaaactcaccgcatggccatttaagccaggaataaattagcttcccgttcatcattttgtgt

SEQ ID NO: 29995 - DNA, 766 bp, Homo sapiens
  SIMILAR (757)..(377): 921254mologous to Escherichia coli K12 putative methyltransferase,accession number AE000405,Smith-Waterman Score= 590.
  misc_feature (1)...(766): n = a,t,c or g
tttataaacaagcccccgctctggtcgataacgtattaagaatgttcatgccagatgaaaacataacgaaattaattcatcaaacgaatgaattaagtgtcatgtaaattcacattctgtcctgaaaattcagttcgtcacagttaaccagttttagtggattaactgagttcatattgcggcatttgtctgtttctgttgccagcagttcaatccactgcatcagtaaagtatcaaacagaaaaacgaagacaggcgaaaacgacgagccaccaatacttgcgaatcattacctgagcctgtgcatgtttaaccaagtctggcaggaaatatacacgaaatgaataatctgaaaaccaggcttacacatcctttactttgtaatgagatcggtgtcaacttcgcttaacggctttgttttggacaggttgccaggctttctttttttcactttcgccagttcttccgcagagtaatgcgacgcgacatccagccgtcgaagccccattttgatgtactcgctgttgatctcaataccaatgaattttcgtccgctggcgatggctacggcaccggtagtaaagctaccagcaaacgggtcgagaacgatatcgcctgggttggaagaggcgagaataatgcgtttcagtaaggcttccggtttttgcgtcgggtggntttcatattcatccatcanataacgcacgcgcgggaaatcccanacgttaccccggactttttgatgattgaaggcttgggaggtttt

SEQ ID NO: 29996 - DNA, 1350 bp, Homo sapiens
  SIMILAR (706)..(1341): 741254mologous to Escherichia coli formylglycineamide ribonucleotide synthetase (EC 6.3.5.3),accession number M19501,Smith-Waterman Score=737.
atggatcagcgtaaaaaagaagtggttggtgctgaaataatgcgtcacttcgaaaaaggcgtcatgctgcaaacgcttgactccctgtggaaagagcacctggcagcgatggactatctgcgtcagggtatccacctgcgtggctacgcacagaaagatccgaagcaggaatacaaacgtgaatcgttctccatgtttgcagcgatgctggagtcgttgaaatatgaagttatcagtacgctgagcaaagttcaggtacgtatgcctgaagaggttgaggagctggaacaacagcgtcgtatggaagccgagcgtttagcgcaaatgcagcagcttagccatcaggatgacgactctgcagccgcagctgcactggcggcgcaaaccggagagcgcaaagtaggacgtaacgatccttgcccgtgcggttctgcaggcgttgctgaaaatcttatatcacaatgtgaatttaatgatgagatgctgaccgagggagtgatacgcgaaaagatgggctttaatccgcagactctccgcgaagtattgcaggcgtgtcagcaacaaggttgtgtagcaaataacctcgatttagatgttgtgatgattattattgatggtgccttcagcggaattgttcaaaactggttaatgaatatggcgggttatgatctttataaacaagcccccgctctggtcgataaccgtaccggcatggagcgcgcatcaaatggtggcccgtggcaggtgcagtcgctacctgcgcggtcataccgccagctcgacagctactacggtgaagcgatggcgattggcgagcgtgcgctggtagcgctgctggatttcagcggccctagcccgtctggcgattggcgatatcaaacgcatcacactttcccgccaactggatggcggcggcaggccaccctggtgaagatgcgggcctgtatagaggccgttaaagccgtgggcgaagagctttgtccggcgctgggcctgacgatcccggtgggtaaagactccatgtcgatgaaaacccgctggcaggaaggtaacgaagagcgcgaaatgacgtcgccgctgtcgctggtgatttctgcatttgcccgcgtggaagatgtacgtcacaccatcacgccgcagctttctaccgaagataacgcactgctgctgattgatttgggcaaaggcaataacgcgctgggcgcaacggcgctggcgcaggtttatcgtcagcttggcgacaaaccggcagatgtacgcgatgtcgcgcaactgaaaggcttctatgacgcgattcaggcgctggttgcacagcgtaagctgctggcgtatcacgaccgcttaatctag

SEQ ID NO: 29997 - DNA, 2605 bp, Homo sapiens
  SIMILAR (500)..(1159): 991254mologous to Escherichia coli potential repressor envR,accession number X57948,Smith-Waterman Score=1129.
  misc_feature (1)...(2605): n = a,t,c or g
ttatttcacttcaaccacattcagccgtaactcatccaactgattttcatcttcttctggctgccagcacgccggttgtagtgggatctcttcgcgatcaaacgccagatcacccccgttaaccacttcagaaccgtgggtgatgcctttgaaatcgaacaggttggtatcgcacagatgcgacggcaccacattctgcatcgcgctgaacatcgtctcgatacgccctggataacgtttatcccagtcacgcaacatgtcagcaatcacctgacgttgcaggttaggctgtgaaccgcacaggttgcacggaataatcgggaacgcttttgcatcggcaaatcgctgaatatctttctcgcggcagtaggccagcggacgaataacgatatgtttgccatcatcgctcatcagtttcggaggcatacctttcatcttaccgccgtagaacatatttaagcctctgtgtcgaatatatttatttcctgaataattaatcatggcaaaaagaaccaaagccgaagctctgaagacccggcaagaactgattgaaactgccatcgcccagtttgcgcagcatggcgtaagcaagacgacgctcaacgacattgccgacgccgctaacgttacgcgtggcgctatctactggcacttcgaaaacaagactcaactgtttaatgagatgtggttgcaacagccttcattgcgggagttaatccaggaacacttgacggctggattagagcatgacccgtttcaacaattgcgtgaaaaattgattgtcggcttgcaatatattgccaaaattccccgccagcaggcgttgctgaaaatcttatatcacaaatgtgaatttaatgatgagatgctggccgagggagtgatacgcgaaaagatgggctttaatccgcagactctccgcgaagtattgcaggcgtgtcagcaacaaggttgtgtagcaaataacctcgatttagatgttgtgatgattattattgatggtgccttcagcggaattgttcaaaactggttaatgaatatggcgggttatgatctttataaacaagcccccgctctggtcgataacgtattaagaatgttcatgccagatgaaaacataacgaaattaattcatcaaacgaatgaattaagtgtcatagtaatgcgacgcgacatccagccgtcgaagcaccatttgatgtacggttcttttgccgatgaacgtgtgattgagcagcatattgaggcaggcatttcactgtgtgatgcggtgaactttctcgtggaaaaatacgcgctggtgcgtaccgaccagccgggattcagcgcctgtacccgctctcagttaataaacagcatcgatatcctccgggctcgcagggcgaccggcctgatgacccgcgacaattacagaacggtaaataacattaccntggntgctgggaagaactcgtggtccgctgccgagtcgtgctatataagtcgacatacggagcaagcgacggctggggcagcagtgcagtgttgtgctgatagtatggcgctgcctcttgtccgtccttccgtcgactacacgtgcactcagcttgctgcatcaggatcggtccaggcatgccggccgcagcaggatactcatgctatcacgtcaagagcgcacggcaagtacggcgttagtccagcacgcgctccagggcgactaaccgacagtgacaacgaagcactgctgacgccaaacacgggccacagcaaacagagcacaagggaaaccaggcgccacacccgcacaaacgcgcgacgaccacgccgagagaaccgacacgccccagcgacacccaccaggccggcagcaagccacggggacagcagccaccgcacacctccgagggcgacacgcgacgccagaccaacgggcgcgcggagaagacgactagaaggaggaccccattgcagactgcacggtagccgggagaatgcacaagtagagaaaaccggagtagagcatcgggtcgacatttaccggtttccaccaggcaaacagtacacccagaatcggaaacagcacgaaggtgctgcacattacccacaaatgcagtcgccagtgaccaccgccagcaataatcgcctcacgcgacaacttcgcacgccctgcataaagaacagcagggcaatagctgactggcctgttacaaaaacgcttttcacgacggttatcgctacactaaatattacgatgatgtcgaagtcgatgcctggcgagggcggcgtatcactctatactggcccggtgatcaccagctaccgctatacccattatgactccagcgatgcaggtggtagttatagcaatatgatttccgtgcgtctgaatgacccgcgcggcactggttatacgcaactatggctaagccgcggaacaggtgcttacacctatgactggacgccagaaacacgctacggcagcatgaagagcgtcagtctgcaacgtattcaaccgctgactgagcaacttaatctcgggctgacggcaggtaaagtgtggtacgacaccccaaccgatgattttaacggtctgcaacttgcagcccgtctgacctggaaattctga

SEQ ID NO: 29998 - DNA, 1347 bp, Homo sapiens; identical to SEQ ID NO: 15100
  SIMILAR (185)..(3): 1001254mologous to Escherichia coli product appears to be membrane bound,accession number X54945,Smith-Waterman Score=321.

SEQ ID NO: 29999 - DNA, 1093 bp, Homo sapiens
  SIMILAR (895)..(395): 971254mologous to Escherichia coli K12 putative dehydrogenase,accession number AE000394,Smith-Waterman Score=799.
ccggatcatgtgggtcgaggaaatcggccagcgattcggtaaccatccattcggtgcgtcgctgctcttctgtggtggtaacgctcacatccgcaatgcggatatctacaaaaccacacttcttcagccagtttttcagcgccagcgcggaagggatgaaatagacattacgcatttgcgcgtaacgatcgcctggtaccagcaccgtgttctcatcaccatcaataaccagcgtttccagcaccagttcaccttcattgaccagttgatctttcaactgccatagatgctccagcggtgaacggcgatggtaaagcacgcccatcgaaaagacggtatcaaaggctttcagtgccggaagttgttcaatactaacggtaacaaatgcgcgcgcatctgctcgaagtgcctgcatcatctcaataaccgcagctgtgagcggcagttgtgcgccgacgccgtgagaagtatccagcgcattcgccagatccttaatatgcagatcaatacggaagcccggcttgaagttgcggtccatcaccatcggcgctttggcatccaaaacggtactgcccgccagtccaccgcgaattgcctgataaaccaggtccgggttaacgcccgctttagttgccagcgttaacgcttctgacatcgcggcaatattcagcgccacaatgacctgatttgccagtttggtgacgttacctgcaccgatttccccggtatgcaccacggaacccgccatcgctttcatcaaatcatagtatttgtcgaaaatagccttgtcgccgcccaccatcactgacagcgtaccgtcgatggctttcggttcaccgccgctcaccggagcatccagcatatcaatgcctttcgctggctccgcgccttcaataatgccattctcacccagcgccacctctttcacatgaggggagtttggcagcatggttatgatgacgtcgcactgttcagcgatcgctttagccgtagacgctgtttctgcacctgcagcaatcacgtcagcaatagcttctgggttacggtcagcaaccaccagcgagtaacctgctttcagaaggtttttactcat

SEQ ID NO: 30000 - DNA, 685 bp, Homo sapiens
  SIMILAR (44)..(3): 921254mologous to Escherichia coli CG Site No. 526; alternate name malA,accession number U18997,Smith-Waterman Score=74.
actggattagtgatcagatgatagtcatcgatgaccagataaatgtgggctatgccattccgccagctcaatgaaaagctgggcgaagagtgacgtcaggctggcatattgccgtttttgcgccatcgtctcacatatcgcacagtgaccgttggttgcctgctgcacggcggcaatgagatagctggcgaaacgctcttgctggttatcaccttcatccagcgagtaccagccgatatcgtttttgcctgccgcccactgggaaatgagggtggtctttccgtagcccgcaggactcgtgatcagcgccagccggaagttgttcgcgccggaaagtttatccagcaggcgctcacgaaccacggtatggtcgagtcgaaccggacgacttaattttgacggaatcagcataggtaaccacttcactgtggaaaatgaggaaaaactattttttttgcccttcggcactaatgggtattaggacagccctaaacctttctaagggacgagattaacgtttttttatgtgtctgaatttgcactgtgtcacaattccaaatctttattaacaactcacctaaaacgacgctgatccagcgtgaatactggtttcccttatgttcatcagattcacttaagcaagggtttcttcttcattcctgaagaaagtgccatctaaaaagat

SEQ ID NO: 30001 - DNA, 1494 bp, Homo sapiens
  SIMILAR (1144)..(1491): 1001254mologous to Escherichia coli hypA product,accession number X54543,Smith-Waterman Score=623.
atgctgattccgtcaaaactaagtcgtccggttcgactcgaccataccgtggttcgtgagcgcctgctggctaaactttccggcgcgaacaacttccggctggcgctgatcacgagtcctgcgggctacggaaagaccaccctcatttcccagtgggcggcaggcaaaaacgatatcggctggtactcgctggatgaagtaccggtccaccccgtgccgccgccattcgatcaaccggttttgccatcgccggaatccccccactggcatcactttctcgcccagcggccctgtaacccaggcgtgacgttcagcccactgggtggctgcaatcatcgcttccaccgttccttcgccaccgtcggcaaccggaacagaaactgcctgcatcatctccataaccgcagctgtgagcggcagttgtgcgccgacgccgtgagaagtatccagcgcattcgccagatccttaatatgcagatcaatacggaagcccggcttgaagttgcggtccatcaccatcggcgctttggcatccagcacggtactgcccgccagtccaccgcgaattgcctgataaaccagcctgcttacaccaccggttctcaaccgatgatcacgttgctgctgattgcctgcccgctgctgccattcatcattatggcgatttgcaaaggcgatcgtttgccatcgcgttcccgcggtgcggcctgggtgtgcggttacgaccacgaaaaatcaatggtgattaccgctcacggttttgccatgccggtgaaacaggcgtttgcgccggtgctgaaactacgcaaatggctgaatccggtgtctctggtgccgggctggcagtgcgaggggagtgcgttgctgttccgccggatggcgctggttgaactggcggagtatcgcgacattatcaaactgctggggcgtcagagcgtcggcccggatgcctccggctgggtgttccgcctgacgccgtatgtgatggtgggcgtcatgctgactatcgctactgcgctgccggtggtgaccgtcggttctccgctgccgcaactgggtgatttgatcaccttactgtatctctttgccatcgcgcgtttcttctttgccatttctggtctgataccgttaatgggaggcgatatgcacgaaataaccctctgccaacgggcactggaattgatcgaacagcaggccgcaaaacacggcgcaaaacgcgtaactggggtctggctcaaaattggcgcattttcttgtgtcgaaaccagctctcttgccttttgttttgatctggtttgccgcggcagcgtggcggaaggttgtaaactgcacctcgaagaacaagaggccgaatgctggtgtgaaacatgccaacagtatgtgacgctactgacccagcgcgtccgccgctgtccacagtgtcatggtgacatgctgcagattgtggcagacgacggtttacagattcggcggatagaaatagaccaggagtga

SEQ ID NO: 30002 - DNA, 2664 bp, Homo sapiens; identical to SEQ ID NO: 23574
  SIMILAR (885)..(16): 771254mologous to Homo sapiens BC273239_1,accession number AC007204,Smith-Waterman Score=1259.

SEQ ID NO: 30003 - DNA, 645 bp, Homo sapiens
  SIMILAR (202)..(534): 1001254mologous to Escherichia coli prlF protein,accession number M32358,Smith-Waterman Score=579.
aatgggggctgcataaccagctggcggtgtttaacccggcaccggtgacctgatttcttttggaacgtccctcgcaaaacatggccttagtgccatgtttttattgtttaaagcccccacgtccattaataatgcatttgcattaccttagttcaagcttataatttgagcagaaaacaggctgtaaaaggacagtgaatcatgcccgctaatgctcgctctcacgctgtactgaccactgaatcaaaggtcacgatacgcggacaaacaactatccccgcgccagtgcgtgaggccttaaaactgaagccaggccaggacagcattcattacgaaattctgcctggtgggcaagtatttatgtgccgactgggagatgaacaggaggatcatactatgaatgcatttttgcgttttctggatgcagatatccagaacaacccgcaaaaaactcgtccattcaacattcaacaaggaaagaaacttgtcgctggcatggacgtcaacattgatgatgagattggcgacgacgaataatggattttccacaaagggttaatggttgggcgctatatgctcatccctgttttcaggaaacctacgacgctttagttgccgaagtcgagacattaaagggaaaagatc

SEQ ID NO: 30004 - DNA, 541 bp, Homo sapiens
  SIMILAR (59)..(538): 981254mologous to Escherichia coli ORF_f160,accession number U28377,Smith-Waterman Score=845.
ggatgattgttaccgctcccgggacgcgttcccgggaataatttcgcagggaggcaaaatgacaaacctgacactggatgtaaacattatcgatttcccatcaatacctgtggcgatgttgccgcaccgctgtagccctgaattgctcaactacagcgtggcgaaatttatcatgtggcgtaaagagacggggctttctcctgttaaccaaagccagacttttggcgtcgcctgggacgaccctgccaccaccgcaccggaagcgtttcgctttgatatctgcggcagcgttagcgaaccgattcccgataatcgttatggtgtgagcaatggtgaacttaccggtggacgttatgccgtggcccgccacgttggcgagctggacgatatttcacacacggtatggggcatcattcgccactggctgcctgcaagcggcgagaaaatgcgtaaagcaccgattctgtttcactacaccaatcttgccgaaggggtgacagagcaacgactggaaacggatgtttatgtgccgttggcgtga

SEQ ID NO: 30005 - DNA, 693 bp, Homo sapiens
  SIMILAR (27)..(245): 261254mologous to Human immunodeficiency virus type 1 nef protein,accession number U85913,Smith-Waterman Score=71.
atgggtctgcccgtgatgtggagcctggaagaagccgacgtgcagcaagtcttggatgggaagatcatgaagaacgcaggcgtccctctgagccccttcaccccgccagccccggggcaggctcccagcttgccctccgagttggccttgtcagggaaaggagccagcagacgccctctcgctcagctggcgcacggcaagaacactatcgccagcgcgattccaaactcgtggttccgatcaaaacgctcttctgctaacatgggccgctttgatcttcctgaaaagcacacttggagcagcgccactttacagacggcatccgagagctttagaaaagttaactcaccccttgtcaaatggctcttcattgtggagcccggctttgcactgggacagtcggactgcagagctgctcctctaaaccctaaaggaggaaccgttagcgaaccgattcccgataatcgttatggtgtgagcaatggtgaacttaccggtggacgttatgccgtggcccgccacgttggcgagctggacgatatttcacacacggtatggggcatcattcgccactggctgcctgcaagcggcgagaaaatgcgtaaagcaccgattctgtttcactacaccaatcttgccgaaggggtgacagagcagcgactggaaacggatgtttatgtgccgttggcgtga

SEQ ID NO: 30006 - DNA, 939 bp, Homo sapiens
  SIMILAR (175)..(558): 731254mologous to Homo sapiens Human G protein-coupled receptor GTAR11-3 SEQ ID NO:30,accession number Y90877,Smith- Waterman Score=501.
ctattcctcgcgcttcagctctgtttcggcggtaatggtaatgtgctgtgcctttagcacggcgatgttgtcttcggcttgactgccgaaatccagcaccagtttatccggggttattgccagtaatttgctgatcagctgcccgccattccaagtcaatggcgtatgatcgctgtggccatctgtaacccacttctgtatcacattgccatgtctcctacagtgtgctccagccttatgtttggttcctatttgatggccttttctggtgccatggcccacactggatgcatgctgagactgactttctgtgatgcgaacaccatcgatcactacttctgtgacatcctccctctgctccagctctcctgcaccagcacctacatcaatgagctggtggttttcactgtggttggcatcaacatcattgtgcccactgttaccatctttatctcttatggtttcatcctctccagcatcctccatatcagttccaaggagggcaggtccaaagctttcagcacttgcagttcccatataattgctgtttctctgttctgtgatgcaaacaccatcaatcattacttccgtgacatcctccctgtgttccagctctcctgcaccagcacctacatcaatgaactggtggttttcattgtggcaggcatcaataccattgtgcccactgtcaccgtctttatctcttatggtgacatcctctccaggatcctccacatcagttccaatgagggaaggtccaaagccttcagcacttgcagttcccacataattgctgtttctctgttcttctgtgatgcaaacaccatccatccctatttgtgtgacatcctccctctgctccagctctcttgcaccggcacctacatcaatgagctggtggtttccactgcagcagtcattattttccactgtcaccat

SEQ ID NO: 30007 - DNA, 1364 bp, Homo sapiens; identical to SEQ ID NO: 28741
  SIMILAR (1)..(579): 1001254mologous to Escherichia coli Hyf F,accession number M63654,Smith-Waterman Score=976.

SEQ ID NO: 30008 - DNA, 1551 bp, Homo sapiens
  SIMILAR (838)..(1380): 931254mologous to Escherichia coli K12 putative synthetase/amidase,accession number AE000490,Smith-Waterman Score= 923.
atgcccgtgccgcacgccgcgctgggcgataacgtcatcggcaaaatgctgcacgtcacccatgtcacctttcaacacggcgatttccagacagtcgtcgtggttgatgtgcacatgcagcgtggcgacggagaggtcgtggtgatgatgctggccattaccgctggaaaacggttctacagcgtagtcgtgggtaataacacgcagcggtccaactgtggtgtactttttcacagcgaatgcaccgctgtacacggatccagggaacagcaacgcttactgcgcgctaatcggggcgtttcaaacttacgaatacgcttacacttgatgcgagtgcagctgtcatcctccgacaagatgtttggctttacccatgcaacagggactgaattcgccggtgttgcccaactgaaagacagtaccttcactctggaacgcgacaacaccgctgcgcttactcacgcgatgttgcagtctgacagtgaaaataccacatcggtaaaagttggagagcaatccattggtggactggccatgaatggaggtaccatcattttcgatacggatattcctgctgcgacgctcgcggagggatatatcagcgtcgatacgctggttgtcggcgcgggtgactacacctggaaaggccgtaactatcaggtaaacgggacgggcgacgtgcttatcgacgtgcctaaaccgtggaatgatcccatggcgaataaccctctgacgacgctcaatttgctggaacacgacgatagccatgtcggcgttcaactggtgaaggcgcaaacggttattgggtcggggcgacgaggtggaagcggacaaaatttccagtggctgtggctggaggatccccggcgcagcggcattattccgcgtgatgccgatcagtacaatgctattcaggaacgcctgatttcacgctttagcgagctttacagtcgggaaccgttttatttttgctgctgtcaggacaccgatgaagacaggagtaccgtgctgtacttgcaggactgcgcccagcaggcagggcaggagtcgcggtttatctacattgaagatctcggtttgggcgtcggcggcgtactgaccgatcttgatgataatgtcatccagcgtgcatttaagctgtatccgctggagtggatgatgcgtgacgataacggtccgctgctgcgcaagcgtcgcgagcaatgggtggagccgttatggaaaagtatcttgagtaataaagggctaatgccgctgctttggcgcttcttccctggtcatcctaatcttcttgcgtcctggttcgatggcgagaaaccgcagattgccgctggcgaaagctatgcctcaccgatgaacgcacgcgtcgtgaacaacctgcgtcacgctaccaacagcgagctgctgtgcgaagcgtttctgcatgcctttaccgggcaacctttgccggatgatgccgatctgcgtaaagagcgcagcgacgaaatcccggaagcggcaaaagagatcatgcgtgagatggggattaacccggagacgtgggaatactaa

SEQ ID NO: 30009 - DNA, 981 bp, Homo sapiens
  SIMILAR (418)..(660): 851254mologous to Escherichia coli metJ193 protein,accession number M38202,Smith-Waterman Score=346.
ctcttgatgcctgcgcgcgactctagaggatcggtgggacaacgcaaccatactgttcgtcggcatttaacccgctacgcacggcgatgttggcctgtttacgcgtaatgtgatgaagttccctgggctttgtcggggaaatgtcaggcaccagagtaaacattgtgttaatggacgtcaatacatctggacatctaaacttctttgcgtatagattgagcaaatcccaaatagccgttaaaattatatgcattatcacgccgacaggtgcattacacgatgtcacggtaacgcctgtacggtaaactatgcgggtttacggtcagtacccacatcaactgtgtggactggtctcaatttattgacgaagaggattaagtatctcatggctgaatggagcggcgaaatatatcaggcccatgcgttgagcccggcaaaaagagcgaccaatccaaaaagattacggtttccattcctcttaaggtgttaaaaatcctcaccgatgaacgcacgcgtcgtcaggtgaacaacctgcgtcacgctaccaacagcgagctgctgtgcgaagcgtttctgcatgcctttaccgggcaacctttgccggatgatgccgatctgcgtaaagagcgcacggccgaaaatcccggaagcggcaaaaagagaacatgcgtgacatggaggattaaccccggagacgtgggaatactaaagcaaaaaaatagcggcgcgtagcgggaatccgcctgatgcgctacgcttatcaggcctacgtcatattgcaatttattgaatttgcacgaacttgtaggccggataaggcgttcacgccgcatccggcataaacaacgagcacgttgtctgcgacccaccgctttttatacatggacgtttaactatgaaaaacaggctgctgatcctcagcctgctggtttctgtacctgcctttgcctggcagccacaaaccggcgacatcatctttca

SEQ ID NO: 30010 - DNA, 900 bp, Homo sapiens
  SIMILAR (583)..(897): 1001254mologous to Escherichia coli metJ193 protein,accession number M38202,Smith-Waterman Score=549.
atgaaactcataatcaaaagggtcagcaacagtggccacgacctggcaaacattctcaggctggccacatccacgcagtgcaaaaagtggctggatgcagtggttcatgcctgtaatcccaacatttcgggaggccaagcgggttactcggaccgctgctatgtcatgggctggcctgccttcctccacacacggggccgtaaatgtgatgtgcggcacctgctgtttggtgtcgggagctgctcttttcttggaagttttgctgaaagacgtaacatcagccactgctctgctgatatcatcttccgattggtgaccctgtttgttatcttcctgtgtagattgtggatccctcttcttgtcatccactcttttggaattggacgatcttttccgcccagcatccactccatccgggagtgtatttgtgggttcagcccccgtcagtccatccgcaccgtccgggaggtgcaatccacgagccacgggaacgctgcacgtaaacaagcgggtttacggtcaggacccacatcaactgtgtgtcctggtcccaatttattgacgaagaggattaagtatctcatggctgaatggagcggcgaatatatcagcccatacgctgagcacggcaagaagagtgaacaagtcaaaaagattacggtttccattcctcttaaggtgttaaaaatcctcaccgatgaacgcacgcgtcgtcaggtgaacaacctgcgtcacgctaccaacagcgagctgctgtgcgaagcgtttctgcatgcctttaccgggcaacctttgccggatgatgccgatctgcgtaaagagcgcagcgacgaaatcccggaagcggcaaaagagatcatgcgtgagatggggattaacccggagacgtgggaatactaa

SEQ ID NO: 30011 - DNA, 2856 bp, Homo sapiens; identical to SEQ ID NO: 25826
  SIMILAR (2802)..(2137): 891254mologous to Escherichia coli Bacteriophage n4 adsorption inner membrane protein NfrB,accession number D90699,Smith-Waterman Score=1050.

SEQ ID NO: 30012 - DNA, 2017 bp, Homo sapiens
  SIMILAR (153)..(22): 841254mologous to Escherichia coli K12 putative dehydrogenase,accession number AE000415,Smith-Waterman Score=172.
gcctgagcggcgctctagaggatcaacaaaatcgctgccttcgtcgctgacaatcaggaattcgccgggggccggactgtttagtgattgtgccgctcgcgccgtttcatggcgttgataaacgggcgcggtggaggttgcccccaggttattccagcgatttccgcactcaccgggcgtaataacacattcacgccatcgagcttcccggcgttggcgcgttttaccagcgcgtcccagtctttactgttgccgagattgaccagcgcatttttcagtcgcacacagtcatctttggcagaacataaatccgctgtcttcagtacaatgtcgccaaaatcatcaagcaataccatgccggatttttgaattgctgaacgtaatgaggcactgacgcgagattcatcttccggtttagggtgcagctggcgattaactgcttcagtcaatgcccgccgctttgttgacccagttcagattctggtaatggcaatgagcgggcgtcgttccagatgatctgcgagcagtcaaacggtaaaaaaggtgaattggttttcgcgctccaggttccggaagttcgaatattacacattcccgtaccgctaatacgcaatgtatcgcctacccgcacgccagcgtcagccagttgttttacgctggtggcttcaatggtctgcgcgcctttcatccatgagagagtgaatttcagcggcatatccagcgggatccagaatacagcataaacagcaccagcagcgagcccgcagcgataatcgtactgcgcagccagtggcactacatggcggtcgagatagatatcgatatcggtttgttgaccgagatcctgagcaatgtatggctgccagtgtgcgggatagaccaggtcgataataccgagtgaaatattgttgatctgttcctgatcgttttcgccaaacaatccccaacgacggggtgtaccgcgcagacaatgaatttcccgcagggaggattttgccgggggcgcgaatagcccccacagacctgcgcccagcagcagtaacgcgccgcctgccagccacggaacaaatacatccggggtaatcaggcagaaaaagaacatcaggaaggaggcgacgatcagcaacgcttcacgcagcccgcgcggacgactcagcgcatattcttcatggggatcctctagagggaacgtgcatacagcagtcactcgtatggccgcgccatcaatattgccctgacgtaacaaagaacggaaacgggcggcaacgacgtccgggttattcggatcaataagttccagccgatataacgactgttgcaccagatcttcacgatgggtcgcttcgcctaaccgaacttgctccagcaactgttgctgagcggttggtgctgcctcgaccatcggcatgacggccagaccgagggaaagcgtgaatatgtttagtgtgaatttgcgcattccttttgtcgagaagcggaaacggtgttgatcccagccttgtccaaacagggtcagcacatagttgtaataggcatcgctgccgggaaagttatcggccacgcgctggcgctgaacggcctgcgcatcgcggttttgtaaaaagggcagcatggcggcagaaaaaccgactggtcctttaccctgcgctttccccgtagccacatccactttttccggcggataaccgtttttctcagtgaatgtcgccatcggtttaaaccggttgagcatccgcgctttttgcggatcgctgtcaggcatcatgcctacccacatgtaaacgcggatagcgtcgtagctgctgatcaatgttttttcggcttttagctgccagcctttgtctttctcatagcgcacccagtctggcgaaaaacctttcggggcggtttccagcaataaacgttgatgggtttcgcgcaacgtggtccaaggcgcgccaaagcgggtgaaatactgggcagcgttcggcggcagtagccatttgccggtacaactggaccagccagaccggaccat

SEQ ID NO: 30013 - DNA, 1998 bp, Homo sapiens; identical to SEQ ID NO: 24476
  SIMILAR (799)..(1350): 981254mologous to Escherichia coli thioredoxin reductase,accession number J03762,Smith-Waterman Score=940.

SEQ ID NO: 30014 - DNA, 1076 bp, Homo sapiens
cgcccctccaccgcgcgcgtcgccgcatgactcgtatacaagaaagaacataactttcctctaacataacgtgggcaagtcttactgccgtgtcgtgtgccgccagaagaccggagtgaggcacgtgggtttgcccgtaaaggttggttcgccccactatttgttgtccccacttgccattggggttcctaaagtatgggatgtatatcgctggtggtacacaggattaatttcagatctcaggatgcatttctgtgttttaatagtattattatgtgtttatttcaagatgtaatagaaatacacagtccattaaacttatgatttcatggatatcagtgtcatgcccaggaggaagcaaaagtgagcaatctctatttaaaaatatgtgcaattatacaggcattcacagtgtagtggcttttaaattttctacccattaactaaacatgctttccatttggggatgaattccacactggtctcgttttggtggaagacagggctctgccttccatttcataaccagaaagaaccaactactcccttcctcctccctgatagtgaggaaagtgtgggcacatgagcctttgcttataggtcacatggatgctcttactgaagactttgaatctgagggagtgaagcaagacacaaaaggcattggattacctgtggcagtagctcctatcctgaccactcactttatgagtgagcattttgatatcacaaagcaccaaacaagatccagaacattgcaggagtcagtccagggtcacacagctattgaagagtagggcctcatggtgggacaagacctcttctccaagccccatactctgtactacattccatttgagaaaaagaataaagttaaggtctctgggagttaggccacccttatgagcactggtccccaaaaaatgggaggaagctaaacctgaggttttaagctggcagcgcggcaacacccagaaaaagggatcacagggtttctcctttacgaaaaaatgggcgaaacacgtttgcgctcactttcttcacgcctgggtcaaaacgcagagcaaccacaaccc

SEQ ID NO: 30015 - DNA, 705 bp, Homo sapiens
  SIMILAR (256)..(408): 681254mologous to Oryctolagus cuniculus retrovirus related reverse transcriptase,accession number X62677,Smith-Waterman Score= 167.
atgaacagagcagtgtatggagacccacatcgtgaacttttgctccaagaacttccacaggaacataccaggaaagccgagaaagtccacagaccctttgaaggaggcggattgccactgcaggctccatgggacagtcgaggaactcaagtgctggaatccatggctgacagacctgaagacggatcatatcacgggattctgcagatactccccagtactagcccagagcccagtagctccactgggtggccagtactggaagtcctagccagaaaaatcagacaagagaaagaaataaaggacatccaaacaagtaaagaggaagtcaaactgttgctgtttgctgatgacatgactgtatacttagaaaaccctaaagactcatccagaaagttcctagaactgagagcggggaagggtggagaaaagattaagaagtcggatggttgccgtgtctgtgtagagggagtgaggaaagtgtgggcacatgagcctttgcttataggtcacatggatgctcttactgaagactttgaatctgagggagtgaagcaagacacaaaaggcattggattacctgtggcagtagctcctatcctgaccactcactttatgagtgagcattttgatatcacaaagcaccaaacaagatccagaacattgcaggagtctgtccagggtcacacagctattgaagagtag

SEQ ID NO: 30016 - DNA, 811 bp, Homo sapiens
  SIMILAR (583)..(479): 971254mologous to Homo sapiens FIL1 eta,accession number AF201833,Smith-Waterman Score=170.
ttaaacatcaagttctggtacaggaaaagagctgagatggcttacttttgatggacgaaaggaatatttccccattattacaaaagaggatgccaacttaacaagctgtgtaggtttggtggtggaaagattacggagtttgaatctgaggacacaggtagcaatggttggaacctgaaggagagaaacctccaaggagaaggttagctgttgtttgaatggataagcccttctaatctgaagatattttcttttggtaagaggaagcgggaacccgttcccgccctcatttctagatatgggatttcctttgtggaagggaatcatagtgtcctttctcccttgcccttcctgtggctgttgggctggtgcctagaagtgggtgaggtccagggccaggcttatgcaagctcagcctcattcctggtgaagatggcatcacgtcaagaagcaacagtgggtttgattgtcactcaccaggcttaatgctgcggctaagaggagctgctattaaagaatttccattcaggacccacaccatctgtcgagaatcacgaatagcataggatttgggtgctgcctcccctgccagatgacaaaaatgcacaaaatacgcgtgaggttatcaacttcaggactccagttgcatcctggtattaatggcttttgagtttctggagaaagtttcgtaactccgagaagtagtggctataacgataaatgaagggcgaatagggcaaggcctggtttgtgaatcaaagcctttaaaagattcccggggtccgaggttgaaaatgtaatcagtgtcatc

SEQ ID NO: 30017 - DNA, 770 bp, Homo sapiens
  SIMILAR (239)..(99): 891254mologous to Homo sapiens interleukin-1 homolog 2,accession number AF200494,Smith-Waterman Score=234.
tgactactaattgcaccttcccccccgatgctctgaggaaccctgaaaaatgatctcatgtcagaactgcccacctgtgggatggataagagaaggtgctcctcacccactcctattccccattggtcatgggttcccatgaagcagctctctctcacatccaggtttatgcatgtgtgaattccaactagtttccagcaagtgaccttccctatgttatcttgggagccctgaagctggaagagagaaatgttcaatgttgctgagataatacactgccaggttacactgtctcaaagttggttgcacggcaatgactggagtaaaaggcctgcttacagcatgtaaggtggggttcaggagtatcccaaagagaatgcggggcactgaagcaataagagataatgccagaagcatagttttggggacaaattatgcctggctgaaaaattggaacttagcagtgggtacccattgcaagacccaatatgcctgcttgtcatgtgcaaagaaggacaagttctcttgagagaagacagcctgttatgctcatggtcatgctcaggatattatggtatatttattgcagtatacatgtacttggttagtggatttgcagattatattacaaaactttattaaaataactttcacaaaatggaccacctgggttaaaaggattccttattccgggaaggggaggaatggaagggccccttaccaaatttcccgaaattatggatgattacccaggggggtttcatacctcg

SEQ ID NO: 30018 - DNA, 1304 bp, Homo sapiens
  SIMILAR (512)..(895): 931254mologous to Homo sapiens interleukin-1 homolog 2,accession number AF200494,Smith-Waterman Score=652.
caattggattttctaaatgagctggctcttctaaaaaagccacaaagttgtactctctattctgttccagagaatccacaaaggagtatcattgaactccaagtaacaggaaagtgactttatgctgggaacatccctggggcctgtgacacggaaggacatggataggtgcccccccagcctcgtggacgttgagagcaataagtacctccaactgtggtcgctgatccacacagatgctcacgctcatcatgggaagaagcgagggagtggaccacttgttgacctggggaaggctgttccttcagaggaacaggaaaaactccctgcaggcgaagataagcttgcagggcaagaaaatcagcagaatccagtacatccagagcagggaagtcagatgggcagggatagaaggcagcagaaagataaagaggacccagatcatgtgggcttgcctcctcaccaccatctgatctatcttgttctcttcacaaaaggctctgaagacatcatgaacccacaacgggaggcagcacccaaatcctatgctattcgtgattctcgacagatggtgtgggtcctgagtggaaattctttaatagcagctcctcttagccgcagcattaagcctgcctgtagagacacagaattcagtgacaaggaaaagggtaatatggtttacctgggaatcaagggaaaagatctctgtctcttctgtgcagaaattcagggcaagcctactttgcagcttaagcttcagggctcccaagataacatagggaaggacacttgctggaaactagttggaattcacacatgcataaacctggatgtgagagagagctgcttcatgggaacccttgaccaatggggaataggagtgggtgaggagcaaattctcttatccatcccacaggtggacaattctgagatgcgttcattcttcatggttcctcagaggatcccagcagtattgagacataatcacccatggcagggcactgaacatgagcaagagatagacagccagcccatcttacatcacaccacctgtgccctctgccagaggagtgaggacattgtgatggtgaaggaggaagaagaggaggagaaaccacagaaagactcaagagtgggtttgcagccagataaacagtgctggggtcagacatctttggtgccccgtggggctccatcctaggcttgaagaggtggtgaatacaagagaaagtatgtctggcaagcccaaggacagaacaaattctgatgccggaatccaggctgtggccagacagccagaataa

SEQ ID NO: 30019 - DNA, 771 bp, Homo sapiens
  SIMILAR (629)..(748): 651254mologous to Homo sapiens FIL1 eta,accession number AF201833,Smith-Waterman Score=134.
tctcctctctcaaatagtcatacacatgtcatcgtcaggtctactcagatacctctaacttcatgtatccccaattgggatgtgttgtgcggttttctcaaaaaccgctaaacattctctgtgtggtggcactttcggtccactccatttcctcgagccggaaatacaggagacatccttgattcctccaagccctcactgtccatccattgtattagcaaagattggtaggtgtaaggtggaaaaaagggttgatttttaagataacatcattacttgcctggactactgccatcacattctcactacccacctctcactttatttgggtagcctaccatcccgtctcatattgtggcccatgagatagaagccccccacttatgtctcatgggccacatcttaagcatatgtccacattttgccgcaagtgtggtaggaaattttacttctttttgggaagctacatgtgctggtcacaactggggttctgttattaaggacgaaaaacaaaataggtttgaggagggtgatggagggtctctgccacatggctaatgggaggagcctgtcactattccctgcctggggggacgtaactgagtgtcagaccagaaagactgaaacatcttctccattttcctttgtgtttccagtcactcttcatttaatagcctgtagagacacagaattcagtgacaaggaaaggggtaatatgggttaccctgggaatcaagggaaaaagatccccggttaccgaagctcgaattt

SEQ ID NO: 30020 - DNA, 1195 bp, Homo sapiens
  SIMILAR (964)..(596): 971254mologous to Escherichia coli K12 homolog of pectin degrading enzyme 5-keto 4-deoxyuronate isomerase,accession number AE000368,Smith-Waterman Score=658.
ctggccgactgtagtagatataatggactggagatgaccctgagttgttgcgccggggcgagtaccagatgccgttggaggtattgagcgcggcggattgaagtcgccggaggcgtcagaaggggagatagcgccacggctgctgttagatggcgagccgttggcgttaagtggtgacaagtggcggatttcaccatggttattagtaaccgatgatacggcaaccatcaccgcgtttttgcagatgattcaggaagggaaggcaatcaccttacgcgatggcgatcagaccatttctctgagtggcttaaaagcagcgttgttgtttattgatgctcagcaaaagcgcgttggcagtgaaaccgcgtggatcaagaaaggggacgaaccgccgctcagcgtaccgcccgcgcctgcgctgaaagaggtcgcggtggttaacccaacgccgacgccactctcactcgaagaacgcaacgatttgctggattatggaaactggcggatgaatggtctgcgctgctcgcttgatccattgcgtcgtgaggtgaatgtcactgcgctgactgatgataaagcgctgatgatgattagctcgcaaatctttaacggccacatggtccatatcatcaaagacctggttttcaccgaccatgccccagataaaggtataagctttggttccgacaccggaatggatcgaccagctcggggagatcaccgcctgctcgttatgcatcacgatatgacgcgtttcttgcggctgccccatcatgtggaaaacgcaggcgtcatcatccatattgaaatagaaataaacttccatccggcgctcgtgggtgtgacacggcatggtgttccactagttacccggagccagctccgtcagccccatactcgattggcaggtttccagtacatccgggaccaaatatttgttaatcgtgcgacggttactggtgaggaaatagcttacgccgagttgtttaccaacttccccgccaacggaaaccgttttagttatcggcataatgccgccaacaataattcggtcaatgtggctgtaaaccatggtgtactcatcggcgacaaataccttttcaaccaaaaattcattgcgcagcccttgggtatccagcgtttttgcgtgcgcactgtggatgctctgtcttacgtccacatcaacctccgataa

SEQ ID NO: 30021 - DNA, 2117 bp, Homo sapiens
  SIMILAR (1152)..(2114): 251254mologous to Babesia bigemina 200 kDa antigen p200,accession number AF142406,Smith-Waterman Score=244.
  misc_feature (1)...(2117): n = a,t,c or g
gtagcacacaacaacacatgaaacaatggtttaacagcacggacaaaccacgaactgggaccttgggatctaccaaggcatccaagacaacttctgccctatataacaactgcggaccaattaaagtccttgaaattccagacttgcgacaacgctccctgatgcacatatgggccatgaaaaggattttggggccctccccctggcggatgatcttgatgcgaagagtgccgttaaaccctgcgctagtaggggagtgtggaagcaaccctcacacctgccttaacagatttcaggattcgctacgcttccggataacagttttgcacccaatttacgttccaacaggtaggtgcaagcaacgggcaggatcctccggcgtacgtagttccgaccccccagaggctcggaggaccataggcgagacacatgacacagatgagactgaccacaatcgtacgtggacgttccaacgatatttcgccggcattgattccgccaataccaactttgtgctggcaaacaccgaaccaacacatatatttgtgtggacgcgggctgcttataacaataacaatgaaaccgcgtggatcaagaaaggggacgaaccgccgctcagcgtaccgaccgcgcctgcgctgaaagaggtcgcggtggttaacccaacgccgacgccactctcactcgaagaacgcaacgatttgctggattatggaaactggcggatgactggtctgcgctgctcgcttgatccattgcgtcgtgagtcacccgatggcggcaacgtacatgccccatcctacaccctcacttgcatagacagacaatctacacagtttgagtcgatcacacacactctaccaatgacttacaatcactactcaatggttgcgcactatagatctcggtcaccctcagacccgaacccgagccagggagtcatccacaggcccccacgcatgcatcaaccatttcattgcctccacagtcagcgccaccacatcttggtcctcattgcagccatgtccccatccgaggtttttgggttgagctcaacnggtggatggcgtactggcacaattggcgggtacacaatctcatttgggttacgcgtacacactctagttttttgcccttacacgctgaatgaggagcgctggccgcacgggcgccgccgaggcgaaacggccggggagcgcacaagcgcagcagcgacaagcagcggtcgaggcagaccacacaagcgggagaagagcgggacgacgcaagccagcacggagggcagcacagacggcgaggaggcgcaagacccgcgcgcagagcagacagcagacgaaagaagggagaggagccacgagcaccgagcacacgccccagcacagaaggcccgcacaccacaagacgccagcgcatgcacacgaagcgcgagacgcacgcgacacgcagccaccccgcgaccacgcagaacagacagcaactcgcaaccacgacgacgcaccaggcccaccacgacgcaacacagcacacaagaaccaagtacccaccacgagagacaacgagacactagacaaaaacagagaacgaaaggacgagcgaacgaaacggcacaaccacgacagcgacgagacagacggagccgacccacgacaacaggagcgagcgcacagagagacaacgcgaggaccacgccaggaaggcaagacaacgacgaacgagaagaaggaacaccacctgccccgataacccgcaggaagagccccaaggcacccagacaccgaggacgaacaccacaccgcgcaaccaccaagagcggaggcgagacagaaccggacgcggcaccggacgacagcaggacgagagacaacgaaagcagggaaaagcggacgcgtgtcgacccggaacagagcgaagcgagacaacgagacgccgacgagaccgaagaggaagcgacgcaacggggacacgacgcgagcagagccggagaacggcaagcgcagcgagcggcggacaaagcagcgaaagaacagcaagagccaacgaccgcgccgcacagagcgaccaggagcggccacgaggcccacgagaagcagccagcagaacgacagggaagagaatga

SEQ ID NO: 30022 - DNA, 955 bp, Homo sapiens
  SIMILAR (1)..(696): 881254mologous to Escherichia coli f440,accession number L10328,Smith-Waterman Score=1025.
atgctgattcgtctgtggttagataaagtgcaggataaagcgaatttccgctccatgctgaccagtcaacaggatgaaaacgacaatccggttcctgatgccttgcaggtcacagatgaagaatatgaacgctggcagaaagagattggtgaaattacgctgcccgatcatgtatttgagctgatttttatgctgcgccagcaactggataaattaccggatgcgccttatgtctcggatcgtcgctggaaaaaagcgatccgattattgcaggccagcgccttttttagcggtcgcagtgctgttgccccggtagatctcattttgctgaaagattgcctgtggtatgacgcgcaaagcctgaatttgatacaacaacaaattgatgtattgatgaccggtcacgcctggcaacagcaagggatgttgactcgccttggcgcgattgtgcaacgtcacctgcaactccagcagcaacaaagcgataaaacagccttaacggtaattcgtctgggcggcattttcagccgtcgtcagcagtatcaacttcctgttaacgttactgcttccactctgactctactgctgcaaaaaccgttagggtaccgagctagagatcgcaattttggtcagttcgcccagcgtatgcagctcggcaaactgcgcttcatcgttggcgtcctgaatagaaccggggcgcagaccgtcgcccagcgacagcgaaacgtcataagcggcacagatttcacaaatttcgcggaagtgttgatagaggaaattttcctgatgatgggagaggcaccatttcgccataatcgaaccgccgcgagagacgataccggtcaggcgtttcgcggtcatcggcacatagcgcagcagtacgcccgcatggatagtgaagtaatccacaccttgctcggcctgttccagcagcgtgtcgcggaacgcttcccag

SEQ ID NO: 30023 - DNA, 1878 bp, Homo sapiens
  SIMILAR (1)..(462): 1001254mologous to Escherichia coli DNA recombination protein RumC,accession number AF300647,Smith-Waterman Score=765.
atggtttacgcagttattgcgttggtgggtgtggcaattggctggctgtttgccagttatcaacatgcgcagcaaaaagccgagcaattagctgaacgtgaagagatggtcgcggagttaagcgcggcaaaacaacaaattacccaaagcgagcactggcgtgcagagtgcgagttactcaataacgaagtgcgcagcctgcaaagtattaacacctctctggaggccgatctgcgtgaagtaaccacgcggatggaagccgcacagcaacatgctgacgataaaattcgccagatgattaacagcgagcagcgcctcagtgagcagtttgaaaacctcgccaaccgtatttttgagcacagcaatcgccgggttgatgagcaaaaccgtcagagtctgaacagcctgttgtcgccgctacgtgaacaactggacggtttccgccgtcaggttcaggactctagagatccccggtaccgagctccgatccatttggttgaagacgtttatccccgttacaaaaagtggtgcgacgaatacttctacctcaaacatcgcaacgaacagcgcggtattggcgggctgttctttgatgacctgaacacgccagatttcgaccgctgttttgcctttatgcaggcggtaggcaaaggctacaccgacgcttatttaccaattgtcgagcgacggaaagcgatggcctacggcgagcgcgagcgcaatttccagttatatcgtcgcggtcgttatgtcgagttcaatctggtctgggatcgcggcacgctgtttggcctgcaaactggcgggcgcaccgagtctatcctgatgtcaatgccgccactggtacgctgggaatatgattatcagccaaaagatggcagcccagaagcggcgttaacgtcagtgacggcttctcggaaaacagctgctggtaatccgtggcaaattgccccagatgccagaatccccactgcatggcggcgtctttcaccgtcacacgttgcgaccacggacttatcagctcgcggccaaagtatccgccagcgctgttcgcactgcacgctgatggagagtttccggattctcgcagaacgtcgccagcgcctgttggacaaagccccacagcgcggctttacgctgctctttcagttccagcgccgactggttacgcatcatatggtaaacccgatccgggttaaggcacaagttagcttccgggtgatgcgtctcatgtctacagtccagattgcgttcgccattaggccaggtgcctttaataaactgcacgacgcctactttttttccgtgagcaactgcgcgtgttgccgtaccaaatgccgcggtggttttgccttttccattgccggtaaagacgatgataataccgcgttcatcctgggcctgggcacacgagcatctacttttgctttcactcgctggctgacgctgttggtagcgttcatcactcattgggaaaaaacccagataggcccggttggggtgcaaagattctccagccgatcgccgccgtcgcgcacgtcgccaattgccacggcatccagtacggtggtgatgccgctcgccaccatcagcgcgtcgtggctgctcatcgccgagtgggcaggccagtcaactttcgggcgcggggtgaagaactactggtgtccgctgttactttatgcgcttattcctgtcgccaatacctgcgaaatgatcctgatgcccgcctgcttcggtctggccgatgacaaactgtggcgttggttgaatgaaaaactaccttgttcactgatgcttttgccaacgctgccgccttccgtgctgggcattcgtctgcaaaaccagttacagcgccagtttgtgcgccagggtgggtag

SEQ ID NO: 30024 - DNA, 2199 bp, Homo sapiens
  SIMILAR (37)..(903): 911254mologous to Escherichia coli K12 GMP reductase,accession number AE000119,Smith-Waterman Score=1350.
atgacttatttagcactcggtaccccggaattgcacatgcgtattgaagaagatctgaagttaggttttaaagacgttctcatccgccctaaacgctccactcttaaaagccgttccgatgttgaactggaacgtcaattcaccttcaaacattcaggtcagagctggtccggcgtgccgattatcgccgcaaatatggacaccgtaggcacattttctatggcctctgcgctggcttcttttgatattttgactgctgtgcataaacactattctgtcgaagagtggcaagcgtttatcaacaattcttccgctgatgtgctgaaacatgtgatggtttctaccggtacgtctgatgcggatttcgaaaaaactaaacagattctcgacctgaacccggcattaaacttcgtttgtattgacgtggcgaatggttattccgaacacttcgtgcagttcgttgcgaaagcgcgtgaagcgtggccgaccaaaaccatttgtgctggtaacgtagtgactggtgaaatgtgtgaggagcttatcctctcaggtgccgatatcgttaaagttggcattggcccaggttctgtttgtacaactcgcgtcaaaacaggcgtcggttatccgcaactttctgcggtaatcgaatgtgccgatgctgcgcacggtctgggcggaatgatcgtcagcgatggtggctgcaccacgccgggcgatgtggcgaaagcctttggcggcggtgccgatttcgtcatgcttggcggcattgtggcgggccacgaagagagcggcggtcccatcgctgagcgcgaccggcgacaatttctgctgttcctccgcttgagccccgagtctgcgatgaacgctccttggcgcggttcgtcactccgagctgagggcgaatttcctgatgtgaaatatcgcttcttccgtaagtcttgccagcactgcgatcatgcgccgtgcgttgacgtctgcccgaccggtgcgtcttttcgcgatgctgccagtgggattgtcgatgttaatccggatctctgcgtcggttgtcagtactgcatcgccgcctgtccgtaccgcgtgcgctttatccatccggtcacgaagacggcggacaaatgcgatttctgccgtaagaccaatttgcaggccgcttgcccgaccaaggcgctgacgtttggcaatctggacgatcccaacagtgagatttcgcaactgctgcgccagaagcccacttaccgctacaagctggcgctgggaaccaaaccgaagctgtaccgcgtaccgtttaaatacggggaggcgggcggtgcagacagtacgttgctgcgcaccacgctgattgtcgggccgggcgcggtgatcctcggtctgttgatcctcgtcttccacctgacaagaccgtggaccttctggaagctgatgttccactacagttttacctcggtgatgtcgatgggggtgatgctgtttcagctctacatggtggtgctggtgctgtggctggcgaaaatctttgaacatgatttgcttgcccctgcaacaacgctggttgccgaagctggggatcgtgcaaaggttctgagcctgctgacgcccgttcatcgcggactggaaacattgatgctgcaagggatgttgactcgccttggcgcgattgtgcaacgtcacctgcaactccagcagcaacaaagcgataaaacagccttaacggtaattcgtctgggcggcattttcagccgtcgtcagcagtatcaacttcctgttaacgttactgcttccactctgactctactgctgcaaaaaccgttaaaactgcatgatatggaagtggttcatatctcctttgagcgtagcgcgctggaacagtggctgagcaaaggtggtgaaattcgcggtaaactgaacggtatcggctttgcccagaaactgaatctggaagttgatagcgcccaacatcttgtcgttcgcgatgtaagtttacaaggcagtacgctggcacttcccggttcatcggctgaaggtctgcctggtgaaataaaacaacaactggaagagcttgaaagcgactggcgcaagcaacacgctttattcagcgaacagcaaaaatgtctgtttatccctggcgactggttaggtcgcattgaagccagcctacaggatgtcggtgcacagattcgccaggcacaacaatgctaa

SEQ ID NO: 30025 - DNA, 1716 bp, Homo sapiens
  SIMILAR (754)..(701): 631254mologous to Escherichia coli hydrogenase-2 large subunit,accession number U09177,Smith-Waterman Score=60.
atgttaaaaaagagagaacaaactgtgtttacccacgaaaagagtgtgtttcaggggcttgaccgggggaaccgagaattagggcctcctaaaacctttggtgtaaagggtgctcaaaagggaaatttgcaaattttttcggaagacaaaaactttggacctggaggttctggagaaatttggggccatagaggccccaagtgggatatcccccgcgggaaacgtgaaaccttggggaaaccccattttttttggaaacccagccaggaatttgggagaaagggattggggtcctttggcccatgggaaagggtctcaggaaacaagaattccgggaaaaggatttacccctggggaccagtggacgggataaactgccgctggcgagaaccgcgaaacgtggacgtagcggaatatcggcgtgattgcgggtccagatttcgttcactacgccatttttacaggtcacttttttcacttcatcgcccggcatccacacgccaccaaaaagcacaatcttccgctgtaactggttttgcagacgaatgcccagcacggaaggcggcagcgttggcaaaagcatcagtgaacaaggtagtttttcattcaaccaacgccacagtttgtcatcggccagaccgaagcaggcgggcatcagggggatttcgcaggtatcgtagaaagcgtgatttcacccaggatatttcccgtcgtcagaccaccatcatagccggaatgtggtgcctacccacggatctgcggcgcttcgtctttataccaggagtcgttcgcgctttcctgaatgcctttgatcaggtattcatcggaatgagaagtgatcggacgatacgaggacagatccgcattctcaatgtagccgcccgggaacaggaagctgccgtttttactgtcggtcgggaattccggcacgctcaggtagttcaccgcacctttaccgcgtgtcagccattccgggtagaacgcggcaataactgcggtatcaaccttataaacctgctcaacaaagtcgctcagtttgtcgatgaaagacttgatgtacatcaggcgctcaaggttcagcacgcccaaaccgtcgaggttgatcgggttcgcgacaccacctaccgccaggttctgaatgtgcggcgttttaccgcccagcagcgccacgacgcggttagcgtcacgctggcactccaacgcttgcaggttcacttccggcggcagtttcatcgccggatgaccccagtagccattagcgaaaatacccaactgacaactggcaaccagatctttgatcttgttctgaactttggtgaactcttccggactgttcaggtgccaggtcgaaacgcctttcagcatttcggaggctttggttggaggccagagaaagcatcacagtcccaccaacacacgtacaccacagaagaagaagtggacgacggctattctgcagctacgcagccacccaatcacctgacaacactcgacaacactccccatagaagagcacacacgacgccgagcgcgtgtagatgtggcagacacgagccgccacacacccacagacacagacaggcaacaactgcacagggacagaactcgcacgccgagcgagcgaacgaccggagcgttcaccaaatcgcgctggcaaaaacagtcccccatctagagtacacggcagcagcccgcgcgtgcccacgagccccttag

SEQ ID NO: 30026 - DNA, 1653 bp, Homo sapiens
  SIMILAR (1012)..(1623): 991254mologous to Homo sapiens myo-inositol 1-phosphate synthase A1,accession number AF220530,Smith-Waterman Score=1038.
atggaaatcgtggatggttttcaccgccatgaaattggtaaaggctcatcatcattaaaattacgcttaaaaggttatttgccggtgacctgtctggaaggtacgcgtaatcaacgcatcgccgcgactattcgtcataatcgcgctcgtggacgccatcaaatcaccgccatgtcggaaatcgtccgtgaacttagccagttgggatgggacgataataaaattggcaaagagctgggaatggacagcgacgaagtgctgcgcctgaagcaaattaacggactgcaagagttgtttgccgaccgtcaatattcccgcgcctggacgctaaagctggcgcaagcgttcagctgctgccagcaacgtcgattccttcttggcaaaacagagactaatcagtttatgtgggaagggatcggcgcaaaacaccgacagcggaatcgccgctacgccgtgctcctgcgtcagccactggcaaaactcaacatcatccaggctcggtaccccaatcaacatcgtcagcacgccggagagtgcaatccccactgccaggctggtggcgatatcgttgatcggtgtcccgcgcgatgcttcaccaagggtgatagtaaggatggttccccaccacaagccacctggcccttccataatagcgcgacgatgaccgcaaaacgcctgagcgaagcaagccagtgcggtagcaagaaaagcatattgcgtgagcgaattatctatcgtccgtcgattactcgatatccctttcaatcaacaatgaatcatccccttccggagcagacattgggctgtattgccacggattatggtagctctccatcgcctgatagatcacctgggccagctcattattactggacggatcatagcacagcaaatattcggtatcaggtagcggcggaagagaatggagagtacacatatgtggaaagagtgaagatacccttggatcatgggaccttgttaatcatggaaagagcgacacaagctgactggcagctggagcagatccgcagggacatccgagacttccggtctagcgcggggctggacaaagtcatagtgctgtggacggcgaacacggagcgcttctgtgaggtgattccaggcctcaacgacacagccgagaacctgctgcgcaccattgagctcggtctggaggtgtcgccctccacgctcttcgccgtggccagcatcctggaggtctgtgccttcctcaatgggtctccgcagaacaccctggtgcccggagctcttgagctcgcgtggcagcaccgggtttttgtgggcggagatgacttcaagtcaggccagaccaaagtcaagtccgtgcttgtggacttcctcattggctccggcctcaagaccatgtccatcgtgagttacaaccacctgggcaacaacgatggggagaacctatcggcgccattgcagttccgctctaaggaggtgtccaagagcaacgtggtggacgacatggtgcagagcaacccagtgctctatacgcccggcgaagagcctgaccactgcgtggtcatcaagtatgtgccgtacgtgggtgacagcaagcgcgcgctggatgagtatacctcggagctgatgctgggaataagacatttgttgggttcacagatggtg

SEQ ID NO: 30027 - DNA, 2205 bp, Homo sapiens
  SIMILAR (2205)..(1270): 1001254mologous to Escherichia coli glycerol-3-phosphate dehydrogenase (EC 1.1.99.5) chain A, anaerobic,accession number D90855,Smith-Waterman Score=1586.
tcattcattgttggcctcctgcgcgttgggcaatctgttgagcggcatgtaaagcactgacggcacaaacaccgccgccgcatccctgggcgatgggatcaaatccgcccagcaccgaaccgatggcaaacaggttttcaatggtttgccctgcctgtgacgggcgtacgtctcatcagtggttacaccgaactgctgccacggttgcggcgcaaaaaaatctcccttataccattcaccccgcgtggcggtttgtagcacatcaaggccgagaatcggctctcgaatgccgttacgttccgctaccagtccgccactaaagaaactgccgctggcgagaaccgcgaaacgtggacgtagcggaatatcggcgtgattgcgggtccagatttcgttcactacgccatttttacaggtcacttttttcacttcatcgcccggcatccacacgccaccctggcgcacaaactggcgctgtaactggttttgcagacgaatgcccagcacggaaggcggcagcgttggcaaaagcatcagtgaacaaggtagtttttcattcaaccaacgccacagtttgtcatcggccagaccgaagcaggcgggcatcaggatcatttcgcaggtattggcgacaggaataagcgcatcaagtaacagcggccagttttcttcattatcaaggaaacgggcgatattcaccgcgcgaaattcggtggcgttattgcgcagcacatccagttccggcagctctatttcacacaatccctgataaacccagcgggtaaattcgctttcgcgcagtgcatctccccaggcgatgggttgcacgcctttccagcgttcgttaaggaaggtggaaagttgctcgatagattgcgcggacgtcgtgacgttaaaacgttgcagcagtccggcagcgcggcaggcgcagagttcgccctggcaggtgcccatccccacacgggtacgacggcgtaaatccagcaggctattaacgtttaaattttctaccgcgtactgcacttcacccgcagttaccgcttcgcactcacataccaggctacggtgcagacggccttcgctcagccaggcaggcgtgcgatcgccatgacgataaaccgcagaaccgcagcggggcaggcagggagatgactttacgcaaggtaacttcagcgggttcatcgcgttcagcatggtcgagcagcacgatgccacggctgacgttacgtccgctcgggtcgtcatcgctggcaaccagcgggcgcacgcagaataggcccgcaaaatgcgcgttttcgccatcacgggggccagtttttccccttcacgcagcagaatatcaacctcttctgccgtcactcgattatcgtcaatctcgttgtaatcaatacgtaaagaggtggtaccaatcagcgaaatggtatcgccaggcaccagaatatcggcgtcggaaggtttacggcagcggttgatcacatgctggttaatgcggtgatccatgatcagcagcgatcctttcgccgggaacatgcgaatgcgcagatcggcatattcggcaatgtgttgcccccagatcccagcggcattaaccacgacaggtgcatgaagggcctgagtttcgccggtgagatggttacgtacacgaacaccgcacaccgtcgcgccttcacgaatcagccccgtgacttcatgagcggtaaggataacggcaccgtgttctttggcatccagcatgtttgctgcggtcagacgaaatggatcaacggtgccatccggaactttcaccgcgccaatcagtgccgggttaacggcaggttcgataatgcgcgcttgctgcgggtctatagcttctgcgctgatccctgcttcttcgcaggcgcgaataaaagtggcctggaaggagaggtcatcttccggcagggtgataaacaggccgttggttggttcaacgcagtgacgtgcaatgcgtttcaggatctggttttcactaatgcattcgcgggccgattccgcatcggttaccgcatagcgcgcaccgctgtgcagcaggccgtggttacgcccggtggcaccggttgcgatgtcgtggcgctcaaccaaaatcacgcgcagcccgcgcagggcacagtcgcgggcaatcccggctcccgttgcgccgccgccaatgataatcacgtcacttgattgcgagtcgcgagttttcat

SEQ ID NO: 30028 - DNA, 462 bp, Homo sapiens
  SIMILAR (243)..(401): 411254mologous to Homo sapiens Human 5' EST secreted protein SEQ ID No: 540,accession number Y11940,Smith-Waterman Score=62.
ctactgctcgtagtctaaggaccagcttttgaggattagcaggattatgaaggctacagctaatgatgggaaggggactgctttgcagatggggtagtcagcagatactgctaaagacatgcttttgaggtaagttcggagagagatattgggtactcgagcaaggctaaaaatcaggactgcaaatgtctggagagcatgttgtgagtgtaactgctgggacccactgttgtcttgatggagagcctttattgccgtcagctctatagcatgcaactggctgccctttgggaaatgtggctcaacatattggatgtgccaatccatgtagcctgcccactggttcagccctgctcccagttccttcttgtgccagtagcaccaaaccgggccttgctctctgccactatcttcattcagtttctccttgagcaccacaatgaggatagcattgctacccat

SEQ ID NO: 30029 - DNA, 1908 bp, Homo sapiens
  SIMILAR (799)..(1326): 981254mologous to Escherichia coli ribonucleotide reductase,accession number X06999,Smith-Waterman Score=915.
atggggtttcaccatgttgcccaggctggttttgaactcctgatctcaagtgatctgcccgccttggcctcccaaactgctaggattacagcgcgtgaagctcgggcgccggtagaagaaaataaaaaggcacagcttgagcgtgataaacagcttagcgaacagcaaaaacaagcggcgttggcgaaagaatataaagctcaggtgaagcagcttattgaaatgaaccgaatcaccattgccaatggcgatattggttttaacttcactgacggcaatctgattaagaagatttttgtcgataagctcacacaggcgcagttgattaatggtcgtctggcgattgcccgcttgttggtcgataacaatagcgaaggtgaatacgccattattcccgccagcgttgccgataaaattgctcagcgcgatgccagcagtatagtgttgcacagcgcgctcagcgccgaagagcaggatgaagacgacccgtatgccgacttcaaagtgcctgatgatttgatgtggcctacggtttatgggcgaagtgtagaccggataaggcgttcacgccgcatccggcagtcgtgcgccatgcctgatgcgacgctttgcgcgtcttatcaggcctacggcttacgggcgaaacacccctcgttcagcagccagggggttcctcactgtgtcccagatgtcactctaaagattgcttcagaggctccctccccaatcgttggagggactctgccagttccaatgaccagccagctgccttcagtcacaagcatgcagctgctgctagatctggataccatccctaatgagcccctccattacgactgggaagctctgcgtgagtcaatcaaaacgcacggtctgcgtaactccacgctttctgctctgatgccgtccgagacttcttcccagatctctaacgccactaacggtattgaacccccgcgcggttacgtcagcatcaaagcgtcgaaagacggtattttgcgccaggtggtgccggactacgagcacctgcacgacgcctatgagctgctgtgggaaatgccgggtaacgatggttatctgcaactggtgggtatcatgcagaaatttatcgatcagtcgatctctgccaacaccaactacgatccgtcacgcttcccgtcaggaaaagtgccgatgcagcagttgctgaaagacctgctcaccgcctacaaattcggggtcaaaacactgtattatcagaacacccgtgacggcgctgaagacgcacaagacgatctggtgccgtcaatccaggacgatggctgcgaaagcggcgcatgcctgataagacgcgccagcgtcgcatcaggctccgggtgccggatgcagcgtgaacgccttatccggcctacggctcggatttgtaggcctgataagacgcgccagcgtcgcatcaggcacaggatgcggcgcgttctgcctggtcgtgccactcgtcgggattttccctctctggaggctgggtatcagtggttaccggggcgtggtctggtgattgaaccgcaggcgcaggtgatgtatcagggcgtgcagcaggatgattgtaccgccgctagccgtgcgcgcgtgtcacaatcgcagggtgatgatattcagacgcggctgggtttacacagcgaatggcgtaccgctgttcatgtcataccaacattagatctgaatgattatcacgatccccattcgacggaaattgaagaggatggcagcactatcagtgacgatgcggtgaagcaacggggtgaaataaaagtgggagtcacgggcaatatcagtcagcgagtgtccctgcgcggcagcgtggcgtggcagaaagggagtgatgattttgcccagacggcagggtttttgtcgatgacggtgaaatggtaa

SEQ ID NO: 30030 - DNA, 1806 bp, Homo sapiens; identical to SEQ ID NO: 10337
  SIMILAR (1326)..(1358): 1001254mologous to Escherichia coli ribonucleoside diphosphate reductase B2 subunit precursor,accession number K02672,Smith-Waterman Score=63.

SEQ ID NO: 30031 - DNA, 2550 bp, Homo sapiens
  SIMILAR (1375)..(2013): 881254mologous to Escherichia coli O157:H7 putative 2- component regulator,accession number AE005606,Smith-Waterman Score= 926.
  misc_feature (1)...(2550): n = a,t,c or g
atgcagcagttgctgaaagacctgctcaccgcctacaaattcggggtcaaaacactgtattatcagaacacccgtgacggcgctgaagacgcacaagacgatctggtgccgtcaatccaggacgatggctgcgaaagcggcgcatgcctgataagacgcgccagcgtcgcatcaggctccgggtgccggatgcagcgtgaacgccttatccggcctacggctcggatttgtaggcctgataagacgcgccagcgtcgcatcaggcacaggatgcggcgtaaaatgccttatccggcattaaactcccaacaggacacactcatggcatataccaccttttcacagacgaaaaatgatcagctcaaagaaccgatgttctttggtcagccggtcaacgtggctcgctacgatcagcaaaaatatgacatcttcgaaaagctgatcgaaaagcagctctctttcttctggcaaaactggccgctgttacttgatgcgcttattcctgtcgccaatacctgcgaaatgatcctgatgcccgcctgcttcggtctggccgatgacaaactgtggcgttggttgaatgaaaaactaccttgttcactgatgcttttgccaacgctgccgccttccgtgctgggcattcgtctgcaaaaccagttacagcgccagtttgtgcgccagggcgaacacgtttggactgcggcactaagcttgctcattactgccgctggcctgccggtattaacggtagtggcgctggcaaaagttggcggcggtgttgacagcctcagcacgccaatcggtaaagtcgctggcgtactgctggcaacggtttgttacctggcggtggggccgcttttcgctacgccgcgtacagctaccgtttcctttgaagtggggattgcgccgctgacgggtgattccgcgctgccgctgtttatctacagcctggtctatttcgctatcgttattctggtttcgctctatccgggcaagctgctggataccgtgggcaacttccttgcgccgctgaaaattatcgcgctggtcatcctgtctgttgccgctatagtctggccggcgggttctatcatcacggcgactgaagcttatcaaaacgctgcgttttctaacggcttcgttaacggctatctgaccatggatacgcttggcgcantgctaactatagatggggatcccttcctaccttcatccctgttccccaaggaaaaccggttttctccatcaccccaagcaggctacatggattggcacatccaatatgttgagccacatttcccaaaaggcagccagttgcatgttatagagctgacggcaataaagacattgggctgtattgccacggattatggtagctctccatcgcctgatagatcacctgggccagctcattattactggacggatcatagcacagcaaatattcggtatcaggtagcggcgataggtgaaattacgctgcccgatcatgtatttgagctgatttttatgctgcgccagcaactggataaattaccggatgcgccttatgtctcggatcgtcgctggaaaaaagcgatccgattattgcaggccagcgccttttttagcggtcgcagtgctgttgccccggtagatctcattttgctgaaagattgcctgtggtatgacgcgcaaagcctgaatttgatacaacaacaaattgatgtattgatgaccggtcacgcctggcaacagcaagggatgttgactcgccttggcgcgattgtgcaacgtcacctgcaactccagcagcaacaaagcgataaaacagccttaacggtaattcgtctgggcggcattttcagccgtcgtcagcagtatcaacttcctgttaacgttactgcttccactctgactctactgctgcaaaaaccgttaaaactgcatgatatggaagtggttcatatctcctttgagcgtagcgcgctggaacagtggctgagcaaaggtggtgaaattcgcgcgaagctggagcggaacaccatgtctgacatggctgcgttcgaaaaactggccacgcctatcgaatacaaccatgtggaatatttctccaacgtgaaaccttacttgtttgccgatgtaattaacaagtttatggctcacgatgagcaggaggagcacactgtgggtcctgggatatggattcccgaggggctgccaaggggctggagggtgaaaattggaaggagagttcagcctgtcagaaacgcacactttgccagtgagctaccagggatgcttggaacaagaactgcccccaaaatgccaggggacccaaacttggacttaattcacagttcgcaagtcctcaacatggggctagctgaacaatttcaactaaatgaaaccctgcatggttctcctgggctgggcctgtgggtgccatgccccagctgtcagccccgcttcacagctgaagataaatcacagcagaaaatggagtgtaatgaaaacactgacagacccttcaaagtaatggagctcgggggtctcccttttgttgcatga

SEQ ID NO: 30032 - DNA, 1800 bp, Homo sapiens; identical to SEQ ID NO: 25899
  SIMILAR (773)..(1111): 351254mologous to Escherichia coli O157:H7 IS30 transposase,accession number AE005493,Smith-Waterman Score=114.

SEQ ID NO: 30033 - DNA, 4224 bp, Homo sapiens; identical to SEQ ID NO: 28508
  SIMILAR (718)..(1374): 981254mologous to Escherichia coli pseudouridine synthase 1 (hisT) (aa 1-270),accession number X02743,Smith-Waterman Score= 1142.

SEQ ID NO: 30034 - DNA, 1365 bp, Homo sapiens
  SIMILAR (601)..(1311): 971254mologous to Escherichia coli K12 putative enzyme,accession number AE000144,Smith-Waterman Score=1199.
atgtatgatgttgctacaaacagccttactcctgatgcaacatatgaaaacaatgactggaaacgtgttgttgatgacaaggtcttccagagcggtgtatttaacgtagcgttgaataacggttctgaatgggatactacaggtcgttccatcgttgataccttgacagttaataatggttctcaggttaatgtttcggaatctaaattaacttcagatactatcgatttaactaacggttcttcgctgaacattggtgaagatggctacgttgataccgatcatctgactattaactcctacagtactgttgcgttgaccgaatctactggtactggcctcacggtccgtgtgaacgataacgtccggggcctctacgccgccaagagcactgcaggcattgcagcaatgagccatcaggtgcaaaatgacagcataagaactgaccagagagcgtctgttatcgatatttcgggaacgttcgtgaattggtgttccgttcactatgttaatcgtacctctttcgcctttgcgggtatgacgcctgccatggcgaaggctatgcgaccgtcgcagatgctgtatattcagttaccaccgttgaaacgtagtctgcttttttctgccgtgctgtgtgcggcgtcattgacctccgtccatgcggcgcagccgatcactgaaccggagtttgcctctgatattgtcgatcgttatgccgatcatattttttacggcagcggtgccacggggatggctctggttgttatcgacggtaaccagcgcgtctttcgcagttatggcgaaacgcgacctggtaataacgttcgcccgcagctggattcggtcgtgcgtattgcttccctcaccaagctaatgaccagtgagatgctggtgaaattgctcgaccaggggaccgtgaagttaaacgatccgctaagtaaatatgctccgccaggcgcacgcgtgccaacctacaatgggacgcccattacgctggtcaatctggcaacccataccagcgccctgccccgtgaacagcccggtggcgcggcacatcgtccggtgtttgtctggccaacgcgcgagcaacgctggaaatacctttctacggagaagctgaaagccgcgccaggcagtcaggcggcgtactctaaccttgcgttcgacctgctggcagatgcactggcgaatgcgtccggcaagccttatacccagttgtttgaagagcagattacccgtccattggggctgaaagacaccacctacaacccctcaccggatcagtgccgccgtttcatggttgctgagcgcgagacagtcgtgcaaaaaggaggcgaaatggcaacagagcgcaatacacgctga

SEQ ID NO: 30035 - DNA, 1443 bp, Homo sapiens; identical to SEQ ID NO: 25898
  SIMILAR (1)..(258): 1001254mologous to Escherichia coli K12 putative transport,accession number AE000412,Smith-Waterman Score=439.

SEQ ID NO: 30036 - DNA, 503 bp, Homo sapiens
  SIMILAR (326)..(3): 1001254mologous to Escherichia coli cytoplasmic maltose- binding protein,accession number J01648,Smith-Waterman Score=562.
aacacttcctgcgcacgttcaaaagtcagctggttagtgctgctgtagttggtgaaggcaatggcgatggtgcagaccagagggaagaggacgaataatcccattccagccattcccgggtaaacatagcgccaggcgtaggctttacgattggcgaaaatatacagccccgctgaactcaatatcagcgtggtaatggcgaacaggtattccccttgtgcgtacattaaaacaacaaggtaacccaccagcaggccgagcagacctagcactgaccatttcagcgcgtcgctttgccaccaatgtttctttttaatgacatccatggggttcttcctcattccaggacggataaggctttcacgccttatccgacaacaattggtgatacgagtctgcgcgtctttcagggcttcatcgacagtctgacgaccgctggcggcgttgatcaccgcagtacgcacggcataccagaaagcggacatctgcgggatgttcggcat

SEQ ID NO: 30037 - DNA, 2936 bp, Homo sapiens
  SIMILAR (1451)..(2305): 961254mologous to Escherichia coli similar to,accession number D90876,Smith-Waterman Score=1444.
atgcctgatgtgcccctgggcaacctactgaatgctgactgtgtgctggtgctgctggcggtgttggccgcgcaatatgaaagcctgaccctgcccatcgccattctgctcatcgtgcccatgggcctgctggcagcgatgacgggcgtctggctcagccatggtgacaacaacgtcttcacgcagatcggattgatcgtgctggtcgggttgtcagccaagaacgccatcctgatcgtcgagttcgcccgggagctggagttcgccggacgcacaccgatgcaggcggcattggaagcggcgcgcttgaggctgcggcccatcctgatgacgtcgatggccttcgtcatgggcgtgttgcccctggtgctgagcagtggcgccggcgccgaaatgcgccaggccatgggcgtggccgtgttcgccgggatgatcggcgtgaccctgttcggcctgttcctgacgccgctgttctacgtcatcgtgcgccgcctcgcgggcaatgcaccgctgcgccaccacggtggccagggggcttggggctatggtgtgaatgggaatatgccaggaggcacaaacaacacgcacgaacacaactcactgacgaccggagccaccgacccaacggagcgacccactgaacggacccaccaaacgagcatacccactgagcaaccgggaaacaaagtgaagggcacgacgagtcaaataaaacaacaaaaaaagaaacgcggaacgcaagacacggaacaggaagacgagcgcacgcgaaagaaacccaaccaaagcacggccacaaccaccaccacaggagaacgcagactaaggagcccccccctaaaccaccaccacacgacaaagagccccgaaacagcgagggaagccaaaacgacagcaggcgaaacgaagtgcgccgcgggctgcgcgcgcagcaggggcccacgacgactaagaccgaaagccagcggggacgggtacaaagacgagcacgacagtctgacgaccgctggcggcgttgatcaccgcagtacgcacggcataccagaaagcggacatctgcgggatgttcggcatgatttcacctttctgggcgttttccatggtggcggcaatacgtggatctttcgccaactcttcctctgttggatacagtttgtaaaaagtgactgccgaagaggtgaataacgcacttaaacaagcaaccaccaataacgagtcatttggttataccgatgaagaaatagtctcttccgatatcattggcagccatttcggttcggtgtttgatgccacgcaaacggaaattaccgccgtgggcgatttacaactgatattcatgcaagccatgtttaccatctgcgccgccaataccggatttacgccatccggcgtggaagccttgcatagcttcgaagttttcacggttgatcccaactgctggacccacttcgcatatgaacagacgttatggcaaagcgatccagaaacgccgttaaaggtttatcagctcttgtctggtgcgcactatcggacttcgccgctggatttacgccggatgatggatgcaccagtgcaacattttttacaggcggctggcgaaaacgagattgccggggcgctgtggctggtggatgagggtggattatctcaacaactcagtcaggcggtatgggcaggttttcgtcgcccgcggggtaatctggtggcccagtcgctggcggcgcacggcaacaatccactggcggcgacattgcgtggacggcgggtcagccggatagcagttcatccggctcgtcagcgggaaggcacagggcggcaacttattgctggtgctttgcaatatacgcaagacctcgactatctttcgttatggcgtttctggcaacgctgcggttttgtgctggtgcggatgggtaatcatcgggaagccagcagcggttgctatacggcgatggcgctgttaccgatgagtgatgcgggtaaacagctggctgaacgtgagcattaccgtttacgtcgcgatgcgcaagctctcgcgcagtggaatggcgaaacgcttcctgttgatccactaaacgatgccgtcctttctgacgacgactggcttgaactggccggttttgctttcgctcatcgtccgctattaacgtcgttaggttgcttattgcgtctgttacaaaccagtgaactggcattaccggcgctgcgtgggcgtttacagaaaaacgccagtgatgcgcagttatgtaccacacttaaactttcaggccgcaagatgttactggtccgtcagcgggaagaggccgcgcaggcgctgttcgcacttaatgatgttcgcactgagcgtctgcgcgatcgcataacgcaatggcaattatttcactgactccttcaattttatctcatggtcattgtgagtcagcggcgtaaaattaatgacatcagttaaggagttcgccatgaaacatgaccattttgttgttcataaggccggattaacctggcccaccagttgttccggcttttccccggtgtcgggaataacccggtgccaatggggaaaatagccacttggttggccccgctgtttcttaatgcgctgttggtgagttccgttggcccggacccgagcggtattccggcggggcgtcagtggttttcggtgcaagggtattacggaagataatcgccaggcgcgtgtggatgcgatcatgccgacgtttattgaaacggtgcgctactggcagaaacagagcggagtaggggctaacgccacggcgctcatcggtttctctcaaggcgcgattatggtgctggagagcattaaagccgaaccgggccttgcttcacgcgtcattgcttttaacggacgctatgcgagcctgccggaaactgcgtctacagccacgacaattcacctgattcatggcggtgaa

SEQ ID NO: 30038 - DNA, 564 bp, Homo sapiens
  SIMILAR (1)..(327): 1001254mologous to Escherichia coli sensitivity to lysis gene,accession number L13261,Smith-Waterman Score=561.
  misc_feature (1)...(564): n = a,t,c or g
ctgcatggtcacggttccctgatctctggcctggaaacggcgctggaaggtcatgaagttggcgacaaatttgatgtcgctgttggcgcgaacgacgcttacggtcagtacgacgaaaacctggtgcaacgtgttcctaaagacgtatttatgggcgttgatgaactgcaggtaggtatgcgtttcctggctgaaaccgaccagggtccggtaccggttgaaatcactgcggttgaagacgatcacgtcgtggttgatggtaaccacatgctggccggtcagaacctgaaattcaacgttgaagttgtggcgattcgcgaagcgactgctttttggtttttgtcctggcttcacgcgggcgataatgccctgatgcacggccccgtcgcttttctcgtcgagatattgncggtttgccaactggataaccacgccttgagactcaagggcgtgaatcagcggtaacagacgtttatcttcacggccttttaaaataaagacttcctgaaaacgttcaggggcgcgctccagcagggcctgcactgcgtggatgccgtaaatcat

SEQ ID NO: 30039 - DNA, 627 bp, Homo sapiens
  SIMILAR (1)..(507): 881254mologous to Escherichia coli K12 galactose-proton symport of transport system,accession number AE000377,Smith- Waterman Score=761.
atgtgggggaccgtgattgtcggcctgaccaacgtacttgccacctttatcgcaatcggccttgttgaccgctggggacgtaaaccaacgctaacgctgggcttcctggcgatggctgctggcatgggcgtactcggtacaatgatgcatatcggtattcactctccgtcggcgcagtatttcgccatcgccatgctgctgatgtttattgtcggttttgccatgagtgccggtccgctgatttgggtactgtgctccgaaattcagccgctgaaaggccgcgattttggcatcacctgctccactgccaccaactggattgccaacatgatcgttggcgcaacgttcctgaccatgctcaacacgctgggtaacgccaacaccttctgggtgtatgcggctctgaacgtactgtttatcctgctgacattgtggctggccgttatgcgtcgcctgcgggaaaaactcgcccaggccaacctgaagctagggcgtaactacccggagccaaaactctcttacacccagcgcggaacctccgccggaacggcctggctggaaagctatgaaattcgcctcaatcccgttttgctgttggaaaacagtgaagcttttattgaagaagtg

SEQ ID NO: 30040 - DNA, 862 bp, Homo sapiens
  SIMILAR (12)..(773): 981254mologous to Escherichia coli K12 galactose-proton symport of transport system,accession number AE000377,Smith- Waterman Score=1289.
ctcgaagtgtccaacgcgtgctgctacgcctgcgtgacaccagcgcggaagcgaaacgcgaactggatgaaatccgtgaaagtttgcaggttaaacagagtggctgggcgctgtttaaagagaacagcaacttccgccgcgcggtgttccttggcgtactgttgcaggtaatgcagcaattcaccgggatgaacgtcatcatgtattacgcgccgaaaatcttcgaactggcgggttataccaacactaccgagcaaatgtgggggaccgtgattgtcggcctgaccaacgtacttgccacctttatcgcaatcggccttgttgaccgctggggacgtaaaccaacgctaacgctgggcttcctggcgatggctgctggcatgggcgtactcggtacaatgatgcatatcggtattcactctccgtcggcgcagtatttcgccatcgccatgctgctgatgtttattgtcggttttgccatgagtgccggtccgctgatttgggtactgtgctccgaaattcagccgctgaaaggccgcgattttggcatcacctgctccactgccaccaactggattgccaacatgatcgttggcgcaacgttcctgaccatgctcaacacgctgggtaacgccaacaccttctgggtgtatgcggctctgaacgtactgtttatcctgctgacattgtggctggtaccggaaaccaaacacgtttcgctggaacatattgaacgtaatctgatgaacggtcgtaaactgcgcgaattagggctcagaataatttcccaagacgttgacgctacacctcaccacttacactttgctgtttggcgcatcaccttggccctggctattaccac

SEQ ID NO: 30041 - DNA, 469 bp, Homo sapiens
  SIMILAR (163)..(462): 961254mologous to Escherichia coli fepD,accession number X57471,Smith-Waterman Score=471.
atgcgtatgttgcaggaagagaatatctggatcgtcggtacggcaggcgaggcggatcatacactctatcagagcaaaatgaccggacgcctggcgctggtgataatgcaccacattatgggaaaactctttttcacagtatttgcatttgagcgcgatatcattgataccttaaaagtggtgctgatcccggtgctgatcgccggagcaactgcgctattactgagtcgcgcgctgaacagtttgagcctcggcagcgacaccgcgacggcgctgggcagtcgcgtggcgcgcacacagttgattggtctgctggcgattaccgtgctttgtggtagtgcgacggcaatagttggcccgattgcctttattggcctgatgatgccgcatatggcgcgttggctggtgggtgccgatcatcgctggtcgctgcccgtcacgctacttgctacccctgttgtcaccaccc

SEQ ID NO: 30042 - DNA, 654 bp, Homo sapiens
  SIMILAR (648)..(412): 1001254mologous to Escherichia coli K12 putative transferase,accession number AE000392,Smith-Waterman Score=437.
ctaagaagtctcatgctctccactcttcacgatgcagcagagccagatgggtcctggaaagttgctgagcccaacatcccacattagagttggagaagctgacagtccttggttggaaagcaggttgagattctgtcccgcctcccgcttctgggaagcaggcattttctttgacacactggggcacatgatgactggtttacccaggttggcactggaaaacaacaagcacctgtctgatgggtctgctccactgccaccaactggattgccaacatgatcgttggcgcaacgttcctgaccatgctcaacacgctgggtaacgccaacaccttctgggtgtatgcggctctgaacgtactgtttatcctgctgacattgtggctggtaccggaaaccaaacacgtttttgatggtcttatggctgcggaagtaatgattacggatatgatcgaaattgactgtttcggcgatccccggcatctggtagatatcgcgcagaaaaccgtacagattcaggtaatcgctgatgcggtgcttatcacacttgaagtgggtcacatacaccggatcaaaacgcaccagcgtagtccacaggcgaatatcggcttcggttagctggttgccggtcaggtaacgatgctggcctcccat

SEQ ID NO: 30043 - DNA, 1431 bp, Homo sapiens; identical to SEQ ID NO: 17859
  SIMILAR (1)..(522): 961254mologous to Escherichia coli K12 transport of D- alanine, D-serine, and glycine,accession number AE000492,Smith- Waterman Score=865.

SEQ ID NO: 30044 - DNA, 1504 bp, Homo sapiens
gtccgccagaacgacgaccgccgctcacctgactgtgacgtttcaccgcacgacgaatctgattcgccttcatgcgacgacggtctttttctacagcgactttagagctggtttctggcggtagctccaccagttcgcgcagatagttagtctgggcgaggtccagctccgtccagccaccgcgtggcagaccttttggcagtgggatatcaccgtaacgaacacggatcaggcggctcacctgcacaccaaccgcttcccacagacgacgaacttcacggttacggccttcggtcagagtcacgttgtaccactggttgatcccttcgccgccgctgaacttgatggttttaaaagctgccggaccatcttccaactgcacgccacgactcaaatcacgcagtttcgcgtcgtcaacctgaccaaatacacgcacggcatattcacgttcaacttcacggcttgggtgcattaaacggtttgccagttcaccatcggtggtgaacagcagcagaccacaggtattaacgtccaagcgacccacggcaatccagcgtgcgccacgcagttttggcagacggtcaaacaccgttggacgtccttccggatcgttacgggtacacaactcaccttccggtttgtaataggccagaacgcgacaaatttgttcagcggactcacgtaccgaaatcaggtgaccatcgatacggattttcaatccaggggtaacttcaacacgatcgccgagtttagcaattttgccatcaacactcacacgaccggcttcaataatagattcgatttcacggcgagaaccgtggccggcacgcgccagcactttctgtagcttttcgctcatagagcttccttttggtgtcgccttcccaggcgtgtcatcattattacgcgccgaaatcttcgatctgacggttataccagcactaccgagcaaatgtgggggaccgtgattgtcggcctgaccaacgtacttgccacctttatcgcaatcggccttgttgaccggctgggcttcctggcgatgcctgctggcatgggcgtactcggtacaatgatgcatatcggtattcactctccgtcggcgcagtatttcgccatcgccatgctgctgatgtttattgtcggttttgccatgagtgccggtccgctgatttgggtactgtgctccgaaattcagccgctgaaaggccgcgattttggcatcacctgctccactgccaccaactggattgccaacatgatcgttggcgcaacgttcctgaccatgctcaacacgctgggtaacgccaacaccttctgggtgtatgcggctctgaacgtactgtttatcctgctgacattgtggctggtaccggaaaccaaacacgtttcgctggaacatattgacgtaatctgatgaaaggtcgtaaactgcgcgaaataggcgctcacgattaatctccccaagcttcctcccatcgcggaggaagccacctcttgcagtcat

SEQ ID NO: 30045 - DNA, 990 bp, Homo sapiens
  SIMILAR (1)..(309): 871254mologous to Escherichia coli cyanate transport protein,accession number U73857,Smith-Waterman Score=434.
atgagctttagcgtggctgccctgttgaccgctctgccggtggttaccatgggcgggctggcgctggccggaagctggcttcatcagcatgtcagcgaacgtcgcagtgtcgccatcagtctgttgctgattgccgtcggtgcattgatgcgtgactttacccgcaaagtgcgctgctgcttaacgatgcttggtggggtggggatcggcatcattcaggcggtgatgccttcggtgattaaacggcggtttcagcagcgcacgccactggtgatggggctgtggtccgcggctctgatgggcggcggcctacaagttcagcgatctacattagccgcatccggcatgaacaaagcgcaggaacaagcgtcgcatcatgcctctttgacccacagctgcggaaaacgtactggtgcaaaacgcagggttatgatcatcagcccaacgacgcacaggcatgaaatgcccagtccatcagcaacacacaaggggcagcatgtggcgtctgattcggaacaaaacgttacggcggcagccgtgaaggcggatagtgcgctgcacccggcggctgccgggtggatggacgttatcgtgatggacccgccgaagtttgttgagaataaaagccagttgatgggcgcgtgtcgtggttataaagacatcaacatgctggcgattcagctgctgaatgaaggcggtattctcctgactttctcctgttccggtctgatgaccagcgatttatttcagaaaatcatcgcggatgccgcaattgatgccggtcgtgatgtacaatttatagagcagttccgtcaggcagccgatcatccggtaaagatttcccgggaggtgactatgattgccagcaaattcggtatcggccagcaggtccgccattccctgttaggttatctcggagtggtcgtggatatcgacccggtttattcgctctctgaaccgtcgcctgatgagctctcggggagagtatga

SEQ ID NO: 30046 - DNA, 2203 bp, Homo sapiens
  SIMILAR (2182)..(1346): 911254mologous to Escherichia coli KbaZ,accession number AF228498,Smith-Waterman Score=1319.
ccggccccctaagctgaggccaagacggggtgttgttggtggggcaaggccgaaaaagccagatacccaggaaatcgctaatgctggcaaaaaagctggaagccaaagtgggttacagtcgggcgcgagtgatgaacggtggcgttgatgctgaaaaagtgattggtatttccggacatctgctggcacctgaggtgtgtattgttgttggcgcttctggcgcagcagcgttaatggcgggcgtacgcaatagcaagtttgtggtggcgattaatcatgacgccagcgctgcggtattttcacagacagatgttggcgtggttgatgactgaaaagtggtgctggaggcactggtgacaaacattcacgcagattgccaataacgtgttgccggatgatcctgcatacggttctggcctggggacttgtaggcctgataagacgcgtcaagcgtcgcatcaggcgctgaatgtcggatgtggcgtgcggcctacaaatcaaaccaaattcaattggttacgattatcccgtcaaagtaattttttcgctaacgtccagaccccggtattcgtggtggaaagcgccacgacacccgcgttaatcgcattacgcgcatctttttcatcgcacaccagcccaccggcaatcagcggttggcggattatgtctgtcacccagcccagcgctatgtgggcatacagcctggcaggatctcaataatcaatcccgttgaggcgtaaattctcgcgcgtcgccagttcactgatgtatgagtcgccaatgctgtacggcttatgttccgccagtgcgcagttgctgtcctccggtttctgttcacttttttttccacagcaggctctgtcgggacgccctgaacgaagcattccaccccagcggttttcaggtcgttaaatgctgcgatatcgcccgcatccacagaaaccgttatggcgatttgttgtttgccattggcgtagtgcatatagccaacgttaatgcgattcaccggaacgccacctttcaccagcgtcaggaaatcggcgggtgttttacaaaccagcaggattttctgtcgatcggcggcgcgatgaatgttgtcgataactttttgcagcgtccagaaacgtacggcgatcccttctgccagtaccatttccatcaggttttgttgtaccggatcttcggcaacctcatcgttggctaccagcaccagatttgcccccgcaaatccgacccattgaacgccgacctgaccgtgaatcaagcgttcatcaatccggcttaaaacaatatttggcatagcgtgttcctctttgttttgcttattggccttcacaggctgtgtggtatgcgccaggatgtcctgaatatggttgataatgagttcccgtggcgttggctgcagctcgccggagcgaactttcacgtactgcagcggcagatactggctgatcagcggcagcggaattggtgaatccgccagattacgtaccagatgagcgaaagcgtcatcaatctggctgtccggccagtaatagcgcacgcgatccgagtagctataaccacgcgccagacgacgcgcgttgccgtcaccgtggtagtggctttgccagtattccgggcggtcgagcatcacgtcttccagcacctgacgcagaccagaacaggctttcgctggcaccagttcttcttcaatcgccgccagagagaacagagcttcacgcagggcgaaggtcagcgctgggccaactttcagaatggcaaagtggtcaatcaccagctggcgcagcgattgcggcgtttgataatcggtagagtgcgcttcgaaaatcagcgtttcgtagttttcgaccatctggcttaaggcgctcgctttggcgggctgataatcaataacgttggtgtgatcgaattcgacgccgggttgaaccaccagggcaatgatgcgtggccagatggcattcaaaccttgcttttcaaaggcgtgacgatgggcttccagcgtggcgcgggcggcatccggcgtggtgaccgccagctcgcttaaggtttcctgcgcgccggcaggtaccggcacttcggtacccatgacatactccaaatcgggttcgccaaggtgttcacgaacgggttcttccgggatcagttcttgccgagagaaatcaaatactggaacctcgtcaaattttaagccgtagtccat

SEQ ID NO: 30047 - DNA, 3845 bp, Homo sapiens
  SIMILAR (2640)..(3332): 971254mologous to Escherichia coli K12 galactose-proton symport of transport system,accession number AE000377,Smith- Waterman Score=1164.
atgcccctcttacacctgctccgccagaatccggtgattgctgccgttaaagataatgccagcctgcaactggcaatcgattctgaatgccaatttatttccgtgttgtacggcaatatctgcaccatcagtaatatcgttaaaaagattaagaacgccgggaaatatgcttttattcatgttgatttgctggaaggcgcgtcaaataaagaagtcgttattcagtttttgaaactggtgaccgaggcggacggcattatcagtaccaaagcctcaatgttgaaagcggcaagagcggaaggttttttctgtattcatcgcctgtttattgttgattcaatttcgtttcacaacattgataagcaagttgcgcaatcgaatccggattgtattgagatcctgccaggctgtatgcccaaagtgctgggctgggtgacagagaaaatccgccaaccgctgattgccggtgggctggtgtgcgatgaagaagatgcgcgtaatgcgattaacgcgggtgtcgtggggctttccaccacgaataccggggtctggacccccccgccacattcgacattcagcgctgatgcgacgcttgacgcgtcttatcagccttctaatccccagcccggaaacgttagcaggaacattcgggaacgaatgtgcgtgacgttctcgaatcttgatcctgagctgaaagcaccacagattctggtgctggcaccgacccgcgaactggcggtacaggttgctgaagcaatgacggatttctctaaacacatgcgcggcgtaaatgtggttgctctgtacggcggccagcgttatgacgtgcaattacgcgccctgcgtcaggggccgcagatcgttgtcggtactccgggccgtctgctggaccacctgaaacgtggcactctggacctctctaaactgagcggtctggttctggatgaagctgacgaaatgctgcgcatgggcttcatcgaagacgttgaaaccattatggcgcagatcccggaaggtcatcagaccgctctgttctctgcaaccatgccggaagcgattcgtcgcattacccgccgctttatgaaagagccgcaggaagtgcgcattcagtccagcgtgaatacccgtcctgacattagccaaagctactggactgtctggggtatgcgcaaaaacgaagcactggtacgtttcctggaagcggaagattttgatgcggcgattatcttcgttcgtaccaaaaacgcgactctggaagtggctgaagctcttgagcgtaacggctacaacagcgccgcgctgaacggtgacataaacaacgagtacattaatgagcgaaatgatttacggcatccacgcagtgcaggccctgctggagcgcgcccctgaacgttttcaggaagtctttattttaaaaggccgtgaagataaacgtctgttaccgctgattcacgcccttgagtctcagggcgtggttatccagttggcaaaccgccaatatctcgacgagaaaagcgacggtgccgtgcatcagggcattatcgcccgcgtgaagccaggacgtcagtatcaggaaaacgatctgccggatctgatcgcttcgctcgatcaaccgttcctgctgatcctcgacggcgtaaccgatccgcacaacctcggcgcgtgcctgcgtatgcggacgccgcagcttcatgcggtgattgtgccgaaagatcgctccgcacagctcaacgctacggcgaaaaaagtagcctgcggcgcggcagaaagcgttccgctgattcgggtgactaaccttgcgcgcaccatgcgtatgttgcaggaagagaatatctggatcgtcggtacggcaggcgaggcggatcatacactctatcagagcaaaatgaccggatcgctggcgctggtgatggggtcggaaagtgaagagtcacccgtgcacgaaatattcaacatgctgctggcggtcttcgatcgggcagcgttaatgcttatctgcctgttctttctcatccgtatccgcctgtttcgcgaactgttgcacaagtcggcgcactcccaaaagaattgctcgccgttaccgccattttctcgctgtttcgccctggtcagcacctggtccggcgtttataaagacatcaacatgctggcgattcagctgctgaatgaaggcggtattctcctgactttctcctgttccggtctgatgaccagcgatttatttcagaaaatcatcgcggatgccgcaattgatgccggtcgtgatgtacaatttatagagcagttccgtcaggcagccgatcatccggtaaagatttcccgggaggtgactatgattgccagcaaattcggtatcggccagcaggtccgccattccctgttaggttatctcggagtggtcgtggatatcgacccggtttattcgctctctgaaccgtcgcctgatgagctggcggtgaatgacgagcttcgcgccgctccgtggtatcacgtagtgatggaggacgataacggcctaccggttcatacctacctggctgaagcccagctaagtagcgaattgcaggatgaacatccctgaacagccatccatggatgagctggcgcagaccatccgcaaacaacttcagggcccggcccggtttcttgaacgcgtgctgctacgcctgcgtgacaccagcgcggaagcgaaacgcgaactggatgaaatccgtgaaagtttgcaggttaaacagagtggctgggcgctgtttaaagagaacagcaacttccgccgcgcgatgttccttggcgtactgttgcaggtaatgcagcaattcaccgggatgaacgtcatcatgtattacgcgccgaaaatcttcgaactggcgggttataccaacactaccgagcaaatgtgggggaccgtgattgtcggcctgaccaacgtacttgccacctttatcgcaatcggccttgttgaccgctggggacgtaaaccaacgctaacgctgggcttcctggcgatggctgctggcatgggcgtactcggtacaatgatgcatatcggtattcactctccgtcggcgcagtatttcgccatcgccatgctgctgatgtttattgtcggttttgccatgagtgccggtccgctgatttgggtactgtgctccgaaattcagccgctgaaaggccgcgattttggcatcacctgctccactgccaccaactggattgccaacatgatcgttggcgcaacgttcctgaccatgctcaacacgctgggtaacgccaacaccttctgggtgtatgcggctctgaacgtactgtttatcctgctgacattgtggctggaatgggtggttagtagcatgatgctcggtgcagcaattggtgcgctgtttaatggttggctgtcgttccgcctggggcgtaaatacagcctgatggcgggggccatcctgtttgtactcggttctatagggtccgcttttgcgaccagcgtagagatgttaatcgccgctcgtgtggtgctgggcattgctgtcgggatcgcgtcttacaccgctcctctgtatctttctgaaatggcaagtgaaaacgttcgcggtaagatgatcagtatgtaccagttgatggtcacactcggcatcgtgctggcgtttttatccgatacagcgttcagttatagcggtaactggcgcgcaatgttgggggttcttgctttaccagcagttctgctgattattctggtagtcttcctgccaaatagcccgcgctggctggcggaaaaggggcgtcatattgaggcggaagaagtattgcgtatgctgcgcgatacgtcggaaaaagcgcgagaagaactc

SEQ ID NO: 30048 - DNA, 656 bp, Homo sapiens
  SIMILAR (1)..(459): 991254mologous to Escherichia coli alternate gene name yibK,accession number U00039,Smith-Waterman Score=805.
atgctaaacatcgtactttacgaaccagaaattccgccaaatactggcaacatcatccgtctttgcgctaataccggctttcgtctgcatatcatcgaaccgatgggatttgcctgggacgataagcgcctgcgccgcgcggggctggactatcacgagtttaccgccgttacgcgtcatcatgactatcgcgcgttcctcgaagcagaaaatccccagcgcctgttcgccctcaccacgaaaggtacacctgctcacagcgccgtaagctatcaggatggcgattatctgatgttcggcccggaaacacgcggcctgccagcgagcattcttgatgccctgcccgctgaaccaaaaattcgcattccgatggtgccggacagccgcagcatgaatctgtccaatgcggtctcggtagtggtgtatgaagcctggcggcagttggggtatccgggagcgcaccacggaacctgcgccaatcttcgcgccgcgcccaacttcaatattgccgaggattttcgcgcccgcgccaatcatcacaccttcacgaattttcgggtgacggtcaccaccagatttacccgtaccgccaagcgtcacagattgcagaatcgatacgtcgttttcaatcaccgccgtttcaccaacgacgatgg

SEQ ID NO: 30049 - DNA, 739 bp, Homo sapiens
  SIMILAR (1)..(651): 951254mologous to Escherichia coli K12 putative transport protein,accession number AE000183,Smith-Waterman Score=1051.
atgttgctgttgagcgcatggggattgttcgatttctggaactggctgcaaaacggcgcggggcagaaaccggtagatatcctgatccgtatcgcactcattcttttcttctcggcggttggctggacggtgctcgccagtttgatcgaaaaccggctggcttcggatattcatggccgcccgctacccagcgcccgcacgcgtaccctgcttacgctgtttcgtaacgcgctggcggtgattatcagtaccatcaccatcatgattgtgttgtcggaaatcggcgtcaatatcgcgccattgctggcaggtgccggggcattaggtctggctatctcgtttggttcgcaaacgctggtgaaagatattatcaccggggtatttattcagtttgaaaacggcatgaacactggagatttggtgactatcgggccgttgaccggcacagtggaacggatgtcgattcgctccgtgggcgtacgacaggataccggggcgtatcacatcattccgtggtcttcgataaccacctttgctaactttgtccgcggcattggttcggtggtggcaaattatgatgttgatcgccatgaagatgctgataaagccaatcaggcactgagagatgcggtagaagatgatgagactcgctttaccagcgagtccagtccgatcttgcggtgctgtcagagggaaggtctagggctgaaggctgttgttcagattcttttgtcccacg

SEQ ID NO: 30050 - DNA, 943 bp, Homo sapiens
  SIMILAR (1)..(588): 1001254mologous to Escherichia coli 2,4-dienoyl-CoA reductase,accession number U93405,Smith-Waterman Score=1014.
gatcatccgaaggtattgagttatctcgatgtactgcgcgacaaagcgccggttggcaacaaagttgccatcatcggttgtggcgggattggttttgatacggcgatgtatttaagtcagccgggcgaatccaccagccagaatatcgccgggttctgtaatgaatgggggatcgacagtagcctacaacaggctggtggcttaagcccgcagggaatgcagatcccccgtagcccacggcagattgtgatgctccagcgcaaagccagcaaaccaggacaggggttaggcaaaaccaccggctggatccatcgcaccaccctgctctcgcggggtgtgaaaatgatcccaggcgtaagttatcagaagattgacgatgacgggctgcatgtggtgatcaacggcgaaacgcaggtattagcagtggacaatgtggtgatctgcgcagggcaagagccaaaccgcgcgctggcgcaaccgctgattgatagcgggaaaacggtgcatttaattggcggctgcgatgtggctatggagctggacgcacgacgggcaattgcccagggaacacggctggcgctggagatttaaatcggtatttgaagcgccggatgcaacgcattccgcacgtcgcggtaataaataaacaaagcgggggaaaatgccgaaacgcggtgccaattttttagcggggttccaacggtaattttctctttccgctcaaaacgcgggacaccatagatttactgccaatttccggcagatcggaaagggttaaaccatattgatccataagggtacgaatcacggctataccgtcaggcatggcttgagccatggcattaaattccgcaaattcgggcgctgattcttcccacgcggttattttggcacacaccagatccagcaaggggttttcaggatccacgggtccgagactcga

SEQ ID NO: 30051 - DNA, 3468 bp, Homo sapiens
  SIMILAR (1629)..(1670): 1001254mologous to Escherichia coli chlE protein,accession number M21151,Smith-Waterman Score=71.
ttccacattaagcttgtgctcactggggccacctggactgccctcccctactgccacagccacgtgggcctcagagccagcttgaagcccacgcctcccttctgggggcgcgcccccctgggcacacgcccatctcagcaaaagacggagtgtagattaatcaactttcctgagacacctatttttggcaactcatttaaatatgacattgaagtgtcgaataaatcaccggatgaagaagtcaaactacgacgtcatcatttagccagatgtatgaagaattttaagacggatatctatttcgtttccacgtttgaaccgtcaacaaaatcggtcgatttgctcacggttgaaacttttgctggtacggtatgtgaatatgctgacatgccaaaagagtggacaacgacccgaggactttatgatcctacccacctaataagcgcgtcatgtcataaagttgagggcttattttcatttgaggaccgcaccgtggcgacattaatccggctttttattcatcctgttaaatcgatgcgcggcattggtcttacacatgctctggcagatgtcagtggtctggccttcgatcgcatctttatgatcacggaacctgacggtgcggatatagcggttaagaccttcaccggcatccggctcaaagttccatgcccgccagaccatccggccttcagtatcacgaaccaccagacggaagtgactgccctggtcgtcttcgagtgtgatattgctgtacgtggtagtgaccgcttgcgcttgtctccgggccccggtggcagcaacacggattgggtcattttcgggctcctgataaaagaaaaccccggcagcctgctagctgtcggggtgaatttgctggggaagatactactatcagtcgttgctgcagtctccgagagtggacagaactttctcagcgttcttccggtccgcagtgaaggtccctgctttgtggtcattgacgtagacgtcgaactgcccggcctcagagatattgctgatgaagtcaaaacaggcgttatcgccgttacgccagctgtaatcccagcactttgggaggctgaggtggacgttaatatcgccgccttccgctcacaaaaggcctatatctccggtcaggtgaataaatccggtcaacaggcgatcaccaacgtgccactgactattctcgaggccatcaaaagcttccatgcctgcagtctgagtgttttcatggaatttaccaccggattgatgtcgctcgacaccgcgcttaatgagatgctttctcgcgtcaccccactgaccgcccaggaaacgctgccactggtacagtgttttggtcgtattctggcgagcgatgtcgtttcgccgcttgatgttccggggtttgataactccgcaatggacggctacgcggtgcgtttagccgatattgcctccgggcaaccgctgcccgttgccggtaaatcctttgccggtcagccataccatggtgaatggcctgcgggtacctgcattcgtattatgaccggtgcgccggtgccggaaggctgcgaagcggtggtgatgcaggagcagactgaacaaatggacaatggcgtgcgttttactgctgaagtgcgtacgggcaaaatattcgccgtcgcggtgaagatatctctgcaggtccgtggtgatatggatgacggatggctggcgctgtatgaatcccgcctgaagggaaagctgcacgtaatcagcaagcgatatacgcagcgaattgagcggcataacctgaatctgaggcagcacctggcacggctgggacggaagtcgctgtcgttctcaaaatcggtggagctgcatgacaaacagcaaggtcttgatgcggcgctgattgatgcgccgttagcagtcgatgcacaaacgcctcttagcgagttgctctctcatgtcggacaggcaccctgtgcggtgcccgtggtcgacgaggaccaacagtatgtcggcatcatttcgaaaggaatgctgctgcgcgctttagatcgtgaggggaatcgttttaagaagtttcgcactcgcttcatcgtccattacggcatagcggggagagaattccaggcactgttctaccatgcgagtgacatttttgcctgccaccagcgcaactacgcggaagtgttcgggattatggcgcaccacgtccagcgtgctgcaaccaatcgagccggtcgagcccagaatgtgctttcactttgtcgttcgcgtcacgacgcacgttacgtactgcaacacgcgcttgttctgcttcaccacgaacgattttggtcagatctttacgacgttcttccgtcagcggcggcaggacacacggatgtcgctacccgagagttcgggttcaggccaagatcggacgccataatcgctttttcaacggccggagacattgaacgatcaaacacgttgattttcagtgtacgggaatcttctaccgttacgcttgcagctgacgcgcggctcggcttggccgtaataattcacgacaatgccatccagcaggctgggagaagcacaacccgtgtcatttttgccgatttggggttttggcggctaatcatacatgcctacaggctggatctgcagagagaatttaagggccaacaacagcatatgacctcctgtaatcagcaggcgacggcgcaggcgttgaaaggggatgctcgtaagacctacatgagtgattgcctgaagaacagcaagtctgcgcctggcgaaaaaagtttgacgccacagcagcaaaagatgcgcgaatgcaataatcaagcaacacaacaatctctgaaagacgataataccggcgatcaccgcaccgaggatcccggtatcgatcgactggatcccaagaatgctctggatgttattggctttcagaaccgcggcatccgtggttggcagaatgcctttattggtcaaccagaagtttaccgcgaggttcattaccgcataaccgatgaagccagcgaatgccgctacgcctttattttcgcgtgccaggcccagcgggatggcgatacagaacattcatgttataccgataaaaacatcatcaacattccaaatctgatcgaacagtacggtgtggcgcgcgccatcattgaaacctgggccgctctgccactcagcaccgccaccatgtggggcttcttcatcctctgctttattgccaccgttacgctggttaacgcctgctcttataccctggcgatgtccacttgccgcgaagtacgcgatggtgaagaaccacctctgctggtgcgtatcggttggtcaattctggttggcattatcggtattgttctgctggcgctcggcggcctgaaaccgattcaaaccgccattatcgccggaggatgcccgctgttcttcgtcaacattatggtgacgctctcctttattaaagacgcgaaacagaactggaaagattaa

SEQ ID NO: 30052 - DNA, 2686 bp, Homo sapiens
  SIMILAR (959)..(1417): 991254mologous to Escherichia coli alternate gene name yibK,accession number U00039,Smith-Waterman Score=808.
atgcagatcccccgtagcccacggcagattgtgatgctccagcgcaaagccagcaaaccaggacaggggttaggcaaaaccaccggctggatccatcgcaccaccctgctctcgcggggtgtgaaaatgatcccaggcgtaagttatcagaagattgacgatgacgggctgcatgtggtgatcaacggcgaaacgcaggtattagcagtggacaatgtggtgatctgcgcagggcaagagccaaaccgcgcgctggcgcaaccgctgattgatagcgggaaaacggtgcatttaattggcggctgcgatgtggctatggagctggacgcacgacgggcaattgcccagggaacacggctggcggacctgcaggcagcaagtcaaggcacttgcattgatgaccaggatatcactatcgatacttatgaattcactactgactatctggagaatcccacctgtggtgaaaaagtagtggaagagacgcttgtcagccacctgctgaaatcaaactgcctgatcacccatcaaccagattggggttcgctccaaattcagtatcgtggacgccaaattgacagagaaaaactgctgcgttacctggtctcattccgtcatcacaacgagttccacgaacagtgcgtggaacgcatcctttaaatgacctgttacgcttctgccagcccagaaaaattgagcgtttacgcacgttattacccgtcgtggcggtcttggacaattaacccgtggcgcagtaatagggttttttttcccatcgaccacaagactgctggaagtggatatgcttaaacgcaccgccagcagcgacctctatcaactgtttcgcaactgttcacttgccgtactgaactccggtagtttgaccgataacagcaaagaattgctgtctcgttttgaaaatttcgatattaacgtcttgcgccgtggggggggcagtatgctaaacatcgtactttacgacccagaaattccgccaaatactggcaacatcatccgtctttgcgctaataccggctttcgtctgcatatcatcgaaccgatgggatttgcctgggacgataagcgcttgcgccgcgcggggctggactatcacgagtttaccgccgttacgcgtcatcatgactatcgcgcgttcctcgaagcagaaaatccccagcgcctgttcgccctcaccacgaaaggtacacctgctcacagcgccgtaagctatcaggatggcgattatctgatgttcggcccggaaacacgcggcctgccagcgagcattcttgatgccctgcccgctgaacaaaaaattcgcattccgatggtgccggacagccgcagcatgaatctgtccaatgcggtgtcggtagtggtgtatgaagcctggcggcagttggggtatccgggagcggataccggggcgtatcacatcattccgtggtcttcgataaccacctttgctaactttgtccgcggcattgtttcggtggtggcaaattatgatgttgatcgccatgaagatgctgataaagccaatcaggcactgaaagatgcggtagcggaattaatggaaaacgaagaaattcgcgggctgattattggtgaaccgaattttgccgggattgtcggcttaagcaataccgcgtttacactgcgtgtttcgttcaccacgctgccactcaaacagtggacgagcgacctgcaggcacattgccttggccgcaaatccaaaagaatatcccactcgaagacgaccagggcagtcacttccgtctggtggttcgtgatactgaaggccggatggtctggcgggcatggaactttgagccggatgccggtgaaggtcttaaccgctatatccgcacctcaggcatccgtacagacacggccacccgctgatcgcgaagcatttacccgcattcacctccccgaacacactttatatccccatacgccagccatcgccgctggcgtttttattgacggagacatacccatgacaacacagacgcagcacgacctcgcacccgctaaccaacccgaatttgaactgaccgtcacgccggtccccgatgaacagcgtatcgatttctggccacagtactttggcgctatcccgcagtggctactcctggagccgcatatcttcgcctggatggaccgcttctgtgagggctacagcggtggtatctggtcgttctacaccctcagcaatggcggcgcatttatgtcccccgagcctgacatcgatgagacagccgttgcgtgcctgcgggtcggcagcggtggtgttggcggcagccggcagcaggtcagagacgccagtttgttgtgctgcggtggcttgcacgcggcgaacggggcgttaggtggggtgtccgacccggtcgggaatacccccagccggccgaggagcggcgaggagaaggtgagtgcgtggccggtgtgcgccagtgccggcgccagtgttggtggcggtccggggtggttcggggtgaaggcgggtgcaggcaccgtgccggtggggtgggtgggcggagcaggttctttcagcgtgctgccgaagtggctgatagcgtcagacggtttcgtcttcggccaggcagtcgagggcagtgcagcaaacggaatggcggtgccggtggaggaggaccagtcggacttaaacacggcggcatag

SEQ ID NO: 30053 - DNA, 2007 bp, Homo sapiens
  SIMILAR (1318)..(1803): 981254mologous to Escherichia coli No definition line found,accession number U00039,Smith-Waterman Score=784.
atgaaacagataacctttgctccccgtaatcacctgctcaccaataccaatacctggacgcccgacagccagtggctggtatttgacatgcgtacttctggcgcgtcgtttaccggcgagaccattgagcgtgtgaatataccaaccggttatgtcgagaagccaaataaacagtgtagacactccgtcactcgctacggccacggcggccactcggatcacactccgtcactcactgtggccacagtggccactcagatcacaccccgtcactcgggccacggcagccactgtgatcgcaacctgtcacttgctacagccacagcagccactctgatcacaccccatcacttgctatggccacgatggccccttggatcacactctgtcacttggtgtggccacggtggccactcggatcacactccatcacccactacggccacagcagtcactcggatcacatcccgtcacccactacggccacagcagtcactcggatcacatcccgtcactcactacagccatggcagccactctgattgcattcccgtcactcgctatgcccacggcggccactcagatcacactccatcacttgctatggccacggcagccactcagatggcactctgtcactcactatggccacggcagccacttggatacttggtcaataaaataagaagaaagcgttgtacggatggggtatcgccaagcggtaaggcaccggtttttgataccggcattccctggttcgaatccaggtaccccagccatcttcttcgagtaagcggttcaccgcccggttattggggtatcgccaagcgccaccaaattctgaatgtatcgaatatgttcggcaaattcaaaaccaatttgttggggtatcgccaagcggtaaggcaccggattctgattccggcattccgaggttcgaatcctcgtaccccagccaatttattcaagacgcttaccttgatttcaaatatgcgtgcattagagaatgattttttcaattctcccccaagaaaaactgttcagtttggtggaactgtgacagaagtcttgctgaagtacaaaacggcgattgaaaaacggctggaaaaactggcggttgatccacatcgcgaccgtgcgcagatgctgaaagtcgaaaacgtccagcaggcgtggcagcaatggatcaacaaactgccgcccgcacgtcgtgaggatgaagacgtgaaagagatccgttggatgatagaagagttgcgcgttagttacttcgctcaacaacttggcaagaactctcgggcagaatccatgctgtggtccttccataaagcggctatagaagcggcacgcaccaatatcattcaggcgcaaacccgcgtcgaagcggcacaagccactgaacggcgcattgccgcagatatcgatgacagcgaactgaaagccccgcgtgacggacgcgtgcagtatcgggttgccaagccaggcgaagtgctggcggcaggcggtcgggtgctgaatatggtcgatctcagcgacgtctatatgactttcttcctgccaaccgaacaggcgggcacgctgaaactgggcggtgaagcccggctgatcctcgatgccgcgccagatctgcgtattcctgcaaccatcagttttgtcgccagtgtcgcccagttcacgccaaaaaccgtcgaaaccagcgatgaacggctgaaactgatgttccgcgtcaaagcgcgtatcccaccggaattactccagcagcatctggaatatgtcaaaaccggtttgccgggcgtagcgtggtcattcctgtattccatcaaccagacaatctgcttgcggttggatagcattgaagccaaattgcaagccctggaggctacttgtaaatccttagaagaaaagctggatctggtcacgaacaagcagcacagccccatccaggttcccatggttgccggctcccctctcaggacaacccagatgtgcaacaaagtgcgatggtaa

SEQ ID NO: 30054 - DNA, 811 bp, Homo sapiens; identical to SEQ ID NO: 10333
  SIMILAR (1)..(483): 1001254mologous to Escherichia coli Ornithine decarboxylase (EC 4.1.1.17),accession number D90708,Smith-Waterman Score=841.

SEQ ID NO: 30055 - DNA, 7521 bp, Homo sapiens; identical to SEQ ID NO: 7182
  SIMILAR (5005)..(6045): 981254mologous to Escherichia coli Anaerobic dimethyl sulfoxide reductase chain A precursor (EC 1.-.-.-) (DMSO reductase),accession number D90801,Smith-Waterman Score=1827.

SEQ ID NO: 30056 - DNA, 1023 bp, Homo sapiens
  SIMILAR (187)..(822): 921254mologous to Escherichia coli similar to fructose- specific phosphotransferase enzyme II,accession number L19201,Smith -Waterman Score=1045.
  misc_feature (1)...(1023): n = a,t,c or g
gcgagcatcgtcgtgaacacaaggaaccggctgctcaagcgtaacttcaagagtacgatcatccgtcgctttgacacccagcgatgtaacatctgctttacccgcaacaatagctgcggcattgttaatgtgcgcctgtactggtactttggcttcaaatggttcgtttcgctgcgtgtatgccccttcggtttgccgtataccgatatgtcgaaaggcgcgccgtcgtttacctgggtagttgaatccatcggttaccttggcttcacctttatgatccccatcatgggcgcttatattgcctcgtcgattgccgataaaccggctttcgctccggcgtttctgtcgggtgcgggattcctcggcgcggtggtgctggggctggcgattggctatttcgtcttctggttccgcaaagtgcgccttggcaaagcattacaaccgctgctcggttcaatgctgatcccgttcgttactctgctggttttcggcgtgctcacttactacgttatcgggccggtgatgtccgacctcatgggcgggctgctccacttcctgaataccattcctccatcaatgaagtttgcggcagcgtttctggtcggtgcgatgctggcgttcgatatgggcggccccatcaataaaaccgcctggttcttctgcttctcactgctggaaaaacacatttatgactggtacgccatcgtcggcgttgtcgcgctgatgccgcccgtcgcggcgggtcttgcgacgttcattgcgcccaaactgtttacccgacaggaaaaagaggctgccagtagtgccattgtggnntncgcggatcaaggcgttaagggcgcggactttatctataccgacgtgtgggtgtcgatgggcgaggccaaagagaagtgggcagagcggattgcgctgctgcgcgggtatcaggtgaacgcgcagatgatggcgctgaccgacaacccgaacgtgaagttcctgcactgtctgccggcgttccatgacgaccagactaccgcgtga

SEQ ID NO: 30057 - DNA, 576 bp, Homo sapiens
  SIMILAR (1)..(393): 961254mologous to Escherichia coli similar to fructose- specific phosphotransferase enzyme II,accession number L19201,Smith -Waterman Score=612.
gctcacacctacatggtggcggaagccttggaacagaaagcccgttctctcggtcataccataaaagtggaaactcaagggtcccgtggcgttgaaaaccgcttatccagcgaagagattgccgctgccgattacgtcattctcgctaccgggcgtggcctgagccccgatgatcgcgcgcggtttgccgggaagaaagtttatgagattgccatctcgcaggcgttgaaaaatatcgcccagattttcagcgaattaccgacaaactcgcagctttttgccgcagatagcggcgtgaagcttggcaaacaggaagtgcaaagcgctagcgtgatgagccacctgatggcgggcgtctctgcggcgctgccgtttgtcatcggcggtggtatccctggtggcgcttgccaacatgctggtgcagttcggtttgccgtataccgatatgtcgaaaggcgcgccgtcccttacctgggtagttgaatccatcggtaaccttggcttcacctttatgatccccatcatgggcgcttatattgcctcgtcgaatgccgataaaccggctttcgctccggc

SEQ ID NO: 30058 - DNA, 2307 bp, Homo sapiens
  SIMILAR (667)..(1239): 991254mologous to Escherichia coli f416,accession number L10328,Smith-Waterman Score=1045.
atggtcgggctggatgctggcgtggctaaactcgccacgctgtcagatggcacagtctttgagcctgtaaacagttttcagaaaaaccagaagaagctggcgagacttcagcgacagttaagccgcaaggtcaaattcagcaacaactggcaaaagcagaaacgcaaaatacagcgactgcattcctgtatcgcaaatatccgcagggactaccttcacaaagtcacaacggccgtcagcaaaaaccacgcaatgatagtcattgaggatttgaaggtcagcaacatgtcaaagtcagcagcgggtacggtcagccagccggggcgcaatgtccgggcaaaatcaggtttaaaccgttcgatactggatcaggcctggtgcttgttcccacgcgtcagcatgaatccgcaagaagccaactacgcctatttacgcggtgaagtggaactggttcgtctgccggatgcagaaggccgtatcgctgccgaagagaacctgccaggccaaacaccagcagcaccaccgggagcagcattacaacgcttccgtcgcccctgccgttacggtgatatcgctatcggcatctggttgatagccatacaaacgttccgttttctgagcaactggaccgatggcaaagactattgtctgaaagtgaagtcctgtgaagaccgcgccatgaaacagataacctttgctccccgtaatcacctgctcaccaataccaatacctggacgcccgacagccagtggctggtatttgacgtgcgtccttctggcgcgtcgtttaccggcgagaccattgagcgtgtgaatatccataccggcgaggtcgaggttatctatcgcgcgtcacagggcgcacacgtcggcgtggtgaccgttcatccgaagtcagagaaatatgttttcatccacggcccggaaaatcctgatgaaacatggcattacgacttccatcatcggcgcggagtgattgttgaaggcggcaagatgagtaaccttgatgcgatggatattaccgcgccgtatacgccaggagtgctgcgcggcggcagccatgtgcatgtctttagcccgaacggtgaaagggtgagctttacctataacgaccatgtaatgcatgaactcgatccggcgctggatttgcgaaacgtcggtgttgctgcgccgtttggcccggtcaacgtacaaaagcagcatccgcgtgaatacagcggtagccactggtgcgtgctgggaaccgggggatatcgcccgagcgtgagcggagaaagcccaccctccagacgaccaagaacggaaaccacggcggaggagacaaagaactctagtcaagatacgctgctgcgcgtttgccaccgctttgcgcatgatcggatcttcaatttgctgacggatgcgtgtcttaaaatctgtattactgatagcggcgtgaagcttggcaaacaggaagtgcaaagcggtagcgtgatgagccacctgatggcgggcgtctctgcggcgctgccgtttgtcatcggcggtggtatcctggtggcgcttgccaacatgctggtgcagttcggtttgccgtataccgatatgtcgaaaggcgcgccgtcgtttacctgggtagttgaaatcccatcgggtttacctttgggcttcacctttatgatccccatcatgggcgcttatattgcctcgtcgattgccgataaaccggctttcgctccggcgtttctggtttgctatctggcgaacgacaaagcgctgctcggcacccagtcgggtgcgggattcctcggcgcggtggtgctggggctggcgattggctatttcgtcttctggttccgcaaagtgcgccttggcaaagcattacaaccgctgctcggttcaatgctgatcccgttcgttactctgctggttttcggcgtgctcacttactacgttatcgggccggtgatgtccgacctcatgggcgggctgctccacttcctgaataccattcctccatcaatgaagtttgcggcagcgtttctggtcggtgcgatgctggcgttcgagatgggcggccccctcaaatagagccgggtggctcttctggttatgctggtggcgccggcgcatgtaggagtggtcgccgttcgccagcggacgtgcggcgttgctccaggcccagaggggactttgggcgctgtcacgcccgttgccgcccgcgctggtgagggggcgctcgggcgagccgcggctgcgtcatacgtgtgcggggacaggcgcgtcgtgcgccagtggtggccctgctgagcgcccggggcggccgcc

SEQ ID NO: 30059 - DNA, 2787 bp, Homo sapiens; identical to SEQ ID NO: 29917
  SIMILAR (2711)..(2785): 921254mologous to Salmonella typhimurium putative isomerase,accession number AF220438,Smith-Waterman Score=124.

SEQ ID NO: 30060 - DNA, 2221 bp, Homo sapiens
  SIMILAR (1430)..(1987): 981254mologous to Escherichia coli K12 putative aldose-1- epimerase (EC 5.1.3.3),accession number AE000463,Smith-Waterman Score=971.
  misc_feature (1)...(2221): n = a,t,c or g
catggcggctgtagaggatcaagactggtccgcgaacgtgggtgttaaatatacctggtaatattcttcactccgaggagatactggtaatttaatctaaataatgcccgtcaaggatttgacgggcattactgcaaaggacgcgcaaatgttatctgtagttaaacctcttcaggaatttggtaagctcgataaatgtttgtccagatacggtacgcgcttcgagtttaataatgaaaagcaagttatattttccagtgatgtcaataacgaagatactttcgttattttagagggagttatctctctgcgtagagaagaaaacgtacttatcggtattacccaggctccttatattatggggctggctgatggtttaatgaaaaacgatataccatacaaattaatatcagaaggaaattggtcgggatatcatctaccagccaaacaaaccattacgcttattgaacaaaatcaactctggcgagacgctttttactggttagcctggcaaaatagaattctggaattacgcgacgtgcagctcattgtgcataattcctacgaacaaatccgcgcaacattattatcaatgattgactggaatgaagaattgcgatcacgtattagggcgatggattatatccatcaacgtacacgcatatggcgctctgttgtcgcagaagttctcgctgctttgcgtaaaggcggctatatcgcaatgaataaaggcaaactgctcggtcaccaggtcattgatgccatcgctcatatttttaaagcgcgtcaacggcgaacgagtgaccaccacaaacgcgccaatattcttctgcgggatcatcgccatataggcatgaaaaaatcccgcgtggaagctttcttgattgttaaggacgtcactcacgacaaaaaatggctggatcgcgcgattcgcagtggcttccagtgattatccacgacgtcgccagaaataatcattatcgcgttaacgaacacttcgatacccagtggaatccgctgccggattacaacaaagataacccggcgcatcgcttccgcgcgttcggaggtacaccaggccactggatcgaatggggccgtttaatgctgcacatccatgctgccctggaagcccgttgcgaacaaccaccagcatggctgctagaagatgccaaaggtctgtttaacgccaccgtgcgcgatgcctgggcacccgatggcgcggacgggattgtttataccgttgactgggaaggaaaaccggtggtccgcgaacgtgtacgttggcctatcgtcgaagcaatgggtacggcctacgcgctctacaccgtcactggcgatcgccagtatgaaacctggtatcaaacatggggcgaggggaccgtccggtgcagtttttgggtttgacatcagcctcacgggaggctgtatgtcgttaattaaggtgccttgtatgcaaatcaccaatatgcattgcagtggacagaccgtttcacttgccgcgggggattatcacgcgaccattgtgaccgtcggtgctggtctggctgaattaacctttcagggttgtcatttagtcatcccgcacaaacccgaagagatgccgctggcgcatctgggtaaagtgcttattccgtggccgaaccggatcgccaacggctgttaccgctatcaggggcaggaatatcagttacccattaatgaacatagttcaaaagccgctattcacgggctgcttgcctggcgagactggcaaattagtgaattaaccgccaccagcgttaccctgacagcttttctgccgcccagttacggctatccgtttatgctggcttcacaagttgtttattcgctcaacgcacacacgggtctttccgttgagatcgcaagccagaatatcggcactgtcgcagcgccttatggcgtgggtattcatccttatttaacctgcaacttaacatctgttgatgaattacttgatgaactatntatcggagcgcgcatgggattgcttatctggacttctctactcgatgacgagctgaaggcgctgcccgctttcgaatctaccgcggctggcgatggcgggaatcactgctttccagattgtctcaggcaccatcgcagggatggcagagaccgccgacacgctaagaaaccaagggcatcacagcttgccagcttggccggcatagaagagcctaaactagcacaccgataa

SEQ ID NO: 30061 - DNA, 1920 bp, Homo sapiens
  SIMILAR (508)..(1116): 1001254mologous to Escherichia coli cpxA product,accession number M36795,Smith-Waterman Score=1010.
atgaatgactgtccacgacactatacccaaaagaaagcggcttatcggtcagttttacctgatgtacgtgagtggggacacaatccgctaccgtggatggacgaagacgaactgcgttatcgcgaggaagtcccttgttattgcggtaaacaaggttgtattgaaacctttatttcgggcacgggattcgcgatggattatcgtcgtttgagcggacatgcgctgaaaggcagtgaaattatccgcctggttgaagaaagcgatccggtagcggaactggcattgcgtcgctacgagctgcggctggcaaaatcgctggcacatgtcgtgaatattctcgatccggatgtgattgtcctggggggcgggatgagcaatgtagaccgtttatatcaaacggttgggcagttgattaaacaatttgtcttcggcggcgaatgtgaaacgccgcaaccccttgtatctggctttcacgaagccgaactgtcgcttgatgatgcgaaatgcgtgatcggcgctgaacgcagcgaaatgcagatcattcgtaactttattggtcaggccgataacgccgatcatccgcagaagaaaaagtatggccgcgtggaactggtcggtccgttctccgtgcgtgatggcgaagataattaccaactttatctgattcgtccggccagcagttctcaatccgatttcattaacttactgtttgaccgcccgctattactgctgattgtcaccatgttggtcagtacgccgctgctgttgtggttggcctggagtctggcaaaaccggcgcgtaagctgaaaaacgctgccgatgaagttgcccagggaaacttacgccagcacccggaactggaagcggggccacaggaattccttgccgcaggtgccagttttaaccagatggtcaccgcgctggagcgcatgatgacctctcagcagcgtctgctttctgatatctctcacgagctgcgcaccccgctgacgcgtctgcaactgggtacggcgttactgcgccgtcgtagcggtgaaagcaaggaactggagcgtattgaaaccgaagcgcaacgtctggacagcatgatcaacgatctgttggtgatgtcacgagcgtccgctggaagagtaagagctgcacggtatgaccgaagaagtttacctcgacgaaatggtcgtattaacgccaatatgatccttccgtacccgccgggagttcctctggtaatgccgggtgaaatgatcaccgaagaaagccgtccggttctggagttcctgcagatgctgtgtgaaatcggcgctcactatccgggctttgaaaccgatattcacggtgcataccgtcaggctgatggccgctataccgttaagcttggttttgatgataaccatgccatcagcctgttcagcgcatatgcttctctggtttacgttacccctattctcggcggctggcttgccgaccgcctgctcggcaaccgcactgcagtgattgccggcgcgctgttaatgacccttggccatgtggtgctggcgacggaagctgtgtccggtcatcacagtcatatcctgaagatggcagttaccgccctcttcacataccggacagtcgtgcgggtggttggtcatcaaccactcgaccacgctttcacggaactgtttcgcttcttcgtcgtcaatggaaataaaggtgccatcggaagccggtgtcatacaggacatcaccaggcgaccacgcgtgtcttccgcgttttggtattgcttcaccgcacactggcggcaagcaccgacacttcccagcgccggatgccagcaaaacaggttcggctgaatcccattaatcaaatgggtattgctgaacggctgtttgattcccgcctcaaattcttcgcggaaatatttgatggcgctctgtaa

SEQ ID NO: 30062 - DNA, 792 bp, Homo sapiens
  SIMILAR (220)..(537): 991254mologous to Escherichia coli glutamate synthase large subunit (EC 2.6.1.53),accession number M18747,Smith-Waterman Score= 549.
atggctgttgctgccaaaacgaaaaacgccggaaaatggcataaccacataatccggcgtttcgacattaatcctggcgatcgtctttatgatcaaggcggtcgcgctcatcatcctttcgctggtactcaccatcaaaagtattaccgccaccgaattttattcatccgttgccgatttgtgctgatgaaagttgtcatactcgtagcatgtctgaacagggtcgatggcggcctgaaaacgggtgtcgatatcatcaaggcggcgattctcggcgcagaaagcttcggcttcggcactggcccgatggtggcgctcggctgtaaatatctacgtatttgccatctgaacaactgcgcaacgggtgtagcaactcaggatgacaaactgcgtaagaaccactatcacggcctgccattcaaggtgacgaattactttgagtttatcgcccgtgaaacccgcgagctgatggcacagcttggcgtaacacgtctggtggatctgattggtcgcaccgacctgctgaaagagctggacgcagaagctggcgctgtcgaagctaacctgagcaatcagatcaacgacatcatcaccaatgctgctgacagcattgacgccggaaacggtatctacctgctcggtttcaccaaccacatgtacctgatagctatgacgggcattcagggcatcaagtaccacctgattgacatcggcaaacgtcagttggatacccgcgtctgccagcagtttaccgataaagccacgaccgatattacctgcgccaaaatgtaa

SEQ ID NO: 30063 - DNA, 4348 bp, Homo sapiens
  SIMILAR (2749)..(3855): 971254mologous to Escherichia coli was o492p and o826p before splice,accession number U28375,Smith-Waterman Score=1875.
atgccatccagcgcattgagcgccatacggataaaaagcacgatgggcaatagcaaaaagaggatgggttgtgccgccaacatcaacagcaatccgccgtggttagggtttgaagtggtgggcgtttaccacgacccgaaaccgggcggcgtttctaacgactgggcgggtaacctgcaacagctggtcgaggacgcgaaagcgggcaagattcataacgtctatatcgcgatgcaaatgtgcgacggcgcgcgagtgaaaaaactggtccatcaactggcggacaccacctgttcggtgctgctgatccccgacgtctttaccttcaacattctccattcacgcctcgaagagatgaacggcgtaccggtggtgccgctttacgacacgccgctttccggggttaaccgcctgctcaaacgtgcggaagacattgtgctggcgacgcttattctgctgctgatctccccggtgctgtgctgtattgcgctggcggtgaaactcagttcaccagggccggttattttccgccagactcgctacggcatggatggcaagccgatcaaagtgtggaagttccgttccatgaaagtgatggagaacgacaaagtggtgacccaggcgacgcagaacgatccgcgcgtcaccaaagtggggaactttctgcgccgtacctcgctggatgaattgccgcagtttatcaatgtgctgaccggggggatgtcgattgtttgtatccccctgccacgcccgcgccgagaatacgcgccagcacgagcgttgaaagtagccaaacagcagcgttctcaccgcactattgaccagataaccgaggatcgcggtcatcgccagcggccagaaatgggcgctaaccaccgtacaagtgaagcccgccagcaccgcgctggtttcgatcatgccgattttgttgaactccagctctttttgcatcaacgcgcggaactgttgcccgtccgggttattcagcacgtcgccgatgagatcactcaacaaaaacaccgccacgcacaccacgatccccagcccgacgttcagccagtacaacgtggtgagttcaaggtgactgatttcttttcgctgaataatcgagttagcgataccgaagtcagaaagcgtatctgccagcgcgataatcaccagcgacacggaataaccagtttgacactgtcatcgcaacattatctggtgatcactgcgttgggtgccgatcgccctggaattgtgaacaccatcacccgtcatgtcagtagttgcggctgtaatattgaagacagtcgcctggcgatgctgggagaagagttcacgtttattatgctgctttccggttcatggaatgccattactctgattgaatcaacgttaccgttgaaaggtgccgaactggatcttttaatcgtgatgaagcgcacgacggcgcgtccgcgtccgccaatgccagcatctgtctgggttcaggtcgatgtggcagactccccgcatttaattgaacgcttcacagcacttttcgacgcgcatcatatgaacattgcggagctggtgtcgcgcacgcaagctgctgaaaatgaacgggctgcgcagttgcatattcagataaccgcccagagccccggatctgcggacgcagcaaatattgagcaagcgttcaaaggcctatgtacagaactcagtgcacaagggctccgtatctcaaatcgtacattcaaacactggaacgctcagacactgtccgacactcagcgcatcggctttgcagcggccttgccgcgtcggcacggcggggcttatactacgtcgtactacctccgagacaagtgccgggcttatatcaacggagctataatactcgatcgaagcacaattccatgcgcggggactgacccgctttttcgtgcgtgggagctggggcttgttgaaacccagcaggcgctggttgctaacggcttgcgtcacaagatccgtttgcaggtcgatggcggcctgaaaacgggtgtcgatatcatcaaggcggcgattctcggcgcagaaagcttcggcttcggcactggcccgatggtggcgctcggctgtaaatatctacgtatttgccatctgaacaactgcgcaacgggtgtagcaactcaggatgacaaactgcgtaagaaccactatcacggcctgccattcaaggtgacgaattactttgagtttatcgcccgtgaaacccgcgagctgatggcacagcttggcgtaacacgtctggtggatctgattggtcgcaccgacctgctgaaagagctggacggtttcaccgccaaacagcagaagctggcgctgtcgaagctgctggagactgccgaaccgcatccaggtaaggcactctactgcaccgaaaacaacccgccgtttgataacggcctgctgaacgcgcagttgctgcaacaggcgaaaccgtttgtcgatgagcgccagagcaaaaccttctggttcgatattcgcaacaccgaccgttctgtcggcgcgtcgctttcaggctatatcgcccagacgcacggcgatcaggggctggcagccgatcctatcaaagcgtacttcaacggcaccgcaggccagagcttcggcgtgtggaacgcgggcggcgtggaactgtacctgaccggtgatgccaacgactatgtcggtaaaggcatggcgggcggcttaatcgccattcgtcctccggttggttccgccttccgcagccatgaagcaagcattatcggcaacacctgcctgtatgggcggaccgggtgccaatacaactgtacccgcctggattacgacagtgcgctgaatatccgcgaactgaaaaaagtcgcgctggaaaaaggttgggatgaatataagcaacgctggcacaaaccagccggttctggttcacgccatccggttgccgtgattggtgcaggtccggcgggtctggcagcaggttacttccttgccagagcgggccatccggttacgctgtttgaacgcgaagccaatgcgggcggcgtggtgaaaaatatcgttcctcagttccgtattcctgcagagttaattcagcacgatatcgattttgttgccgctcacggcgtgaaatttgagtatggctgctcacccgatttaaccattgagcagttaaaaaatcagggcttccactatgttctgattgccaccggcactgataaaaatagcggtgtgaaactggcgggcgacaaccaaaatgtctggaaatcactccccttcctgcgtgaatacaacaagggtacagcgctcaagctgggcaaacatgtggtcgttgtcggggcgggtaacaccgcaatggactgcgctcgtgcggcgttacgcgttccaggcgtagaaaaagcaacgatcgtttaccgtcgttcactacaagagatgcccgcatggcgcgaagagtatgaagaagcgttgcacgacggcgtagagttccgtttcctgaataatccggaacgtttcgatgctgatggcaccttaaccttgcgcgttatgtcgcttggcgaaccggatgagaaaggtcgtcgtcgtccggttgaaaccaatgaaacagtaacactgcttgtagacagcctgatcaccgccattggtgaacagcaggatactgaagccctgaatgcgatgggcgtgccgctggacaaaaacggctggccagacgtcgaccataatggcgaaactcgtctgactgacgtctttatgatcggcgacgtacagcgcggaccatcctccattgtcgctgctgtcggaaccgcgcgtcgggcgaccgatgccatccttagtcgggaaaatatccgttcccaccagaacgataaatactggacaacgtctatccagcgaaaggtccgagcctatgatagtggtgatggtaaagtacagacgctgggcgcggtagagcatagcccgttgtatacctcggtagatccgctgcaaagcatgagccgtgaagagaagctggatatcctgcgtcgcgtcgataaggttgcccgcgaagcggacaagcgcgtacaggaagtgactgccagcctcagtggtgtctatgaattaattttggttgcggccaccgacggcacgctagcggcggatgtccgtccgctggtgcgtctttccgtgagcgttctcgtcgaagaagatggcaaacgcgaacgcggtgccagtggcggcggcggtcgttttggttatgaattcttccttgccgatctcgacggcgaagtccgtgcggatgcatgggcaaaagaagcagtgcgtatggcgctggtcaatctttctgccgttgctgcaccagcgggcaccatgccggtagtacttggcgcag

SEQ ID NO: 30064 - DNA, 2247 bp, Homo sapiens
  SIMILAR (1165)..(2244): 1001254mologous to Escherichia coli K12 membrane-bound lytic murein transglycosylase C,accession number AE000379,Smith-Waterman Score=1858.
atggaaaagcctttgtggtaccagcgcctctcaactaaggaagtacttggaagcgttgggtggctcttgctgtgtaaaccttatacaattgatacttttccttctcacattagtgagacaagatggatgtatccatcttttagcaactggcatatgcagcaggtcggtgcgaccaatcagatccaccagacgtgttacgccaagctgtgccatcagctcgcgggtttcacgggcgataaactcaaagtaattcgtcaccttgaatggcaggccgtgatagtggttcttacgcagtttgtcatcctgagttgggaccccttattgaacggaaaaggcgtgcccaaccggcgtttcccacggaaaaggggcaggaaaaagggacaggcacccagggtatcaccgggttacagacgtcccaagggcgtacgggacaccagtgaggcagcgcccatcgaacgctgggcgctttatccgggcaaaaaaccgaaacagacgctgccggagcgcaccggctactttttgctattacagcacgaagatgaagtattgctggcgcagcgtccgccgagcggattgtggggcggtttatactgtttcccgcagtttgccgacgaagaaagtttgcggcagtggctggcgcaacggcagattgctgccgataacctgacgcaactgaccgcgtttcggcataccttcagccatttccacttagatattgtgcctatgtggcttcccgtgtcgtcattcaccggctgcatggatgaaggcaatgcgctctggtataacttagcgcaaccgccgtcagttggcctagcggctcccgtggagcgtttgttacagcagttacgcactggcgcgccggtttagcgcaaggtcaggattttcagctgtaccccggcgagctgggaaaacgcatctataacgagatctccaaagaagcctgggcgcagtggcagcacaagcaaaccatgctgattaatgaaaagaaactcaacatgatgaatgccgagcaccgcaagctgcttgagcaggagatggtcaacttcctgttcgagggtaaagaggtgcatatcgagggctatacgccggaagataaaaaataaaaacagtgccggagcacgcctccggcaacttgcataaaaacaaacacaacacgcacccggaatgatgaaaaaatatctcgcgctggctttgattgcgccgttgctcatctcctgttcgacgaccaaaaaaggcgatacctataacgaagcctgggtcaaagataccaacggttttgatattctgatggggcaatttgcccacaatattgagaacatctggggcttcaaagaggtggtgatcgctggtcctaaggactacgtgaaatacaccgatcaatatcagacccgcagccacatcaacttcgatgacggtacgattactatcgaaaccatcgccgggacagaacctgccgcgcatttgcgccgggcaattatcaaaacgttattgatgggtgacgatccgagttcggtcgatctctattccgacgttgatgatattacgatttcgaaagaacctttcctttacggtcaggtggtggacaacaccgggcagccgattcgctgggaaggtcgcgcaagcaacttcgcggattatctgctgaaaaaccgtctgaagagccgcagcaacgggctgcgtatcatctacagcgtcaccattaacatggtgccgaaccaccttgataaacgtgcgcacaaatatctcggcatggtccgccaggcgtcacggaaatatggcgttgatgagtcgctgattctggcaattatgcagaccgaatcttcctttaacccgtatgcggtcagccgttccgatgcgctgggattaatgcaggtggtacaacatactgccgggaaagatgtgttccgctcgcaggggaaatccggcacgccgagccgcagtttcttgtttgatcctgccagcaatattgataccggcaccgcgtatctggcgatgctgaacaatgtttatctcggcggaattgataacccaacatcgcggcgttatgccgtcatcaccgcctataacggcggcgcaggcagcgtgctgcgagtcttttcgaatgataagattcaggctgccaatattattaacaccatgacgccgggcgatgtttatcagacgctgacgacccgccatccctctgcggaatctcgccgttatctttataaagtgaataccgcgcaaaaatcctaccgccgccgataa

SEQ ID NO: 30065 - DNA, 1200 bp, Homo sapiens; identical to SEQ ID NO: 14853
  SIMILAR (462)..(4): 891254mologous to synthetic construct InsB peptide,accession number Z37515,Smith-Waterman Score=714.

SEQ ID NO: 30066 - DNA, 1908 bp, Homo sapiens
  SIMILAR (1521)..(1093): 891254mologous to synthetic construct InsB peptide,accession number Z37515,Smith-Waterman Score=653.
ttaatatccctgctcgaaatagctttcgagaataataaccgcagaggcagagtcaactttgcctttgttgagcgcccgatagccgccctgttcaaacagaccggaacgggcttccacagtgctaagacgctcgtcatggagctttacttcaacaccgaaacggccatgaatacggttggcaaatttacgcgctctggcagtcaatggttgctcggtgccgtccatattcagcggcaaaccgacgatgatttcgtccggctgccactctttcagtaaacgctcgataatgttccagtccggcgtaccgtcctgtgcaggcatggtgagaatatccacaccaatcagttttgccgcctcgcgccagcggtcggcaatcggcgttttgaacagaatattcagatctgccggggccgttagccacgcgttatcgagaatttcttgttccagttgacctttctcccaggaggcataacccagagccaccaatacgtcagacggttgtttatcggtgccgagcgtttccagcacatcgcgggaagtggtcattaccgtgttgtctgaaatgcgaatgctggaagcaaaattggaggccggagtatgcaaaataaacccgcgatcttcagccagcggaccgccgagcataaccggtttatccagacggattgattcatcacgcggctccggcgtgatcttcagcttttccagaatcccttcaattttgagattttccagcggcttgttgacgatgatccccattgcaccattggtattatgttcgcaaatgtagaccacggaacgacggaaaatcggatccggaaactctgcttcaatctcacgaatacaggtacccagagaaaggggcatgcaaacatcagtggtccggaaacgtttaggatatatcaccggaacgcgcacgcccccctcacgatctaaagcgcgcagcagcattcctttcgaaatgatgccgacatactgttggtcctcgtcgaccacgggcaccgcacagggtgcctgtccgacatgagagagcaactcgctaagaggcgtttgtgcatcgactgctaacggcgcatcaatcagcgccgcatcaagaccttgctgtttgtcatgcagctccaccgattttgagaacgacagcgacttccgtcccagccgtgccaggtgctgcctcagattcaggttatgccgctcaattcgctgcgtatatcgcttgctgattacgtgcagctttcccttcaggcgggattcatacagcggccagccatccgtcatccatatcaccacgtcaaagggtgacagcaggctcataagacgccccagcgtcgccatagtgcgttcaccgaatacgtgcgcaacaaccgtcttccggagactgtcatacgcgtaaaacagccagcgctggcgcgatttagccccgacatagccccactgttcgtccatttccgcgcagacgatgacgtcactgcccggcgggttgagaagcggtgtaagtgaactgcagttgccatgttttacggcagtgagagcagagatagcgctgatgtccggcggtgcttttgccgttacgcaccaccccgtcagtagctgaacaggagggacagccgtattgtccatgcgatgaataaaggaaaagttatgaaacacaagctttctgcaatccttatggccttcatgttgacgacgccagctgcgtttgctgcccctgaagcaacaaacgggaccgaggcaacgacgggtactactggcaccacaacgaccactaccggcgcaaccacgactgctactaccactggtggcgtggctgctggcgctgtcggcacggcgacagttgtcggtgtggcaacggctgttggtgtggcgacgttggcagttgttgcagcaaatgacagtggcgatggcggttctcat

SEQ ID NO: 30067 - DNA, 526 bp, Homo sapiens
  SIMILAR (169)..(525): 971254mologous to Escherichia coli MbhA,accession number D38582,Smith-Waterman Score=591.
atgaatgcatgccgtagtccgctgctgaagaagaaatccgccaccgagctcggtgagctggcaaccagtatcaacaccattgcccgtgatgcgcatatggaagcgaatctggagatggagattgttccccagggattacgcgtgctgattaaagacgaccaaaaccgcatgttcgactcgctcgataataaaattattattaccgggcataacgatgcgatggcctacaaaaacaatatctacaacaactggaacctttcgggtgaccgcgcgctttctgttcgtcgggtgctggaagaggccggaatgccggaagataaagtgatgcaggtaagcgcaatggcggaccagatgctgctggattccaaaaatccgcaaagcgcgggcaaccggcgcattgagattatggtgctgaccaaaagtgcgtccgatacgctgtatcaatactttggtcagcatggggataaagtggtgcagccgctggtgcaaaagctggataagcagcaggtgctttcgcagcgaacgc

SEQ ID NO: 30068 - DNA, 1539 bp, Homo sapiens
  SIMILAR (945)..(328): 981254mologous to Escherichia coli glycogen synthase,accession number U18997,Smith-Waterman Score=1090.
tcactcagcctgcgcgccggttccctgcgtaccattacgcacatcctgctgccgctgctgcgcccggcgatcctctcggcgctgatttacagctttgtgcgcgccattaccaccgtcagcgccattgtgttcctcgtcacgccggatacccgcgtagcgacggcttacatcctcaaccgcgtggaagatggcgaatacggtgtagcgaatgctacggtccattctgatcgtggtgagccggcgataattcacctggacgggtgatcgggaacacggcccccgggaaaggcaaacagcgtaagggggccatacccaaaaccgcaatggcagctcgcgagcgtaggttggactgaccgccgtaatgtgatcggcatagtacagaccggccttcaggaaagagatttgtccgttgaattccagcccatgaatattaaagaatgaccatggcaattggatgtcattcatgtgatgtgcataaaacatgccttgataggccaggttgtgcacagtaaacaccgacttcgccggacgcccgcgcgccgccagatacgcaggcgcaaggcctgcatgccagtcgtgcgcatgcaccacatcaggacgccagaatgggtcaagcccgctggccatttctgccccaacccaccccagcagcgcaaaacgcaatacgttgtcggtataggcaaataagttggtatcgtgatacgggcttcccggacgatcatagagatgcggcgcgtcaatcaggtaaatgccaaccccgttgtaatgaccgaacaacagcgtgatatgtccggcgaaggtatcacgacgggatactacctgcgcatcggtcacgccacggcgaatatcgggaaatgcaggcaacagtacgcgagcgtcaacgccgtctgcgatttgtgctgcgggtaatgccccaataacatcagccagaacgccgggttttatagacagccgaggagaggataccagcacgatgccttcttctgaacgatagaaacgacgtgcatcttcctctgcgttttcaccaatcaccatgccttccggaataacacaagcacgatcgatgacgcagcggcgcagacggcacgagcgacctacccatacttccggtaacaatacggcggaatcaatgttgcagaatgaattcacgcgaacgcgcgagaacagaacggactgcaccaccaccgaaccggagatcacacaaccgccggaaaccagtgagttaagggtcatcccgtggctaccggagcgatcctgcacgaatttcgctggcggtaatgattcattgtaggtgcgaattggccaattgcgatcgtacatatccagttccggcaccacagaggccagatcgaggttcgctttccagtaagcttccagcgtacccacatcgcgccagtacggctcggcatccgggtcggattgtacgcaagagagcgggaacgggtgcgcataggccagaccggcttcggtgatcttgggaatcaaatctttgccaaagtcgtggctggagttctcatcgagaacggcttctacagacat

SEQ ID NO: 30069 - DNA, 3147 bp, Homo sapiens; identical to SEQ ID NO: 22484
  SIMILAR (1246)..(2256): 1001254mologous to Escherichia coli Transcription-repair coupling protein mfd,accession number D90747,Smith-Waterman Score= 1767.

SEQ ID NO: 30070 - DNA, 1233 bp, Homo sapiens; identical to SEQ ID NO: 22473
  SIMILAR (379)..(777): 981254mologous to synthetic construct insB,accession number M27083,Smith-Waterman Score=696.

SEQ ID NO: 30071 - DNA, 1194 bp, Homo sapiens; identical to SEQ ID NO: 22476
  SIMILAR (1060)..(1098): 841254mologous to Escherichia coli alternate name ygiH; ORF_o205,accession number U28379,Smith-Waterman Score=66.

SEQ ID NO: 30072 - DNA, 2781 bp, Homo sapiens
  SIMILAR (2655)..(1930): 991254mologous to Escherichia coli flagellar protein FlhB,accession number U88319,Smith-Waterman Score=1214.
ttattgatagtgttttatgttcagataatgcccgatgactttgtcatgcagctccaccgattttgagaacgacagcgacttccgtcccagccgtgccaggtgctgcctcagattcaggttatgccgctcaattcgctgcgtatatcgcttgctgattacgtgcagctttcccttcaggcgggattcatacagcggccagccatccgtcatccatatcaccacgtcaaagggtgacagcaggctcataagacgccccagcgtcgccatagtgcgttcaccgaatacgtgcgcaacaaccgtcttccggagactgtcatacgcgtaaaacagccagcgctggcgcgatttagccccgacatagccccactgttcgtccatttccgcgcagacgatgacgtcactggccggctgtatgcccagggttaccgaactcgggcctgcttgtttcctggccccttccgttgtcatctctttcggaccatgttccactagcagattcgcaaacattgttcgtattgcccggatgtgcccatattcccctgcgctgcaagaactgggtcgaattcttgacttatgagttatcaggacggaagggggcccaaaaaatggaggaagcttcgtgtcgttagcgaaataataagggacaatatgcacagcccgtttagaatcctcccaggggttcctccctgcgtcaggtggtgtgcgtaaaaggataaatgatgaaaaggatgattgtgctggatggcgcacatggcgaaggtggcgggttctgacagcccgatgggcgacgatctggataaaaaccgttccattgttaaacgctttggttatccggtgattatcaaagcctccggcggagtgcggcgtgtctgcggtatgcgcgtaatgcgcggcgacgcataactggcacaatccatctccataacccgtgcggaagcgaaaaaatgccgccaccagaaagtggtcgaagaatcgccaccaacgggcattaccccggaactgcgtcgctacatcggcgaacgttgcgctaaagcgtgtgttgatatcggctatcgcggtgcaggtactttcgagttcctgttcgaaaacggcgagttctatttcatcgaaatgaacacccgtattcaggtagaacacccggttacagaaatgatcaccggcgttgaccctgttctccaactcgctggcaccggccattgttgccgcgtccatcaaagtactggagatggtcgaagcgggcagccgaactgcgtgaccgtcctggcgggagccgatcacgccattattccggtcatgcttggtgatgcggtagtggcgcagaactttgcccgtgagctgcaaaaagagggcatttacgttaccggtttcttctatccggtcgttccgaaaggtcaggcgcgtattcgtacccagatgtctgcggcgcatacccctgagcaaattacgcgtgcagtagaagcatttacgcgtattggtaaacaactgggcgttatcgcgttcacatctataactgggatgagtggtcgcaaataaaccatcccggttgccagatgtgttcgttgggccactgcaatactgttcggtgacagtggtcaggtattcggtcacggaagtgaaaggcttcaagatcggcgatcgcgtttctggcgaaggccatatcacccatttgtgccgcaacacgataggcgttggtgttaatcgcccgggctgctttgccgaatatctggtgatcccggcattcaacgccttcaaaatccccgacaatatttccgatgacttagccgcaattgtactgacagtggtgtctatgaataccatgtcgcgccacgggagaaatctctttctaacgcgcgtgtgttcggcgcacttgggccctatcgggacattcggttggtccacccggtaaaccgattttgcaggggcggcggatcgccctttaacatgagggtcaccttcgctttgtttgaactcatcacgaatatcctgccgtgacatacgcagctttttcaggtggctgaatatttggaaaaagacgtcaaatcccaccattggaatgacaccaagcaccaccagcagtgcgcatagccctaccaaatccatcgcattacccatggcggtaatcggagactcggccatcaagcgcatcatctgcggccagtgatgccagagaaaaaaccccgtcacgctgccaaccaggatggttttcaaaattgctttaagcaactccgcgccagtctgagccgagaacatccgtttaatgcccggtagcgggttgagtttggaaaacttcggctgcaaggatttgccgctaaataccagccctcccagcatgaccggagaaatgagcgccaccagcaccacgccgctaatcagcggcagcagcgccagcatggcttctctgatcagcagaataatctgcccgaggatcagattcgggtcattgataatactgtgatcaaaatgcagcccagcggagagcatgcccgacaatcgacgggccagcgacacaccgccaaaccagataacactaacgcccaccagcaaaatcagcagtgaggtcagttcacgggaacgcgggatttgcccctcttcccgcgctttttctagtcggtgaggtgtgggggcttctgttttgtcgtcgctctcgtcagacacgtcgccaatccttcccaaggggaaaacgcacgacgtgctgaccggaagtgatgacggtcgccacagcaacacgtctctggcgtggggagctggcgtgcagtttaacccgaccgaatccgtggccat

SEQ ID NO: 30073 - DNA, 2655 bp, Homo sapiens; identical to SEQ ID NO: 22474
  SIMILAR (2655)..(2176): 981254mologous to Escherichia coli TorCAD response regulator,accession number D90736,Smith-Waterman Score=796.

SEQ ID NO: 30074 - DNA, 1896 bp, Homo sapiens; identical to SEQ ID NO: 22489
  SIMILAR (1189)..(1893): 971254mologous to Escherichia coli Arginine transport system protein ArtQ,accession number D90724,Smith-Waterman Score=1153.

SEQ ID NO: 30075 - DNA, 2655 bp, Homo sapiens; identical to SEQ ID NO: 22480
  SIMILAR (1417)..(2106): 911254mologous to Escherichia coli serA,accession number A25268,Smith-Waterman Score=1066.

SEQ ID NO: 30076 - DNA, 810 bp, Homo sapiens
  SIMILAR (417)..(4): 981254mologous to synthetic construct InsB peptide,accession number Z37515,Smith-Waterman Score=719.
ttattgatagtgttttatgttcagataatgcccgatgactttgtcatgcagctccaccgattttgagaacgacagcgacttccgtcccagccgtgccaggtgctgcctcagattcaggttatgccgctcaattcgctgcgtatatcgcttgctgattacgtgcagctttcccttcaggcgggattcatacagcggccagccatccgtcatccatatcaccacgtcaaagggtgacagcaggctcataagacgccccagcgtcgccatagtgcgttcaccgaatacgtgcgcaacaaccgtcttccggagactgtcatacgcgtaaaacagccagcgctggcgcgatttagccccgacatagccccactgttcgtccatttccgcgcagacgatgacgtcactgcccggcctctttcgccacactttctccttatatattctgtttacaacgttcttttcttttggtatttccgcattcggtcgtccagccacaacgggctgaaatcgtccgtgattatgatccgtagtgttcagccatctccaaccaccaattcttctttggttatttactccctgagcttctaattttctttccaaactcacagacatctgggctgctagctgcatgaaggagctacccgctgtgggtactccgtcgtttggcttgaccagccttggggaaccaaaccttttggaaccaggacattggaacccttggcccttgaaactgcctttgtgagctcttggtcttctctcaatattaatcaggatagcatcatccttttgaatgaagtggttgtccaccttcat

SEQ ID NO: 30077 - DNA, 1740 bp, Homo sapiens; identical to SEQ ID NO: 22483
  SIMILAR (574)..(870): 951254mologous to synthetic construct InsB peptide,accession number Z37515,Smith-Waterman Score=494.

SEQ ID NO: 30078 - DNA, 1986 bp, Homo sapiens
  SIMILAR (1383)..(1045): 971254mologous to Escherichia coli K12 putative transport system permease protein,accession number AE000134,Smith-Waterman Score=528.
ttagtccccagcatactcccgggaaggcggttttgacgcatactccccttggcggccccttgtttccccggattgtgctcccatatgcacgtcgtaaaggtaggagtagccgcgtttgccgttctcgcttatacgggcggggcgagctccttgctgatctgcccattcacagagtccacagaaacgtgtggtaaccatggaggaattccgaagggaaaatagccacacacaggcagtcggtcctgtcgctcgattcacagctttatccgcaacatttccggacataagagccgttttgccattcgttttatgccgctggacactgaaaacggacaggtaccggaacgtctggatttcgaactggcctgttgctcggagaatgggctgctgaagaaaaacgaatccccagcagtggcgatctttccgaaagcgatgactggagcgaagaaccaaagcagtgacatttgtctgatgccgcacgtaggcctgataagacgcggacagcgtcgcatcaggcatcttgtgcaaatgtcggatgcggcgtgaacgccttatccgaccattcgaccccggaaatctgcaggcgatgagagcgaaaacgataatcgccagcggtgcgggcatacccagcagcaaggggtggaaaccgttgaggatataatcaaccggaacgcgcacgcccccctcacgatctaaagcgcgcagcagcattcctttcgaaatgatgccgacatactgttggtcctcgtcgaccacgggcaccgaacagggtgcctgtccgacatgagagagcaactcgctaagaggcgtaagtgcatcgactgctaacggcgcatcaatcagcgccgcatcaagaccttgctgccgggctacgcaaaagaaccggtacgacgcgcataagaaagggcaaggggcccgaataggaacatagccccgtgctggggtcaatagagaaaaaagcttaactccagagatatcttgactcagaatgcttccttctgctggcagtctgctctgactgtgatcgtcgacagtcttctcgaatctggacagaagtgattcaccgatcagccagtcaaagatgaaaataatcgccagcatcaccacgatcagaatggaaccgtaggcaatcgctacaccgtattcgccatcttccacgcggttgaggatgtaagccgtcgctacgcgggtatccggcgtgacgaggaacacaatggcgctgacggtggtaatggcgcgcacaaagctgtaaatcagcgccgagaggatcgccgggcgcagcagcggcagcaggatgtgcgtaatggtacgcagggaaccggcgcgcaggctgagtgaggcttcatcgagcgatttatcgatttggcccggtaatgactccaatttgtcatgctgctccaccgattttgagaacgacagcgacttccgtcccagccgtgccaggtgctgcctcagattcaggttatgccgctcaattcgctgcgtatatcgcttgctgattacgtgcagctttcccttcaggcgggattcatacagcggccagccatccgtcatccatatcaccacgtcaaagggtgacagcaggctcataagaagcccagcgtcgccaagtgcgtcaccgaatacgtgcgcaaaaacggcttccgaacctgcatacgcggtaaacagcagcgcggggccgaatagcccgaagtatccaaggtcggccactccggcgaacatgagcccggccggctgatggccgggaccgaagggccgaagattaaaggggcaccaggtagggcgcccaaaggggatgaaccgttctgcacgggttaatgaggaactttgccctcccagccaggcgatccgctgatgcccatgagaagcagagaacacatagcccattcccacgggatcaaggccgatatctttggccatttccgaaccggcgatagagagcgtagcgcggtcgccgtagttgaaggatgtgacgataaacaacat

SEQ ID NO: 30079 - DNA, 3288 bp, Homo sapiens
  SIMILAR (2208)..(1258): 901254mologous to Escherichia coli K12 putative membrane protein,accession number AE000312,Smith-Waterman Score=1441.
  misc_feature (1)...(3288): n = a,t,c or g
tcatgagaaaagtatattcttattattcccctttagcagatgagaaaaccaaggctcagagaggttaagtatcttgtccacaatcacagagctggcaagataatagagccaggatgtgaacacaggcattccaaccctcgaagctgaaaatgaaggcgcacaagttaagaagtttgcgcacgtcagatcgacgcggtactgaaaactcagggtgctgcggcattcgaaggtgcggttatcgcttacgaacctgtatgggcaatcggtactggcaaatctgcaactccggctcaggcacaggctgttcacaaattcatccgtgaccacatcgctaaagttgacgctaacatcgctgaacaagtgatcattcagtacggcggctctgtaaacgcgtctaacgctgcagaactgtttgctcagccggatatcgacggcgcgctggttggtggtgcttctctgaaagctgacgccttcgcagtaatcgttaaagctgcagaagcggctaaacaggcttaagtctgacaggtgccggatttcatatccggcacttactttccttaactcttcgcactgatgatcctgaatttcctcggctgaagcacggttaagcgtcagtagatttcgttgtgtcgccagcaatacaaatgagttatcactctgccgtaccatcgccagcccgtagcgtcccatatgttcccgcgcctcaggtacttcttctgccagcatcataaatgggctgcgttgtaccagttcgctttccgttacccgacgcgccaggtattcatgcccgcgcaaaccacctggcagtggcaaccagcggctgctgatgttcgccagattgtgatccagagatgcggggcataatctaaaccgtccgtggttgtccgatgaagatagttgagtggactcggagtagatccatcggtaaagcagcacagaacagactcttcgccagatcctctcttttcgcttcttcgcggcggtaagtactggcctgctgccgtgggtgcttaagcgcagcggcattacccctggaagagagccttgccgtaatcggtcaacaaagcagtaataaacgactgggtgacgtgttaaatcaggtacgcagcgccatccttgaagggcatcccctttccgatgcattacagcattttcccacgcttttcgattcgctctatcgtaccagtatttctgccaatcccagcggccgtcccctcctgctggcatgcggatgaattctaagcacgcccctgccgacagcccgtcgccgttcatcccacgcgcggtgatacgccagcgggttaacgaatcaggcatcaggaacgtgaaatacgctttgccttgtttatcggttgtgagtgacggcatccatgccgcggtatccacctcttcacgccgtggacgttcaagcatttttactttcgccgctcgctgancggttagttgcgccagagcgcaaccggctcgctggagagcgcctggatcgtagctgataaacgacagactggagctggtacgcacattgttacgccccagcggatagaaaaatttgccgatattcggcgcgatttctggttgcagcgcgtagatcatttcatcgaccacgcctaccgttagctgcgcagaaacaggtttacctttcagcgacgaggttaattcgacattgaccagttcaccaggctggtaatgggttttgtccgttttcacccggatatccagctggggaacggcaactttgatcccggcgttctgaaaactgtactgaccgttacgggtatacagcaccgaaaaagtgatgttaggcgcaaaggaattgctcactggaacccgggcttcatactgggtatcgtttaaacgttgtagcgttagccagtttgccggatgcgaaagcagcgactgctgttccacgcgatcgcgttccagcgtcaataatgcttcatcaattggctccggaaaggtaatcagcatcttcgcggtttcgcctggctggtacagcgttttatccgccacgatatctaccgtaccagtatgcgccgtgctgcccttaccgctgacggcatgacttaacccagcgagaattaagccgtctttatcgcgtaatgtcagattgtagttgccaggtttagcgaaattgacggtaaaggatttgccgcgcctgtctttggcttttgaacgggaggtacgtgattcaccgatcagccagtcaaagatgaagataatcgccagcatcaccacgatcagaatggaaccgtaggcaatcgctacaccgtattcgccatcttccacgcggttgaggatgtaagccgtcgctacgcgggtatccggcgtgacgaggaacacaatggcgctgacggtggtaatggcgcgcacaaagctgtaaatcagcgccgagaggatcgccgggcgcagcagcggcagcaggatgtgcgtaatggtacgcagggaaccggcgcgcaggctgagtgaggcttcatcgagcgatttatcgatttggcccggtaatgactccaatttgtcatgcagctccaccgattttgagaacgacagcgacttccgtcccagccgtgccaggtgctgcctcagattcaggttatgccgctcaattcgctgcgtatatcgcttgctgattacgtgcagctttcccttcaggcgggattcatacagcggccagccatccgtcatccatatcaccacgtcaaagggtgacagcaggctcataagacgccccagcgtcgccatagtgcgttcaccgaatacgtgcgcaacaaccgtcttccggagactgtcatacgcgtaaaacagccagcgctggcgatatttagccccgacatagccccactgttcgtccatttccgcgcagacgatgacgtcactgcccgggtcattcatgccataatcatgattttctggtgcgatcgggttgagaagcgtgtaagtgacgcagttgcatgttttacgcttgagagcgagatagccgaagtcggcgtgctttgccgtacgcacatccgtcagtagcgacaggtcacgcctgctcgaatgtaagctctgtcgcgaatcttgcatgcctgcaggtccgaagacgtgcgccacaaccgtcctccgtatcctgtcatacgcgtaaaacagccagcgctgacgtgatttagcaccgacgtagccccactgttcgtccatttcagcgcagacaatcacatcactgcccggttgtatgcgcgaggttaccgactgcggcctgagttttttaagtgacgtaaaaccgtgttgaggccaacgcccataatgcgtgca

SEQ ID NO: 30080 - DNA, 3891 bp, Homo sapiens
  SIMILAR (853)..(1650): 961254mologous to Homo sapiens Maltose binding protein- zalpha11 fusion protein,accession number Y79316,Smith-Waterman Score=1331.
atgggcaattttgttgagcaatcaacgcttaataaaacacatccggtaatttataacgtctgcaattatcagaaacccgctgccggtgagcctgcgttgttactctgggatgatgtcataaccttattccatgaatttggtcatacgctgcacggcctttttgcccgccagcgttatgccacgctttccggcaccaacacgccgcgtgattttgtcgaatttccgtcgcaaatcaacgaacactgggcaacgcatccgcaggtattcgctcgctacgcccggcattatcagcgcggggcagcaatgcctgacgaactgcaacagaaaatgcgtaatgccagcctgttcaacaaggcgattaaggtcaagcgataccgctcttacagaggagaggtagggcaaaccgcccctaatgttctccaaagagatttcaaggctacgcggccaaacgagaagtgggttaccgatgttactgaatttgcagtcaatgggcgcaagctgtatttgtctccagtaatagatctcttcaacaacgaagttatttcttacagcctttcggaaagaccagtgatgaacatggttgagaatatgctcgatcaggcattcaaaaagcttaatcctcacgagcatcctgttctgcactctgaccagggatggcagtatcgtatgagaagatatcaaaatatccttaaagaacatggtattaaacaaagcatgtccagaaaaggcaattgtctggataatgctgtggtggagtgtttctttggaaccttaaagtcggagtgtttttatcttgatgagttcagtaatataagcgaactgaaggatgctgttacggaatatattgaatactacaacagcagaagaattagcctgaaattcaaagcgttatcgctgatttataacaaagatctgctgccgaacccgccaaaaacctgggaagagatcccggcgctggataaagaactgaaagcgaaaggtaagagcgcgctgatgttcaacctgcaagaaccgtacttcacctggccgctgattgctgctgacgggggttatgcgttcaagtatgaaaacggcaagtacgacattaaagacgtgggcgtggataacgctggcgcgaaagcgggtctgaccttcctggttgacctgattaaaaacaaacacatgaatgcagacaccgattactccatcgcagaagctgcctttaataaaggcgaaacagcgatgaccatcaacggcccgtgggcatggtccaacatcgacaccagcaaagtgaattatggtgtaacggtactgccgaccttcaagggtcaaccatccaaaccgttcgttggcgtgctgagcgcaggtattaacgccgccagtccgaacaaagagctggcgaaagagttcctcgaaaactatctgctgactgatgaaggtctggaagcggttaataaagacaaaccgctgggtgccgtagcgctgaagtcttacgaggaagagttggcgaaagatccacgtattgccgccaccatggaaaacgcccagaaaggtgaaatcatgccgaacatcccgcagatgtccgctttctggtatgccgtgcgtactgcggtgatcaacgccgccagcggtcgtcagactgtcgatgaagccctgaaagacgcgcagactcgtatcaccaattgttgtcggataaggcgtgaaagccttatccgtcctggaatgaggaagaaccccatggatgtcattaaaaagaaacattggtggcaaagcgacgcgctgaaatggtcagtgctaggtctgctcggcctgctggtgggttaccttgttgttttaatgtacgcacaaggggaatacctgttcgccattaccacgctgatattgagttcagcggggctgtatattttcgccaatcgtaaagcctacgcctggcgctatgtttacccgggaatggctggaatgggattattcgtcctcttccctctggtctgcaccatcgccattggcttcaacaattacaggaggactaaacaggtagctgggatgccagcgaagtcttcttcgttgcgtagttcacaagaccgggaaatgcgccccggtgcgaaggccgaacggacccgatacgactcccccggttcctacggtgtggccggccctgggttcctaggttcccgggggggttcgccttttgggggccctggaaaatataacaacaccattaccaaatatgcattaaacatagcgccctctgcacaaaatcagagtccacatggcccgaaactgaaccggagacaagaaacacagcatgcgttagactggttagatgcaggttataccttcacctacagcgaagatcaggctctgactccgtacttcaaactggcttacgtctacgacgactctaacaacgataacgatgtgaacggcgattccatcgataacggtactgaagggtctgcggtacgtgttggtctgggtactcagtttagcttcaccaagaacttcagcgcctataccgatgctaactacctcggtggtggtgacgtagatcaagactggtccgcgaacgatttgacgggcattactgcaaaggacgcgcaaatgttatctgtagttaaacctcttcaggaatttggtaagctcgataaatgtttgtccagatacggtacgcgcttcgagtttaataatgaaaagcaagttatattttccagtgatgtcaataacgaagatactttcgttattttagagggagttatctctctgcgtagagaagaaaacgtacttatcggtattacccaggctccttatattatggggctggctgatggtttaatgaaaaacgatataccatacaaattaatatcagaaggaaattgtacgggatatcatctaccagccaaacaaaccattacgcttattgaacaaaatcaactctggcgagacgctttttactggttagcctggcacaatagaattctggaattacgcgacgtgcagctcatcgggcataattcctacgaacaattcgcgcacattatattcatgattgccgcaatgcaaatgggatccgtatggggtgacgatttctcctcaggtcagcattcggtcgcgcgcaaatcccagctgcacaagcccattcttcgtgtgaagtgccacgaagggtttactatatcagcaaacccgaattccagccctagatatcccaccatcatcgaacaggcggaacagccacggatagttgatttctccatcgtccggttcatgtcgatcagccagtgcctgatactggctggctctatgatgcgtactttcatcaagaaagtatacgcagctatcgaagctggcgacaaagctgctgcacagaaagcatttaacgaaatgcaaccgatcgtggaccgtcaggctgctaaagctactgacggggtggtgcgtaacggcaaaagcaccgccggacatcagcgctatctctgctctcactgccgtaaaacatggcaactgcagttcacttacaccgcttctcaatccggtacgcaccagaaaatcattgatatggccatgaatggcgttggatgccgggcaacagcccgcattatgggcgttgggctcaacacgattttacgtcacttgaaaaaactcaggccgcagtcggtaacctcgtgcatacagccgggcagtgacgtgcatcgtctgcgcggaaatggacgaacatgctccggaagacggtcgttgcgcacgtattcggtgaacgcagctatggcgacgctggggcgtcttatgagcctgcggtcaccctttgacgtggtgatatggatgacggatgggtgggcgctgtatgaataccgcctgaagggagagctgcacgtaagtcagcagcgatatacgcagcgaattgagcggatcaacgtgatctga

SEQ ID NO: 30081 - DNA, 2170 bp, Homo sapiens
  SIMILAR (804)..(16): 981254mologous to Escherichia coli DinP,accession number D38582,Smith-Waterman Score=1333.
tcagctacgacctctttctacctttgccagacggcgttcaagttccggatacagccgctcgataatcgcttcacattcagaccagtgatgaatatcttccgccatcgtgcgttccacgccgacggattttcgcaaccgttcgctgttaacatcgcgttcgtcaatcccctgactacgctcccacaaaatgcggccaaatttgccaaagcgtttaagcagcatcaccagatcacacttttgtacatcaccgcaggtccgcagccccatcgcttccagttttgccgctgagactttgccgacgccggggatttttgccagcggtaaggtttgtaaaaatgccggaacttctgccggcgtaatcacaaactggccgttgggcttattcatgtcggaggcgattctggcgagaaactttactggtgccacgcccgcagacgccgtcagttgcagctcgttgaagattgtctggcggatttcctgggcgatgagggtcgcagaaccgtggcaatggacgctatcggtgacatcgagataagcctcatccagtgacaacggttcaatgcgcgaggtgtagcgcgagaagatttcacggatatgatttgaggcttctttgtaggcgtcaaagcgccccggaagcaaggtgagatgtgggcataatttgagcgccatccctgtcggcatagcgctacgtacgccaaatttacgcgcgggataattgtcggtgctgatcaccccccgacgttcgcggctgccgccaatagcaatagggatatcgcgcagggcgggattgtcgcgcatctccacaaagtattgatacagcgtatcggacgcacttttggtcagcaccataatctcaatgcgccggttgcccgcgctttgcggatttttggaatccagcagcatctggtccgccattgcgcttacctgcatcactttatcttccggcattccggcctcttccagcacccgacgagccgaaagcgcgcggtcacccgaaaggttccagttgttgtagatattgtttttgtaggccatcgcatcggtatgcccggtaataataattttattatcgagcgagtcgaacactggcgcgagctccaccagcagcgttttaaagaacggcataatcttcgcgctgccggcgttcaaacatattgcggttctggtcgtctttaatcagcacgcgtaatccctggggaacaatctccatctccagattcgcttccatatgcgcatcacgggcaatggtgttgatactggttgccagctcaccaagctcggtggcggatttcttcttcagcagcgccgttttctcattcacatcacgcgcttttttctccgtctcttccggcaccgccacggtggcaggttttggcggatgagacgggcagaaaatcattgatatggccatgaatggcgttggatgccgggcaaccgcccgcattatgggcgttggcctcaacacgattttccgccatttaaaaaactcaggccgcagtcggtaacctcgcgcatacagccgggcagtgacgtcatcgtctgcgcggaaatggacgaacagtggggctatgtcggggctaaatcgcgccagcgctggctgttttacgcgtatgacagtctccggaagacggttgttgcgcacgtattcggtgaacgcagcctgttcactggtccatagcgggaacggtttgccacgcagatcgaagtaggaaaactgttcgccgcagccgtagatatggtcctctggttgagcggcaaggcgcagccagatacggttgtggttaaggttgtcgttttgtagttccagcaataaacgcccctgatcgtcggcagagatattcagcgtggcgctaatgtcagaaccacggctgaaatgaattaaccaaccatccggtgactggctgacgatggcgtcggtaagcgcaattttctcctgtagtttatctttaatgctgaaattaccgcggaacatatcgatatccgctatacctgagccaatccataaacaaggattatctttgctatgggttaaaactaagacgttgttgaacaatgtagcggtaaaactgtcgttattctgatgaaattgaaaatctaataatgatttagtgtatgatggtgtctttgaggtgaccacgttcctttggctgtacacaccgccgtcacacat

SEQ ID NO: 30082 - DNA, 4358 bp, Homo sapiens
  SIMILAR (2801)..(1995): 971254mologous to Escherichia coli PTS enzyme II- asc,accession number M73326,Smith-Waterman Score=1307.
atggccgcattaccatacatgcaactgtacatagctgattacctggctgacaccatgcatttgtcagcagaggagcatggtgcgtatttgttgctgatgttcaattactggcaaacaggaaagccaatacctaaaaacaggctggcaaaaattgcccgtctgactaacgagcgatgggctgatgttgaaccatccttgcaggagtttttttgcgataacggcgaggaatgggtgcatcttcggattgaggaagatctggcatcagtcagggaaaaattaaccaaaaaatcagccgcaggaaaagcatctgttcaggccagaagaagcagaaaggaagcagatgttcaaacaaaacaagagagaaatttaacaggtgttcaaacagatgttgaagtggtgtttgaacatgatgtcaacacaaaggcaactaataaagatacagataaagatctaaaaacagatccccccctaaatcccccccgggggaatcgaggtgtcaaaaagtttgaccctctggatattactttgccgaactggatttctgtctcgctttggcgtgagtgggttgaatttcgccaggcattgcgaaaaccgattcgaacggagcagggcgctaacggggcgatacgggagctggaaaaattccgccagcagggtttttcacctgagcaggtgattcgacacagcatcgccaatgaataccagggcttgttcgcgccgaaaggtgttcgacctgagacgttactccgacagactggccccgtcacatgtaaccgcgccattcaagacggtagcggagtggcgcgagtggcaactttccgaagccagaaacgttgtgaggagatcaaccgtcagaatcgtcagttgcgggtggaaaaaattctgaatcgctctggcatccagccattgcaccgcaaatgctcgttttcgaattaccagcggaaaacctggtaccgggaagaaccacttagcggcactatcgggaatcgcctgctgaaagacggtcagacagtgattgtggttaccgtggctgatgttatgagtgccctgcacgccagctatgacgatgggcagtcaggcgaaaaatttttgcgggaactgtgcgaagtggatctgctggttcttgatgaaattggcattcagcgcgagacgaaaaacgagcaggtggtactgcaccagattgttgatcgccggacagcgtcgatgcgcactaaaagcattcgctttttcacccgtggaagatggcatagccgttcgccagttgctgtttactttgttggcaaccgcattgatcgtcccctatttcaaacgctcgtcgcggctactgacggggtggtgcgtaacggcaaaagcactgccggacatcagcgctatctctgctctcactgccgtaaaacatggcaactgcagttcacttacaccgcttctcaacccggtacgcaccagacaatcattgatatggccatgaatggcgttggatgcccgggcaaccgcccgcacttatgggcgttggcctcaacacgattttccgccatttaaaaaactcaggccgcagtcggtaacctcgcgcatacagccgggcagtgacgtcatcgtctgcgcggaaatggacgaacagtggggatacgtcggggctaaatcgcgccagcactggctgttttacgcgtatgacaggctccggaagacggttgttgcgcacgtattcgtgtgaacgcactatggcgacgctggggcgtcttatgagcctgctgtcaccctttgacgtggtgatatggatgacggatggctggccgctgtatgaatcccgccctgaagggaaagctgcacgtaatcagcaagcgatatacgcagcgaattgagcggcataacctgaatctgaggcagcacctggcacggctgggacggaagtcgctgtcgttctcaaaatcggtggagaagatcacaagtgggccaaccaccaacgccacacccgggacacagaagacagccaccgacaagagaggcggcaaaaaactaccgatccagataccaatcgggccaatcagcaggattgccagcggtgcggcaatcaacacaatcagcattggtttgaggaagtttttggtcaccgccggtgtaatgctgtccacccagcgttcgatatatgacaggcaccaggtcatcaccagcgccgggatcaccgtgtaggtgtatttcaccgcggtgaccggaatcagggcaaattcgacatgttcaccctgggccgctttcgccatcagttcaataaaactcggatgtaccagcacacccgcgatggcaatcgccagcgacatattggttttaaatttgatggcggcagatgccgcgaccatcagcggcaggaagaagaaagcaccgtcaccaatcacattcagaatggttaaggtcggcgatccttttgtcagcacgccgctcatctcgaggatcattgccagcagtttgaccatcgatccgccgataatcgccgggatcagcggtgacatggtgccgatcagcgcatcgaggatccccgcaccaatgcgacgtagcgtgagtttgggtttacccacgggctgtgcgggctgcatatctcccggcagcaggctgacgacttcctgaaaggcttgtgaaacggtattgccgataatcacctgacactggttgtcactacgtaccacgccgagcacgccggggatggtttttaacgtcgggctgtcgataagtgcatcatctttgataacaaagcgcaaccgcgtcatacagtgcgtgaccgccgagatgttatcaacgccgcccagtgccgctgaatatttttcccgccgattgtgcaaggacaatcggcaaacggtgcagtacactgcgttgattgcgtgtaaagggatgaaaatgatgacgacgatgctggaagtggcgaagcgcgccggggtttcaaaagcgaccgtttcccgcgtgctttcaggtaatggtccggggctcccgacggcagagttcttccagcgagtggcgacactggcgtcgagatcgccttcatcggcggagactttacagccgccaggatggagggtgggatcgccccgcaagcgccagccatgcaaacttaaggtagcgccgagcatatcatccacacgttgcagatcatccgggtgcacgcgcagctgtggtttaccgctgaataacggttcttgctgcaacaactgttggatctgtttgatcagtgccgagttatccaccgttggcgtctgaccgatgacctgacgtgccgcctccagcgccatctgcatcaggcgcgacgctatcacactatcaagtgcatcaagggtagtttgaaattcgctgaccagttgctgcatccgggcatgaattggcgcttgttgagacttcgcctctgccagaccttgctccagcccctgggccagtccttcctgatagccctgcttatgaccttgctggcgaccttcggcaatacccgcctgataaccttgctcatgggcctgcatttgcagttgcgccagttgctgctcaaggctgggttcagcctcttcaatgatggtttcttccggctcgactatgggcacaaactctgccatctcgccagtttcggcaaggcggcgcacaatcagcagaatcgctttctgttcgttttccacctgcgacagacgcaccggaccacggttggcgagatcgtcgcgcagaatatcggcggcacgctgcgacatattgcgcaagaatttctcgcgcagtggctgctcggctcctttcagcgcgatcaacagcgattcggaatccacttcctgcaacagacgctgaatgctgcgatcgtcgacatccaccagattctcgaacaggaacatctcgtcgatgattttctgcgccagctcgccgtcgaattcacgcacggcggtaataacggcttcttcctgctgagttttcatcaggttgataatttcggctgccgttctcacgggggatcctttagagttcgaccactcaggaacacccttgtacacccaggctgcctcccgcacttctggctctcctctctttttcctcatcaccttcttgaacacagcagtactactaatagacttcatttcttcactttcctcagcccctgcaatccagcctttgctgtgttttgaaactgctttactaagatctccagtcccctcaatgtggccacactcattttgccttccaggaatcttccctttcttgaatcttctactgcttctgtcacactcgccagccttctccacaccttctttcttagccctcctcaggacctcgatgtcaggatgttgatgggttggtttgtctggtatcatggcagtagccagttcaaatctaggagtaggaaccat

SEQ ID NO: 30083 - DNA, 3776 bp, Homo sapiens
  SIMILAR (1636)..(2112): 1001254mologous to Escherichia coli Spermidine/putrescine transport protein A,accession number D90748,Smith-Waterman Score= 834.
atgtggtccttcgaattacggtttccccgcgcggtgaccgatgcggcaattgttggtcgtcatgtcggaaccacgttaatggtggcgcgttatgcggtcaacacattgaaagaagtggaaaccagtctgagccgctttgagcaaaacggtattccggtgaaaggggtgattctgaactccatcttccgccgcgccagcgcgtatcaggattatggctattacgaatacgaatatagtcggatgcgaaataacgacgcctgcattcgcaccgccccgccggataaggcgttcacgccgcatccggcaagcaaaccagctcataagccgggagaacaacctatgaaaaacaatccgctgatctcaatctatatgccgacctggaaccgacaacaactggcgattcgggcaataaaatcggttttgcgccaggactacagcaactgggagatgatcatcgtggatgattgctccacctcctgggaacaactgcaacatgcgttcaccgaatacgtgcgcaacaaccgtcttccggagcctgtcatacgcgtaaaacagccagcgctggcgcgatttagccccgacgtatccccactgttcgtccatttccgcgcagacgatgacgtcactgcccggctgtatgcgcgagaagcgatcgaccgtctgcgtgacacctcttcttctcaccagcgtatttccgtggtggaagtgatgggccgttattgtggagatctgacgttggctgcggccattgccggtggctgtgaattcgttgtggttccggaagttgaattcagccgtgaagacctggtaaacgaaatcaaagcgggtatcgcgaaaggtaaaaaacacgcgatcgtggcgattaccgaacatatgtgtgatgttgacgaactggcgcatttcatcgagaaagaaaccggtcgtgaaacccgcgcaactgtgctgggccacatccagcgcggtggttctccggtgccttacgaccgtattctggcttcccgtatgggcgcttacgctatcgatctgctgctggcaggttacggcggtcgttgtgtaggtatccagaacgaacagctggttcaccacgacatcatcgacgctatcgaaaacatgaagcgtccgttcaaagaagtgataaaggaatccaaagttgaagagcccaggaaacgggaaactgtatccataatgctgaccaaatatgcagcctataacacctttcaccactgtgaacagtgccgccagtacatggacttcacctctgcctcccagaacgaactggcgctgcacagcaagaaagagatcgacgagtatttcgcgcatgtctggcaaaccatgcaggcatgtatcgatcgcgggatgaacaccgaaggtgtactgccaggcccgctgcgcgtgccacgtcgtgcgtctgccctgcgccggatgctggtttccagcgataaactgtctaacgatccgatgaatgtcattgactgggtaaacatgtttgcgctggcagttaacgaagaaaacgccgccggtggtcgtgtggtaactgcgccaaccaacggtgcctgcggtatcgttccggcagtgctggcttactatgaccactttattgaatcgaactgctgggcggtagcccggaacagggatgtgatgcgcgatggtcgcattgagcaagacggcacgccgcgtgaaatctacgaagagccgaaaaacctgtttgttgccggcttcattggcgaaatcaatatgtttaacgccactgtcatcgaacgtctagacgagcagcgcgtacgcgccaacgttgaaggccgcgaatgtaatatctacgttaacttcgccgttgaaccggggcaaaaactgcatgttctgctgcgcccggaagacttacgtgttgaagagattaacgacgacaaccacgctgaagggctgattggttacgttcgcgagcgtaactacaaaggcatgacgctggagtcggttgttgaactggaaaatggcaagatggtgatggtcagcgaattcttcaatgaagacgatcctgactttgaccactctctcgaccaaaaaatggccattaattgggtagaaagctgggaggtcgtactggctgatgaagaacacaaaatatgttggacttttatcagagctcctatgaattttcacgtttggtttcgatctcaaaaacctggtttcccaatggttcaacagagccggatagttcccgctttcgtcacacaacaaatggtgtttccagactggaaggtcagcttccttttcaccttcacgcaccctggtcatttcaaacttgttcgccggcctgaccagatccacatcctgcggttcggtactcatttcgacgatttgacgataggcctctttacgctcatctttcaacgacttgatttgcggtgtgtactcggccagccacgccttcgccagtctatcggcctcgccatcgaagtaatcctgcacctccatcaccagccccatgccagcaacggtaacacgagcctccatgattgcttccagatattcctctgcatcctcttctcgatccgcaaccttatcggccagatattcgacatagctgtccctcctgattcagctactgacggggtggtgcgtaacggcaaaagcaccgccggacatcagcgctatctctgctctcactgccgtaaaacatggcaactgcagttcactttacaccgcttctcaaccggaacacttggattcagtgtggttcactgggccggcccatgggtaccctcaaaaacccggcggtagaagaaaataaaaaggcacagcttgagcgtgataaacagcttagcgaacagcaaaaacaagcggcgttggcgaaagaatataaagctcaggtgaagcagcttattgaaatgaaccgaatcaccattgccaatggcgatattggttttaacttcactgacggcaatctgattaagaagatttttgtcgataagctcacacaggcgcagttgattaatggtcgtctggcgattgcccgcttgttggtcgataacaatagcgaaggtgaatacgccattattcccgccagcgttgccgataaaattgctcagcgcgatgccagcagtatagtgttgcacagcgcgctcagcgccgaagagcaggatgaagacgacccgtatgccgacttcaaagtgcctgatgatttgatgtggcctacggtttatgggcgaagtgtagaccggataaggcgttcacgccgcatccggcagtcgtgcgccatgcctgatgcgaagctttgcgcgtcttatcaggcctacggcttacgggcgaagttttattggcgtggtagcatatgttgccgagcagtgctcgagcgtaaccgcgaacagccgatgacccgcaccaaagaactggcggaagtcgtggctgctgcaacgccggtgaaagataagtttaaacatcccgcgacccgtaccttccaggcggtgcgcatttgggtaaacagtgaactggaggagatagagcaggcgctaaaaagctcgctcaacgtgctggccccgggtgggcggctttcgatcatcagcttccactcgctggaagaccgtattgtgaaacgttttatgcgtgaaaacagccgcggtccgcaagttccggcagggttaccgatgactgaagagcagctcaaaaaactgggtggccgtcagctgcgagcactaggcaagttaatgccgggcgaagaagaggtggctgagaaccctcgtgcccgtagttcagttctgcgtattgcagagaggacgaatgcatga

SEQ ID NO: 30084 - DNA, 1284 bp, Homo sapiens
  SIMILAR (742)..(1266): 981254mologous to Escherichia coli GSH-II,accession number X01666,Smith-Waterman Score=906.
atgattcccgaattcgaatctccagtcaagaactccctctccaaggaccagaaccaggagacatctctgcagggtcttcaagttttaccgttcatggccagcgcagatgccgccaaccatatcgggcgcgtactgcgcatggggccggggcaggcgttgcaattgtttgacggtagcaaccaggtctttgacgccgaaattaccagcgccagcaaaaaaagcgtggaagtgaaggtgctggaaggccagatcgacgatcgcgaatctccgctgcatattcacctcggtcaggtgatgtcgcgtggtgaaaaaatggaatttactatccagaaatcgatcgaactcggtgtaagcctcattacgccacttttttctgagcgctgcggcgttaaactggatagtgaacgtctgaacaagaagcttcagcagtggcagaagattgcaattgctgcctgtgagcagtgtggtcgtaaccgggtgccggaaatccgtccagcgatggatctggaagcctggtgtgcagagcaggatgaaggactgaaactgaatcttcacccgcgcgccagtaacagcatcaatacgttgccgttaccggttgaacgcgtccgcctgctgattggcccggaaggcggtttatcggcagatgaaattgccatgactgcccgctatcaatttactgatatcctgttgggacctcgcgttttgcgtacagagacaactgcgctcaccgccattaccgcgctacaactcggcatcgtgatggaccccatcgcaaacatcaacatcaagaaagattccagttttgctatgttgctggaagcacagcgtcgtggttacgaacttcactatatggagatgggcgatctgtatctgatcaatggtgaagcccgcgcccatacccgcacgctgaacgtgaagcagaactacgaagagtggttttcgttcgtcggtgaacaggatctgccgctggccgatctcgatgtgatcctgatgcgtaaagacccgccgtttgataccgagtttatctacgcgacctatattctggaacgtgccgaagagaaagggacgctgatcgttaacaagccgcagagcctgcgcgactgtaacgagaaactgtttaccgcctggttctctgacttaacgccagaaacgctggttacgcgcaataaagcgcagctaaaagcgttctgggagaaacacagcgacatcattcttaagccgctggacggtatgggcggcgcgtcgattttccgcgtgaaagaaggcggtataagctcgagttga

SEQ ID NO: 30085 - DNA, 1506 bp, Homo sapiens
  SIMILAR (816)..(142): 1001254mologous to Escherichia coli fhuC product (AA 1- 265),accession number X05810,Smith-Waterman Score=1154.
taaccatgattacgaattcaagcgtccgacccggagatcaatagccgtcgcgagagcgggattcatctgccatatacaacggataaagcgccatcgccgttaacagtcgacggcgcgaaataagaggtaagccgctcatcaataaacaaaactcacaggtgcagcacccgccggatgcggcaaaatacccatcgggatgccataaatcatttcgagggtttcgccgcgcataatttccgcaggcgttccctgagcaatcatttcaccgccgcgcagggcgaccagataatcacagtagcgtgccgccatattgatatcgtgcaacacggcaatgaccgtcaggccacgctcctgacttaaacggtgcaccagcgacagcacatcaacctggtgggcgatatccagcgccgaggtcggttcgtcgagcaacagacaacggctatcctgcgccaccagcatggcgatccacgcccgctgacgttcgccgccagagagactatcgaccagccgatgcgccagcggttttaagccaaccagcgagatagcttcctcgactttttcgcgatctgccgccccaaagcgccccagcgcgccatgccacgggtaacgaccaatcgccaccagttcacgcacggtcatcccttctgccggaggaagctgctgcggcaaataagccactttgcgggcaaacgctttgctgctccagctttccagcggttgggcatcaagaagaatctccccttccgacggcggctgatgacggccaagcattttgagcagagtggatttaccagaaccgttgtgaccaatcagaccgggggtaccgagctcgattcgtatgagtgtaaccatgatacgaatcgagtgtgggaaccactggtcactgattttttgataagtaccgtcagctttaattgctgccagcgcgttattcagtttttccagcagggctttgttatccggacgtacagcgatgcccaggccggtgccaaaatattgcggatcggtcactttctcagtagcaacaccaagttgtggattggttttcagccattcgtttaccaccgctgtgtcaccaaataccccatcaatacgaccatttttcagatcgataaaggcattctgataactgtcataagagacagttttcacttccgggtgctgatcctgaatatatttctggtgcgtagtaccgttttccatcccaatacgtttgcctttcagatcggcaaacgttttgtaggtatcttttttggcaatcacgacggctgagttttcatagtagggcgtggtaaacgatacctgtttgctacgctccggggtgatatccataccggagattacggcgtcatattttctgaatttcagggacgggatcaggctgtcgaacgcgtgattagtaaaagtacattctgcctgcatttgtttcatcagtggtggcacaaacattagactgaagaggtactgttcaaatagagccctccaaggtaaaggaaggtctctcat

SEQ ID NO: 30086 - DNA, 2773 bp, Homo sapiens
  SIMILAR (588)..(653): 721254mologous to Escherichia coli elongation factor G,accession number X00415,Smith-Waterman Score=78.
aaagaagttcgcgcgggcgacatcgctgctgctatcggtctgaaagacctagcgcactggtgacaccctgtgtgacccggatgcgccgatcattctggaacgtatggaattccctgagccggtaatctccatcgcaggtgaaccgaaaaccaaagctgaccaggaaaaaatgggtctggctctgggccgtctggctaaagaatacccgtttttccgtgtatggactgacgaataatctaaccagaccataatctcggctatgggcgaactgcacctcgacattatctttgaccgtatgaagcgcgaattcaacgctgaagcgaacgcaggtaaaccggaggccgcttaccgtgaaactatccgccagaaagttaccgatgttgaaggtaaacacgcgaaacagtctggtggtcgtggtcagtatggtcatgttgttatcgacatgtacccgctggagccgggttcaaacccgaaaggctacgagttcatcaacgacattaaaggtggtgtaatccctggcgaatacatcccggccgttgataaaggtatccaggaacagctgaaagcaggtccgctggcaggctaccccggtatgagaaatgggtattcgggtggccttgcgctcttaccatgacgttgactcctctgaactgggcgtttaaactggctgcttctatcgcctttaaagaaggctttaagaaagcgaaaccagttctgcttgagccgatcatgaaggttgaagtagaaactccggaagagaacaccggtgacgttatcggtgacttgagccgtcgtcgtggtatgctcaaaggtcaggaatctgaagttactggcgttaagatccacgctgaagtaccgctgtctgaaatgttcggatacgcaactcagctgcgttctctgaccaaaggtcgtgcatcatacactatggaattcctgaagtatgatgaagcgccgagtaacgttgctcaggccgtaattgaagcccgtggggagagcactatagtaaggaatatagccgtgtctaaagaaaaatttgaacgtacaaaaccgcacgttaacgttggtactatcggccacgttgaccacggtaaaactactctgaccgctgcaatcaccaccgtactggctaaaacctacggcggtgctgctcgtgcattcgaccagatcgataacgcgccggaagaaaaagctcgtggtatcaccatcaacacttctcacgttgaatacgacaccccgacccgtcactacgcacacacacctcaccagatcattcagacccgcaacgcccgtgaactggtcgatagcatcaccagcgccggttcggtatttcttggtgactggtcaccggaatcggcaggtgattacgcctccggcaccaaccacgttctaccgacttacggttacaccgccacctgttccagcctcgggctggcagatttccagaagcgcatgaccgtacaggaactgtcgaaagaggggttctccgcgctggcttcaaccatagaaacactggccgccgccgagcgcctgaccgcccacaaaaatgccgttactttgcgagcaagcatgagcaccgtgactattaccgatttagcgcgtgaaaacgtccgcaacctgacgccgtatcagtcggcgcgtcgtctgggcggtaacggcgatgtctggctgaacgccaacgaataccccactgccgtggagtttcagcttactcagcaaacgctcaaccgctacccggaatgccagccgaaagcggtgattgaaaattacgcgcaatatgcaggcgtaaaagcggagcaggtgctggtctaccgtggcgcggacgaaagtattgaactgctgattcgcgctttttgcgaaccgggtctctctggcggcgaacgtcagcgggcgtggatcgccatgctggtggcgcaggatagccgttgtctgttgctcgacgaaccgacctcggcgctggatatcgcccaccaggttgatgtgctgtcgctggtgcaccgtttaagtcaggagcgtggcctgacggtcattgccgtgttgcacgatatcaatatggcggcacgctactgtgattatctggtcgccctgcgcggcggtgaaatgattgctcagggaacgcctgcggaaattatgcgcggcgaaaccctcgaaatgatttatggcatcccgatgggtattttgccgcatccggcgggtgctgcacctatgaataccgcccacgcggcggctattgatcccaatcgtattgtggcgctggagtggttgccggtggaattactgctggcgctcggcatcgtgccttacggcgtggcggataccatcaactatcgcctgtgggtcagcgaaccaccattgccggactcagtgatcgacgtcggtttgcgcacagaacctaaccttgaactgctgaccgaaatgaaaccatcgtttatggtctggtcggcaggatatggcccttcaccagaaatgctggctcgtattgcgccgggtcgcggatttaacttcagtgtacggcaatacgccgttggcgagaaccctgcagttaattttgcgggaaggcccaaggggtcaccctgctttggtccaggtggtggacttattaattgagccgccccaacttcctctcctggtcccctctgttcaaactcgcatccccaggatccagccccaatcacacccagcccatggggtcaatgaggctgtcaggaaccctacggtctgggtggcccccttcatagacgagatcatttcttcaatccacaagtattccatttag

SEQ ID NO: 30087 - DNA, 9561 bp, Homo sapiens
  SIMILAR (5277)..(7778): 981254mologous to Homo sapiens CGI-152 protein,accession number AF288687,Smith-Waterman Score=4216.
agcgcacagcgccttctggttggtgcaccgcaaggggcccaaagaaagccggcgctgaccatcgtcattatcgccagtacacgggccgcaatatccagcggaaatacgctgactaataatcgcccccgcaaagttttcatcgtgtttcgccagcaaatctttcgcgaggatatgattgcctttttccagttcgccctgcaccacaacgccctgcccttcacggaacagatccggcaaaatgccttcttgcccttcttgtactgtgtcactttgtggggttggtgcttgccacacttcttacagaaagtccagtgggttttagggacattcgccatgtttgtgtgagtgctgtcagcatggaaagcgatagactgttgatggctatgtcagacgaggcgatgtttgccccgccacaaggaataacaattgaagcggtaaacggaatgctcgcggagcggttagcacagaaacacggcaaggcgtctttattacgcgccttcatcccgctgccgccgccgttcagcccggtacaacttgaagaacctgatgattacggatctccagagtccgacctggcagcaccgatcctggcgggaattattaccgcagcgattgtcagctggtggcgtaaccggaaacacttcaagaatagccgcaaaatgttgtcattacaacaaggcggctatatgacgctcgcgcagtttgccatgactttctggcacgacctggcggcaccgacagttacgttattgacccgctgttcttccctggcggtaatatcggcaagctggcgatatgcggcacagccaatgacgttgcgtgacctgcaggaatgaacccaatacctgcgcccagcggcatcaaagatatcgaagaagtttacctgaacggtgacctggaacacggtgcgccgaacattctcaacgtcagcttcaactacgttgaaggtgagtcgctgattatggcgctgaaagacctcgcagtttcttcaggttccgcctgtacgtcagcaagcctcgaaccgtcctacgtgctgcgcgcgctgggtacggcagttttgggatgaacccgacgagagactgatacgtagtccccggggtaccgagtctgagaatcgagacattcccgtcgtgcctcgcgcgggtcgtacgtgcgcgctggtgccgcatgccgagcgtgagaagtggaagtagcaagtcttcaatatcaataccatgagtaaattacctgaccttctggaatattttaccccaactcttcttgggggctggtgctcatggtggccggcgtattccttaataaccttaatattctcccatcgaaccctagagatcccgaccggttactagagtgtcgactactacaatctgacggcaagggttgtggcgctgcatcgtggtataagtgtgtagttctttctggcctctacgacgactccccccgtgtggtgactttacgcgttcacgccgatcgggtgccggtatcgcgctgtacaaagttgcctttacctagtactactgcggtgatgctctggagggcttaccattacgacattaacgggataaaaatacaagcgggggaacacttttggacacgacaagaccacgatggtattaaagctaacttataggatgacccagcgctcgctggtggccgtcacctgctggaacccgcagaacaacaagtggtaccccttggcctcgctgcccttctatgaccgcgagttcttcagtgtagtgagtgcaggggacaacatctacctctcaggtgggatggaatcaggggtgacgctggctgatgtctggtgctacatgtccctgcttgataactggaacctcgtctccagaatgacagtcccccgctgtcggcacaatagcctcgtctacgatgggaagatttacaccctcgggggacttggcgtggcaggcaacgtggaccacgtggagaggtacgacaccatcaccaaccaatgggaggcggtggcccctctgcccaaggcagtacactctgctgcagccacagtgtgtggcggcaagatctacgtgtttggtggggtgaacgaggcaggccgagctgccggcgtcctccagtcttacgttcctcagaccaacacgtggagcttcatcgagtccccaatgattgacaacaagtatgcccccgctgtcacgctcaatggcttcgttttcatcctgggcggggcttatgccagagctaccaccatctacgaccctgagaaaggaaacattaaggcgggcccaaacatgaaccactctcgccagttctgcagtgctgtggtgcttgatggcaagatttatgcaactggaggtattgtcagcagtgaagggcccgcgctgggcaacatggaggcctacgagcccacaaccaacacatggaccctcctcccccacatgccctgccctgtgttcagacacggctgcgtcgtgataaagaaatatattcaaagcggctgatgacgccagacgcccaggccccgggaccgccccgagtccgcgcggcctgcgagcgccgtctggtgggaaagcgcggagcttccgacgcggggcggggcttccaggattgttagggttaaatgagctaatgtggaacagtgcctggcaaatagtaggtaccgtgttagtggaaaaacataaaataaaaagcagtaagaggaaggaagagtcagacaaaaattattttgaaggtacgggctatgctcgagttccaactcaaccacatgctcccatcccaacctttggacagacaattcagaccaccgtggatagaggcttgctgttctttgcagaaaacggggatcgcttcatatctctaaatatagaagatggcaagctcatgattcagatcaaaattggaaaactccaaaagcgtatgtggataaatgtggacgttcaaaacactataattgatggtgaagtatttgatttcagcacatattatctgggaggaattccaattgcaatcagggaaaggattgtatttgctggggctgctattaaaaagtaccgtgaactgagtggcttaaacaccagaaattattctctcacagttctggaggactaataggccatcatcaagggaatgtggacaagaagaacagagacagtgtgcagaagggggccgtctcctgcccaaccttgggaaacctgcctctgaatgggagttccacccagcagtcgaagaaaggagagaaatcctgggttcccatgtcctggatgaagtggattgggtatgaggcctatgtggggactgccagccttgagcagaaggtgccacatgtcagagttgcggtgaatactggtgtagttgtgatgtaggcttaggcatggaagttttgcggcattctggctacacaataacaagggaagacttactcgtggctggaaccctactagctcaaaatttattcacacatgaaacatggatgcaactggaggccattatcctaaatgaattaatggggaaacggaaaatcaaataccgcattttctcacgtataagtgagactggcacactgggtactcatgaacatggagatagaaacaatagatactgcggactcctaaaggaggcaggaagggagcagctgagtccacccaagctggggaaacctggggagcagactttcaccccagccctaagttggagactggttggtgccattttggctcctgtgggcaggagaatgtcccctctgccctccctgccaatatcgggtgaaccaggctttgcctagcggcgtatagttttcatcgtgtttcgccagcacttctttcgcgaggatatgattgcctttttccagttcgccctgcaccacaacgccctgcccttcacggaacagatccggcaaaatgccttccgaattgggatcgcgctgcacactacccggcatcaccatcccgccaacgcgcagacgctgaccgacttccggcatttgctgagtttcacgcttgccgtagagaatttcccccggcgtataaaagagatcgatattcgagcgcagcattatagcaccagaccgataaattgcccgatgttgcatcaccgagtgcacgaccaaaaccaccagcggaataacggtcatcaccaccgccagccagacaaaaaaggcgtaaccgcccattgcgaaaaattcattccaggaagcaaatgccggggtcatttacggcctcttttcagtatcagttcactcacccacggacggcgtttttccatcagcaaaatcatattacgcatccgcattagggttcagttgggcatacagacctttgatgaaaccataaaagagttaagtcgctttaaacaggagtattcacaggcagcctccgttttagtcggcgatattaaaaccttacttatggatagccaggataagtattttgaagcaacccaaacagtgtatgaatggtgtggtgttgcgacgcaattgctcgcagcgtatattttgctatttgatgagtacaatgagaagaaagcatccgcccagaaagacattctcattaaggtactggatgacggcatcacgaagctgaatgaagcgcaaaaatccctgctggtaagctcacaaagtttcaacaacgcttcctgggaaactgctggcgttagatagacatgaaagccagcatccgggccagggtggagcacccatttcgcatcatcaagcgacagttcggcttcgtgaaagccagatacaaggggttgctgaaaaacgataaccaactggcgatgttattcacgctggccaacctgtttcgggcggaccaaatgatacagggagaaggcgtaacgattaccaatctgcgtaatctgtttttcacccctgcggggatcaaagaagagaatatccagaagctcactattgataactaccgcgagcatgatcagaaactggcgcgtgaaggcggactggatttggtggtgctgggattaggtgcagatggtcatttttgtggcaatttgccgaatacgacccatttccatgagcaaaccgtggagttcccgatccagggagagatggttgatattgtggcgcatggcgagttgggcggcgacttttcgttagtgcctgacagctacgtgacgatggggccgaaaagcatcatggcggcgaaaaacttgctgataattgtcagcggcgcgggtaaagcgcaggcactgaaaaatgttctgcaaggtccggttaccgaagatgttccagcttccgtgttgcagctgcatccttcgctgatggtaatcgctgataaagccgctgccgcagaattagcactcggttaaacctggtgccatgtgacgtgcttctgctgcgaggccgctgcatcgtagacgaggccatgctcacgggggagtccgtgccacagatgaaggagcccatcgaagacctcagcccagaccgggtgctggacctccaggctgattcccggctgcacgtcatcttcgggggcaccaaggtggtgcagcacatccccccacagaaagccaccacgggcctgaagccggttgacagcgggtgcgtggcctacgtcctgcggaccggattcaacacatcccagggcaagctgctgcgcaccatcctcttcggggtcaagagggtgactgcgaacaacctggagaccttcatcttcatcctcttcctcctggtgtttgccatcgctgcagctgcctatgtatggattgaaggtaccaaggaccccagccggaaccgctacaagctgtttctggagtgcaccctgatcctcacctcggtcgtgcctcctgagctgcccatcgagctgtccctggccgtcaacacctccctcatcgccctggccaagctctacatgtactgcacagagcccttccggatcccctttgctggcaaggtcgaggtgtgctgctttgacaagacggggacgttgaccagtgacagcctggtggtgcgcggtgtggccgggctgagagacgggaaggaggtgaccccagtgtccagcatccctgtagaaacacaccgggccctggcctcgtgccactcgctcatgcagctggacgacggcaccctcgtgggtgaccctctagagaaggccatgctgacggccgtggactggacgctgaccaaagatgagaaagtattcccccgaagtattaaaactcaggggctgaaaattcaccagcgctttcattttgccagtgccctgaagcgaatgtccgtgcttgcctcgtatgagaagctgggctccaccgacctctgctacatcgcggccgtgaagggggcccccgaaactctgcactccatgttctcccagtgcccgcccgactaccaccacatccacaccgagatctcccgggaaggagcccgcgtcctggcgctggggtacaaggagctgggacacctcactcaccagcaggcccgggaggtcaagcgggaggccctggagtgcagcctcaagttcgtcggcttcattgtggtctcctgcccgctcaaggctgactccaaggccgtgatccgggagatccagaatgcgtcccaccgggtggtcatgatcacgggagacaacccgctcactgcatgccacgtggcccaggagctgcacttcattgaaaaggcccacacgctgatcctgcagcctccctccgagaaaggccggcagtgcgagtggcgctccattgacggcagcatcgtgctgcccctggcccggggctccccaaaggcactggccctggagtacgcactgtgcctcacaggcgacggcttggcccacctgcaggccaccgacccccagcagctgctccgcctcatcccccatgtgcaggtgttcgcccgtgtggctcccaagcagaaggagtttgtcatcaccagcctgaaggagctgggctacgtgaccctcatgtgtggggatggcaccaacgacgtgggcgccctgaagcatgctgacgtgggtgtggcgctcttggccaatgcccctgagcgggttgtcgagcggcgacggcggccccgggacagcccaaccctgagcaacagtggcatcagagccacctccaggacagccaagcagcggtcggggctccctccctccgaggagcagccaacctcccagagggaccgcctgagccaggtgctgcgagacctcgaggacgagagtacgcccattgtgaaactgggggatgccagcatcgcagcacccttcacctccaagctctcatccatccagtgcatctgccacgtgatcaagcagggccgctgcacgctggtgaccacgctacagatgttcaagatcctggcgctcaatgccctcatcctggcctacagccagagcgtcctctacctggagggagtcaagttcagtgacttccaggccaccctacaggggctgctgctggccggctgcttcctcttcatctcccgttccaaggaacggcccctgcccaacatcttcaacctgtacaccatcctcaccgtcatgctccagttctttgtgcacttcctgagccttgtctacctgtaccgtgaggcccaggcccggagccccgagaagcaggagcagttcgtggacttgtacaaggagtttgagccaagcctggtcaacagcaccgtctacatcatggccatggccatgcagatggccaccttcgccatcaattacaaaggcccgcccttcatggagagcctgcccgagaacaagcccctggtgtggagtctggcagtttcactcctggccatcattggcctgctcctcggctcctcgcccgacttcaacagccagtttggcctcgtggacatccctgtggaggtcagtggccctgtggaggtgaccctggggctcagcttgatgggtccctcctatggcagtgaccctgagctgggctgcaggtctccagctcaccatccctccctgccccgacagttcaagctggtcattgcccaggtcctgctcctggacttctgcctggcgctcctggccgaccgcgtcctgcagttcttcctggggaccccgaagctgaaagtgccttcctgaggctttggcggcgaagagagtgcaggggcttccttcatgcgtttcgacggcacgccgtgtcccaccgacaaagacggcatcatcatgtgtctgctggcggcggaaatcaccgctgtcaccggtaagaacccgcaggaacactacaacgaactggcaaaacgctttggtgcgccgagctacaaccgtttgcaggcagctgcgacttccgcacaaaaagcggcgctgtctaagctgtctccggaaatggtgagcgccagcaccctggcaggtgacccgatcaccgcgcgcctgactgctgctccgggcaacggtgcttctattggcggtctgaaagtgatgactgacaacggctggttcgccgcgcgtccgtcaggcacggaagacgcatataagatctactgcgaaagcttcctcggtgaagaacatcgcaagcagattgagaaagaagcggttgagattgttagcgaagttctgaaaaacgcgtaactggttctcagtgggtccctgtaggacacggggcacgggaaatcagcacagttactgctgtcaacagggatacctcagtgatgcatttgacttcttaggagatgtccgctgcggctccaaccatcaagttttggactcaggcaggaagaagaggaaaggatgctccaaggagctgcgcactggccacaccatggtccacctcactactcccctctgcaaggcctattacaggggccacttaacgatctgccttgccctgggtggctgcaccaaccagcccttctaccgcattgtggctgctcacaggtgtcccagggatggccgttttgtagagcagctgggctcctatgatccattgcccaacagtcatagagaaaaacttgctgtcctcaaactggactggatccatcattggattggctgtggggcccacctctctaagcctatggaaaagctacacctgctcagtgccttcttctcatcccaaagggaggccacagccgttgttcaggatgttgatgtcactgatgacaaggaagagcttcagaactgggctcatcaccctctgttccttagtgagatccccaggcacttcgtgtgcatactgacgtctgagaagctccgccgatgggtttactttttgtccaacgtgttctgtggaggaggacttgggttttgacattaatgacacctatcagttcaccagagacctctactctcagttccactgccagagaaaggtggtcacggactagcagctaatcattgttgatgaaggagtaaaacccgccgtcgaacgggtttacaccatcaaaaatacgatcgattattattaatgttgactgaaacgcacagtagatacctgaaggggaagggaagtcctaggcaacagagtgagaccctctctcaaaaacagataaagtggacagaaaataggtcagtaaggactaatcatttaagggacaagcccccagaagagtggctactagagtgggaggaggaaaagcagaaggagaaagagttgaagataggcgaggctgtggtcccagtgctgaattctgccaagcagtga

SEQ ID NO: 30088 - DNA, 822 bp, Homo sapiens
  SIMILAR (1)..(453): 921254mologous to Escherichia coli O157:H7 putative 3' terminal phosphate cyclase,accession number AE005564,Smith-Waterman Score=697.
atgcgtggagaagttctattagctggtgtgccgcgccatgttgctgagcgtgaaatcgctacactggcggggagtttttccctgcatgaacagaatattcataacctgccgcgcgaccaggggccgggtaataccgtctcgcttgaagtcgaaagtgaaaatatcaccgaacgcttttttgtcgtcggtgaaaagcgcgtcagtgccgaggtggttgcggcacagttggtgaaagaggtgaaacgctacctggcaagcacggcggcggtgggggaatatcttgctgaccaactggtgctaccgatggcgctggcgggcgcgggggaatttacggtcgcccatccctcatgccatctgctgaccaatatcgcggtggtggagcgtttcttgccggtgcggtttagtttgatagaaacagatggcgtaacgcggagcacggtcagtgaatccactttgattgccctgctggcagcaaggaagaacaaaatcctggaaatgaaaacgtctgagcccgatgctgatgagtcctgcctaaatgcccgactcgtggcctatgcctctgaccaggctcactcctctgtggaaaaggctggtttgatttcccttgtgaagatgaaatttctgcctgtggatgacaacttctcactccgaggggaagctcttcagaaggccatcgaggaagacaagcagcggggcttggtgcccgtctttaagcagtgtgcccagcggacaaagcgcagcggcggcgcgggcgcccaggccgaccccgccgacccccgcggaataagcggggccaggagccccggaaacccggcgccttaa

SEQ ID NO: 30089 - DNA, 2240 bp, Homo sapiens
  SIMILAR (1355)..(822): 991254mologous to Escherichia coli RhsB core protein with unique extension,accession number U00039,Smith-Waterman Score=933.
ttcggtttagaaaggataattttgaccaggtcgatgtatgtaacaggtttatagaaataataaccctgctgaaatgtgatataattttggttcagatagtcaagttgttctttcgtttcgacaccttcagcgacgatactgatcgaaagtttacgcgccagatccaatacacaatccagaattcgggttgattctgggtctgcgtttacgcggccaacgaaactgtgatcaattttgatataatcaatatgcaggtcatgaagataagaaagccctgagtagccagtaccgaaatcatccagtgcgatgacaaaaccattttcatgcagtatgttcaaccgctgaaccagactttcatcaacattcaataggtcacgctcggtgacttccagaacaaggtttaaatcgcggcgggtaaaactgtcacggaaatttaaacactcgtcgacaaacgtcggcgaaataatatgcgaagcgctaaaattaattccaatatgaaaaccttccggcaatttactcgcgatagcgttcatctgtctggcaacctcccacatagataaacccagggggtcgatgtctgagatcggattcaacggatactgataaaaattccatccccctttcagcccaatcggatcctgagtgatatatcgcccctgcagcgggtcataatagcggtggcggttgtaatacaggccggactcctcatcatactgctgccccggcaggcggataagctgctgcagctgatgcgggttctcttcattcagcaggttaccccattcatcgtattctggtaccacgctgttgtcccttccgtgcgggtccatctggttttgcatctgctccacggtcaggccgcacgatgccagccagcggcggctttcctcactcacccggtcagccaggatttcactttccagccggtcgagcatctgcaccagcaccggcgggaacaccacactgccaccgtcttcgccgccggactgctgaagggcatccgccaggctgcggcgctgcgttttcgccagctcaccggtggcagtttcgaccctgatgagtggcgtgaagctccccggctgataaatcgtctggatgcggctcctgtcgttctgtatcgtggtcagccggtcgccgtcccagccgtaccaggtcacttgcggtttccgtgacagcgacatccagcccgtcaggtcccgttcacgccgccacacccgttttgccaccctgcggcccagcgggtcgtaaagatagcgactttcgaccagcggctcttcatattgtgtccgcgtgtagtcgaccagccggtgctgactgtcgtaatggtaccggtgagtccgctcatcatccgtgcggaattgttgcagtagcgctactaccgggtgcaggcgaaccgacacggcacacaccggatgcacgggctggaatagctcatgcagcaggcagattttgcggctgatattttgtttctgctctgtggaaaggatatttccaccgctggtgggttcagctttgtctgactggctgataacaaacagcatcttatgccggtatgcttcgccaatcacctgacggtaaaaatgctcatcagtcgccagtgcccgatcatcagccttaatcagccacagaatcaggtcgagccggggaagttgttcgcggtacagcgcagcatactcggtatcgcgaacgccactttcgcccacgccgggcagatccacgatggtcataaagtgttctccaatctgcaggcgaaagcgtaaaggatcacgtgtacaggccgctacatcgctgaccggcgatacttcaccggcaaacagggcattgcaaaggctactctttcccgccccagttttacccatgatgccgatcactggctcgtagtgggttaactgatttatctgctgcaatatacgttcagatacccatagcggtagaccggaaagggagttctgtagtggctgcagaacttcaaaatttttcatcaccactccttcaggatgattacgtaaagtaaaagtcagtttgctcaggatatgtgtcggaacgtcctgctcatcaataattttggccgtatccagcatgatccggccatatttcatttccagcgtaacgaagcggttccactctggaccgttagcgcacaagaggtcaaaaaggatttcaccagtggtctcactacccagtagggcagaaagtttcgtctcaatttcattaactgaagtatccgggtccgagcgcat

SEQ ID NO: 30090 - DNA, 4770 bp, Homo sapiens; identical to SEQ ID NO: 4188
  SIMILAR (1525)..(2382): 981254mologous to Escherichia coli K12 putative general secretion pathway for protein export (GSP) (TYPE II TRAFFIC WARDEN ATPASE),accession number AE000409,Smith-Waterman Score=1388.

SEQ ID NO: 30091 - DNA, 2919 bp, Homo sapiens; identical to SEQ ID NO: 22592
  SIMILAR (1917)..(1399): 991254mologous to Escherichia coli ferrienterochelin receptor protein,accession number M13748,Smith-Waterman Score=924.

SEQ ID NO: 30092 - DNA, 1883 bp, Homo sapiens
  SIMILAR (379)..(218): 731254mologous to Escherichia coli K12 putative oxidoreductase,accession number AE000155,Smith-Waterman Score=209.
ctcaacacgttttcgaacaacaggcctatggccccaccggtaacggctgaaagcgtcagcaccatcaaccactgaccgacgattagcttacgcagttgcgctcgccctgcccccagcgttttgaggatcgccaccagatcgtagcgactgcgacagtaatgattcatcgctaccgtcaccgctgccactgccagcagcaaggtcaaaaagcgccgaaaagcaagcaagaaactgttgcgaagcgttcccatcgaatgccccagcggcgccttcgtccctgttccagaccgtaccagcgttgttcgggtttaagctgaggtaacaaccatttctcatagccgtcgagctggttctcgttgccgccgaatttataacgccagggtgacccgactccccggctgcacggctccggttttatcgacatccgccagattcatcatcagacgcggagccatctggaaggggttaaaaccggaatccggttcctgaatcacttctccggcaatccgcaaggtggcatcgcccacgtcaatggtgtcgcccgttttcaggttaagcagtgccatcaggcgtggggccagcaatacgctgcccgcctgcggtttcaggccagggggattagtttgcagatcgccatacatcgggtagatatcatccaccgctttgacgttcgccagctgcggtgtgtcgcctgcaaaggtcattgtggcgaaagtcagctgcttgccgactttcaggccgcgcttttgcgcttcctccagccacgcttgcggcacttcgcgtgaactgcgcaacgcccgatcgcccgccataaactcacggctttgctggcttaagcccttctccatgcgatcgctgatattgcccagcgccagcacgcaggccaccgccaggtgcccgttcaccagccgtaagcagcggtcgcagcgtgccgccagttgcaggtcgtgggtcaccataatcaacgtggtgccatgttcacggttgaggaaaaacagcaggtcggcaattttatcgcccgtctggcggtcaaggttgccggtgggttcgtcggcaaacagcacatcaggtcgaccattaaaggctcgtgccagcgccactcgttgctgttcaccgccggaaagctgtgccggaagatgatccagacgtttacccagccctaactgttcgagcagcgcttcgccccgtacagcggacgcgataatcagcagattaagcgcagcatctatttgctggcagagcgcggcaagctggcggaactgcgtttgctggtgatccctggccaggtggattatttgcaacacatcgaagaactggcggcgtttatcaagggactcggcgatgttccggtacgcctgaacgcgtttcatgcccacggcgtgtatggcgaggcgcaaagggcctacggttcggcacagacttgtaggcctgataagacgcgtcaagcgtcgcatcaggcattgtgcgccaactgccggatgcggcgtaaacgccttatccggcctacggttcggcacaaacctgtaggcatgataagacgcgacaagcgtcgcatcaggcaacggctgccggatgcggcgtgaacgccctatccgacgcggttggcgcaacacttcgttgatttgcggatcgtccagcggacccgaaatgtgatagcgcaaaatggagactttgctccacagcggccccagcactttactggcggcaaacactgccgcgccaacaataaggttaaccgcaaaagccgcagccacgcccaccgtcgcagaaatctctggtgcgacaaccgcttccatattcaggtcgcgacgtaccagatttaccgaccctttcatggcgatatccgcctccaggccatccaccagcgtgtcgtcggtgtgcat

SEQ ID NO: 30093 - DNA, 1788 bp, Homo sapiens
  SIMILAR (976)..(1581): 911254mologous to Escherichia coli O157:H7 putative 3' terminal phosphate cyclase,accession number AE005564,Smith-Waterman Score=922.
atggcggttgtaatacaggccggactcctcatcatactgctgccccggcagccggataagctgctgcagctgatgcgggttctcttcattcagcaggttgccccattcatcatattctgcgcaccacgctgttgccccttccgtgctgatgagcgccagcggcaggccgcgatggtcgcagtggtgatgacaggtttcaccctgcgccctgaccgggcggcgctggaaatcgccagccgcgtctataacgggaacgccacgccgcgtcatttcttgtggtgggccaacccggcagtgaaagggggggaagggcatcagagcgtcttcccgccggatgtaacggcggtgtttgatcacggcaaacgggccgtctccgctttccccatcgctaccggcacttactacaaagtggactactccgctggagtggacatttctcgctataaaaatgtgcctgttccaacctcatatatggccgaaaaatcgcagtacgattttgtcggcgcgtggtgtcacgatgaagatggcgagtttgctatgagacgagaacttgccatcgaattttcccgcgtcaccgaatcagcggcgctggctggctacaaatggttaggacgcggcgataaaaacaccgcggacggcgcggcggtaaacgccatgcgtattatgctcaaccaggcgggcagcgtattgctggccccacgcctgatggcactgcttaacctgaaaacgggcgacaccattgacgtgggcgatgccaccttgcggattgccggagaagtgattcaggaaccggattccggttttaaccccttccagatggctccgcgtctgatgatgaatctggcggatgtcgataaaaccggagccgtgcagccggggagtcgggtcacctggcgttataaattcggcggcaacgagaaccagctcgacggctatgagaaatggttaggtggcataggccagtggaggaggcatcagactctagagggtccccgggtgggggaaatagggattaatcagcgaaccacgctgttacgccacggtttttaccctgccggaggcggtgtggtggcaacggaagtctcgcccgtggcatcgtttaacaccttgcaacttggcgagcgcgggaacattgtgcagatgcgtggagaagttctattagctggtgtgccgcgccatgttgctgagcgtgaaatcgctacactggcggggagtttttccctgcatgaacagaatattcataacctgccgcgcgaccaggggccgggtaataccgtctcgcttgaagtcgaaagtgaaaatatcaccgaacgcttttttgtcgtcggtgaaaagcgcgtcagtgccgaggtggttgcggcacagttggtgaaagaggtgaaacgctacctggcaagcacggcggcggtgggggaatatcttgctgaccaactggtgctaccgatggcgctggcgggcgcgggggaatttacggtcgcccatccctcatgccatctgctgaccaatatcgcggtggtggagcgtttcttgccggtgcggtttagtttgatagaaacagatggcgtaacgcggcaattgctgggcgtgttgtaccgcatcctggcgatgggccacgccgagtttctgatacagattgcggatatgcgttttgatggtggttgccgcgacttccagttctccggcaatttgctcattgctgtaaccagagtagatcagccccagtacctgccattcacgttgcgtcagcgggctggtgcggatcagttcaggtacttcaggatgatttag

SEQ ID NO: 30094 - DNA, 1434 bp, Homo sapiens; identical to SEQ ID NO: 27830
  SIMILAR (675)..(22): 901254mologous to Escherichia coli K12 putative oxidoreductase,accession number AE000389,Smith-Waterman Score=984.

SEQ ID NO: 30095 - DNA, 954 bp, Homo sapiens
  SIMILAR (1)..(345): 1001254mologous to Escherichia coli O157:H7 putative ATP- binding component of ABC transporter,accession number AE005655,Smith-Waterman Score=584.
atgatgctggggcgcgagctggatacccacgcgctacagcgtgccgggcgaacattgttgagcgacaaacccgttgccgcgttcaaaaattacggcaaaaaaggaacgatcgcaccgtttgatctcgaagtacgccccggcgagatcgtcggtctggctggattgctgggatcaggacgtaccgaaaccgccgaagtgatcttcggtatcaaacctgctgacagcggcacggcgttgatcaaaggcaaaccgcaaaacctgcgatcgccacatcaggcttcggtactgggcattggcttctgcccggaagacaggaaaaccgatggcatcatcgctgccgcctcgccgctggttgaagcggtttatttcgatacgccctggctgccgcgggttaatcttatcgccagccaaattcagcgtggctatggtggttgggtattgacgatgcgttgtctgggacatgaaaaggtcgcacaactggagcgcaaaatcggcactccgctgcggctgtacagtggctatagcgacagtaatcaggacaatccgctgctttatttctgtcagcatcgttggcgagtaaccccgcgcgtcgaatttagccacgaatactggatgcgtcacgcgctgacgctggcgaaacgtgcctgggatgagcgggaagtgccggtcggcgcggtattagtgcataaccatcgggtaatcggcgaaggctggaaccgcccgattggtcgccatgatcccaccgcacatgcagaaatcatggccctgcggcagggtggtctggtgatgcaaaattatcgtctgatcgacgccacgttgtatgtcacgcttgaaccatgtgtaatctgtgccggagcgatgatccacagtcgcattgtcgcgtggtctttggtgcgcgtgacgcgaaaactggcgctgcggatcttaatgattctcgatatccggggcctttaa

SEQ ID NO: 30096 - DNA, 3294 bp, Homo sapiens
  SIMILAR (2433)..(1651): 921254mologous to Escherichia coli o588,accession number L10328,Smith-Waterman Score=1246.
tcatgggattgctaggtcagatgaagttgcccatttattacgccagtactgtctgtgaaacaccttatgagcatactccgggtaacagtaatgaatcgataggctgatccattcggcaaactcacgtacaaattgttcgaaggtcatgcctggccattcgacatcaggttcccagcactgccattcgggttggtattgtgaaagggaattttgcgtcgtaagcgggagcgcaacccagtaaaactcttcgatgacatcggtgtacaactcgcgcactgacatctggtgtgcttgctgtgcgcctgtcagcgggttgtaattttcctgaattggtccatcggcggttaaccctttggcgtgccggaagaacgtatccgccagcttcagggcatcatcacgataaccgtaacgctccatccctttcagaccaaaccagaactgatccacccatacgcgcccacgccagtagatatcagcgccaaaagccggattggttaacgccgccgttcccagcgggacaaaggtgttgaactctttaggatcgagcatcaccttcaccaccgcgtcggcattggcctgcgttgccgcaccgttaaacagcggcgaccagccttccggccctttaccgcgctcaacaatcggtttgcccgcgcagccgttcgccagtggtttatcttcaatacgtacgtcatagtagaactgggtagtcgggtcgaacatacaggtgttgatgtagtccgcgagctgctgtgccaactggcgatagcgtttggcctcttctggcttaccgaggatggttgccatctccgccagataatggttatcgctgtacatatagctggcctgatccaccgactcctgcaatagcgagtagcccagcaacgttccgtcctgactgcggttttcggcgaatttcaccgtccagtcgctacgtttgccgccattagcgacatatttatccaactgttcgttgaggtccacgaagggcaaatcgttatttgcgatatccatgaagcgtatcggtttatctgcaataacgcggtcaaaaaagtggttctcaaagtcaccatcgaagatggttatttccataacaaataacaacctactcattttcggagatgtgttatgtctgataccaaacgtaatacaatcggcaaattcggcttgctctcgctgacttttgccgccgtttacagctttaacaacgttatcaataataatattgagcttggactggcctcggcaccgatgtttttcctcgcgacgattttttattttattcccttctgtcagagcgaacaggttccgggcatgatcgagcgctacactgctgccatcactggtgcagaaggcaagatccaccgtctggaagactggggccgccgtcagctggcttacccgatcaacaaactgcacaaagcacactacgttctgatgaatgttgaagctccgcaggaagtgatcgatgagctggaaactaccttccgcttcaacgatgccgttatccgcagcatggttatgcgtaccaagcacgctgttaccgaagcatctccgatggttaaagcgaaagacgagcgccgtgagcgtcgcgatgatttcgcaaacgaaaccgctgatgatgctgaagctggggattctgaagagtaatttctggccgttacgtaccacgcacagcccgccgccatcctgaatcacctgattgaccgccagcgccatctcttcggcactgcgaccgatcaccacaatattatggctgtcatggctgaccgtcgcagccagcgcaccttcattcagtccaaagccgccaagcaaaccacaagccggagccagccgttgcccgtaacgctcaagtacggcaataaagctcacatcatcgcgatcaaaaccattttcgctgtagacgctggagtgggagtgcgtaatcaattcgttatggatgacgtcaatgacccgatagcgttttccgggcgtaaattgcagggcaaagtcgctggcggaaactggctggcgggcaatggtgttgccatatggcggagcggattgtgccagtctcgccgactcttccgcctgtaaggtttgcgcatcaatcggctcgcctttcaccagtacctgctgcaccgtgaccttacgcgcatcgctcaacaggacgatatcggcctgcttgccgggtgccagtaagccgaggtgattcagaccaaagtggcgcgccgtcgaccagctggcgacgcgatatgccacatgcagcggcacattgtgttgttcgatcaggcggcgaattaaggcatcgatgtgtccttcatgggcgatctcccacgggttacggtcatcggtacagagcatgcattgcgggctgttaaattcgttgatcaaatcgttgcttgaaccagactttgagcctttagtgagtgacacaaaggagagggcaagatccatgctggtgaggaaagtggcaacagaggcgggggccgaaacagtgggattggccaagagcggagaacaagcggggctgcgggaccgggagagggataccccctgtgctgagcccagcgccccttctccgtgttccaagccgaagttggcttcccggtgacatcccccagcggagaggctggacatgtgctccctttggggccggtgcgctttctccagccccagcttggtgaagatgcccacgagcaccatgacggccaccaccccgcagatgatgtagacgatcaggttggtcttgtccttggtggggtcgtgcaaggggtcgtccttgcgggcggggggcttgccggtgttgagccagagcggcgtgtcgtagttggtgcaggtgctttggttcagtcgccgcttcttaaacgtgcagcagaaccggaagccacaagtcccgcagcagaagatgaagtcgcccgagctgcagttgaacggcgggtcccactggcccatgacatcgaagtagccccggcagaagtccggcgtgggcgcccgggtcgggggcgcgtccgatgcctcagcgccctcgctggcctctccggaggcggccccggagcggttgccccccgccagcagcaacacgccgcccagttgcgccagctgcccgtgtcccgctcgctcctgcgcccggcacacgcgggcgcacagctcggtgaggaagcaaccgaggagcagccgaaggacgcggcgcatggtgtctcccagcccgggctcggccgctcggccgccgctggagcctctgcggccgcctctcgaggcgcggccgaagctgccgaggctgctgccgggagctgcgagccgccgcgggccgcacat

SEQ ID NO: 30097 - DNA, 1392 bp, Homo sapiens
  SIMILAR (898)..(1389): 981254mologous to Escherichia coli YFHC-ECOLI protein,accession number D64044,Smith-Waterman Score=849.
atgaggatcatcgataacttagaacagttccgccagatttacgcctctggcaagaagtggcaacgctgcgttgaagcgattgaaaatatcgacaacattcagcctggcgtcgcccactccatcggtgactcattgacttaccgcgtggagacagactccgcgaccgatgcgctatttaccgggcatcgacgctattttgaagtgcattactacctgcaagggcagcaaaaaattgaatatgcgccgaaagagacattacaggctgcggagaaaccgttgaggtccacgaagggcaaatcgttatttgcgatatccatgaagcgtatcggtttatctgcaataacgcggtcaaaaaagtggttctcaaagtcaccatcgaagatgtgtatttccataacaaataacaactacggcggcaaaaggagtttgcgccaccgctaccctactcattttcggagatgtgttatgtctgataccaaacgtaatacaatcggcaaattcggcttgctctcgctgacttttgccgccgtttacagctttaacaacgttatcaataataatattgagcttggactggctctggttcaggagcgattaaccacctacctgttaagttccgatgctgatatctggttgattaccggctctccgcagccgctggttgaagcggtttatttcgatacgccctggctgccgcgggttaatcttatcgccagccaaattcagcgtggctatggtggttgggtattgacgatgcgttgtctgggacatgaaaaggtcgcacaactggagcgcaaaatcggcactccgctgcggctgtacagtggctatagcgacagtaatcaggacaatccgctgctttatttctgtcagcatcgttggcgagtaaccccgcgcgtcgaatttagccacgaatactggatgcgtcacgcgctgacgctggcgaaacgtgcctgggatgagcgggaagtgccggtcggcgcggtattagtgcataacaatcgggtaatcggcgaaggctggaaccgcccgattggtcgccatgatcccaccgcacatgcagaaatcatggccctgcggcagggtggtctggtgatgcaaaattatcgtctgatcgacgccacgttgtatgtcacgcttgaaccatgtgtaatgtgtgccggagcgatgatccacagtcgcattggtcgcgtggtctttggtgcgcgtgacgcgaaaactggcgctgcgggatctttaatggatgtgctgcatcatccgggtatgaatcaccgagtggaaatttacggaggaatactggcggatgagtgcgcggcgttgctcagtgacttctttcgcatgcgccgccaagaaattaaagcgcagaaaaaagcgcaatcctcgacggattaa

SEQ ID NO: 30098 - DNA, 380 bp, Homo sapiens
  SIMILAR (1)..(216): 1001254mologous to Escherichia coli Transcriptional activator protein copR,accession number D90699,Smith-Waterman Score=372.
atgaaactgttgattgtcgaagatgaaaagaaaaccggagaatacttgaccaaagggttaaccgaagccggttttgtggtcgatttggccgacaacgggctgaatggctaccatctggcgatgaccggtgattatgatctgataatcctcgatattatgctgccggacgtgaacggctgggatatcgtgcgcatgttacgctccgccaataaagggacatcaactgaggatgagaagctgaagagcaattttgttctaagacattggtacaacctgagcgatggcgcgatggaagatgctctgtacgaaatcgcctccatgcgtctgtttgcccggttatccctggatagcgccttgccggaggctctagatgaccaaag

SEQ ID NO: 30099 - DNA, 3258 bp, Homo sapiens; identical to SEQ ID NO: 15912
  SIMILAR (1885)..(2469): 921254mologous to Escherichia coli K12 aconitate hydrase B,accession number AE000121,Smith-Waterman Score=907.

SEQ ID NO: 30100 - DNA, 2858 bp, Homo sapiens
  SIMILAR (1136)..(1792): 931254mologous to Escherichia coli Transcriptional activator protein copR,accession number D90699,Smith-Waterman Score=1012.
acaaaaaaaggcgtatatttgcgctgtgaatggttgacaaaagatgaaatagaataccttttgtcagctgacacttcctcttatcttattgataaaatggatttatgttcctacgtgcgcccccagcccgcaacaatgatcaacatgccgcaaagcgcaatcaacgcacccgtccagtcataaagagtcagtttcacgccatccacaacgcgcagccacatcaacgccgtgcagacataaacgccaccataagccgcgtaaacacgcccactcgccgctggatgcaacgttaacaaccagacaaacagcgccagtgaaatccccgccggaagcaacagccagatactggcgtttcgttttaaccacaaccagggcagaaagcatccaataatttcacacagcgcagtagcaaaaaatagtaacgttgttttaatcatctttgtctcttattgacatcatgtatagttatagggcgacataatatcatcaatataaacaccctcctggtacgttttgcgtccgcagtggatggtgtagaatcacctttaatcattcatacagggaatgaattatgaaaatcactctcagcaaacgaatcggcctgctcgctattctgctgccttgcgcactggcattgaacacaactgttcatgccgaaactaacaaactggtgattgatttgggcaacggggcacaaagccgccagcacgccgctatggaaaaagagcaatggaatgacacgcgcaatctgcgccagaaagtgaataaacgcactgaaaaagagtgggataaagccgacgccgcttttgataaccgcgataaatgtgagcaaagcgccaacatcaatgcctactgggagcccaatactttgcgctgcctggaccgtcgaactggccgcctacgcccgctggagcgtgaagatttacgctatgtacatcaactcgacaataacgccagtgtgatgcgttactggtttgaggaaccctacgaagcctttgttgaactctctgatctgtatgataagcatattcacgatcagagcgaacggcgctttgtggtggaatgtgacggcgaaaaagccggtctggtggagctggtggaaattaaccatgttcatcgccgcgcagaatttcagataattatctccccggagtatcaccggaaacgtctggcaacccggttaaccgaagccggttttgtggtcgatttggccgacaacgggctgaatggctaccatctggcgatgaccggtgattatgatctgataatcctcgatattatgctgccggacgtgaacggctgggatatcgtgcgcatgttacgctccgccaataaagggatgccgattctgttgcttaccgcgcttggcaccattgaacatcgcgtcaaggggctggagttgggggcagatgactacctggtgaagccattcgcttttgctgaactgctggcgcgggtgcgcacattactgcggcgcggggcggcggtgattatcgaaagtcagtttcaggttgccgatttgatggtcgatctcgtcagccgcaaagtcacccgcagcggcacgcgcatcactttgaccagtaaagagtttactctgctggagttcttccttcgccatcagggcgaagtgctgccccgctcgcttatcgcctcgcaggtattggacatgaattttgacagcgataccaatgctattgatgtggcggtgaagcggctgcgcggcaaaatcgacaacgactttgagccgaagctaattcagaccgtgcgcggcgtgggttacatgcttgaggtaggcggtaatagaaaagaaatcgaggcaaaaatgagcaaagtcagactcgcaattatcggtaacggtatggtcggccatcgctttatcgaagatcttcttgataaatctgatgcggccaactttgatattaccgttttctgtgaagaaccgcgcatcgcttatgaccgcgtacacctctcgtcttacttctctcaccacaccgccgaagagctgtcgctggtgcgcgaaggcttctacgagaaacacggcatcaaagttctggtcggcgaacgcgctatcaccatcaaccgtcaggagaaggtgattcactccagcgccggacgtaccgttttttatgacaagctgatcatggcaaccggttcctacccgtggatcccgccaatcaaaggttctgatactcaggactgctttgtctatcgcactattgaagacctcaacgccattgaatcctgcgcccgtcgcagcaaacgcggtgccgttgttggtggcggcctgttagctcaagatgacaactcaaaaaggcagccagaagtagacatacccatgcctcaatttccattctcccctcactttccacccactcccaatttctttgcacgtttccccatgaaagagaagaaagggcagacagatgcgtgctgcagaattgccacacgccaaagcccacttgcactctggcaggcacactatgtcaaagacaagttgatggcgaagccatccggtgcctgggtcgttgaactgggtaccgatggttgacgcgcggcgatgtgattcttgatacgccgctgggcgaaagtaggcgggaaaaggcttatttgtaaaagagcttggaagtcgcgctcctcgaaaatcgcgccgatattcgccgtaccactcatgaaagatgtgcccgttgaattcccgcaagggtctgggactgggcaactatttgtgagcgggaagaacctcgcgaagcccttgtttccccaaaactatgacagtctggatgcgttaccggcaggcagtatcgtcgggacgtccagtttacgtcgccagtgcctactggctgaacgccgtccggatctga

SEQ ID NO: 30101 - DNA, 618 bp, Homo sapiens
  SIMILAR (49)..(585): 1001254mologous to Escherichia coli FixA protein,accession number D90812,Smith-Waterman Score=894.
atgaattgtgatgagaacatgaattctagtgtctgctgcctgcaggtccgcgggccgcacagcctgtatttggtgcaggatgcgcaacttgaacatgcactgcctctcgataccgcaaaagcgctggcggcagcaattgaaaagatcggcttcgatttactgatctttggtgaaggttccggcgacctttatgcccagcaggttggcttgctggtcggagaaattctgcaacttccggtgattaatgcagtgagtgctattcagcgtcagggcaatacactggtgattgaacgcacgcttgaagatgatgttgaagttattgaactctctgttccagccgtgctctgcgtcacctccgatattaacgtgccacgcattccttcgatgaaagccattctcggcgcgggtaaaaaaccggtaaatcagtggcaggcaagtgatattgactggagccagagcgcgccacttgctgaactggtcggcattcgcgtaccgccgcaaacagaacgtaagcacatcattatcgataacgattcgccggaggccattgccgagctggcggaacatctgaagaaagccctgaactgaagcctacggagaagaaacgatgagtcaatt

SEQ ID NO: 30102 - DNA, 1716 bp, Homo sapiens
  SIMILAR (544)..(990): 951254mologous to Escherichia coli K12 putative ATP-binding component of a transport system,accession number AE000313,Smith- Waterman Score=785.
atgagcacgatcgcgagctttacgcagttcgaaaatagtacgacgggtcaccacttcacggcggtgacgaacaaacgccgcgatgatgtctttcaggttcatgatcttcggctgaccatggtgcaatgccaccatgttgataccgaaagaaacctgcaactgggtctgggagtagaggttgttgagcacaacttcaccgaccgcatcgcgtttcacttcaatcacgatgcgcataccgtctttgtcagactcgtcacgcagcgcgctgatgcctttcacgcgtttttcttttaccagttccgcaatcttctcgatcaggcgcgcttttgttacctgatacggaatttcgtggacgataatggtttcacgaccggttttgggcgtcaactttcactttttgcgccaagcgccggatatacacccttgcccgcgacccgtaccggtaagcttttttcaattcccccaacaaccgttaaagatttgccccccccggggaaaatcccgccccccggaatgttttcctttaaccccttcaaaggggaggggttggatggtcagacgctgaatttacgtgttatcggcggagattatcattacacagcagcggggcaactggctcaacatgaagacacttctacggtgcaacttagcggcgatctgtttagcgggcgctggggcacggatggcgagtggatgcttgggattgttggtggctacagcgataaccagggcgacagccgctcgaatatgaccggaactcgcgccgataaccagaaccacggttatgccgttgggctgacatcaagctggtttcagcacggtaatcagaagcaaggggcctggctggatagctggctgcaatacgcgtggtttagcaatgatgtttccgaacaagaagatggcacagatcattaccactcgtcggggattatcgcctcgctggaggcggggtatcagtggttaccggggcgtgcagccttccgccctccgcctggggcccaagggagcaaagccttgaagacggcaatgacagggtcctcgtgggtggtcaccaccaacacgctgcggaacttgtcaaacagcatgagcagcttggagcgccgcgtgttctcgttgtacataaatctcttcaggcctttgttgaagaagcactgctgggaattaacttctgactttgccacaagcctgaacaaaagctggttgttaaaggccaaggaagcaactaacagtggaccatatacagagtgctctagtcaccatgcggatcgcatccgctgtccggtgcaaatcatctgcgccagtgatgatctgctggtgccaacagcatgttccagtgaacttcatgccgccctgcccgatagccagaaaatggtgatgccctatggcggacacgcctgcaacgtgaccgatcccgaaacgtttaatgctctgttactcaacgggcttgccagcctgttacatcaccgtgaagccgccctagaccctggggtcggtgcaaggatccttggggccaagcagtggccccaagacagcgggggcgccttcttcccgtccgccttccccaagcgcccgccgcccacggacaacagagaccaggtggacgctgctgcgatcaaaggactattggctcataacgcggaaagtggggctggggaacctccaagacgggggaagggccggcagtctgtcatgagggggctacggagcggcaactaa

SEQ ID NO: 30103 - DNA, 1815 bp, Homo sapiens
  SIMILAR (1)..(591): 1001254mologous to Escherichia coli proline-tRNA ligase,accession number U70214,Smith-Waterman Score=1010.
atgaacaacgccggtgcgatcgaggtgtcgatgccggtggttcagccagccgatttgtggcaagagagtggtcgttgggaacagtacggtccggaactgctgcgttttgttgaccgtggcgagcgtccgttcgtactcggcccaactcatgaagaagttatcactgacctgattcgtaacgagcttagctcttacaaacagctgccgctgaacttctatcagatccagaccaagttccgcgacgaagtgcgtccgcgtttcggcgtcatgcgttcccgcgaattcctgatgaaagatgcttactctttccatacttctcaggaatccctgcaggaaacctacgatgcaatgtatgcggcctacagcaaaatcttcagccgcatggggctggatttccgcgccgtacaagccgacaccggttctatcggcgggagcgcctctcacgaattccaggtgctggcgcagagcggtgaagacgatgtggtcttctccgacacctctgactatgcagcgaacattgaactggcagaagctatcgcgccgaaagaaccgcgcgctgctgctacccaggaaatgacgctggttgatacggacggaggatccccgacaatttataaagcgacggttaatgtggccgatctcgaccgcaaccagtttctcgatgcctctctgacgctggcgcgccatccttcagaaacccaggagcgtatgatgctgcgcttgctggcgtggctgaaatatgctgatgaacgtctgcaatttacccgtggtttgtgtgccgatgatgagccggaagcgtggctgcgtaacgatcacctgggcattgatttgtggattgagctggggctgccggatgagcggcggattaagaaagcctgcacccaggccgcagaagtggcgctgtttacctataatagtcgggcggcgcaaatctggtggcagcaaaatcagagcaaatgtgtgcagtttgccaatctttccgtctggtatctggacgatgaacaactggcgaaagtaagcgcctttgccgatcgtaccatgacgctgcaggcaacgattcatgatggcgtgatctggttatcggatgataaaaataatctggaactgtctgcagtgaactccgttgatcccccggtgcaaatcatctgcgccagtgatgatctgctggtgccaacagcatgttccagtgaacttcatgccgccctgcccgatagccagaaaatggtgatgccctatggcggacacgcctgcaacgtgaccgatcccgaaacgtttaatgctctgttactcaacgggcttgccagcctgttacatcaccgaattgctatgaacgaagccgttagcccaggtgcgcttagcaccctgttcaccgatgcccgcactcacaacggctggcgggagacacccgtcagcgatgagacgttacgggagatttatgccctgatgaaatgggggccgacatcagctaactgttctccggcacggatcgtgtttacccgcacggcagaaggaaaagaacgtctgcgcccggcactttccagcggcaatctgcaaaaaaccctgaccgcgcccgtcaccgctatcgtcgcctgggacagtgaattttatgaacggttaccactactgtttccccacggtgatgcccgcagttggtttacctccagcccacaacttgccgaagaaacagcgtttcgcaacagttccatgcaggcgggctatctgatcgtcgcctgccgggcgctgggacattatacgaactctagctcggtacccggaaaagaagcaggcaagtttaggagagagaagataaactaa

SEQ ID NO: 30104 - DNA, 777 bp, Homo sapiens
  SIMILAR (169)..(711): 281254mologous to Mycobacterium avium subsp. paratuberculosis putative transposase,accession number AF286339,Smith-Waterman Score=179.
atgttcaacacagttgcagaatgtgtggaacgcatagccaaaagtgcccatcacatcgacaaaaactccgacctcatggacatttggttgcttgatgcttatgtgctgggagtagggaatgggaagccaatccgttgttcccgggacggggccactgtaccgattcaccgcctgaaacccgtccacaccaacttgttcagcgtgtttgagcgttacggcctgccggaccggatgaccatggataacggctcaccgtggggcgacaccaccggcacctggacggcgctggagctgtggctgatgcgcctgggtatccgggtggggcactcccggccttatcatccgcagacgcaggggaagctggagcgttttcaccgcagcctgaaggcggaagtgctgcagggaaaatggttcgcagacagcggtgaactgcagcgcgccttcgaccactggcggacggtctataaccttgaacgcccgcacgaggcgctggatatggcggtaccgggctcgcggtatcagccgtcagcgcggcagtacagcggcaacacaacgcccccggaatacgatgaaggggtgatggtcaggaaagtggatatcagcggaaagctgagcgtgaaaggggtaagtctgagcgcaggccaggcgttcaggggagaacgggtcgggctgaaggagatgcaggaagacggcagctacgaggtgtggtggtacagcacgaaagtgggggtgatcgacctgaagaaaaagtcgatcaccatgggtaaaggatgttaa

SEQ ID NO: 30105 - DNA, 2768 bp, Homo sapiens
  SIMILAR (1354)..(1509): 171254mologous to Escherichia coli No definition line found,accession number U00039,Smith-Waterman Score=48.
atggataaattcctcaacacatacaccctcccaagactaaaccgggaagaagttgaatctctgaatagaccagtaacagcctcgggacttgaggtgataattaatagcttaccaatcaaaaaaagtccaggaccagatggattcacagctgcattctatcagaggtacaaggaggacgctggggaaagagaaggagaggggggaaatcagcaggtggctgttagaggcaaaagaaagaccacagagaggaaaaagaaactaggagaagacgtcaaagtaaaagagagcaaaaacagtggtgcatatgaagtcaaacagcatcgattcttccgttctttagactggaacagtttgctgagacagaaggcagaatttattccccaactggaatctgaggatgacacaagttattttgatactcggtctgagaagtatcatcatatggaaacggaggaagaagatgacacaaatgatgaagactttaatgtggaaataaggcagttttcttcatgttcacacaggttttcaaaagctgcagaggtatccactcgattgctttccactcgggttaccgaaatcgaagggtggttgatcgttcagagaaatcagaagctgctgcagagtaatctgaagcaacgtagcggcgaaccattgatactggatgatgattctcacgtgccaccggaattacgtgcggggtatcgcttgctgaagaatgccggttgcttaccgccagaacttgagcaacggagagaagcaattcagcttctggatattctcaaaggtatccgtcacgatgatccgcaatatcaagaggttagccgtcgattgtcattactggaattgaagctgcgacaagctggattgagtaccgattttttacgcggcgattatgctggcgcccagcagggtaatcggcacgcccagtttcaaattgcatgggattataacgctggcgaaggggtggtccaggactataagcaagcgatgtactggtatctgaaggctgccgctcaggggagcgtcggcgcttacgtcaacatcggttatatgtataaacacggacaaggcgttgagaaagattatcaggctgcctttgaatggtttacgaaagccgctgaatgcaatgacgccactgcctggtataacctggccattatgtatcattacggagaaggaagacctgtcgatctccgacaggctctcgacctgtatcgtaaagttcagtcatccggaaccagagatgtcagtcaggaaattcgtgagactgaatatttacggggttatgtggacaataaaggcatctcttttaaatcctgcttactgaacggttctgttgaagtcgccccgcgtgccggactggcggatgcgatttgcgatctggtttccaccggtgccacgctggaagctaacggcctgcgcgaagtcgaagttatctatcgctcgaaagcctgcctgattcaacgcgatggcgaaatggaagaatccaaacagcaactgatcgacaaactgctgacccgtattcagggtgtgatccaggcgcgcgaatcaaaatacatcatgatgcacgcaccgaccgaacgtctggatgaagtcatcgccctgctgccaggtgccgaacgcccaactattctgccgctggcgggtgaccaacagcgcgtagcgatgcacatgcgacgggaaaaagctgataatgatatggctccgctccagcaaaagctggtggtggtgagcaacaagcgggaaaaaccgattaacgatcgccgttcgcgccagcaggaagtgactccggcaggcaccagtatacgctatgaggcaagcttcaaaccgcaaagcggaggaatggagcagacgtttcgcctcgacgcccagcagtaccacgccctgacagtgggcgataaaggccagcagttcaaacacgccgaaaaggaaaatccgtaccttttcggcggtggtcatctgcgggccatctttcggtaaagtggatttcaatagcgccagctgcataccatgcattggggcgcgtcgaacaggccgaacatccatggcgcaaccatctacgcgagcacagttgcgaactcccattcccccgccgattcacacgggctctggtcgggtctggcatgaagcccaggcttaacggtgagcgcgtattgatttgcgctgccgggaaacatcccgctgatgcatttactggtttaattaacgaactggaaagcgccgggcaaacggtagtgctggtagtacgtaacgatgacgtgcttggtgtcattgcgttacaggataccctgcgcgccgatgctgcaactgccatcagtgaactgaacgcgctgggcgtcaaaggggtgatcctcaccggcgataatccacgcgcagcggcggcaattgccggggagctggggctggagtttaaagcgggcctgttgccggaagataaagtcaaagcggtgaccgagctgaatcaacatgcgccgctggcgatggtcggtgacggtattaacgacgcgccagcgatgaaagctgccgccatcgggattgcaatgggtagcggcacagacgtggcgctggaaaccgccgacgcagcattaacccataaccacctgcgcggcctggtgcaaatgattgaactggcacgcgccactcacgccaatatccgccagaacatcactattgcgctggggctgaaagggatcttcctcgtcaccacgctgttagggatgaccgggttgtggctggcagtgctggcagatacgggggcgacggtgctg

SEQ ID NO: 30106 - DNA, 9231 bp, Homo sapiens
  SIMILAR (8453)..(8400): 501254mologous to Escherichia coli Aldehyde dehydrogenase, mitochondrial 3 precursor (EC 1.2.1.3),accession number D90776,Smith-Waterman Score=40.
ctataagattacgcgatggggggcaacaaattcggtgaccccggcggggaaacaacattggggctcccgaagaagcgtatacggacgttgtaccggcatcgcccacaggtcgatggagaaacctttttccagacccgcttctttcagcaaggctttcgctttttcaggatcgtaggtgtagtcctgaacgtcgtcgttatagccccacatggttggcgggatcaggtttttcgctgatacgcccgcgccctgataaaccgctttgatgatcgcgtctttgttcaccgcgtaggtcagagcctggcgaactttcacgtcatcgagtggtaaacccagctcgcgtaccaaggtgagacgcacctggatggtatcgcctggctttacgggttcgataaaacgcaagctgtccagcccgtagttagcaatgaccggaccgacaccggcatcgacaaacagacccgcagccgcagaaagcacaaaatacccatgcaccacccgctcaccgaaaatagattcggcagcagcaatcttatccatatgtgcatagaaatgatcgccgctgaggcaagcaaagttaacaatatcggcctctgtcattgtgcggcggggagtcaacaggctgtcgcctggttgtagctcctcaaaatatttgcggaacggatgaatacgatcttcttcgactttcgcaccgcgcacccactgtttactgatagcggcaagcatcgtcggactaccctgaacagcggttcgctgcatgtaatgtttcaccgctcgtaaaccgcctaattcttcaccgcctcctgcgcgaccaggcccaccatgtaccagttgtggcagtggggagccatgcccggtggattcttttgccgactcttcattgaggatctgaattcgcccatgcgtacgtgccgcgtcggcaataaactgacgcgcaatttgcggatcagccgtcaccagcgttcccgcaaggctaccgccgcctgcacaagccagttgcagagcatgtcgctggtttagtgctggcatcagcgttgcgacagggccaaaggcttctgttgcatgtaccgccggtgtttcatccggtccagaggtacagagaattccgcgcatcttctccccatatagtgttctacgtggacggtaatgcgcttctcggaagtggagcagaacgacaaactggaatggctgatccgcaaagacggctgtatgcactgttccgatccaggctgcgacgtggacttctcccggcttcacaatgtatcgctgtaccgactcataagtgatgaacgtggcgctgcaattcacgttctgacactggtgataacgctcttttgtcgtgtcagtgatatagcggcttgtacgcgcatgtgcggcatgctcaagctctaatgacgtcgtgaagccgctattattcagaaaatgtgtcaccttagtgattgtccagtcctgctcgtctatgacgcgcttaaagccagacactttgaccggtgtttccgtgtaaatattaccgtattctcggcttaaccgtccatgcaacctcaacacattgctttcaactgccgtcaccacgttctccggaaaatctgtcggtaatgaagtcttcacgttatccagtgctgctggaatcattctggcaaagtcactcaggatttcatgcatctgcacttccgggaatctcagcacctttgtctgccactggatgtggcacaacagatgattagctatccggcggttgatgccgctgtggcgaagtttgagcaggactggcagggagcgtttggcagaacgtcgatttaaccggacgttctgcatcctcataaattgctcacaccccggattacgcatcagtttcatttcgcgaaactgacaggtcatcgcatcgtacatgacgattttcccgctggccggtttgccataacctgccagcattttgatcgcttccattgcctgcaacgaaccaattacgccgatcaacggtgccattacgcctgcttccacgcaggttaatgcattttcaccaaacaaacggctaaggcagcgatagcacggttcaccgtcctgataagtaaagacggtgatttgaccttccatacgaattgccgcgccggaaaccagcggtaccttcgcggcaaaacagcctgcgttcagttgattacgtaccgcaacgttatccgtacagtcgagcaccagatcgtgttcagcaatcaatgctgcaagttctgcgtcatccagcagtgcattgacttcattcagcaccacaaatgctttgatggcttcatcgcgaatcgaatctttaatacccacaaccacgatgtcctgaattttcgggtgcgcggcgataatattttccagctccacgcaggagacattctcgccgccacgtttaatcatattgcagcggcgatcgacgaaataaaaaaagtcctcttcgtcgcggtatccggtatcgccggtatgcagccagccatcggcttccagcactttcgcagtggcttgtgggttgagaaagtactctttgaagatggttttcccaggtatgcctttaatgcagatttcaccgatctcaccagccgggagcgggcgattgtgatcgtcgcggatctccgcttcgtagcaaaaccccacccgaccaatcgacggccagcgtcgtttatcgccaggacgatcgccgataatgcccacaatggtttccgtcatcccataagacgtcagcaagcgaacgccgaagcgttcacaaaacgcatctttttcctgctccgacaagttgagataaaacatcacttcccgcaggcggtgttgctgatcgttcgctgaaggcggctgtaccatcaacgtacggatcatcatcggaatacattcggtaacggtggcgcggtacttctgtacctgccgcaatattattttttgatatgttgaaaggcggatgcaaatccgcacacaacatttcaaaagacaggattgggtaaatggcaaaggtatcgctggccgatcatgatcgacgttgttactacctgatggcgacccgggggctgaaaaaaccacgcggtcgccgagcagcagctcatgcgtcagtgactctagaggatccctgcctgattgcgctgcgcttatcaggcctactgggtgagtggcaatatgttgaatttgcatgatcttgtaggccgtgataaggcgtttacgccgcatccggcatgaaacgatgagcaattctcccagccattcaacagctcgacccccgttctctattacgacaaagacgccggtccatggcgaagttcctcgatttcctctgcgaagccacaaaacgctgcgcgagtgcatcaaaaaccgtgattggccattaggattgcttattttattgtggagcttatagaaccactcagccgtttttcgcttcaggcgtccatcagttgagcggtcagatcttttagcaagaaccatatcagcacctgcttgccatttttcaataagatgaggaataacctcaatcgggtcttgcaggtcaacatcaattgggattatcgcatccccggttgcatggtctaaccctgcaaacaatgctggttctttaccaaagttgcgtgtaaatgacagcggaacaactagaggatctgaaacagccagagcattaatgattgactccgtagcgtctttgctgccgtcatttatgaaaacgatttccacttcatatgacttcaattcttcgaattcacgtaccgttttataaaaaattggtatcgcttcttcttcattgaagacaggaactacaagagatatcttcatttcgcatccaacgcctaaacgcgtgctctgctcgtccgttgcttcctggcgcgaaatgacttcactgaacagctggcgagtgttgaagtggggaactacgccgtgaaaaacaggaaaatgaaacccaggacgaaaccctgactcgctcaattccattttgacttgttgctcaatggggcgaataacatcggttaacacccggcaaagggtggattcaagctcggcaaaacgcagcgtaaagtcgcgactgatggtgttctgcgccgtctgtaacagtgtctcacagcgggtacgaatctcgcttaacggctccgaatcatcctgaaacaaggcggctaactgcaccttcagcgcatcttgctgttgacgcagaaagtggttggcggaggtcagggccagctcgatttcatgtttaatctcgccgctcacctgcgcctgattgagttgcaatagctgcaaactttcttcgatctggtggatattttgccgcaattgttcacaagcgacgtttaacccgtgcgcacgaaaatccaggtattcccgcgcctgctgcgcgtaattcaacagtttatgcgcggcagatcgcagagcatacaacgaggcgttagcgtaagcggcatgaagcaaagcctgaattgggttggggaacacaggtgagtcgctggacaacaccgacgccgttgtctggatgaccaccggcaccacacatgtggcccgcgccgaagagtggccgattatgccgaccgaagtgggtacatactctgctgaaaccatggaacttctttgacgaaacgccaacgctaggggcgcgtacacagcgaccgacttagtttcacaccaaccgtccagccagtcggggccaaaatcacggcccgttcctgactgcttcatcccaccaaacggtaagttagcgtcaattaaggtatggctgtttacccacaccgtccctgcctgtaagcgatcgctatattccagagcctgggagagattttgcgtccagacactggcagttaagccatattccgtgtcgtttgccagttgtaacgcctcttctccatccgctactcgcaccaggtttaccaccggaccaaacacctcttcacgagttaagcgcaatttagcatcgggatttaccaccagcgttggcgcaacataatacccctctccggctggtccattcgacccgcgaatcagctctgcttgctgtgcctgcgcatcgtcggaggaatgaacacatttgtcgcagtgcgcacgagaaaccaaagggttaatctgtgcaacaggtgacatccccggtcccacttgcaacgattttaccgcctgctcaaatccactaaccagcgtgtcaaacaacggcgcttcaatataaattcgcgaactggcggcgcatacttgcccttgattcaggaagcttccggtcatcaagccttcaataacccattgcggatcagcatcttttaatacaattgccgggtttttaccgaccagttccagcgttacacgcgttaagtgatcagcagcagttctggcaataccttttcccgtcgcggttgaaccggtaaaactgattttcgcaacatgaggatgtgacgtcagggccgcgccgcatacagcacctgacccggtgacgacattgaaaacgccatcagggataccagcctcgctgggcagttccgccacgcgcaacatcgtcggcccccccggttccctcacgtggtaccggcctttcccctgggaagttctccgcgtggtttttgtgccggggtagaccgcgctatcagcattgttgaaaacgcgctggccatttacggcgcaccgatatatgtccgtcacgaagtggtacataaccgctatgtggtcgatagcttgcgtgagcgtggggctatctttattgagcagattagcgaagtaccggacggcgcgatcctgattttctccgcacacggtgtttctcaggcggtacgtaacgaagcaaaaagtcgcgatttgacggtgtttgatgccacctgtccgctggtgaccaaagtgcatatggaagtcgcccgcgccagtcgccgtggcgaagaatctattctcatcggtcacgccgggcacccggaagtggaagggacaatgggccagtacagtaacccggaagggggaatgtatctggtcgaatcgccggacgatgtgtggaaactgacggtcaaaaacgaagagaagctctcctttatgacccagatcacgctgtcggtggatgacacgtctgatgtgatcgacgcgctgcgtaagcgcttcccaaaattggcggtccgcgcaagatgactctggtaggcctaataacggcagaacgggtccgccctgtgcaatgccgaactgctgctgcgctggcaggatggtaactcggttaccgaagaggatatccacgcgctggcaggatggctgaaaaatgcccatgctgaccgtgaaattgcctaccgcccggcaagggtgctgatgcaggactttaccggcgtacctgccgttgttgatctggcggcaatgcgcgaagcggttaaacgcctcggcggcgatacggtcgacctggtcattgaccactcggtgaccgtcgatcgtttttgggtatatgtattctcgctcggtatttgtctggtttgtggttggtggcttttttggggacggtttatattttgctattagtaaaatcttcgcctcaaatccaccttgttccgcattcccaaattcaacattcatgccatgcaatttggcgattcgctggacaatcgatagcccaagcccgctgccggtagcggtttgtccgggtgggcgatagaagcgttcgccaattcgcgccagtgcctctggtgtcacaccggggccgttatccctcacgatgaaattatcagcattcagcgtgacgtctaccacgcaggcgatcgtgtaagacttcagaggttcacgctgcgggctatggcaatacgtggaaggtgagtactggctatccaggtggatcaagcgggcgtttgttatcgctacgggaaaactctgtcgcatgttcacaccatgcaacggcgcggttttccagtgtccatgaagtgtcgagcactgacatgttgatgcagacaggttatctggcgtgacatcgacaaaggcgtccagctcctggctgctctccaggtcagaaaggagataaatgtagtcgcgcccaagcttaccccatgaagccaggagcgggttgccgacatcctgttcaccatcgctgttaaagagctgtccggcattttcgctatcacgaaatagcggcaagtcgcgatcttcaaaactgtgtcgacgctgacgggtcagcagtttcgccagataagcaggatcttgaatatcgccccagtaataacggcaggggttggtaaacaggagatggatttcaatatgtttacccagcgcctgtagcgcctggagataaacaggcggtaacgcggaaataccgcatataaagacgcgcgaaggtaaccccggcgggcaggtcgtcgcggactccagcgtttcgataaagcgctgatagagattggcgcggtgccagcgcggttgcccgagttgatgggtatattccaccagcgccttccacaacggggcttgccaggcctgtgcttctcccagcccttcaaccaaatgtcctgtttcccacccgcggtgcaccgccgtcatctgcccgaagcggtcatggtcataacgggttacataaccggaacagtcggtgaagctcagcaactgaccgtaacggctccacgtcatggttttccggctgccggtggcatcttccgttgcgcagggtaagtcactgtgtggattatcataacggtagcgggtgatatcgccgtcaggggcagtttcctgaatcagacggcccaattcatcatattcccggcgcaattccaacccgtcaggcccggtggctgacgttaactggttgtggtggttatagtaaaacgccgatgccctgccatccggcgtggttatgcgcgtgatgaggcccgtcaccacatccgggctgtactctgttgtcctgcctgcggcatccgtctgtgccctgagcctgcccacggcgtcaaactgactctgcgtgacgctgccgtccgcgtgtttctttttcaccacccgcttcagaccggcttcaccctgcgtgtgcagcactttattgtgggccaagctgtcagtgatggtgatgcagtctttctcatactgatacgagtatcttaagcctgcccggtttacatgttctgtcacccgctgcgaagctagtttacgacgataaaggtttttgtgccgatatcgtaaatcgtgggtgatggtttgatacaacgcatcataaacgcgcccgtaatcgcccatctccggcttcatctcttctctgaccgtcacgccctcgtcattgacatactccagcacaccgaccgaatcatccgctgcgaatcccggttcgcccggcataatattagccttcaggctggtttcctgctggtcgataccgtatttaataaacgaacctttcttaccgtgaacgataaatttcggataatcgattttcaccagatggctggttttgacgatggctttcaggtcgccataaaacagttgcgcttcaaaggtgtcgtcaggattggctttattacgcaggctgcggatgtcataagcgacgtgatccgggcgaccgaacagagaaataatctggtccatcgtatgcacaccaagggcataaaacgcgccatcctgcggcagcccaggtttggtttcaggtcgccccgaggctttatcgacaacttcaccatcgccatgcttgatacagagttgcattaattgatattgcgcgaccagcaaactttccagctctcgatccacttcttgtttgatcgatcgcggagaaaagagcaaatccgccataatcgcacacacaataccgataacgatctcgctacaacgttcgacggcaaactgcggcgtaagcaatggttccggctgaatggtgatcacaatgatcagcgcggtataaccggccagcccccacgcatacgagttttctattcgtaccagcgaggatatccaggtacaaaaaccggcccagatacagcacaccagaatcatcaataatggtgcgcggatcatcgcaatgatgatcaccagtccggcaatacagccaataaatgtgccgatgatgcgcaaaaagccacgatagcgaatagcgccagaatacggttcacctcccgcagcaaaggccggaccggcggcaacaatcgccgctgtcagtaccgcccagcgatggcgtttccaggtgaaggaacgaatcctggctttcgtcgcgatctgtttgccagtgaccaccactgtagcagtggtgcccgcaggccagatgttctcttgctggttgtcgagacgatatacgtaacacggaacacagttgcgcaagacgcacgccat

SEQ ID NO: 30107 - DNA, 2488 bp, Homo sapiens
  SIMILAR (451)..(1092): 951254mologous to Escherichia coli similar to Alcaligenes eutrophus pHG1 D-ribulose-5-phosphate 3 epimerase,accession number U00006,Smith-Waterman Score=1067.
atgagccgattaaccgcaatcatctgcgctgtcgttatctgcctgctggtttccatggcctgggccattaaccactaccgcgacaacgccatcacctacaaagaccagcgcgacaaagccaccaaaagtctccgcctggctaacgacaccatcaaagacatgcagacccgtcagcgtgatgtcgctgcactggatgccaaatacaccggagaactggctgatgcgaaagatgccgtcctgcgtcgcgaaatgcgtcagatggaaggtgcatggctggggagcgatctggtcgatcagggtaaggagcgtctgaatcgtctgggcttctttgaaactgtcgataccgatacccaacgtgttcgggtagcccggaccaggttgatgtcgtctacaagatgcgtaagcctcggtggacgtctcttctataatgacttccaggcagatgacgcagacctgtccgactataccaacaagaagatcgaaattatcgacagccatgccgattacttccacatcgatatcatggacggtcactttgtccccaatctgacactctcaccgttcttcgtaagtcaggttaaaaaactggcaactaaaccgctcgactgtcatctgatggtgacgcggccgcaggattacattgctcaactggcgcgtgcgggagcagatttcatcactctgcatccggaaaccatcaacggccaggcgttccgcctgattgatgaaatccgccgtcatgacatgaaagtggggctgatccttaacccggagacgccagttgaggccatgaaatactatatccataaggccgataaaattacggtcatgactgtcgatcccggctttgccggacaaccgttcattcctgaaatgctggataaacttgccgaactgaaggcatggcgtgaacgagaaggtctggagtacgaaattgaggtggacggttcctgcaaccaagcaacttacgaaaaactgatggcggcaggggcggatgtctttatcgtcggcacttccggcctgtttaatcatgcggaaaatatcgacgaagcatggagagttatgaccgcgcagattctggctgcaaaaagcgagcaatggggccaacaggtgtatgccattgtacaaaataccgaccaggcgcaggcagttatgccttatggtccaaaatgtctttatgttcttgcgcaaaacgacgcgctgcaacgcactgaaaattacgccgaaagcattgctgccctgctgaaagataaacaccccgctatgttgctgttggccgcgacgaaacgtgtcctcttcgcaatcgtggacacgtacgtgacgacgaatgccagtctagctgggatcgcactgaactccatggacttgagcccgggaggcagagtggccgtgaaagaaagcaatcagcgatggtgctctgacgggttcgagttctgctgtgataacggagagagactgcgtgtcacgttcgcgctggactgctgtgatcgtgaggcactgcactgggcggtcactaccggcggcttcaacagtgaaacagtacaggacgtcatgctgggagcggtggaaacgccgcttcggcaacgatcttccgtcgtctccagtggagtggctgacggataatggttcatgctaccgggctaatgaaacacgccagttcgcccggatgttgggacttgaaccgaagaacacggcggtgcggagtccggagagtaacggaatagcagagagcttcgtgaaaacgataaagcgtgactacatcagtatcatgcccaaaccagacgggttaacggcagcaaagaaccttgcagaggcgttcgagcattataacgaatggcatccgcatagtgcgctgggttatcgctcgccacgggaatatctgcggcagcgggcttgtaatgggcgcgccggagttttatccagcgggactctagagatccccgataccgagctccgattcgaatccatccgctgcccggtgcaaatcatctccgccagtgataatctgctggtgccaacagcatgttccagtgaacttcatgccgccctgcccgatagccagaaaatggtgatgccctatgccggacacgcctgcaacgtgaccgatcccgaaacgtttaatgctctgttactcaacgggcttgccagcctgttacatcaccgtgaagccgccctcaccctgttcaccgatgcccgcactcacaacggctggcgggagacacccgtcagcgatgagacgttacgggagatttatgccctgatgaaatgggggccgacatcagctaactgttctccggcacggatcgtgtttacccgcacggcagaaggaaaagaacgtctgcgcccggcactttccagcggcaatctgcaaaaaaccctgaccgcgcccgtcaccgctatcgtcgcctgggacagtgaattttatgaacggttaccactactgtttccccacggtgatgcccgcagttggtttacctccagcccacaactg

SEQ ID NO: 30108 - DNA, 2427 bp, Homo sapiens
  SIMILAR (370)..(951): 881254mologous to Escherichia coli selenium metabolism protein,accession number M30184,Smith-Waterman Score=860.
  misc_feature (1)...(2427): n = a,t,c or g
ttaacatcctttacccaatgtggtcgactttttcttcaggtcgatcacccccactttcgtgctgtaccaccacacctcgtagctgacgtcttcctgcatctgcttgagcgcgacccgttctccgctgaatgccttgcctgcgctcatgtttaccgcttttacgctcagctttccgctgatatcggctttcgtgaccatcactgcttcatcgtattccgggggcgttgtgttgccgctgtactgccgcgctgacggctgataccgcgagcccggtaccgccatatccagcgcctcgtgcgggcgtttaaggttatagaccgtccgccagtggtcgaaggcgagctgcagttgaacgctgtccncccctttcccaaaatgttggaaaccatcctgcatagtgagcaggcgaagtttgttgatccgaatttgcttgtgggtaatgaaacccgcgacgatgcggcggtgtacgatctgggcaatggcaccagcgttatcagtaccaccgacttctttatgccgatcgttgataatcctttcgattttggccgcattgcggcgactaacgccatcagcgatatcttcgcgatggggggcaaaccgattatggcgattgcgatcctcggctggccgattaacaaactttccccagaaattgcccgcgaagtgaccgaaggtggacgctatgcatgtcgtcaggcgggtattgcgctggctggcggtcactccatcgatgcgccggagccgatttttggtctggcggtaacggggatcgtaccgaccgagcgggtgaagaaaaacagtaccgcacaagccggatgcaaactgttcctgacgaaaccgctggggatcggcgttcttaccacggtgcgtcgacttaacgccctcaaacgcgctgactttagtcaccatgcggatcgcatccgctgcccggtgcaaatcatctgcgccagtgatgatctgctggtgccaacagcatgttccagtgaacttcatgccgccctgcccgatagccagaaaatggtgatgccctatggcggacacgcctttatcgcccactgtcagggcgtggtactgctgggcgtcgaggcgaaacgtctgctccattcctccgctttgcggtttgaagcttgcctcatagcgtatactggtgcctgccggagtcacttcctgctggcgcgaacggcgatcgttaatcggtttttcccgcttgttgctcaccaccaccagcttttgctggagcggagccatatcattatcagctttttcccgtcgcgccacgccatcaattggttgcagcgcaggcgttaacgccacagcactttttacgcctttttcacactcagcgagggtggattcactaatgccgtagatgccataaacagtacgctcttcaccggtaggcccctgtttaaaatctttcagccagtcagcataacgcgccagactgcgctgtaccgggatctgtaacttgttgtagcacttgatatagacatccattttttcgtcgaaaaccgcttgttcatcgaccaccggttgcgcacgtgtttcaggtttagcttctgcttttgcaacaggagcttcagtaggtttcgcttcaggagctggtgcggcaggttgactattggcaggcgggagcgtttctgtttcggcttttttatcatcacaacccgtcagaccgagggagcgagtctgcctgcaggtccagtggcaggcaagtgatattgactggagccagagcgcgccacttgctgaactggtcggcattcgcgtaccgccgcaaacagaacgtaagcacatcattatcgataacgattcgccggacgcattgccgagctggcggaacatctgaagaaagccctgaactgaagccaggcgcaggcagttatgccttatggtccaaaatgtctttatgttcttgcgcaaaacgacgcgctgcaacgcaccttgcacccggtgttcagggaatggcgccataaatgatatgctgaagggcccgttcttcaaatgcacatcatcggccaaacgatcgaaagtcaccgagtggtcaatgaccaggtcgaccggtgagagcgggttaacctttgcagtatcgccgccgaggcgtttaaccgcttcgcgcattgccgccagatcaacaacggcaggtacgccggtaaagtcctgcatcagcacccttgccgggcggtaggcaatttcacggtcagcatgggcatttttcagccatcctgccagcgcgtggatatcctcttcggtaaccgagttaccatcctgccagcgcagcaggttttcgagcaaaactttgagtgacttgggtagacgggtgatatcgcccagtgatttagcagcaagcggcaggctgtagtagtggtaagttttatctttggcctgcaacgtgtccttactggcttctcgtagggttgacgacat

SEQ ID NO: 30109 - DNA, 753 bp, Homo sapiens
  SIMILAR (474)..(4): 981254mologous to Escherichia coli isovaleryl-CoA dehydrogenase precursor homolog(PIR:C34252),accession number D10483,Smith-Waterman Score=804.
ttagcggtattgcttcagcaccgcacgacccagcgtcaggatctgcatttcgtcagatcccccggagacgcggtctacacgcagatcacgccagaagcggctgatgcggtggttgcccgcaatcccgacaccgcccagcacctgcattgcgctatccacaacttcaaatgccgcattggcgcagaagtatttgcacatcgctgcatcgccagaggtgatggtgccgttgtctgctttccacgctgcttcatacagcatgtttttcatggagtttaatttgatcgccatgtgggcgaatttttcctgaatcaactggaaacgaccaatagcctcgccaaactgcacgcgctgattggcgtagcgcgccgcatcttcaaaggcgcacatcgccgtaccgtagttggtgagggctaccaggaaacgttcatggtcgaactcttctttgacgcggttaaagccgttacccggcccgccagagaaaaaggcatacaccgcaaaggccatcactaccagccagatccccatatccgggattagccccaaaagcgccagcgccagcgtcatcatggcaaagctgccaatcaacaatggacgccgtccggcagtgtttaaccacagcatcggcggaatacagccgagcataaagaacaggctaatcaccacattccctagtgccgcgtttttgccaacccccaatcccaacaaaccaacgatttgcgggccaaaggtgtaaatggcgaacattgggatcac

SEQ ID NO: 30110 - DNA, 438 bp, Homo sapiens
  SIMILAR (436)..(11): 991254mologous to Escherichia coli yehO,accession number U00007,Smith-Waterman Score=728.
gttcagttcagacatggaaaactccccagttttgcagcgatgccagtgcctgctgttcgagttgttgatgatgtgcaatggcctgtggtggacaatgcaacggcatttgcagcgccgaaacgggaagttgcgccagttgataatgctcaagcacctgatgcgccagcgtcccgcgttctcgtggtggtagccaggccatcgccgcgcgtaaatcgggcagggcgttaataaaatcggcttcactcagttgatttaaatgactgctgaaaccggcgataaatgccggctgacaggccagttgatggcgggccagcgccagcaaaccgtgcagcgcctcaccagattgtgccggggataactgcgccagcatcgtcagcgccgcttcggcactggcgttgggatgttccaaacgcattagtgcgccaagaaccgcgccgc

SEQ ID NO: 30111 - DNA, 1873 bp, Homo sapiens
  SIMILAR (589)..(2): 991254mologous to Escherichia coli Hypothetical protein HI1265,accession number D90728,Smith-Waterman Score=1023.
cctccgcttccagcgtgtcgatggcttcaactactgctgggtaacgcgccagcacgtctgccgggatctctggcaggctgatgctttcagcaataatgcggtttttcacgtagcgttcgaaaacttcagacaatccctgaacgcgtgcttcgttgcgggtattacctgcggacataccgttggagacgtacaggttaccaatgatattcatcggaatataaacggtctgattgtcggactgacgcgtaaacggcaggccgcaaataccacgatcttcgttaccggattgtaggtcaatcagcatgctgccggtcagttcattctccggatcataaaacgcgcgcagacggtcatcgagcagcccttctggcacatcgtcattttcggtcagtgggaaccatttttcgttgggataatgcacgaacggaccgttggcgatggtttcgcccagccagaagtccgcaaaaaagtagttggttgagagacgctcgaaatattcaccgagtgcagaagccagcgccgctttcttggttgcgcctttaccgttggtaaaacacagtgcgcactctttgtcgcgaatatgtacagacccagaagttaagcaccgggattcacgcaggaagcgcttttcaatcttgtagttggaggggacattaagaagatcgcgaaaatccttctcggcttcctctgcaacctgaatgaactctttgccacggtgactcacttccatcaccgacgtaccaagaccgttccagtcgcgcagttcctgttgagcctgtttaagcacctctgccggtagcattgccggaccagaacgccgcccgcacagtccccttgccctcatggagccagggcgggatgggggcagcactgtcctctggtgccagcagtcagcacattggaagtatctgcaaggggcgtccctcgtgtcctctggctgtggagaggtcaggagacagtagaagtgttcgtggaggccggctggcagcagcaagcggaggcgtggggggcacagccacgagctgctgtccacggtgtctgtggtaagggcagcagcagagataggcaggcagtggtgaccattatgaggcgtcaaggaagtgactgttgaactgggcctgggcaaacgcactgaggcttgacccagcagtgtcttagagacttgtgagcgggtcagtttgaccagggctggacatttgaagggcatgtggaaggagacgaggaagagaagtggggagtctgtaaaaatactggcgaggtacacgtagcgaggaaggcaggacttcttggcgtcagtcatagacttacttatttcagcaaagttacttccctctctgggctgtagttttctcattagctgctggatccagccatggctgaagctagcccagtccaacacttttacattttgggagccagcaccttctcctttttgttgaagccagtctctcttgtttgtgactgggccaccttgttgagccgattgcctgaatgggcctgtgcagcagggaccggagctcaggccctgggcactcaatgctgtggccttagaagtgtgaaggccatcaggcttgggaaggctcccagcaagcctcagaccttgcaggggactgagggtgattgactgcaccgtccatggtctggatgatgcatccggtgattggtccttattgtacaactgacgattcgacagcacaacaggaccatatggggaagcaccggagtcagtcagggggtggaaggagctggggcatggactcccctcttcagagagcccccgtcctgtctgcagagccatcaagaggaccctcgccgagggaagctgcctgccgctggtgataaccagaatcggtcgtggggaggaggtggccat

SEQ ID NO: 30112 - DNA, 1374 bp, Homo sapiens
  SIMILAR (1)..(1104): 971254mologous to Escherichia coli caiA,accession number X73904,Smith-Waterman Score=1906.
atggattttaatttaaatgatgagcaggaactgtttgtcgccggtatccgcgaactgatggccagcgaaaactgggaggcctattttgccgagtgcgaccgtgacagcgtctacccggaacgttttgtcaaagcactggcggatatgggtatcgacagtctgctgatccctgaagagcacggtggtctggacgcggggtttgttactctcgccgccgtgtggatggagctgggacgtctgggggcaccaacctatgtgctgtaccagttgccgggcgggttcaacaccttcctgcgcgaaggcacacaagagcagatcgacaaaattatggctttccgcggcaccggtaagcagatgtggaactcagcgattaccgaaccgggcgcgggctccgacgtgggtagcctgaaaacgacttatacccgtagaaatggtaagatttatcttaatggtagtaagtgttttattaccagcagcgcctacaccccgtacatcgtggtgatggcgcgcgacggggcttctccggacaaacctgtctacaccgaatggtttgttgatatgagcaaaccgggcatcaaagtgaccaaacttgaaaagctcggtctgcgtatggatagctgctgtgaaatcacctttgacgacgtggaactggacgagaaagacatgttcggtcgggaaggtaacggctttaaccgcgtcaaagaagagttcgaccatgaacgtttcctggtagccctcaccaactacggtacggcgatatgcggcgcgtacgccaatcagcgcgtgcagtttggcgaggctattggtcgtttccagttgattcaggaaaaattcgcccacatggcgatcaaattaaactccatgaaaaacatgctgtatgaagcagcgtggaaagcagacaacggcaccatcacctctggcgatgcagcgatgtgcaaatacttctgcgccaatgcggcatttgaagttgtggatagcgcaatgcaggtgctgggcggtgtcgggattgcgggcaaccaccgcatcagccgcttctggcgtgatctgcgtgtagaccgcgtctccgggggatctgacgaaatgcagatcctgacgctgggtcgcctacgggagcacgaatgtaggccggataaagcgtttacgccgcatccggcagtcatgcgctacataaatttttcaggagcaaataatggatcatctacccatgccgaaattcggccgttggccggattgcgcgttgtcttctccggtatcgaaatcgccggaccgtttgccgggcaaatgttcgcaggccccagtatcatcccaatgtatcgaaaatgggccattggcaaccagggaaagatgaacgtgatgatgttcacaatttgctga

SEQ ID NO: 30113 - DNA, 3378 bp, Homo sapiens; identical to SEQ ID NO: 28667
  SIMILAR (1207)..(1860): 991254mologous to Escherichia coli methionine synthase,accession number J04975,Smith-Waterman Score=1074.

SEQ ID NO: 30114 - DNA, 3132 bp, Homo sapiens; identical to SEQ ID NO: 15107
  SIMILAR (1111)..(1755): 961254mologous to Escherichia coli caiA,accession number X73904,Smith-Waterman Score=1093.

SEQ ID NO: 30115 - DNA, 3981 bp, Homo sapiens
  SIMILAR (3456)..(2185): 991254mologous to Escherichia coli Proline dehydrogenase (EC 1.5.99.8) (proline oxidase) / delta-1- pyrroline-5-carboxylate dehydrogenase (EC 1.5.1.12) (p5c dehydrogenase),accession number D90738,Smith-Waterman Score=2188.
ttattcgatgcgttcccacggaataaggttatccataagaacagccagtaaaatcccgaccaataagccgttactgagcagaggacgaagcgttaatggaaggtcttgcagatacacaggcggtaatgccattaaaaatatgccgacaaataacggcaatgcgagtcgataaatattgcgagcggtaaacgttatttgctggctaaacaccagcgcggaaaagagtaaaggcagataagaaaccagcatgaccgcactactcacgggtaaagggatactgcaaaacagtcgcgtgagtgcaggaaccagcgccaccagcaggcaaataacgctgccataaataaacgaacgccgcgtgtaatcgccagtctgggttaataaaccaatggatgaaacaaacggtgaaaatggaattaccgccagcggtacggttatcagcgtcataaatccggtcgccacaaagctacgacgataacgcgtattccctgcgccctgctgcggataaaaaacatccgtgccccgaatcgcaccgtaggtattgctgatatttaccagacctgtaatcaccgccgtcagaataattcccggcgacaaagcaccgccactgccgagcgggaaccactgccagtgcaactcaccggagagcgagtgcgaagaaggaaagcaaaagtaccacaacaaccagccggttatggtgccgaccagcaggccataacgggctaaacgttgcggcaggaagataatcatcgccagtaccaggcacatcaccgccaccgagagcgcgaacggcggtaactgaattttaaaattcgggtcggctatgccaaacggcagcccgagcatacctttgaaaaagatagtggtcagctgcgcgcccagcatcaacataaacaagaccatcaccgacggcgtaaataaccgtgccaggcgatggcctaatccgctaaaaccaatcaacatcgtcagcacgccggagagtgcaatccccactgccaggctggtggcgatatcgttgatcggtgtcccgcgcgatgcttcaccaagggtgatagtaaggatggttccccaccacaggccacctggcccttccataatagcgcgacgatgaccgcataacgcctgagcgaagcaggccagtgcggtagcaagaaaagcatattgcgtgagcgtaagcaggctactttgcggcaacataagttctcccacggctgggcttacggtcatggcggcacggcgctgcatggcaaacatttgctgtgggcggtgacgaccggcggcggggaaagccattttgaaattggtgcgcatccgggctttgatgtgctgtcgcagccggtctgctggaatggcaggaggcccatcatggatagccatacgctgattcaggcgctgatttatctcggttcggcagcgctgattgtacccattgcggtacgtcttggtctgggatcggtacttggctacctgatcgccggctgcattattggcccgtgggggctgcgactggtgaccgatgccgaatctattctgcactttgccgagattggggtggtgctgatgctgtttattatcggcctcgaactcgatccacaaaggctgtggaagctgcgtgcggcagtgttcggttgggctgcgctggcaggtcgcggaattgatcggcatgacgctggcgctctcctctacggcgattgccatgcaggcgatgaatgaacgcaatctgatggtgacgccaaatgggtcgcagtggccttgcggggctgctgttccccgatattgcggggaaacggcggtggggaggattcgatcctgcaaaatctggcgcagcgtttgctcggtttgctgtggctgaaaaccacgcaaaccgtcattgccgcccagttcaaccagcacccaacgcggctgatgctgtttcagcagagccggaaggcgcgccagtccttgttgcgaggtgtcgccgctgatgctggcattaactaccgacgttttactctgccacttatcattcaacaaggcaggccaggccgcgctggcagacattcgatacccggcgctcaggctatcacccagaatcaataacgtgtccgcacaccacacgaagacaaccaaaacacacgaacacacagacaacacaagaacgccaccgaccgagcaacaacaaacactaacaccaagccacaacaaaccatccatcagcacggcagcgcggtgcaaaatcgctgcgcgttcagccggaggcgtggcaaaccagattggcgcgttattaaccgcactttccagcgcctgttctacttcacgcggcgtggcttcacgcacatagcccacaatatctttcggttccgcagggttaataacgggcgacatctcacctgccgctaccggttgttccagcattggcaaggcctgccatttttgcagtgcactattgagcagggcagaggagagcgaggccaggcggtgttcgttagcgagatccagccctgccgagttgtcgcgcccgtgaccgtaaagatcgcgcggcaggggaattttcggatgcggtaatccagtttgcccttcctgttgcgccagtttttctacagcagtgaccggatcggcgaccagttcatccagtggcaaagaggtgtcggcaatacggttaacaaacgaggtgttagcaccgttttccagcaggcgacgcaccagatacgccaacagcgtttcatgtgtgccaaccggagcataaatacgacacggacggttaagtttgccgtcggcaactttcccggtgacctgctcatacagtggctcgcccataccatgcaggcactggaactcgtactgacccgggtagtagttctgccccgccagttgataaatcgccgccagcgtatgggcgttgtgcgtcgcgaactgcgggtagattagattcggcaccgccagcagctttttcgcacaggcgagataagaaacgtcggtatacaccttgcgggtataaaccggataaccttcaaggccgtccatctgcgcacgcttaatttcactatcccagtacgcgcctttcaccaggcgaatcatcagacggcgacggctgcgggtggcgagatcaatcaggtaatcgatcaccaacgggcagcgtttttgataagcctgaataacaaaaccgatgccgttccagcctgccagttccggctcgaaacagagtttttccagcagatcgagggagatctccaggcgatcggactcttcggcgtcaatgttgataccaatatcgtactgacgcgccagcagggtgagtgatttcagacgcgggtaaagctcttccattacccggtcatactgggcgcggctataacgcggatgcagcgccgacagtttgattgaaatgcccggcccttcatagatgccacgaccgttagacgctttaccgatggcgtgaatcgcctgctgataggaaaccatatacgcctgtgcatctgaaattctcataaggatcccgtcgctgcttacaaagtggttgttttccgccagcgcctgccagcgtctgtcactcgccttgagcggagcaggaaaccattctggatgctgttttatctgctcccggttgtgctggcgtagcgcccttttgctttcggcattgccttccacaatatagctggcctgctttttcagatgagtttggtactgttttaataaacgcgcacggttttgcatccgctggcgggcggcgtagctgaaagagatatgtgatgtggtggcgccccgtgctgtctctcgggcccctgaggtctctctgcagtccccttccttgtcccccttctcgggcccccagttttggtgggtcccctcttggctgttggcccgtttttccggtaatcggtaccgcccatccgctttagggcctctggaacgtttgggccaactcacggttctccccgtgaaccattcgtgaacccctggccccactgatctcagctcgttacttcccagcgttctggtgaccat

SEQ ID NO: 30116 - DNA, 554 bp, Homo sapiens; identical to SEQ ID NO: 25696
  SIMILAR (1)..(552): 981254mologous to Escherichia coli K12 B12-dependent homocysteine-N5-methyltetrahydrofolate transmethylase, repressor of metE and metF,accession number AE000475,Smith-Waterman Score=924.

SEQ ID NO: 30117 - DNA, 3670 bp, Homo sapiens
  SIMILAR (2524)..(3105): 1001254mologous to Escherichia coli yehP,accession number U00007,Smith-Waterman Score=1002.
atggggatcgtcaacgccgggcaactggcgatttacgacgacctacccgctgaactgcgcgacgcggtggaagatgtgattcttaatcgtcgcgacgatggcaccgagcgtttactggagcttgccgagaaatatcgcggcagcaaaaccgacgacaccgccaacgcccagcaggcggagtggcgctcgtgggaagtgaataaacgtctggaatactcgctggtcaaaggcattaccgagtttatcgagcaggataccgaagaagcccgccagcaggctacgcgcccgattgaagtgattgaaggcccgttgatggacggcatgaatgtggtcggcgacctgtttggcgaagggaaaatgttcctgccacaggtggtcaaatcggcgcgcgtcatgaaacagggcaaagagcagggcaaaaccaacggcaagatggtgatcgccaccgtgaagggcgacgtccacgacatcggtaaaaatatcgttggtgtggtgctgcaatgtaacaactacgaaattgtcgatctcggcgttatggtgcctgcggagaaaatttctcgctcaaaggccactgccgagcgggaaccactgccagtgcaactcaccggagagcgagtgcgaagaaggaaagcaaaagtaccacaacaaccagccggttatggtgccgaccagcaggccataacgggcaaaacgttgcggcaggaagataatcatcgccagtaccaggcacatcaccgccaccgagagcgcgaacggcgcccgagcatacctttgaaaaagatagtggtcagctgcgcgcccagcatcaacataaacaagaccatcaccgacggcgtaaataaccgtgccaggcgatggcctaatccgctaaaaccaatcaacatcgtcagcacgccggagagtgcaatccccactgccaggctggtggcgatatcgttgatcggtgtcccgcgcgatgcttcaccaagggtgataatccttctcggcttcctctgcaacctgaatgaactctttgccacggtgactcacttccatcaccgacgtaccaagaccgttccagtcgcgcagttcctgttgagcctgtttaagcacctctgccggttcaagacgatatttcctagcttccacataacattgaaaaacgccactgagcactacagctatctcaatagcctacgactggtggcggcaaacagctatacgtcagtggcttttcctgcaatcagtactggggtttatggttaccctcgtgcggcagcggctgaaatcgcagtaaaaaccgtttcagaatttattacccgtcacgctttacccgaacagatgtcatggcataagacccgtggtagaggacgtgccgatgatttcgcctgctactggtatgccaaatcggatatactatgtgacatgtgctctaaagcgcagcacgatcaactgtatcagctgtcgtcatcaggcgtgaccaaagtctcagcattacctgactcgctcaccacgccgttagggagtttgtggaaactgtatgtttacgcctggctggaggatacccatcaaccggagcagccctaccagtgtcgcggaaactccccggaagaggtttattgttgtcaggctggggagagcataacgcgcgataccgcgctggtacgttcctgtgggctctattttgcgccgcagcggttgcatattggcgcagatgtgtgggggcaatactggcaacagcgtcaggcacctgcgtggttagcgtctctgactacgctgaagccagaaacctcggtaacggttaaatcgctgcttgattcattagcgacgttacccgcgcaaaacaaagctcaggaagtcttactggatgtggtgctggacgaggcgaaaatcggtgtcgcatccatgctcggtagtcgggtacgggtgaaaacctggagctggtttgccgatgataaacaggaaatccgtcagggtggttttgctggctggttaaccgatggtctggttgcccgtttcctcgggagtttgctcatcgcgccccgcgtcagcgatccttcccgcctgatttccgccttgcgcgtgctggcactgctgacacttctctttgctgtcgccttctgggcgggggcgcacgtagcgtggctgatgctggtgatgattggctttaaccctctttttctcaccactgtgcgactgtggggctcggtggcgtttgtcattggctcggcgctgacgggcaaactggtcactatgtttgattatcgggtgatcctcgcgctgttgacgttgggcgtggcatccatgctgctcggctttctcatccgtccgacgattcagccacaaggggcaagtcgccagcaggagagcaccggcctgtaccgccagtacgacatgttcgcaaagtgtgccttcaatacaatcacaacgggcgaaacgaatactgctgcgggaataaaaacgcacatcgctcatcggccattgcacatcatcaacaactcgaacagcaggcactggcatcgctgcaaaactggggagttttccatgtctgaactgaacgatcttctgaccacccgtgagctacaacgctggcgattaattcttggcgaagcggcagaaacgacgctttgtgggctggatgacaacgcccggcagatagaccacgcgctggagtggctgtatgggcgcgatcctgaacggctccagcgtggtgaacgttccggtggattaggtggctcaaatctcaccacccctgagtggatcaacagtattcacacgctgtttccgcagcaggtgattgagcggctggaaagcgatgccgtgctgcgctacggcattgaagatgtggtgacgaatctcgacgtgctggaacgtatgcagccttctgaaagcctgctacgcgctgttttgcacaccaaacatctgatgaaccccgaagtactggctgccgcccgccggatagtgtgccaggttgttgaagaaattatggctcgactggcgaaagaagttcggcaggctttttctggtgtccgcgatcggcggcgccggtcatttattccactggcgcgaaactttgatttcaaaagtactttgcgcgccaacctgcaacactggcacccgcaacacgcgaacaagggcgcgcgacggggcttctccggacaaacctgtctacaccgaatggtgtgtagatatgagcaaaccgggcatcaaagtgaccaaacttgaaaagctcggtctgcgtatggatagctgctgtgaaatcacctttgacgacgtggaactggacgagaaagacatgttcggtcgggaaggtaacggctttaaccgcgtcaaagaagagttcgaccatgaacgtttcctggtagccctcaccaactacggtacggcgatgtgcgcctttgaagatgcggcgcgctacgccaatcagcgcgtgcagtttggcgaggctattggtcgtttccagttgattcaggaaaaattcgcccacatggcgatcaaattaaactccatgaaaaacatgctgtatgaagcagcgtggaaagcagacaacggcaccatcacctctggcgatgcagcgatgtgcaaatacttctgcgccaatgcggcatttgaagttgtggatagcgcaatgcaggtgctgggcggtgtcgggattgcgggcaaccaccgcatccagccgcttctggcgtga

SEQ ID NO: 30118 - DNA, 554 bp, Homo sapiens
  SIMILAR (39)..(329): 1001254mologous to Escherichia coli Ferredoxin like protein,accession number D90812,Smith-Waterman Score=541.
aacttgctgaaagatggcattaagggagcaaccgcgctatgagccagaacgctacggttaacgtcgacatcaaattaggcgtcaataaattccatgttgatgagggccacccgcatatcattctggcggaaaatcccgatatcaatgaattccataaattaatgaaagcctgccctgccggactttataagcaggatgacgcaggaaacattcattttgattccgccggttgtctggagtgcggcacctgtcgggtgctgtgcggtaacactattctcgaacagtggcaatatcccgcaggcaccttcggtattgattttcgctacggctaatcatgcatcccacaggcccgcatctcgggcctgatgttctgtttcgagagtccaacatgaaagtgacattaacgtttaacgaacaacgtcgtgcggcgtatcgtcagcaagggttatggggcgatgcttcgctggccgattactggcagcagaccgctcgtgcgatgccagacaaaattgccgtggtcgataatcatggtgcatcgtacacctatagcgcgc

SEQ ID NO: 30119 - DNA, 729 bp, Homo sapiens
  SIMILAR (729)..(1): 991254mologous to Escherichia coli EntA protein,accession number D90812,Smith-Waterman Score=1264.
atagacaaacggcgttgcgccgagcatacaggtgcaacgctgctgctcaagcagcgcgagacacgcatcaggagtgaaaatatgtaacaacacgctgcgagcgccaattaagaatggtgccgttacgccatgcagaaagcccgttgcgtgaccaagtggcgcaggcatcataaagacatcctgccaggtcagattcagtcgcgcgcaataagcccgctcactggcgagaatattgttatgcgttagcatcacgccctttggcagaccctcggttccggaggtaaacagcaccgcagctaattcatcgccgtgggtcgttatcgccgtggtcagtgaggtattgtcggcgataatctgacttaatgagagggaagaggtggcgggagccagtttgtccacgccgacaatttgttgtagttgtggaagctgattttgcagcggcaggattaaatctaccggacgcgtttgtttaaacaacgtcggtgcaaagaacatttttgcctgacacttattgagcacccacaccagttctgcttcccgccaggaaggcaacagcggcacggaaactgcaccgattttcaggcaggcaagatagataacggtaaattcacaccagccaggcagttgaaatgcgatgcgatcgcctgattcaatacccttcgctaacatccagtttgccagacagctcgcggcgtgatcgagcgcgctataggtgtacgatgcaccatg

SEQ ID NO: 30120 - DNA, 1264 bp, Homo sapiens; identical to SEQ ID NO: 24247
  SIMILAR (660)..(4): 1001254mologous to Escherichia coli gut R protein (AA 1- 257),accession number X13463,Smith-Waterman Score=1106.

SEQ ID NO: 30121 - DNA, 988 bp, Homo sapiens; identical to SEQ ID NO: 17814
  SIMILAR (988)..(530): 991254mologous to Escherichia coli alternate gene name yibK,accession number U00039,Smith-Waterman Score=805.

SEQ ID NO: 30122 - DNA, 978 bp, Homo sapiens
  SIMILAR (1)..(420): 861254mologous to Escherichia coli K12 orf, hypothetical protein,accession number AE000492,Smith-Waterman Score=612.
atgggaagtctccatcgttttgtcttgtgtttaaatacgctaacacctaaacttacttttagtaagtacgtacaaaaaggtaagtatgaaatgagtcaggttagcctgtcgcaacaactgaaagagggtaatctctttgcggaacagtgcccgtcgcgcgaggtgttgaaacacgtcaccagccgttggggggtgttgattctggtggcgctacgcgaaggtactcatcgctttagcgacctgcggcgcaaaatctgtggggtgagtgaaaagatgcttgcgcagtacttacatgcgttagaacatgatgggtttcttaaccgtatcgcgtatccggcggtgcctgcgcatgtggaatataacctcacgccgctgggcgagcatgccttttatgacaacgtccgcagtagtgattatgttttccgctacgggggcgatgaatttatcattgttttgactgaagcttctgaaaacgaaacgttacgtaccgcagaacgtattcgcagtcgggtggagaaaaccaaactgaaagccgcaaacggcgaagatattgccctctcactttccatcggtgccgccatgtttaatggtcatcctgactatgagcgcctcattcaaatagccgatgaagctctgtatatcgccaaaagacgaggcccgcatctcgggcctgatgttctgtttcgagagtccaacatgaaagtgacattaacgtttaacgaacaacgtcgtgcggcgtatcgtcagcaagggttatggggcgatgcttcgctggccgattactggcagcagaccgctcgtgcgatgccagacaaaattgccgtggtcgataatcatggtgcatcgtacacctatagcgctgaagactacgatactagcactgcgtcccccttcgttagcagcccagaacgctctctgcaagaagaaaaatatggctgtttttgcccaaccccgcaggcagtcagcccatatggttga

SEQ ID NO: 30123 - DNA, 765 bp, Homo sapiens
  SIMILAR (417)..(100): 1001254mologous to Escherichia coli similar to NADH ubiquinone oxidoreductase,accession number X72298,Smith-Waterman Score=547.
atggtgcgcgatgcagtcagtgctacggagcgcacgtcggacgatgatttcgagcagagatttacgaggagatgccggagaagaggaacagcaccggcagatcgggttattgaggaacggatacgatttcagcgccgacagcagaaagccggtataagcccccaacaacaccgccagcaccagcatcaatgtttccagtccgcgatgaacgggcgtcacgaggctcagaaccttttgcacgatccccagcttcggcaaccagcgttgttgcagggcaagcaaatcatgttcaaagattttcgccagccacagcaccagcaccaccatgtagagctgaaacagcatcacccccatcgacatcaccgaggtaaaactgtagtggaacatcagcttccagaaggtccacggtcttgtcaggctgatgttgctgatgcagctgtgagctgtacgctccctgcgggtaaggaccgtcctgtgttactggaactgctggcaggagctactaatcacagggcaggtgcttcgcagtacgttgaaggccagcccccggacatccggccaacaaccccggtggacgcggccctgacggggctttgtctggctccccgggcattccggtttacgagacagagcctgttgacccggtcttccggggaagcctgccatggtggtcaggaggggtttttcgaccggtcgatcgacccgaaaaccgcggcggaggacgggaaaggggggcctcggtggatacggcctatttttctatag

SEQ ID NO: 30124 - DNA, 733 bp, Homo sapiens
  SIMILAR (1)..(402): 991254mologous to Escherichia coli No definition line found,accession number U00006,Smith-Waterman Score=665.
atgctcaacaacagtgccgccaatgccgcagcccgccgtgtcgcgctggatagtctgctgtttaagctggtgggtagcctgattatcctgccgtttgtccatttgctggcagagacaatggggaagttgtcattgccaaaagcggaactggtgatctatttccacgtcttctacaaccttgtacgttgcctggtcatgctgccatttgttgacccgatggcacggttttgcaaaacgattattcgcgatgaaccggaactggatacccagctacggcctaaacatctggatgtcagcgcgctggatacgcccacgcttgctctggcgaacgccgcgcgcgaaaccctgcgcattggcgacgccatggaacagatgatggaagggttgaataaagtgatgcacgcgttttggcatcaacgaagcgggcaaagccgtgaagcgatccatatgtacggcccggattatggttttgataccactatcaataaattcaactgggaaacgttgatcgccagccgtaccgcctatatcgaattccctcaactaaaccaagggctagggagaaatttgggaaacgcctcaactattcgacggtcttgtttggtgtcctttgtgtctaaacctcctatgagtaataaacaggccgaccaaagatctgcggcaagaagaagaagacgctgttgtggtaatcggccccccttttatggtgggaaaggaattaattcccatgaag

SEQ ID NO: 30125 - DNA, 2805 bp, Homo sapiens
  SIMILAR (2436)..(1912): 981254mologous to Escherichia coli gut R protein (AA 1- 257),accession number X13463,Smith-Waterman Score=874.
  misc_feature (1)...(2805): n = a,t,c or g
ttacacacagtaacttgaataattgcttctctcctcaacagctttgagctctgctagtttagagattttggtcctcatggagaggaatgcttccactgggcacacaacaatggatccaacaactgggagataagacttccacctgaacattttgaggtccttgtgtcgcagcccaagaaacatctcaccaatttcaaatccggtaagcggcctctttttactctcttctccaacctccctatccctcaacctctttctcctttcaatcttggcgccacacttcaatctctccattctcttaatttcaattcctttcattttcttcctgcaaggctttgttgatatgttcccgctggcctgggcagggatctccatgttctttatgcgctttatgctcggcttctcggaagcgccatcattcccggcgaacgcccgaattgtcgccgcctggttcccgacgaaagaacgtggtactgcctccgccatctttaactcggcgcaatatttctcgctggcgctcttttcgccgctgcttggctggctgactttcgcctggggctgggagcacgtctttaccgttatggggctgattggttctgtgctgacggcggtatgtctgcggaagagctgaagtttatctctgaaaatggcgcggtggtcgatatggaccacaaaaagccgggcagtgcggcagcaagcggacccaaactgcattacatcaagcaattgctctctaaccgcatgatgctgggcgtatttttcggacaatattttatcaacaccatcacctggttcttcctcacctggttcccgatttatataggcaatgtcgttagcgataatcgataatacgtcgcgcaaattaccttcataacgtggataaaaacgtacggacgatgccccagttttcaacgcgatggcgacggcttcgtcaatagatgccttatctgaggcgctggtttcaatatgaatatcaaggttcagacggcgggctttatccccaaaggcagagagttctttatcgtccatattaccaagagaaaaacgctcgccatcgagaacatggattttgacgccacgtagattattttcacttgcgatatcaagtaaatcagcaggcaacactctttcagcgaggtacgtcattccccggattataacccattcaccatcggcagtaagccgcgagaaaccagtatcaatcagtccattggtcagcgttaacgtatcgccagaaatggtgatatcactgtcaatgcgaccgaatttttgcccccagaaccagcactctgtgcatcgtatttgggcgtccggccagccacggaagttaatgcgctccgttgtcgggaaaggtgatgacggcgttgaatcaccacgagttttcgccacgctcgggttgtaataaagatatttgatattcgccagccacggcgcgttattacgcatcgctagcgtggcgttgatttcacgcccttgcgcttcaaccagggtgccatttgccgtcggttgcgaaacaatactcaggttattccattgctgatttcccagtgacaacataggcgtacgtaacgttatgtgttgtgggaaactcgctgcaccaccgacactctccgcagcgcctttctggaacagggccagccactcggcaccattcatcggcggcatattgagttcaacgccactttgttccggcaacggcgggagcgttttactgtttaactgattcatctcgtgaatggcatcccaggcgcttttatagctaataccggcatctttctcggcgccgaggcccttttccgggaagcccgttgccagatatcgccgctggaaggatacacctttgagggctatcgcaatgccgatggcagcgtgggcaccaaaaacctgctcggtatccaccaccagcgtccaggtataaacctcgttaaaggtggttacgcccgcattgagatcgatgccgtcggtgcccataaacaatttatcgaaggtgaaatgctcgaaggcattctctgccagttgcccgtgaaatgaggccgattttttgcgaaacgttccgcctggcatcaggatagtttgttcgttatccagttcggatagcgcattgacgatatgcaggctgttggtcatcaccgtgatgttattaaagcgcgagagcaggggaaccatctgcaaaacggtactgccagcatcaagaatgatcgaatcgccatcatggataaaactaacggcagcttctgcaatcagctctttcttgtgggtgttgatgagtgttttatgatcgataggcggatcggattcctctttattcaacaccactccgccataagtacgaatgacggttccggcatgttccagaatgaccagatctttgcgaatggttgtgcctgtggtgtcaaagtattgcggcaattcttcaaccgagcttttacctgcttttgcagatactccagaatggcggcctgacggggatctcggcggccagacgtaaccaaaaatggccgccagcaccaggcagaagaatccggtggcaatcggcacanagcgtttgccgccgaagaagctcaggaagtccggcagtttaatatcggaccaacggttataggctgcgccaccaaccagaccggtaatgatacccgccagtacacccatgttaatttctgggttgatggtcaccatcgctttggttaacacaaagtaacctaccgcacccgccagcgccgccgcaccagcgctgtctttcgaccagctggatgccacaccgatggcgaagattaatgcgaggttatcaaaaatcgcaccgcccgc

SEQ ID NO: 30126 - DNA, 2034 bp, Homo sapiens
  SIMILAR (1482)..(1517): 1001254mologous to Escherichia coli glucitol-6-phosphate dehydrogenase (sorbitol-6- phosphate 2-dehydrogenase),accession number U29579,Smith-Waterman Score=65.
atgcgtatcccccgcatttatcatcctgaaccactgaccagccattctcacatcgcgctttgcgaagatgccgccaaccatatcgggcgcgtactgcgcatggggccggggcaggcgttgcaattgtttgacggtagcaaccaagtctttgacgccgaaattaccagcgccagcaaaaaaagcgtggaagtgaaggtgctggaaggccagatcgacgatcgcgaatctccgctgcatattcacctcggtcagagtttaacaatgcagcagttacagaacattattgaaaccgcttttgaacgccgtgccgagatcacgccagccaatgcagacaccgttacccgcgaagcggtaaatcaggtgatcgccctgctggattccggcgcactgcgtgtagcggaaaaaattgacggactccccactaaccaaatgcaagcaagcaggagggcaaaggaggaagaagtacatctgactggtcagccttccagggttcaaagccccccaagacgttgtgaggagaaacagtacatggtactgatgatcgtcagcggacgttcaggttcaggtaaatctgtcgccctgcgtgcgctggaagatatgggtttttactgcgtggataaccttcccgtagtgttgttacccgatctggctcgaaccctggccgatcgcgagatttctgccgccgtcagcattgatgttcgtaatatgccggagtcaccagaaatattcgaacaggcgatgagtaacctgcctgacgctttctcaccgcaactcctgttcctggatgccgaccgtaataccttaattcgtcgttacagtgacacgcgccgactgcatccgctttccagcaaaaacctgtcgctggaaagtgctatcgacaaagaaagcgatttgctggagcctctgcatgggtttccggattacgacactgttggtttttcctgcaaacgacgtattgattatgtatgccgaataaagcattcacgccgcatccggcaagttgtattgctcaacttcgctaaatctggtgctttttcaacaacgcgcggaactgatgataagacccgacgttctctacttgtgactctggtgcgtattttctgtgtgcgcgtaattttcgcgtatgatatccgcgacgggattcatgtgcgcattattcagatcaactcgaaatccggcaaagtgggcagcaaacacaactctggctacagcgcagcgaaatttggtggcgtcgggctgactcaatcactggcgctggatctggcggagtacggcattacggtgcattcactgatgctcggtaacctgctgaaatcgccgatgttccagtcactgttgccacaatacgcgaccaagctgggtatcaaaccggatcaagtcgagcagtattacatcgacaaagtaccgttcaaacgcggctgcgattatcaagatgtgctgaatatgctgctgttctacgccagtcctaaggctgtcgtacttgcaccggacagtcgatcaatgtcaccggcggtcagcgggcgctttaaaccgcgggtcgtggtcgccatcgcgctggacgatcagcagcgcatcgtcgacaccttgtttatgaaaggactgaccgtcttcgcccgaccgcaaaaaattcccgcaattaccggccgccattctggagctactctgcaaaagcagggtaaatgctcggttgaagaattggcgcaatactttgacaccacaggcacaaccatgcgcaaagatctggtcattctggaacatgccggaaccgtcatccgcacttctggcggagtggtccccgactccccccctcatactcggcgagacccccgccggttttctatggccttcccctggttcgacaacattcgatcggcagaattccaccacgtaacgacactgctcgcagaaataccccgccagcagaatgacatccatcgccccgctcacgcagcggcggcaccgaaagtggaaacacgctcaggcgatgaaacaaatcggcgctggaatcgccctgcccagcacctcttcgcgtaa

SEQ ID NO: 30127 - DNA, 3186 bp, Homo sapiens
  SIMILAR (2224)..(3183): 961254mologous to Escherichia coli Transcription-repair coupling protein mfd,accession number D90747,Smith-Waterman Score= 1560.
atgtcaacttctatcagaatctgtagctacctgttgctgccgctgatttatctgctggttaacgtcaaaatcgcccagcttggcgaaagtttccccatcaccatcgtcacttttttacctgtcttgttactgctgtttttagaacgcatcagcgttaaaaaattgatgattgccttagggattggcgcgggactcacggcgtttaactatctgtttggtcagtcgctggatgccagtaaatacgtcacttcaactatgctgtttgtctatattgtgatcattattggcatggtgtggagtattcgttttaaaacaatttcgccacacaaccatcgcaagatattacgtttcttttatctggtggtcgggctggtggtggcgctggcggcggtggagatggcacaaattatcctcaccggtggcagcagtattatggagtcgatttcgaaatatctgatttacagcaacagctatgtgctgaatttcattaaattcggcggcaagcgcacgacagcactttatttcgaaccggcatttttcgctctggcattaatctcaatttggctcagcatcaaacagtttggtatcaaaccgcctaaaacagatgctatgattctcgcagggataatattatccggatcgttttcaggggttatgccctttatcctgttttatttgctggagtgggcatttcaatatctgaataaagaggcgattaagaaaaagttcccgttagcattggcccaggaggcatgcaagagttgcccatgcaaagcccagaccgacgaagtgctggaaaacccggacccgcgagtcgggctggacgctgaaccggcggcggtgccttttcaacaaagcgtgattaccgctgagatagaacgctggccggaaaccgcattaacccgcgagctggcgcgccatccggcctttgtgaaccgcgatgtgttcccgattattgctgaccgtctgactcagaagcagcttttcgataagctccacctgccgactgcaccgtggcagttacttgccgaacgcagcgagtggcctgcggtgtttgatcgtttaggtgagctggcgattgttaagcgtcgcactggtggttatgacggtcgcggtcaatggcgtttacgcgcaaatgaaaccgaacagttaccggcagagtgttacggcgaatgtattgtcgagcagggcattaacttctctggtgaagtgtcgctggttggcgcgcgcggctttgatggcagcaccgtgttttatccgctgacgcataacctgcatcaggacggtattttgcgcaccagcgtcgcttttccgcaggccaacgcacagcagcaggcgcaagccgaagagatgctgtcggcgattatgcaggagctgggctatgtgggcgtgatggcgatggagtgttttgtcaccccgcaaggacactttgtcatgactaaacactatgattacatcgccatcggcggcggcagcggcggtatcgcatccatcaaccgcgcggctatgtacggccagaaatgtgcgctgattgaagccaaagagctgggcggcacctgcgtaaatgttggctgtgtgccgaaaaaagtgatgtggcacgcggcgcaaatccgtgaagcgatccatatgtacggcccggattatggttttgataccactatcaataaattcaactgggaaacgttgatcgccagccgtaccgcctatatcgaccgtattcatacttcctatgaaaacgtgctcggtaaaaataacgttgatgtaatcaaaggctttgcccgcttcgttgatgccaaaacgctggaggtaaacggcgaaaccatcacggccgatcatattctgatcgccacaggcggtcgtccgagccacccggatattccgggcgtggaatacggtattgattctgatggcttcttcgcccttcctgctttgccagagcgcgtggcggttgttggcgcgggttacatcgccgttgagctggcgggcgtgattaacggcctcggcgcgaaaacgcatctgtttgtgcgtaaacatgcgccgctgcgcagctccgacccgatcatttccgaaaggtgtctgaatgctacgcttcgcaaagttgctaaaccggtagaagaagtgaatgcagaaattcagcgtatcgtcgatgatatgttcgagacgatgtacgcagaagaaggtattgctggcggcaacccaggtggcggtgctggtgcatacccccttctcgagcagcagcattacgacaactcccgcgaccgtttcgccaactggccggtacgtatggaaatgatctcccgtttccgcagcgccaaagagcagacgcaaatccttgcggaagtggcggaaggcaaaatcgatattctgatcggtacgcacaaactgctgcaaagtgacgtcaagtttaaagatttaggcgtgctgattgtcgatgaagaacaccgcttcggggtgcgtcataaagagcgcattaaagcgatgcgcgcgaacgtggatattctgacgcttactgcaacgccgatcccacgtacgctgaatatggcaatgagcggaatgcgtgacctgtcgattatcgccacgccgcccgcccgtcgtctggcagttaaaacctttgtccgtgagtatgacagcatggtggtccgggaggcgatcctgcgtgaaattttgcgcggaggacaggtttattatctctacaatgatgtggaaaacattcagaaagccgccgaacggctggcagaactggtgccagaagcgcggatcgccatcggtcacgggcagatgcgcgagcgcgaactggaacgggtgatgaatgatatccatcatcaacgtttcaacgtgctggtttgtacaaccattatcgaaaccgggatcgacatcccgacagccaacactattatcattgaacgcgcggatcacttcggtctggcgcagctgcaccagttacgcggtcgcgtcggacgttcgcatcatcaggcatatgcatggttgctgacaccgcatccaaaagcgatgactaccgatgcacaaaaacgtcttgaagcaattgcctcgctggaagatctcggggcaggttctgcgctggcaccgcacgatctggagattcgcggcgctggtgaactgcttggcgaagaacaaaccggctcaatggaaaccatcggtttctcgctgtgtaccgagttcctgtaa

SEQ ID NO: 30128 - DNA, 2550 bp, Homo sapiens
  SIMILAR (2535)..(1855): 1001254mologous to Escherichia coli transmembrane protein,accession number L08399,Smith-Waterman Score=1151.
ctacatcggcaatgttttcaacaatccaaatgcctctttcatccgatcctcactgaccacaaaggcgcgaagctggtcagcatcgtcaacgccgcgcgccaccattccctggcgttcggtattaatttgccagcgtaaatcctgacgctgggtttcgcctgccagatgcagcggtaattccggcgttttgattttcaccagcatcgccgggagtttcagcggcgtgttattgccgagaagattttttgccagcaccatcgcgctaagttgaatcggctggaggaacggcaatacctgaccgttaatttccgcgcaatcgcccagcgcgtaaatatcggtattactggtttgcagataactatcgacgcaaacgccgcgattaatcgtcagcccggcgcgtcgtgccagggcggtttccgggcgcagtccggtggcggcaattaccgcatccacttcgatattgcgctggcggtccagcgttgcctgaatgccagaatccgttttttccagccccagatggacccggtgtacacgccggcgcgaaaaatccacctgtaccactgcgaccatcgcggcctgccgctggcgcttgtcagcacggaaggggcaacagaatggtgcgcagaatacgatgaatggggcaacctgctgaatgaagagaacccgcatcagctgcagcagcttatccgcctgccggggcagcagtatgatgaggagtccggcctgtattacaaccgccaccgctattatgacccgctgcaggggaggtatatcactcaggatccgattgggtgtattgcaggaagtgggtaaaaccaaatctgacttgtacgccacaggatgattcccagtatccagggatggatacaaagacagcaagtgattacctgccacagacaaattggccaacaactcaattaccaccaggatatacttgtgcagaaccatatttattgcccagacattaataaaccctaaggccagcggtcgagtgacggatagcgcattgacgatatgcaggctgttggtcatcaccgtgatgttattaaagcgcgagagcagggaaccatctgcaaaacggtaggcagcttctgcaatcagctctttcttgtgggtgttgatgagtgttttatgatcgataggcggatcggattcctctttattcaacaccactccgccataagtacgaatgacggttccggcatgttccagaatgaccagatctttgcgaatggttgtgccggtaattgcgggaattttttgcggtcgggcgaagacggtcagtcctttcataaacaaggtgtcgacgatgcgctgctgatcgtccagcgcgatggcgaccacgacccgcggtttaaagcgcccgctgaccgccggtgacattgatcgactgtccggtgcagtacgacgccttagactgcggtccgagctacttatgtagtcgtcttcggcgttaaaatagcgttcataggcgaccagcgtcattttggcgtcgatcaccacatcttttccctgcggcaggcgcacgatgacatccggctgcatccgcgagcgggcgtcattttcgatgctgacctgggtttcatattcatacccttcacgcagaccggaagcctccagcacccgcgtcaatactacctcgccccagttgccctgggttttattgtcgcctttcagcgcgcgcgtcaggttgatcgcttcctgggccatttgcgcgttgagttgctggagattgcgaatttcgtgggtcagggtatggcgttcttgtgcttctttaccgaagctgtcctgaacctgacggcggaaccgtccgtgtttagcacgatgacgacgtaaaccagcccgacgaccgcgcttcttatgacgaatacgcgggttcaccacgccgtacagcagatcgaccagcaagttgacgaggataatcatcgtcgccaccagcaatacgccgccctgcactaccggatagtcgcggcgttgcagtgcgtcaatcaaccagcgtcccagaccgggccacgagaagatggtttcggtcagaatcgcccccgccagcaatgttcccacctgcaggccgataacggtcaccaccggcagcatcgcgttacgcagcgcatggacgataatcacccgcatgcgggttagccctttggcgcgcgcggtgcggatgtaatcctcgcccagcacttccagcatcgaggagcgtgtcatacgcacaatgaccgccagcggaatagtacccagcacaatggcaggcaagatcatatgggcgacggcatcgataaagttgccgtcttcaccccagatggcggtgtcgattagcataaaaccggttaacggattggagtcatcgaggaacaccatatcgctcacgcgaccggagacgggcgtcaggttccagtgcaccgaaaccagcatgatcagcatcatgccccaccagaagataggcattgaataacctgtcagcgccaggccaaccgctgtgtgatcgaaaatggaaccgcgtttaaccgcagccagcacgccgaccggaataccgacctcttttttcaacat

SEQ ID NO: 30129 - DNA, 3963 bp, Homo sapiens
  SIMILAR (2650)..(3090): 991254mologous to Escherichia coli Proteinase IV (EC 3.4.-.- ),accession number D90820,Smith-Waterman Score=726.
tgaaagcgcttccctttccttactgttgccgcgcgttattgcttatgcttcgtatgccttcctcggatacgaatatattatgacgccggttgccaccaccattatcagtatggtgctgttcgccttctccacctgggtttccaccaacggggcgaaaatgttggggccaattacctccgtcacttcaacgctgatgctgctgttaacgctctcctacattttactggcaggtacggcgctggttggcggcgtacagcctgctgacgccatcaccgttgacgcgatgatcccgaacttcaactgggcgttcctcggcgttaccacctggatctttatggccgcaggtggcgcggagtccgtcgctgtgtacgttaacgacgtcaaaggcggttcgaaatcgttcgttaaagtgatcatcctcgccgggatttttatcggcgtactgtattccgtctcctcggtgctgattaacgtcttcgtcagcagcaaagagttgaaatttaccggccgatcggtgcaggtattccactgcatggcggcgtattttggtctaccgaaagcgtccgcgaagtttgcatgcctggcagccacgctggtgctgacgttctccatccctctcgacccggatcaggatttctcacgcgttattcatgtcgtcgataaaaaaagcggcaaagtggatggtgcctgggagctgtcagataatcttaaagagttacgtttacgccacctcgaaccgaaacgtgatttgatcgttactattggcaaggaggtcaaagcactcaacaacgcaaccttcagtaaagattacgaaaaaactataactacccgcgacatccaacccagcgtcggttttgccagccgtggttcgctgctgcctggcaaagtcgttgaagggctgccggtaatggcgctcaacgttaataatgtcgatgttaacttcttccgcgttaagccagaatctctgccagcattcattagccaatgggaataccgcaattcgctggcgaactggcagtcagacaaactgctgcagatggcggatctggtctacaccggacggtttgatctcaatcctgcgcagtccaacatgaaagtgacattaacgtttaacgaacaacgtcgtgcggcgtatcgtcagcaagggttatggggcgatgcttcgctggccgattactggcagcagaccgctcgtgcgatgccagacaaaattgccgtggtcgataatcatggtgcatcgtacacctatagcgcgctcgatcacgccgcgagctgtctggcaaactggatgttagcgaagggtattgaatcaggcgatcgcatcgcatttcaactgcctggctgtcagattatcgccgacaatacctcactgaccacggcgataacgacccacggcgatgaattagctgcggtgctgtttacctccggaaccgagggtctgccaaagggcgtgatgctaacgcataacaatattctcgcaaccaggtttggcacctggtatgctcggggaaacgcttttggtctatggcaacacgccgaccagactggccccacacgccgccagcacgcaggaatgccacgactgcgattgacccacggtttgagcagcattggcacaatcagccccagcccggcgacaccaagccagaaccaccacgtccagaaaccgccacctaatgccgccaccagcgcacgaactttaccgtcatcgcccagcgccagaccgacaaaaaacgccaccagcaggaagatttcaccccataccacagggatttccatacggtgtacaaactgcgcttccgtggaatgcgggttactgcgttggcgtatcgcaatgggcgatcagcgccaccgccgcaccggacgagatgccggagaagaggaacagcaccggcagagtcgggttattgaggaacggatacgatttcagcgccgacagcagaaagccgtaaacgcgtcagcttaacgggtatcgatatcggcaatcgccacgatgttatggcgtttcaggtaagaagagaggtcttcggtattacggaagttgctggcaatcagcggcaggtcgcgaatcaccagaccttgtgcatgtacctgagaagattcttcaacggcgtcattggtgccgacattgccaatatggggataagtaagagtaacgacttgaacgagaataggaaggatcacggcggtatcgcctccatcaaccgcgcggctatgtacggccagaaatgtgcgctgattgaagccaaagagctgggcggcacctgcgtaaatgttggctgtgtgccgaaaaaagtgatgtggcacgcggcgcaaatccgtgaagcgatccatatgtacggcccggattatggttttgataccactatcaataaattcaactgggaaacgttgatcgccagccgtaccgcctatatcgaccgtattcatacttcctatgaaaacgtgctcggtaaaaataacgttgatgtaatcaaaggctttgcccgcttcgttgatgccaaaacgctggaggcggtcgtccgaaccacccggatattccggggcgtggaatacggtattgattctgatggcttcttcgcccttcctgctttgccagaacgcgtggcggttgttggcgcgggttacatcgccgttgagctggcgggcatccctgctgagcaggtattccctggcgcgcaagggttgcttgagggtttaaccaaaaccggtggcgataccgcgaaatatgcactggaaaacaagctggtcgatgcactggcatcgagtgcggaaatcgaaaaagcactgaccaaagaattcggctggagtaagactgataaaaattatcgcgccatcagttattacgattacgcattgaaaacgccggcagataccggtgacagcatcggtgtcgtctttgctaatggcgcaattatggatggcgaggaaactcaggggaatgttggcggtgataccactgcggcacaaatccgcgacgctggccttgacccgaaagtgaaagcgattgtcctgcgtgttaatagcccaggcggcagcgttaccgcgtctgaagtgattcgcgctgaactggcagcagcccgggcagcggaaaatagtctggattcgattggtgttcatactgatggtgtctcaacttcaccgctggcggatgtttctatcaccaggtcattgccgccggaagcccagctgaagatgcatgtaaacattgaaaatggctttaaagctttacaaccgggttgcgaggcgcgcaattcacccggggccttttgtaaatttgccagggcccatttggacggggggggggggggggacatccccggggttgtggcggctttacctgcccacgacgcgaagcctagcagtgtactgtattataattgttcttgtttcccggtaacccaggtaatcacgcccatgaaacctcgtcagcgtcaggccgccattctggagtatctgcaaaagcagggtaaatgctcggttgaagaattggcgcaatactttgacaccacaggcacaaccattcgcaaagatctggtcattctggaacatgccggaaccgtcattcgtacttatggcggagtggtgttgaataaagaggaatccgatccgcctatcgatcataaaacactcatcaacacccacaagaaagagctgattgcagaagctgccgttagttttatccatgatggcgattcgatcattcttgatgctggcagtaccgttttgcagatggttcccctgctctcgcgctttaataacatcacggtgatgaccaacagcctgcatatcgtcaatgcgctatccgaactggataacgaacaaactatcctgatgccaggcggaacgtttcgcaaaaaatcggcctcatttcacgggcaactggcagagaatgccttcgagcatttcaccttcgataaattgtttatgggcacgacggcatcgatctcaatgcgggcgtaa

SEQ ID NO: 30130 - DNA, 516 bp, Homo sapiens
  SIMILAR (516)..(166): 1001254mologous to Escherichia coli ORF_o154,accession number U18997,Smith-Waterman Score=625.
attgatacgcaaggtatcgacatgatcagtgttgatgaaggcattcctgcggatagcctgaaaggactgcgaaaggctggggttgaagtgcttctggtcggggagtgagaaaggatgtccgctggtcaacacgaatgcgttcggcgggcattgtgaacaccatcaatgggtttcttctgtttctcgggtgagggtttcccagtcggcaggaggatgtcctctttttaacattttgctgaatacggtataggcatctgtttttttaccgtaggtgcgcagagtgttttcatcgttcatccatcccagaatgatgactttctctttttcactataacgaaagaagagacgataacgaccagcaccaaattttacccgtgaccagtctttatttttcccagagcctaacgacttgccatgacggaatgccggtgatgatggattgaccgtgatatgctcctcaatcactttatggactaccgccaataactttgtggcggcttttctctgataattttc

SEQ ID NO: 30131 - DNA, 606 bp, Homo sapiens
  SIMILAR (210)..(100): 571254mologous to Human T-cell lymphotropic virus type 2 gag polyprotein,accession number AF326584,Smith-Waterman Score=147.
tcagtcttcagccactaagccaagaagatctggaaaggagtcagtcagagagccttgggccagaattccaggggctctgggagtggctgccaggcaagttggaccatccgatttccagtggggttccacacagatgggacacggcttaggaggaatcccgggatgcaggcattccttggcccagtggccagatttctggcacttgaagcaagatcccttgactgtgcttttagctccagcctcctctttaagaggaaattgtcgggcaggtgggggagggctagtcgcggaacgaaactgtaagccagaccgggtgtgaggagtggaagtgatagaaggattatagggtgggggagcagaggctgagggacttgctgtggccttgcaaggagcagccagatttgaaattggtgagatattccttgggctgcttggtctgaggacctgatgttgtaggtggatctcctcacagaatgagggcaaggacagggggccagtctcctgaaggagtcctcctgtcccgggtctttggcaccaaatgtcacatgtgtcctccaacaggccctgatgtgtgatgttcccgtccttgggtccatgtgttctcat

SEQ ID NO: 30132 - DNA, 1830 bp, Homo sapiens
  SIMILAR (700)..(1599): 981254mologous to Escherichia coli phospho-beta-D- galactosidase; alpha-subunit,accession number U18997,Smith-Waterman Score=1598.
atgacagaaaaagtaaaacaacagcccgctccggtaacggccagtgatgaaatcgatattggtcgcctggtcggcaccgtcattgaagcgcgctggtgggtgattggcatcaccaccgtattcgccctctgtgccgtggtttacaccttcttcgccacgccgatttatagtgccgacgcactggtacaaatcgagcaaaacagcggcaattcgttagtgcaggacattggttcggcattagccaacaaaccgcctgcatcggacgccgagatccagttgattcgttcgcgtctggtgcttggtaaaacggtggacgatctcgacctcgatattgcagtgagcaaaaacacgttcccgattttcggtgcgggctgggatcgcctgatgggacgtcagaacgagacgcgacgcggctttagcgcccggggcacgggccagatgctgaaaaaagaaggcgtcacgctgatggttgaagccattcacgccagcccgggcagtgagtttaccgtcaccaaatactccacgctggggatgatcaaccaactgcataacagcctgacggtaacggagaacggcaaagacgctggcgttttgagcctgacttataccggtgaagatagatacacaaaccacgcgggtgtagtaaacaccatgataattattgcggctacacacaacttggtttttgagaataactcttgtgaatatgctcatccgatggggaacgcaccggccggtctgacggagtaccagaacgtcttctataagcacgatcgcattcagggtcattatgtctgggagtggcgcgaccacgggatccaggcacaggacgaccacggcaatgtctggtataaattcggcggcgactacggcgactatcccaacaactataacttctgtcttgatggtttgatctattccgatcagacgccgggaccgggcctgaaagagtacaaacaggttatcgcgccggtaaaaatccacgcgcgggatctgactcgcggcgagttgaaagtcgaaaataaactgtggtttaccacgcttgatgactacaccctgcacgcagaggtgcgcgccgaaggtgaaacgctcgcgacgcagcagattaaactgcgcgacgttgcgccgaacagcgaagcccccttgcagatcacgctgccgcagctggacgcccgcgaagcgttcctcaacattacggtgaccaaagattcccgcacccgctacagcgaagccggacaccctatcgccacttatcagttcccgctgaaggaaaacaccgcgcagccagtgcctttcgcaccaaataatgcgcgtccgctgacgctggaagacgatcgtttgagctgcaccgttcgcggctacaacttcgcgatcaccttctcaaaaatgagtggcaaaccgacatcctggcaggtgaatggcgaatcgctgctgactcgcgagccaaagatcaacttcttcaagccgatgatcgacaaccacaagcaggagtacgaagggctgtggcaaccgaatcatttgcagatcatgcaggaacatctgcgcgactttgccgtagaacagagcgatggtgaagtgctgatcatcagccgcacagtaaagccccgcgggcccgcccgttgcccggatagctcagtcggtaccacctactgcaccgaaaacaacccgccgtttgataacggcctgctgaacgcgcagttgctgcaacaggcgaaaccgtttgtcgatgagcgccagagcaaaaccttctggttcgatattcgcaacaccgaccgttctgtcggcgcgtcgctttcaggttcgcatggcacgtggcatgggctgcggtga

SEQ ID NO: 30133 - DNA, 1121 bp, Homo sapiens
  SIMILAR (316)..(447): 481254mologous to Human T-cell lymphotropic virus type 1 Pr gag-pro-pol,accession number AF033817,Smith-Waterman Score=140.
atgcccatcctagcctcctggccccaccctcctggtcctttcctgctgctgactctcctgctaggactcacagggcctcccatgtggaccatgctaaaaaacaatattgcagaaaagaacgatattcacagcagggactctcacgccagccagtctggaatggcctcgtacatgctccaccaccttgaagcctctgcattttctcttcagcatctgcgctgcagcagcagtggcagcatgaaggctggtgtggccaactgctacccagagggcatggtcccaatcggaagctgcagcagcaaagacagtggatcttgctttaagtgccagaaattctgccactgggccaaggaatgcctgcagcccaggattcctcctaagctgtgccccatctgtgtgggacttcactggaaatcggactgtccaactcaccaggcagccactcccagagcccctggaactctggcccaaggctctctgactgactccttcccagatcttcttggcttagtgactgaagactgacactgcccgatcgcctcagaagcctcttagtctgggtagacactttcactagatgggtagaggcctttcctacagggtctgacaaggccaccacggtcatttcttcccttctgtcagacataattccttggtttggccttcccacctctatacagtcattttctctatctttacaaggtggtatttcaggaggaaagcagttatgtggcctgaataacattagacttttcacattattagtattcaggctttgggttaaggaacaaagttgccagcagaccttctgctgtgagagatacccgaagcttggcgtccgtgatggtttagggggcttctgaggcgaactggcagcgtcagtcttcagccgctaagccaagacgatctgggaaggagtcagtcagagagccttgggccggagttccaggggctctagaagtggctgccaggaccaacacctacaagttacttccagctccaagaggccgtgcagaggaaggggcctctgtgtgtaatttttctgtcaggataggccatctgttcctggtttgcattaagagtcttgtacgtgttggtgcactcctggcaatttggaccaa

SEQ ID NO: 30134 - DNA, 4427 bp, Homo sapiens
  SIMILAR (3316)..(4305): 641254mologous to Homo sapiens BC273239_1,accession number AC007204,Smith-Waterman Score=1148.
atggaaaacaatcgcaatttccctgccagacaatttcattcgctcacgttctttgccggtctttgtattggcatcacgcctgtggctcaggcactcgccgccgaagggcaaactaacgcggatgacacgctggttgtcgaagcatcaacgccttcgctttatgcgccacaacaatctgccgatccgaaattctcgcgtccggtagcggatactacccgcacgatgacggtaatttctgaacaagtgattaaagatcagggcgcaaccaaccttaccgacgcgctcaaaaacgtccccggcgtgggtgcgttttttgcgggtgagaacggtaactccaccactggcgacgccatttatatgcgtggtgccgatacctctaacagtatttatattgatggcattcgcgatatcggcagcgtctcgcgcgacacctttcaatacgagcagttaggcggcgaatggcatgcttttagcgatctagacgatccccgcagtgatattaccgggcgcttagcgacgtacatcgctgacccgcaggtggacgttaatatcgccgccttccgctcacaaaaggcctatatctccggtcaggtgaataaatccggtcaacaggcgatcaccaacgtgccactgactattctcgacgccatcaacgccgcaggtggcctgaccgacaccgctgactggcgcaacgtggtgctaacacacaatggtcgtgaagagcgcatttctttgcaggcgctgatgcaaaacggcgacctcaaccagaatcgcctgctttaccccggcgatattctctacgtgccacgtaatgatgatctgaaagtatttgtgatgggtgaagtgaagaaacagagcaccctgaaaatggactttagcggcatgaccctgactgaagccctgggcaatgctgaaggcatcgacatgaccacctccaacgccagcggcatctttgtcattcgtccgctgaaagggcgagggcgggcgtaacggcaagattgccaatatctaccagctggatatggtcgatgccacgtcgctggtgatggcgacagaattccgccctgcaacttatgacgtggtgtatgtcaccaccgcccccggtttcccgctggaaccgtctgatcaatcagttgctgccaactattagcggtgtccgttacatgacggatacagccagcgacattcataactggtaatcgtcatgtttaacaacatcttagttgtctgtgtcggcaatatttgccgttccccgacggcggaacgcttactgcaacgttatcacccggagctgaaagtggagtccgctggactcggcgcgctggtcggtaagggcgctgatcctaccgctatcagcgtcgccgcagaacatcaactgtctctggaaggtcactgtgcccgtcaaatcagccgccgtctgtgtcgcaactacgacctgattttgaccatggaaaagcgccatatcgaacgcttatgcgagatggcaccggagatgcgcggcaaagtgatgctgtttggtcactgggataacgaatgtgaaatccccgatccgtatcgcaaaagccggaaaacgtttgcagcggggtacacatttacttgaacggtctgcccgccagtgggcgcaggcatttgaacgcagagcaggtataagaatgacagaaaaagtaaaacaacatgcccgctccggtaacgggcagtgatgaaatcgatattggtcgcctggtcggcaccgtcattgaagcgcgctggtgggtgattggcatcaccaccgtattcgccctctgtgccgtggtttacaccttcttcgccacgccgatttatagtgccgacgcactggtacaaatcgagcaaaacagcggcaattcgttagtgcaggacattggttcggcattagccaacaaaccgcctgcatcggacgccgagatccagttgattcgttcgcgtctggtgcttggtaaaacggtggacgatctcgacctcgatattgcagtgagcaaaaacacgttcccgattttcggtgcgggctgggatcgcctgatgggacgtcagaacgagacggtgaaagtgaccacctttaaccgcccgaaagagatggcggatcaggtgtttacgcttaatgtgctggacaacaaaaactacaccctgagcagcgacggcggctttagcgcccgggggcaagcgggccagatgctgaaaaaagaaggcgtcacgctgatggttgaagccattcacgccagcccgggcaatcgttactgccaggatgtgaaaagagcacttttttggccccggcggcaatatgcgcttcgccatgctcgcgggagccatatacgccggtgcagtcgaggactacatcaacgccaagttcacgccgccaacgggaagagtaatcccaaccggaggccgcccccgcgcgtaaatcgcggtacacctcgttgggcggaggcttctgaggtgattaggcagtgtcagtcttcagccgctaagccaagaatatctgggaaggagtcagtcagagagccttgggctagagttccaggggctctaggagtggctgccaggcgagctggacagtctgattcccagtggggtcccacacagatgggacatggcttaggaggaatcctgggctgcaggcattccttggcccagtggccagatttctggcacttgaagcaagatcctgagggaggcggtcctgtaggaatgcctgaccactgtggcttaggcattttgaagttcttgtgtgctggagaacaaacagaaaaaaaaaaacacaacaaaaaacataacagaggacaggagaagaagcggagagggagaaagagacaacagcagcaagcccgaagcagagaaaggcggaggagggggcatggggtaactggggtaggaaggggtggtcgtgaaagcgggttcgaggattattcacctcattctgacaaaccgattaaagtcgttggttcgagcacacgtggcacggctgcaactaggcacttacagagagttgtaaagagtcgagaaaatggccgacgatgcactcttaacgcaacggccaagatcatcgagcatattggcacggaaacgcacagctctggcgatatcttcgcagccgacgttttagtgatttcaaatttcgccgtcaacatccaggttaatggttgggcgctatatgctcatccctgttttcaggaaacctacgacgctttagttgccgaagtcgagacattaaagggaaaagatcctgaaaattatcagagaaaagccgccacaaagttattggcggtagtccataaagtgattgaggagcatatcacggtcaatccatcatcaccggcattccgtcatggcaagtcgttaggctctgggaaaaataaagactggtcacgggtaaaatttggtgctggtcgttatcgtctcttctttcgttatagtgaaaaagagaaaaaaattcatactggagggaaaccctacaaatgtgaagaatgtggcaaagcctttaaccactcttgtagccttactagacataagaaaattcatactggagagaaaccctacaaatgtgaagaatgtggcaaagcctttaagcactcctccactcttactacacataagagaaatcatactggagagaaaccctacaagtgtgataaatgtggcaaagcctttatgtcatcctcaacccttagtaaacatgagataattcatacggaaaagaaaccctacaaatgtgaagaatgtggcaaagccttcaaccggtcctcaacccttactacacataagataattcatactggagaaaaaccctacaaatgtgaagaatgtgacaaagcctttaagtactcctatacccttactacacataaaagaattcatactgaagacaaaccctacaaatgtgaagaatgtggcaaagcctttaagtactcctctacccttactacacataagagaattcatactggagagaaaccctacaaatgtgaagaatgtggcaaagccttcaagcggtcttcagaccttactacgcataagataattcatactggagagaaaccctacaaatgtgaagaatgtggcaaagcttttaagtactcctctaaccttactacacataagaaaattcatactggagagagaccctacaaatgtgaagaatgtggcaaagccttcaaccagtcctcaatccttactacacataggagaattcatactggagagatattctacaaatgtgaagaatgtggcaaagcttgtaagtgctcctctaaccttactacacataagaaaattcatactggagagaaaccctacaaatgtgaagaatgtggtaaagcctttaaccggtcctcaaaccttactacacataagagaattcatactggagagaaaccctacaaatgtgaagaatgtgggcaaaggctttaagtact

SEQ ID NO: 30135 - DNA, 406 bp, Homo sapiens
  SIMILAR (1)..(405): 991254mologous to Homo sapiens vascular cadherin-2,accession number AB026893,Smith-Waterman Score=675.
ctcaatggcaaagtgtcccctgagaaagaatcagggccccgtcagatcctgcggagcctggtccggctgtctgtggctgccttcgccgagcggaaccccgtggaggagctcactgtggattctcctcctgttcagcaaatctcccagctgctgtccttgctgcatcagggccaattccagcccaaaccaaaccaccgaggaaataagtacttggccaagccaggaggcagcaggagtgcaatcccagacacagatggcccaagtgcaagggctggaggccagacagacccagaacaggaggaagggcctttggatcctgaagaggacctctctgtgaagcaactgctataagaagagctgtcaagtctgctggaccccagcacaggtctggccctggaccggctga

SEQ ID NO: 30136 - DNA, 400 bp, Homo sapiens
  SIMILAR (215)..(397): 881254mologous to Homo sapiens vascular cadherin-2,accession number AB026893,Smith-Waterman Score=269.
tttgaggtgggtgttatttattactctcattttacaaatgaggaaacagagtaagaggagggcgggaatcacatgatccaggttggtctgactctagaggccaggctgtgtatccagttccctatatgggtaaatgaatgcaaacatgaatgggcatgaatgaatgaatctatatgggaatgtccctacccatggactggttggtttcttttgcaggagtgcaatcccagacacagatggcccaagtgcaagggctggaggccagacagacccagaacaggaggaagggcctttggatcctgaagaggacctctctgtgaagcaactgctagaagaagagctgtcaagtctgctggaccccagcacaggtagggaccccctggagttaccttgaccctgc

SEQ ID NO: 30137 - DNA, 954 bp, Homo sapiens
  SIMILAR (199)..(447): 511254mologous to Felis silvestris polyprotein,accession number X51929,Smith-Waterman Score=192.
atgtataaggtcccagaacaagtactagaaaaagtcacagtccctaaacaaatatgtctgcttcagtatgtggatgatcttcttatatctggtaaagacataaaagaggtaggtgacttctctacacacattctcaatcacttgcagtgtgaggggttgctggtctcaaaagggaaaattcagtatgtagaacctgaagctaaatacttaggctacctaattagtgcagaaaagccatttcaccttttcattaatgtaaataatggggtagccctaggaatgctaacccaagaacatggaggctgccaacagcccgtggccttcttgtcaaaggtcttagacccactcactcataggtggccccagggtatccaatccattgcagctacagcagtattagtcaaagaaagtaggaaggtaacctttggaggaaagttaacagtgattgagaggaaaagacataacaggtattcagtgattgatggagagacgcttgaagaagtagaatcaggaaggctgcctaatgattggtctgcccaaacatgtgaactgtttgcactcagccaagctttaggacatttacaaagccaagggtatactgactcaattctggcccatattggtaagcccgaagaactgggacctgcaggcatgcggacccctgcaggtctcaatggtgcccaggctggagtgcagtggcgtgatcttggctcgctacaacctccacctcccagccgcctgccttggcttcccaaaatgccgagattgcagcctctgcccggtcgccaccccatctgggaagctcctgaaattcaagctaccctcagtctgagtcaacatacaaccccattttatgtccctcctaagaacatgctgatttcagggtgccctcccctgccacagacaccagcaatttctgctacagaacctgcagagaaaaagagaagaaattaa

SEQ ID NO: 30138 - DNA, 3729 bp, Homo sapiens
  SIMILAR (1)..(369): 1001254mologous to Escherichia coli mprA,accession number X54151,Smith-Waterman Score=636.
atgctgaaggctcagggaattaacgagacgttgtttatggcgttgattacgctggagtctcaggaaaaccacagtattcagccttctgaattaagttgtgctcttggatcatcccgtaccaacgcgacgcgtattgccgatgaactggaaaaacgcggttggatcgaacgtcgtgaaagcgataacgatcgccgctgcctgcatctgcaattaacggaaaaaggtcacgagtttttgcgcgaggttttaccaccgcagcataactgcctgcatcaactctggtccgcgctcagcacaacagaaaaagatcagctcgagcaaatcacccgcaaattgctctcccgtctcgaccagatggaacaagacggaagtgaggagcgtctctgcctggccgcccatcgtctgggatgtgaggagcccctctgccgggctgcccagtctggaaaccattcaccatccatccagccagccatccagccagccatccagccagccaaccaactatccatccacaatttgtggacacaattccggcattcaaccaaaattccagttgaatgggtgaatggtgaatggctgaatggacgaatgccaggggatcatcatgaatggcaatgcaactatcagccagccatccagccagccatccagccagccaaccaactatccatccacaatttgtggacacaattccggcattcaaccaaaattccagttgaatgggtgaatggtgaatggctgaatggacgaatgccaggggatcatcatgaatggcaatgcaactatcagccagccatccagccagccatccagccagccaaccaactatccatccgcaatttgtggacacaattccggcattcatccaaaattccagttgaatgggtgaatggtgaatggctgaatggacgaatgccaggggatcatcatgaatggcaatgcaactatcagccagccatccagccagccatccagccagccaaccaactatccatccacaatttgtggacacaattccggcattcaaccaaaattccagttgaatgggtgaatggtgaatggctgaatggacgaatgccaggggatcatcatgaatggcaatgcaactatcagccagccatccagccagccatccagccagccaaccaactatccatccacaatttgtggacacaattccggcattcaaccaaaattccagttgaatgggtgaatggtgaatggctgaatggacgaatgccaggggatcatcatgaatggcaatgcaactatcagccagccatccagccagccatccagccagccaaccaactatccatccacaatttgtggacacaattccggcattcaaccaaaattccagttgaatgggtgaatggtgaatggctgaatggacgaatgccaggggatcatcatgaatggcaatgcaactatcagccagccatccagccagccatccagccagccaaccaactatccatccacaatttgtggacacaattccggcattcaaccaaaattccagttgaatgggtgaatggtgaatggctgaatggacgaatgccaggggatcatcatgaatggcaatgcaactatcagccagccatccagccagccatccagccagccaaccaactatccatccacaatttgtggacacaattccggcattcaaccaaaattccagttgaatgggtgaatggtgaatggctgaatggacgaatgccaggggatcatcatgaatggcaatgcaactatcagccagccatccagccagccatccagccagccaaccaactatccatccacaatttgtggacacaattccggcattcaaccaaaattccagttgaatgggtgaatggtgaatggctgaatggacgaatgccaggggatcatcatgaatggcaatgcaactatcagccagccatccagccagccatccagccagccaaccaactatccatccacaatttgtggacacaattccggcattcaaccaaaattccagttgaatgggtgaatggtgaatggctgaatggacgaatgccaggggatcatcatgaatggcaatgcaactatcagccagccatccagccagccatccagccagccaaccaactatccatccacaatttgtggacacaattccggcattcaaccaaaattccagttgaatgggtgaatggtgaatggctgaatggacgaatgccaggggatcatcatgaatggcaatgcaactatcagccagccatccagccagccatccagccagccaaccaactatccatccacaatttgtggacacaattccggcattcaaccaaaattccagttgaatgggtgaatggtgaatggctgaatggcgtaatgccaggggatcaaccagaatggcaatgcaactatcagccagccatccagccagccatccagccagccaaccaactatccatccacaatttgtggacacaattccggcattcaaccaaaattccagttgaatgggtgaatggtgaatggctgaatggacgaatgccaggggatcatcaagaatggcaatgcaactatcagccagccatccagccagccatccagccagccaaccaactatccatccacaatttgtggacacaattccggcattcaaccaaaattccagttgaatgggtgaatggtgaatggctgaatggacgaatgccaggggatcataaagaatggcaatgcaactatcagccagccatccagccagccatccagccagccaaccaactatccatccacaatttgtggacacaattccggcattcaaccaaaattccagttgaatgggtgaatggtgaatggctgaatggacgaatgccaggggatcatcaagaatggcaatgcaactatcagccagccatccagccagccatccagccagccaaccaactatccatccacaatttgtggacacaattccggcattcaaccaaaattccagttgaatgggtgaatggtgaatggctgaatggacgaatgccaggggatcataaaaaaatggcaatgcaactatcagccaccccatcaggctttgaggaggggccgccctcatcccaatacccctgggctatcgtgtggggtcccaccgtgtctcgagaggatggaggggaccccaactctgccaatcccggatttctggactatggttttgcagcccctcatgggctcgcaaccccacaccccaactcagactccatgcgaggtgatggagatgggcttatccttggagaggcacctgccacctgcggccattcctgttcgggggccgtggggaaggaactggtaaaaccttttgcctttattggttccctagaacaccttaacgcccctttaagaacactttcaccaccttatccacaaaacactgttactctgaaatttccacacaaaattgcttacaaagtgtgggcattaggtggcaggagcctaaatcatctgctcagctcctggaagactggggcatggaagacattgaccacgtgttctcaagaggaggattatcgaaccctcaccaactacatagccttcagccagtttgtcagacccctcattgctgccaaaaatcccaagattgctgtctccaagatgatgatggttttggatgcaaaatggcgggagttcagtaccaataaccccttcaaaggcagttctggggcatcagtggcagtgcggcagcagcagcggtag

SEQ ID NO: 30139 - DNA, 2491 bp, Homo sapiens
  SIMILAR (1897)..(2268): 981254mologous to Homo sapiens vascular cadherin-2,accession number AB026893,Smith-Waterman Score=617.
atgctgcgctctctccgcctgcagcaggagtggctggaatgggaggaccggcggcgggcggctgcccagcagtgccggagccgcaggtgcccgtcaagtccccgggcccgactcactaggcctcaccgttcctgccgagacccagctgtccaccaagccctcttctccggcaacctgcagcaggtccaagccctgttccaagatgaagaggccgccaacatgattgtggagactgtgagcaaccagctggcctggtcggctgaacaggggttctgggtgctgacccccaagaccaagcagacggcacccctcgccatcgctacagcccgaggctacacagactgtgctcgacacctgatccggcagggagctgagctggatgcccgtgtcgggggtcgcgctgccttgcatgaggcctgtgcccgagcccagtttgactgtgtgcggctgctgctgaccttcggagccaaggctaatgtgctgactgaggagggcacgactcctttgcacctctgcacgatccccgagtccttgcagtgcgccaagttgctgctggaagcaggagcgacggtgaacctggcagcaggcgagagccaggagacgcccctgcacgtggcggcggcgcgcggcctggagcaacatgtggctctgtacctggagcatggcgccgacgtgggcctgcgcaccagccagggcgagactgcgctgaacacggcgtgcgctggggccgagggcccaggtagctgcaggcgacaccaggctgcggcgcgccggctcctggaggctggagctgatgcccgggcggccgggcgcaagcgccacacgccgctgcacaacgcttgtgccaacggctgcgggggcctggccgagctgctgctgcgttacggggcccgcgctgaggtccccaatggggcgggccacacgcccatggactgtgcgctgcaggccgtccaggactcccccaactgggagcctgaagtccttttcgccgcactgctggactacggggcgcagccagtgcgccctgagatgctgaaacactgcgccaacttccctcgggccctggaagtcctgcttaatgcctatccttgtgtcccatcctgtgagacctgggtggaggcggtgctcccagagctgtggaaggagcacgaagccttctacagctcggccctgtgcatggtgaaccagccaaggcagctgcagcacctggcccgactagctgtgcgcgctcggttgggaagccgctgccggcagggtgccacccggctgccactgcccccgctcctcagggactacctgctgctgcatatgaagcggagccgctgccgcgaccgaccgcagccgccgccgcccgaccgccgggaggatggagttcagcgggcagcggagctgtctcagtctttgccgccgcgccggcgagcgccgcccgggaggcagcggctggaggagcggacgggccccgcggggcccgagggcaaggagcagccgcctgccttggcctcccaaagtgccgagattgcagcctctgcccggctgccaccccgtctgggaagtgaggagcgtctctgcctggccgcccatcgtctgggatgtgagccgcccctctgcctggctgcccagtctggaaacctaggggacaatggacttcctgcaggaaggcaagagttgaagcaggggacccatgaggaaaccactgcgctggcccaggtgagagctgaagggctgcctgtgctggtatggatggagacagaggatttgcaggtgatgagcttccgaatcagcctgagtagacatgggccgaagccctcccaccccaagtcagacagtttcagtttggcgggatccaaatccctcctgccctttaaggatctcaagcacacagtgaatgatgaggagggtcggtggagtgcaatcccagacacagatggcccaagtgcaagggctggaggccagacagacccagaacaggaggaagggcctttggatcctgaagaggacctctctgtgaagcaactgctagaagaagagctgtcaagtctgctggaccccagcacaggtctggccctggaccggctgagcgcccctgacccggcctggatggcgagactctctttgcccctcaccaccaactaccgtgacaatgtgatctccccggatgctgcagccacggaggagccgaggaccttccagacgttcggcaaggcagaggcaccagagctgagcccaacaggcacgaggctggccagcacctttgtctcggagatgagcctcactgctggagatgctgctggaacagcgctccagcatgcccgtggaggccgcctccgaggcgctgcggcggctctcggtctgcgggaggaccctcagtttagacttggccaccagtgcagcctcaggcatgaaagtgcaaggggacccaggtggaaagacggggactgagggcaagagcagaggcagcagcagcagcagcagcagcagcaggtgcctgtga

SEQ ID NO: 30140 - DNA, 2633 bp, Homo sapiens
  SIMILAR (2620)..(1814): 791254mologous to Homo sapiens Human PRO1342 (UNQ697) amino acid sequence SEQ ID NO:243,accession number Y99408,Smith-Waterman Score=967.
tttttttttttttttttggtatggcatttttgttttgttgttaacagctttattgagctataactcaccccttatatattgagatatagttcactcctttaaagtatacaattcaatgtgttttagtatattcagagttgtgtaaccacgtactatatgatgatttttgaaaatactaacctctcccctctcccctttccctagtctccctctgatgccaagccgaagctggactgtactcccgccatctcggctcactgcaacctccctgtcctgattctcctgcctcagcctgccgagtgcctgcgattgcaggcgcgcgccgccacgcctgactggttttcgtatttttttggtggagacggggtttcgctgtgttggctgggctggtctccagctcctaacccgtgagtgaatccgccaagccttcggccttcccgaggtgccgggattgcaagacggagtcttgttaactcaagtgctcaaatggtgcccaggctggagtgcagtggcgtgatctcggctcgctacaacctcccacttccccagccgcctgtcttggccccccaaagtgccgagattgcagcctctgcccggccgcttaccccgtctgggaaagtgaggaagcgtctctgcctggccgcccatcgtctgggatgtgaggagcccctctgcctggctgcccagtctggaaagtgaaggaagtgtctctgcccggccgcccatcccatctaggaagtgaggagcgcctcttcccacccgccatcccatctaggaagtgagggagcgtctctgcccggccgcccatcgtctgagatgtggggagcgcctctgcccggccgcgaccccgtctgggaggtgaggagcgtctccgcctggccgcccatcgtctgggatgtgaggagcccctccgcccggcagctgcccagtctgagaagtgaggagcgtctcagcccggccgccatcccatctaggaaacatttaattttggcttctgctgctagccggatcttcattgccaaaagaagcacccaaccctctgcagtggctattggccgaccttccgtaccccagtgcactatgcggctttcagttaataactgctctaggccacctggcattttcaaggcatccctgcactcacacagaggtacacaggcactcaccacacagaagaagagcccagcaaagagccccacggccgccacaaccgagaccagggtgatgaggaagatttcccacggcaccagggacccaccaggcttcgcctcactcactgcagtagatgcactatgggaagttgtgtgcattccagtcagagctgctgttccagagcctgcagaggtcacactggacccagagttggtggctgtgttggccccactggaggttgtgctggactcagaattggtggcagtgctggccccactggacactgtgctggactcagagttggtggctgtgctggccccactggaggtcgtgctggactcagaggtggtggctgtgctggccccactggacactgtgctggactcagagttggtggctgtgctggtcccactggaggtcgtgctggacccagagttggtggctgtgctggccccactggaggttgtgctggactcagagttggtggctgtgctggccccactggaggtcgtgctggactcagagttggtggctgtgctggccccactggaggttgtgctggagtcagagttggtggctgtgttggccccactggaggttgtactggactcagagttggtggctgtgttggccccactggagggtgtgctggactcagaattgagttggtggctgtgccggccccactggacactgtgctggactcagagttggtggctgtgccggccccactggaggtcgtgctggactcagagttggtggctgtgccggccccactggagggtgtgctggactcagagttggtggctgtgctggccccactggaggtcgtgctggactcagagttggtggctgtgccagccccattggaggtcgttctggactcagagttggtggctgtgctggccccactggaggttgtgctggactcagagttggtggcagtgctggccctactggacactgtgctggactcagagttggtggctgtgctggccccactggaggttgtgctggactcagagttggtggctgtgctggcctcactggaggttgtgctggagtcagagttggtggctgtgctagccccactggaggttgtgctggagtcagagttggtggctgtgctggccccactggagggtgtgctggactcagagttggtggctgtgctggccccactggaggttgtgctggactcagagttggtggctatgctgatcccactggacgctgtgctgaactcagagttggtggctgtgctgatcccactggaggttgtatggaactcagagttggtgactatgctgaccccattggaggtcacgctggaccctgagatggtggctgtgctgaccccactggaggtcacactggacccagagttggtggctgtgctggctccactggagatcacactggatccagtgttggcagaggtgctagtctcattggaatttgttgctgaagaaatcatataa

SEQ ID NO: 30141 - DNA, 3729 bp, Homo sapiens
  SIMILAR (989)..(879): 1001254mologous to Homo sapiens cytoplasmic polyadenylation element-binding protein long form,accession number AF329402,Smith- Waterman Score=223.
tcatccacgggcccccatgggcatgctgatggtgatcatgttgatgtcgctgatgctgctgagcacctctgtcagcatatggtgcatgcacagcatctcatcgccccgctgtacctgctctgcagactcctccatcagcgtgttctggtccccatgcgagtacaggttggatagcagctccaagaagatgaattccttggtctgaaggttggacagactgccgaagtccaaaagcttcagcatttccttagtgtcaggatctacttcaataatctcctgatccaaggctgagacctcaggaacataattgtctctcctttctctctcctcctcctgcagcttgatggagatacctcttactgggcctctctgaattcgcttcatcagatgcgtgacataacctgctatcttgttgcggagctttttgctggggataatggcgatctcctcgcacacgcgcttgttcgtgtggaagtcgttgcccaggcgcgtgtagtacttttctatgatgacccgggccgccttcttcacggttttggtgcgaacgcggccgagccagcgcaaccttctgggaagagtgcggcgccgagccccggccggtgtggttggggaccgccggctgcgctgagccggagagggcccggctaaacagtgccgggcgccgggcttaatgcggaagccgccggcccgttgcgctccagcctgacagggctctgcgccttcccggcccagggcctctctgtgggctgaggaccgcgggaagctgcagatgggggacgattgtggaggatggcggcctcgagccaaaacacctaccatgttggcgggtcctgccagctttgggcgccacaggccactgggcaaggccagctcctctagctggaatctcggttcttctggttccgcatcagggggctgtggtggcgcaggccctccatgctgtgccgccagtgccagcagctccggcagaagtatttgaagcagacctgtgggtacagcccagatgcaaatatcaaagtcgtccagaagttcagatgtaaaggaggacgaggcatcctcctgatctcgacagaagaaaggaccaggctgagaactgcagatatgacacagagaatcttctaggtaggggtcaatctgaaccaggaggctcgataggcgatagaagaagggcacattattggccacacacaggaatgcgggatattggaatgcaggatatttgcctgttttaaaggaggcttggagagaattatgggccttctttgtgaacttggtggttttgatctccacaaaagcagcgctgactgctttcaggtaactccgttggttattgaaagtcacacgaccagaaccaatgggatacttgtgcttatctgtgtcaatcccggcatacaccactccaccaaataggtcgttcaagatggctgccagggcctcagcatttagcattccatgcagagcaccgacaaacaccgtcctgctggggtcaagcctctgagatgggctccggacaaagttactgtcggctaatacccaggggatcacctgcacctccttgcagcgcatccttcggctggacatcttgaaataatattcactcaggccatctgggctcagcgggtcatgagagcaagcctgaagcaaggatcggacagacttctctagttcgaagaccagatacacataccctttgggaggacaccggggatgcttgccatccttaccaggccactccacactcaaagagccaaaaacacggaaggtgttaactaatccagcttctgtaatatcccaaggaacacctcctagaaacaccttgcaagagtagatggggttcttatagttccggggaggaagctggccactccaggtacaggtggcttcattcacagctgcagcttgtcggtgcagcctggcctctctctctatgctgaaggggtctttgggagcttcgaggaggtcccaggacggccacacagaagctcctggccatctctttgaagcactggttggggagggagtgactgcagcaagagcagcttgctcttggtccatccgagaccctacccccatctttaaagggtctctgggaccaccccctgacagagacaggaagggcagaggtggagaaatgcgaaggcttgacttcatctcctcctggtcctgggccagcctgacgatgtcctcctctcccagtgctgcgtctctgacactgccccctggctgatgtactttccttctccttccataaagtcgctgcagcttctccatggccccctgcagggcccggtgggtctccccaaacacagactcacccccactctctggggctggggccgctacctctggctttttctgggacgaggccactgggtgagccaggggctggcagcacaccctttgttcctcctgggcattggctccagcggagttgaaaaatgccaccatggcctcccggctctccaggtcccctgggatgttcggcatgggccgaagcgcctcctgctcactgtccagatgtcctcctccatctccaccctgcttgtccgcacatccaagctccttgtgggactggggctccaggtactggtctggctgctgctgcagactcggagcctcttggctcttcagctccacctgccggaagaccctgtccccaggctgcagctgcctgtggcctggcacctcccctccccagaggctggtgcccgcctcccacatcttcttggatgggtcggaggttacagtctctttcagctcacccgacttctccagctcctttacttgctgctccaactgcagtgtgctcttgttctcgttgttcagctcctcgaagccgctgcgtggctcggcccgctgctcgtacagggcttcccaccccagctccagcatcctctccagctcccgcaacctctccagctcccgcagagtctcctgctgccacagcctctcatcctgttgccgaagcctctcctgctccaggagctcctccacctcgtccagcagcctctccctctccagcagcctctcctgctcctcctgccgcctctcctgttttaacagcttctccacctcttccagcagcctctcctgccctggcagcttctcctgttcacacagcctctcctcctgttcacgtagcctctcctcctgttcacacagcctctcctcctgttcacacagcctctcctcctgttcacgtagcctctcctcctgttcacgtagcctctcctcctgtctcctgttcaggagactcaacatctgattgttttccacctcagcctggagctgtcttcccacactctctagctccttccttaggtggttggtctcatcttgtagctgctccaccttagatggccctgctgggggctgtggggccaggggttcagccgtctggtttttgagtttgaacaagctcctcccaagcttctgtaccagatgtatctcatgcttcttctcctccttagatgtgcgaaccagtgaattgatgttttcagtgagttgactgattattgcggagcttgaatccagggctactgctagttcttggtactggctatccccaggtgagtggtaaccaccagaagtggctgtgtcagggctactgccattgactttctttttcctgttagctcctgctggaatgccagggctcttcctctgccaatatgcttttaactttttcttggctgcggccaatttcccctgttgtgttttttctgacat

SEQ ID NO: 30142 - DNA, 3362 bp, Homo sapiens
  SIMILAR (947)..(2908): 1001254mologous to Homo sapiens Na+/glucose cotransporter,accession number M24847,Smith-Waterman Score=3382.
acccgacaacatggtaggcgttttggctcgaggccgccatcctccacaatcgtaccgcatctgcagcttcgcggggacctcagtccacagagaggccctgggccgggaaggcgcatagccctgtcaggctggagcgcagcgggccggtggctttcgcattaagccccgcgcccggcactgtttagccgggccctctccggctcagcgcagccggcggtccccaaccacaccggccggggctcggcgccgcactcttcccagaaggatgcgctggctcgtgagtgatactgtcctctgcacccgcagggccgcgttcgcaacaaaacccgtgaagaaggcggccccgggtcatccatagaaaaagtactacacgcgccctgggcaacggacttcccacacgaacaaagcgcgtgtgcgaggagatcgccatttatcccccagcaaaacagtcccgcaacaaggttaccaggttatgtcacgcatctgatgaagcgaattcaaaaagggccaagtaaaaggtatctccatcaagcttgcaggaggaggaaagaaaaaaggagagacaattatgttcctgaggtctcagccttggatcaggagattattgaagtagatcctggacactaaggaaatgctgaagcttttgggacttcggcagtctgtcccaacctttcaggttcacttcaggcctacagttgggggatggaattttcaaaacgccttcgggggacctggtttggaattttttctcgtagtgctgtttagtgaccagatcctggttttgattggcaccaatgacggcaagagagagtccaacaggatcctaccagtgagcagtgacccagcagctcaggccagctgcatgggagcaggtgggcatcacactgtgttctcctagaagcatccattcaggggaaattgggtttgaagtgtccctttagaagacaccgcggtcacccggcctgttgagacccacgagctcattcgcaatgcagccgatatctccatcatcgttatctacttcgtggtagtgatggccgtcggactgtgggctatgttttccaccaatcgtgggactgttggaggcttcttcctggcaggccgaagtatggtgtggtggccgattggagcctccctctttgctagtaacattggaagtggccactttgtggggctggccgggactggggcagcttcaggcatcgccattggaggctttgaatggaatgccctggttttggtggttgtgctgggctggctgtttgtccccatctatattaaggctggggtggtgacaatgccagagtacctgaggaagcggtttggaggccagcggatccaggtctacctttcccttctgtccctgctgctctacattttcaccaagatctcggcagacatcttctcgggggccatattcatcaatctggccttaggcctgaatctgtatttagccatctttctcttattggcaatcactgccctttacacaattacagggggcctggcggcggtgatttacacggacaccttgcagacggtgatcatgctggtggggtctttaatcctgactgggtttgcttttcacgaagtgggaggctatgacgccttcatggaaaagtacatgaaagccattccaaccatagtgtctgatggcaacaccacctttcaggaaaaatgctacactccaagggccgactccttccacatcttccgagatcccctcacgggagacctcccatggcctgggttcatctttgggatgtccatccttaccttgtggtactggtgcacagatcaggtcattgtgcagcgctgcctctcagccaagaatatgtctcacgtgaagggtggctgcatcctgtgtgggtatctaaagctgatgcccatgttcatcatggtgatgccaggaatgatcagccgcattctgtacacagaaaaaattgcctgtgtcgtcccttcagaatgtgagaaatattgcggtaccaaggttggctgtaccaacatcgcctatccaaccttagtggtggagctcatgcccaatggactgcgaggcctgatgctatcagtcatgctggcctccctcatgagctccctgacctccatcttcaacagcgccagcaccctcttcaccatggacatctacgccaaggtccgcaagagagcatctgagaaagagctcatgattgccggaaggttgtttatcctggtgctgattggcatcagcatcgcctgggtgcccattgtgcagtcagcacaaagtgggcaactcttcgattacatccagtccatcaccagttacttgggaccacccattgcggctgtcttcctgcttgctattttctggaagagagtcaatgagccaggagccttttggggactgatcctaggacttctgattgggatttcacgtatgattactgagtttgcttatggaaccgggagctgcatggagcccagcaactgtcccacgattatctgtggggtgcactacttgtactttgccattatcctcttcgccatttctttcatcaccatcgtggtcatctccctcctcaccaaacccattccggatgtgcatctctaccgtctgtgttggagcctgcgcaacagcaaagaggagcgtattgacctggatgcggaagaggagaacatccaagaaggccctaaggagaccattgaaatagaaacacaagttcctgagaagaaaaaaggaatcttcaggagagcctatgacctattttgtgggctagagcagcacggtgcacccaagatgactgaggaagaggagaaagccatgaagatgaagatgacggacacctctgagaagcctttgtggaggacagtgttgaacgtcaatggcatcatcctggtgaccgtggctgtcttttgccatgcatattttgcctgagtcctaccttttgctgtagatttaccatggctggactcttactcaccttcctttagtctcgtcctgtggtgttgaagggaaatcagccagttgtaaattttgcccaggtggataaatgtgtacatgtgtaattataggctagctggaagaaaaccattagtttgctgttaatttatgcatttgaagccagtgtgatacagccatctgtacctactggagctgcagaagggaagtccactcagtcacatccagaaaaaggcagactaagaatcagaagccatgtgattgatgtctgacgtgagtctgtctcaggtagattccgggtgtcagtgtggtttataatccttgaatattgttttagaaactttggtctccctggttcctgccacttttcctgtccgtcctcctccccattttttttttaaaagaaagctgttttcccctcatcaaa

SEQ ID NO: 30143 - DNA, 1491 bp, Homo sapiens
  SIMILAR (787)..(1488): 1001254mologous to Escherichia coli K12 putative transport protein,accession number AE000114,Smith-Waterman Score=1208.
atggcctttcgcatgatgcgttattctatagccgccatgcaccggcatctggaggctgaccacgataagctgccgctggtggtgccgatactgttttatcagggcgaggccacaccttatccgctatcaatgtgctggtttgatatgttttactcgccggagctggcgcgacgcgtctataacagtcctttcccgctggtggatatcaccatcacaccggatgacgaaatcatgcaacatcggcggattgcgattctcgaactactgcaaaaacatattcgccagcgcgacttaatgttattgcttgagcaactggtcacgctgatcgacgaagggtacactagcggaagtcagttagttgccatgcaaaactatatgctgcaacgcggtcatactgaacaagcggatttgttttacggtgtgttgagagacagggaaacgggaggggagtctatgatgacgctggcgcagtggtttgaagagaaagggattgagaaggggattcagcagggaagacaggaagtaagtcaggaattcgcccagcgtcttctgagtaaaggaatgtctcgggaagacgttgcagagatggcaaatttacctcttgctgagattgataaggttaaaaacaatgagcacaaaaccactcttccgttacggaaagcgaaaaaatcatccggtgaacctgacgtcgtcctgtgggcaagcaacgattttgaatcgacctgtgccactctggactacctgatcgttaagtcagcaccagacaacgctcactatcaaggcaatgaagagatgatgatcaaactgtttggcgaaccggtggctttcgatgaagagcagccgcagcaaacccgttttcgcgatctgtttaatcgccgccattttccttttgttctgtttgttgccgccatctggacctgccaggtgatcccaatgttcgccatttacacctttggcccgcaaatcgttggtttgttgggattgggggttggcaaaaacgcggcactagggaatgtggtgattagcctgttctttatgctcggctgtattccgccgatgctgtggttaaacactgccggacggcgtccattgttgattggcagctttgccatgatgacgctggcgctggcggttttggggctaatcccggatatggggatctggctggtagtgatggcctttgcggtgtatgcctttttctctggcgggccgggtaatttgcagtggctctatcctaatgaactcttcccgacagatatccgcgcctctgccgtgggcgtgattatgtccttaagtcgtattggcaccattgtttcgacctgggcactaccgatctttatcaataattacggtatcagtaacacgatgctaatgggggcgggtatctcgctgtttggcttgttgatttccgtagcgtttgccccggagactcgagggatgtcactggcgcagaccagcaatatgacgatccgcgggcagagaatggggtaa

SEQ ID NO: 30144 - DNA, 701 bp, Homo sapiens
  SIMILAR (269)..(538): 971254mologous to Escherichia coli racC,accession number M24905,Smith-Waterman Score=449.
ttcccgggtcgacgatttcgttgttgactaagaaaataaaatgtgcttaccacctttgcaaaaaagacgttgaagaaagcaaagctattgaaagaatgcttcacttcatgcacgggattttatcaaaagacgaaccgagaaaatattgcagtgaagcttgtgccgaaaaagaccagatggcacatgaactttaattaattgactattcgaaactgaatttatgccagaaatggcaggtattcgctcaaccctaattaaggagaaaaacatgattaccaattatgaagccactgttgtaactaccgatgacattgttcacgaggtgaatctggaaggaaagcgcattggctatgtaattaaaacagaaaataaagaaaccccattcactgtggttgatatcgatggtccatcaggcaacgtaaaaacacttgatgaaggtgtcaaaaaaatgtgcctggtgcatatcggaaagaatctgcccgcagaaaaaaaagccgaatttctggcaactctaattgcaatgaaattaaaagcgaaaaaatcatccggtgaacctgacgtcgtcctgtgggcaagcaacgattttgaatcgacctgtgccactctggactacctgatcgttaagtcaggtaaaaaactgagcagctattttaaagctgttgccacgaattttcctgtcgttaatgacctgcccgctgaag

SEQ ID NO: 30145 - DNA, 2316 bp, Homo sapiens
  SIMILAR (1788)..(925): 971254mologous to Escherichia coli yejE,accession number U00008,Smith-Waterman Score=1500.
tcattctggtgctgtatgtaagctgggttcggctctatagaacccataacctaggggacagggaacctctgcccggtccagggagatgctcattccattcgcagtgccgttggcgttaacgccgttgttctgactgtccagtacgtggaaactatttttctggcgcgatgcttttataacgagatcgctgtaaaaaccgttttgtgccatgtaactggcgtacattcccatgtagtctgaacgtgcggtaccgtcgcctccgctatagtccggcgatgcatgtataacaacacggccggggatctcaacaagggtgaagcaatcggtgttatcgcggcacagtccatcggtgaaccgggtacacagctgaccatgcgtacgttccacatcggtggtgcggcatctcgtgcgggtgctgaatccagcatccataaacaagtgctcaatcatgtaccattgatccgggcacatggttgaaggttgtacggctagagtgaccccggcttcaggcacggcaaagcccggataaccgatcccagaggccagccagggcggaggctgcaaggtggaagctcggagggaaacggcagcgatatgaaggctgctcgcaaagtatccggcaataagcacagcacttcttcccaccagcatgcagtttggtgcccaggagttccgagttaaagtggcaaggcatgggcagctgatcaacggtttgtgccccggatccttggaaaaggcaggggacatgtcgatgctgcatagctcagttggaaatgcagaaatcacctgtcttctgtgtcgctcaatggcgaaaatcagcgttttgttggcgacgcccgctaccgcacgagattgcaacgtggaagtgccaatctcttcaaacgacaacggtgcggaacacttcaccaaaacctggaacttctttagcagttcaccgagtgacggtgaaccgagcggtagaccgaagccgaggaaatcgagcgaggtcaggctggttatcgaactacataaaataaacggtaaaaaggtgagggtcgcgaccatggcattaggcaacatatgacgcaggatgatactgcgatcgctgacgccaagcgcctgtgccgcacgaatgtagtcgaaattacgagtacgtaaaaactccgcccgcaccacgccgaccagactcatccagccaaacaagacagtaattgccagcagccaccagaagttaggctgtacgacgctggaaagtaaaataatcaaaaacagcgtcggcatccccgaccatacttcaataaagcgttgtccccagagatcgactttaccgccgtaatagccttgtagcgcccccgccagcacgcccatcacgctggaacagagagtcagcatcaggccaaacagaaccgagatccgcgtgccatagagaatgcgtgccagcacatcgccgccgttggcatccgttcccagccagttttgccgggagggtggagaagggaagggcttattggtagcaaagttgatactggtagcaccaaagcgaatcggtgcccacagtacccagccgttattttccagccgtcgtctcagccacgggtcctgatcatcagcctgacttgccagcgggccgccaaaatcgctttcgctgtagtttttcaataacgggaaataccaactgccgtcataacgcaccagcaacggtttatcgttggcgataagttcagaacacttactcaaaccgtacaagacgaggaaaatccataacgaccagtagccgcgacggttatgacgaaaacgcgcccaacgggcccctttcgcacgcgcggtcaccacgtattgcttgcgcacttcatcaaggaatgagttttttgtcagcatggtcagcgccgcaaagccaccaatcactgtcgccagcaccggcagcgtgatatgccacagataatcggtgattttctgataccacggcagcgaatcaaagttagcggaaaccaggccgcgtagagggaacaggtcgatagcacatgtgattacgccttctccctctcgttcccccagcgcgtaagtcactgaaactttggccaacttcagtctccccgtgaacccgtggtgaccccgggcccgcggtgtcgcatggttctcccaggatgcacgctggagatctgagaatggacagactgcctcctcaagtggtctctgaccctgagtagtataatagcaagtcccgaatgaggcaaagtctgcttgcttggtccggccattgttaacgttatactcgatgttcgttgagactacgtagggttgaccaatgtaagcttcagtagcattggaaggttccat

SEQ ID NO: 30146 - DNA, 2196 bp, Homo sapiens
  SIMILAR (1215)..(631): 891254mologous to Escherichia coli rpoC,accession number V00339,Smith-Waterman Score=875.
atggaattgaatattacttcaaagtctaatccgtttggtgatccgacagcagaaaatgataaaaagatgttgagtaatgctttcattgaaactgctgactttaggactctaattgaaactgatgacaggaccattgttgttggtagacgagggacagtaaatacaacgccccagatagagctgccaggtgcgcgaattttgctggtcgtcggtctggatagtcagcgcatttgccggacaagcacaggcgcaggcaccgcaggcaatacattggctgggcatcagcgtcacacggtcggtacaggagtagcagggatcaaggctaccgataatcagcggtgcgtcagaaacggtattgccgcgcagcatgtaacgcaacaccggccagttggcgtaggtggcggcacggcagcgccagcggaacaatttttggttatcaccgagcatgctccagtgcacgtcttcaccgcgtggcgcttcaacaaagcccagcgcgaatgcgtgaggtttatagctaaagccttcggtcagcagtggggtatccggcatgttgtcgagggcaaattccagcattgccagcgaatcaacgtctctttgacacggaccatcacgcgggagaaaacatcgccgccggtaaagaccaccggtgatgtccttggtaccgccggattcctgcggaatacgcgccagggtgtcaccagagctgatctgtacgccatcttccagctgaacaatcgctttacccggcaggaagtactgcgctggcatatcggtacctgggatcagaacgtcgttaccctgagcatcaacgattttcagtgccggacgcagatctttaccacctgcggtacgttctgcggaatccagaaccaccagcgaagacagaccggtcagttcgtcggtctgacgcgtaatggtctggccgtcgatcatgtcagtaaagcgtacaaaaccgcttacttcggtgataaccggcatggtgtgcgggtcccagtttgcaacggtttcgccgccagcaacctgttcgccatcgcctttcgccagtaccgcaccgtaaggtactttgtagctttctttagtacgaccgaattcgtcgatcagtttcagttcagtattacgggaagtgataaccagtttaccgctggagttcaaaccgacttcacgctgctgagcttgatgctgggtccgagtacggatagtcacttccagtgccgcgagcgcgggctgctggcaccaattactgacgtggttaaacgtggcgctctgtatattggctggagcgcaggcgctaaccttgcttgcccaactattcgtaccaccaacgatatgccgattgtcgatccgcaaggtttcgatgcgctaaatctgttcccgctgcaaatcaacccgcacttcaccaacgcgctgccggaaggccataaaggtgaaacccgtgagcagcgtattcgcgaactgctggtcgtcgcgccagaactgacgattattggtctaccggaaggtaactggatcacatgcctgatgcgacgcttgacgcgtcttatcaggcctacaggattcacaatattaatactcgtcccgtccttcatcttcatccggctgttccagcacactgtaagccaccgaacaaatcaagagttcaggcgctgcatatctcccaggggatcctctagagtggttgaactggaaccgttcgaccgcgaactgtttggcggcattgtgggttggtgtgacagcgaaggtaacggcgaatgggtggtgaccatccgctgcgcgaagctgcgggaaaatcaggtgcgtctgtttgccggagcggggattgtgcctgcgtcgtcaccgttgggagcgaggatgagcattccattcacccgctggccggaagagtttgcccgtcgctatcgggaaaaaggctactggcaggatttgccgctgactgacattctgacgcgacatgctgcgagtgacagcatcgcggttatcgacggcgagcgacagttgagttatcgggagctgaatcaggcggcggataacctcgcgtgtagtttacgccgtcagggcattaaacctggtgaacccgcgctggtacaattgggtaacgtcgatgaattgtctctttcctttttcgcgctgctggaactgggcgttgcgccggtgctggcgttgttcagccatcagcggggtggacaacaaccgggctaa

SEQ ID NO: 30147 - DNA, 3401 bp, Homo sapiens
  SIMILAR (595)..(1215): 981254mologous to Escherichia coli K12 putative dehydrogenase,accession number AE000370,Smith-Waterman Score=1063.
atgaataaatggagcaggttaaaccattgttcgcttttggtaattaatcccgaaaataataacgataaacaattttcattgttgcttgaggaataccgttcactttttggtcttgccagtttgcgttttcagggtgaccaacatttgctggatattgccttctggtgcaacgaaaaaggggtcagcgcccgtcagcagcttagcgttcagcaacaaaatggtatctggacattagttcaaagcgaagaggcggagatccaaccacgcagcgacgaaaaacgcattctgagtaatgttgctgtactggaaggtgcgccgccgctatcggaacactggcaactgttcaacaataacgaagtcctgttcaatgaagcccgtaccgctcaggcggcgacggtggtcttttctttacagcaaaatgcgcaaatcgagccactggcccgcaacattcataccctgcgtcgccagcgcggtagtgcgatgaataatctcgtgcgggaaaataccgctagcctgcgcgccaccgatgaacgtttgttattggcctgcggtgcaaatatgggtatttcgtggaatgcgccactctccgatggtaatctggcggagctgcggggaattacgctggcggaagatggctcgctacgtatcggctctgcaacgacatttacccagctaatagaagatcctataactcaacgtcatctcccggcgttatgtgctgcggccacgtccattgctggaccgcagatccgtaacgtcgctacctacggtggaaatatttgcaacggtgccaccagcgcagattctgccacgccaacgctaatttatgacgcgaaactggagatccactccccgcgcggtgttcgtttcgtcccgattaatggctttcacaccgggccgggcaaagtgtctcttgagcatgacgaaatcctcgtcgcctttcattttccgccacagccgaaagaacacgcgggcagcgcgcattttaaatatgccatgcgcgacgcaatggatatttcaacgattggctgcgccgcacattgccgactggataacggcaatttcagcgaattacgcctggcatttggtgttgccgcgccaacgccgattcgctgccaacatgccgaacagactgcacaaaatgcgccattaaacctgcaaacgctggaagctatcagcgaatctgtcctgcaagatgtcgccccgcacgccgcgatcggcacacataaccaggaccgcttttttgcccacatgcgggatgccattcaaccccggcattcctggcagcagtatggcaagcacctccagcttatccaagctaccaacaggggcgttagccgcacaccgcgtggtgatgcaaccgtgctgattgttaacgataaaagtcaggttgaagcgcgccctgtcgttgccagtcaggcgattggcgataaatggttgattagtgaaggactgaaatctggcgatcaagtcattgtcagcggcctgcaaaaagcgcgtccgggagagcaggttaaagccactaccgatacccccgcagatactgcatcgaatatccaacaattgcaccggctgcggtttctggttcagcaaactatccgggcggctgagccccaaacgggccaggatccggggacgcaagttatcgaacagaatatgaacgggatcgattacctgatgtatatgttcttcatcagcgatttcggcggtagcgtgacaattacccttaactttcaatgcgggaccgaatctgatatcgcgccagtgccagtgcagaacaaactcagattggcacgcggtggtgtccggagaagttcaccagcagggatcaaggattggaaaacccgtattggtgtgaaccagacgaccctgatcgtcataaaccggaacgcagggcgaatcgtgagcacagcccgccagcaatgcgagggccgaccagctgatcggcccgaggggttatttcacgcgttcttgcgcttctttcagcagttgctcgagcagtgcacctggtttggcgtatttacgggacaggatcatcgcggcgatgatataaggcttccagctggcttctttgtaggtagcgatacggtatttttcgaatacgccttcagtcacttcaccttctttacaggatacgccgctgatatcagctggccagcagtgcatgtacagggcttcgccatcacgggtcagttccatcatctcttcagtacaatgccagtctttgtgttgcgcgttctgtgccagacactgtttttccagtggcttttaagccttcgtgatcgttcgcacgcagcaatacagtacgctcttccatcactttgtaaggtgcccatgactgcggataacgatgtctgcgtctttgaaggcttcttccagccggtgacttcacgaaatctccccgaggcttacatatggtatcccaccttaaccctctcggacaggcaagacttccgatgtgcagggaaatcctacgaagagtgtcacacgcgaagtcgcttcacagtgccagttaaaaagggggaagtttcatgcgcagtacggtccggagagacgtcctctcgagtcaccgttgcgtacccggtaagtgaaggcgataaagtcgtctctctgatcgtgcctcgtggcgatggcgcaatcctcaccgcaacgcaaaacggttacggtaaacgtaccgcagtggcggaatacccaaccaagtcgcgtgcgacgaaaggggttatctccatcaaggttaccgaacgtaacggtttagttgttggcgcggtacaggtagatgactgcgaccagatcatgatgatcaccgatgccggtacgctggtacgtactcgcgtttcggaaatcagcatcgtgggccgtaacacccagggcgtgatcctcatccgtactgcggaagatgaaaacgtagtgggtctgcaacgtgttgctgaaccggttgacgaggagagatctggataccatcgacggcagtgccgcggaaggggacgatgaaatcgctccggaagtggacgttgacgacgagccagaagaagaataattttacttcttcatgccaaaagggagctatctcccttgtttgaattgaaaagtccaggctgcaaagtctgggcttttgtcgtattagggcacggtaaagtttggctgtgcccgtaaaaaatggctggctatacacaaggaatgtggcaatgagtggtgaaaaaaaggcgaaaggctggcggttctatggtcttgtaggttttggcgcaatagcactgctttccgctggcgtctgggcgttgcaatatgctggcagtgggccagaaaaaacgttgtcgccgctggtggtgcacaacaatctgcaaatcgatctcaatgagccggacctctttctcgacagagactctctgagccagcttcccaaa

SEQ ID NO: 30148 - DNA, 2560 bp, Homo sapiens
  SIMILAR (2384)..(2482): 271254mologous to Escherichia coli acriflavine resistance protein,accession number M94248,Smith-Waterman Score=42.
atgggcggcatggtggagcagcagctttctgatgcaatcaccgcgatgcataaccaggacagcgatctggcgaagcgcgtcatcgaaggcgacaagaacgtcaacatgatggaagtggcgatcgatgaagcctgcgtgcgcattatcgccaaacgtcagccgacggcgagcgacctgcgactggttatggtgatcagtaaaaccattgccgagctggagcgtattggcgacgtggcggacaaaatctgccgtactgcgctggagaaattctcccagcagcatcagccgttgctgatgctgcacgacgtgctggacgggtaccgaatgcgaagtcgcgatccccgtcagcaccgcgccctgcaacaacgaaacaccaagaatgagtttaaaaccgatcgccgcaccaataaattccgccagcttccatacacaacatctgaaagcaggcgatcgcgtagtaataagtgggctgcagaaagtgcgtcctggtgtccaggggggctggcgatcctcaaactgccggtggcgcaatatcctacgattgcaccgccggcagtaacgatctccgcctcctaccccggcgctgatgcgaaaacagtgcaggacacggtgacacaggttatcgaacagaatatgaacggtatcgataacctgatgtacatgtcctctaacagtgactccacgggtaccgtgcagatcaccctgacctttgagtctggtactgatgcggatatcgcgcaggttcaggtgcagaacaaactgcagctggcgatgccgttgctgccgcaagaagttcagcagcaaggggtgagcgttgagaaatcatccagcagcttcctgatggttgtcggcgttatcaacaccgatggcaccatgacgcaggaggatatctccgactacgtggcggcgaatatgaaagatgccatcagccgtacgtcgggcgtgggtgatgttcagtggtaccgagatcgagttgtatcatgccgaaatgacgatctcaatgccgcccaggaggcgctcgaagagcgtgcgcgtaatgaactcagcatgaccagcccgggcgaaactttttatcgtctggtgcctgacgcgtcgaagcgcgcacacccgggaattaacatggcaaccactcatttggatgtttgcgccgtggttccggcggccggatttggccgtcgaatgcaaacggaatgtcctaagcaatatctctcaatcggtaatcaaaccattcttgaacactcggtgcatgcgctgctggcgcatccccgggtgaaacgtgtcgtcattgccataagtcctggcgatagccgttttgcacaacttcctctggcgaatcatccgcaaatcaccgttgtagatggcggtgatgagcgtgccgattccgtgctggcaggtctgaaagcccgctggcgacgcgcagtggggtattggtgcatgacgccgctcgtccttgtttgcatcaggatgacctcgcgcgattbttyggcgttgagcgaaaccagccgcacggggggggatcctcgccgcaccagtgcgcgatactatgaaacgtgccgaaccgggcaaaaatgccattgctcataccgttgatcgcaacggcttatggcacgcgctgacgccgcaatttttccctcgtgagctgttacatgactgtctgacgcgcgctctaaatgaaggcgcgactattaccgacgaagcctcggcgctggaatattgcggattccagtttgatattggtcggatgcccgcccaaatgttgctgagcaaaattaaaaataacgatcacaaccacaacactgttgacctcgggcaggaaactggaggatatctcatgagtgaacccctgttaattgcccgcacgccggacacagaactgtttttactgccgggaatggctaaccgtcatgggctgattaccggcgcaacggggacgggtaaaaccgttacgctgcaaaaactggcggagtcattgtcggaaatcggcgtgccggtgtttatggctgatgtgaaaggcgatctgaccggcgtcgcgcaggcaggaacggtgtcggaaaaactgctcgcaaggcttaaaaatatcggcgtcaatgactggcaaccgcatgccaatccggtggtggtgtgggatatctttggcgagaaaggccatccggtgcgggcgacggtttcggatctggggccgctgttgctggcacgactgttgaatctcaacgatgtgcaatctggcgtgctgaatatcatcttccgcattgctgacgatcaggggctgttactgctcgactttaaagatctgcgggcaattacccagtacatcggcgataacgccaaaccatcagcccacagctactcaatgcgatcgattaagccatccggcaggtgcgggtttagtggcccgacattcaccggccaggcggtggtgatttcatctggtgcagcggcatggacgattttcacgggcgtcaggggctacctggcccgcatcagctgcggcgtttgcctggccgttattagtttgcgctccgctatcggcagccagtgcggcaccgctggcaaggcttag

SEQ ID NO: 30149 - DNA, 2823 bp, Homo sapiens
  SIMILAR (403)..(1098): 1001254mologous to Escherichia coli K12 putative ligase,accession number AE000494,Smith-Waterman Score=1256.
atggcaaccactcatttggatgtttgcgccgtggttccggcggccggatttggccgtcgaatgcaaacggaatgtcctaagcaatatctctcaatcggtaatcaaaccattcttgaacactcggtgcatgcgctgctggcgcatccccgggtgaaactcgctggcgatagccgttttgcacaacttcctctggcgaatcatccgcaaatcaccgttgtagatggcggtgatgagcgtgccgattccgtgctggcaggtctgaaagccgctggcgacgcgcagtgggtattggtgcatgacgccgctcgtccttgtttgcatcaggatgacctcgcgcgattgttggcgttgagcgaaaccagccgcacgggggggatcctcgccgcaccagagcgcgatagaatttgtggcacatttatgggcggtctggcgatgctggcgcgccagttaggccatgaagtaacgggttcggacgccaatgtgtatccgccgatgagcaccttacttgagaagcaaggcattgagctgattcaggggtacgatgccagccagctcgagccgcagccggatctggtgattattggcaacgccatgacccgtggaaatccgtgtgtggaagcggtactggaaaaaaatatcccttatatgtcaggtccacagtggctgcacgattttgtgctgcgcgaccgctgggtgctggccgttgccggtacacacggcaaaaccaccaccgcgggaatggcgacctggattctggaacagtgtggttacaaaccgggctttgtaatcggcggtgtgccggggaactttgaggtttcggctcatctgggcgaaagcgacttctttgttatcgaagcggatgagtatgactgcgccttcttcgacaaacgctctaaatttgttcattactgcccgcgtacgctgatcctcaacaaccttgagttcgatcacgccgatatctttgacgacctgaaagcgatccagaaacagttccaccatctggtgcgtatcgttccggggcagggccgtattatctggccggaaaatgacatcaacctgaaacagaccatggcgatgggctgctggagcgagcaggagtctgagtttgtgaagtcccgtggggttcccgagttctcggtcctttgtgggaccggtctggtcaccatccatgttggaggctgggagcgtccacctgcgccagatgctgctagttggcccagagacgacaacacatgcccgggttccgaacattcaagtggcccagccggttttgcgggctgtcgtttcccgttcctctccgcgcctgtgacggccagcggccagccccgtgtcctgtccccggttcgttgtattccccgggtctcccgggtattcgtgcgcctcgtccagcggccatgctttacccgccggggttctgcgctggaattcggtccttggatcacgatttccagtgccgatcgcagatcttaccacctgcgggtacgttctgcggaatccggacccgccagcgaagacagcccggtcagttcgttcggtctgacgcgtaatggtctgcccgtcgatcatgtcagtaaagcgtacaagaccgcttacttcggtgataaccggcatggtgtgcgggtcccagtttgcaacggtttcgccgccagcaacctgttcgccatcgcctttcgccagtaccgcaccgtaaggtactttgtagctttctttagtacgaccgaattcgtcgatcagtttcagttcagtattacgggaagtgataaccagtttaccgctggagttcacaaccgacttcacgttgctgagcttgatgctacctttgtttttcacttggatgctggattcagcagccgcacgagatgccgcaccaccgatgtggaacgtacgcatggtcagctgtgtacccggttcaccgatggactgtgccgcgataacaccgattgcttcacccttgttgatgatgtggccacgcgccagagttctcttccagcaggtcacaccactgttcgtgcagcagcgtgttgcgcggaacgaggatatcagcagtacccggcttcagaacgtcttcagcagttacacgacccagtacgcgatcgcgcagcggctctttacgtcaccaccctaataccgagtcaggtccgatacggagatgattggccgacaattcagggacccgctaagcgtttaacgaagcggatattcgctaccacgagtcggtgctccagtcgttgcataacccggtgttacagcaacttagcattgcgatcaggcgaccactgcctggagagcaggcaatcagaagcaggcgtcacgcgcctgaacggaaaatctccggctgcggtgttagcagaagtcacgaccgactggcgtgaagagaaaacgccagtggtaatggcaggaatggttggcagcaacgtcggctggaaagttgcaccgtatttatctgttcctgcctgtttttcgtctattggcgaacaattaacgtcagttggcgacaatatctggattattcccggattatgtgtctctcatgacgataaccacaatgtgatgcgcggcgaagaaacacaattgatcggcgcgcgagctctggctccttcctctctttatgtcatgcccgaacccatgcaaatgcatcgtggccgtaacacccagggcgtgatcctcatccgtactgcggaagatgaaaacgtagtgggtctgcaacgtgttgctgaaccgtttgacgagaaagatctggataccatcgacggcagtgccgcggaaggggacgatgaaatcgctccggaagtggacgttgacgacgagccagaagaagaataa

SEQ ID NO: 30150 - DNA, 476 bp, Homo sapiens; identical to SEQ ID NO: 4971
  SIMILAR (239)..(415): 941254mologous to Homo sapiens ribosomal protein L5,accession number U14966,Smith-Waterman Score=279.
  misc_feature (1)...(476): n = a,t,c or g

SEQ ID NO: 30151 - DNA, 458 bp, Homo sapiens; identical to SEQ ID NO: 5847
  SIMILAR (94)..(456): 1001254mologous to Homo sapiens MSTP030,accession number AF113210,Smith-Waterman Score=641.
  misc_feature (1)...(458): n = a,t,c or g

SEQ ID NO: 30152 - DNA, 1212 bp, Homo sapiens; identical to SEQ ID NO: 23468
  SIMILAR (949)..(1209): 871254mologous to Homo sapiens ribosomal protein L5,accession number U14966,Smith-Waterman Score=379.

SEQ ID NO: 30153 - DNA, 1443 bp, Homo sapiens; identical to SEQ ID NO: 23467
  SIMILAR (865)..(1440): 871254mologous to Homo sapiens ribosomal protein L5,accession number U14966,Smith-Waterman Score=881.

SEQ ID NO: 30154 - DNA, 570 bp, Homo sapiens; identical to SEQ ID NO: 24009
  SIMILAR (218)..(337): 951254mologous to Homo sapiens Misshapen/NIK-related kinase MINK-1,accession number AB035698,Smith-Waterman Score=197.

SEQ ID NO: 30155 - DNA, 2670 bp, Homo sapiens
  SIMILAR (1747)..(1845): 1001254mologous to Homo sapiens ribosomal L5 protein,accession number U76609,Smith-Waterman Score=164.
  misc_feature (1)...(2670): n = a,t,c or g
aatttttggtagagatgaggtctcattctgtcatctaggctggggtccagtgagctgtgattgtgccactgcagccttgacctcctggactcacgtgtagtcctgtagctgggactacaggtgcatgccaccattaataattgccacctggctaattagtttttttatggagacaggtctcactgtgttgccttagctggtctcaaactcctgggctgaagtgatcctcccacttcagactcccaaagtgcttgagattacaggcatgaaccaccacacctggcctgatttttttcttgagtaagatggagttctgtagtgataattcacattgcataaggtgaaaattgggaatttgttaggaaaaggtgagttacatttagaagttaaagtgtttaccaacattgatttagtttagttccttttgagaatctggcttagaaggacaagagtaagttatggttgcattaatatagtagggcacatgaaatgaaaccaagtactgtttgctttcctttgtttcagatggaggagatgtataagaaagctcatgctgctatacgagagaatccagtctatgaaaagaagcccaagaaagaagttaaaaagaagaggtatgtcgtctttttttttgtcttttcaagaaaacggttgggaatggttcccacgtggggcagactgttggtgtaattgtgcaaactcgatcactagctctgcgtgatgtggcagaagcgaagggaaccaggtttgcaaaagtaactgtggggatggaatgtgttacctcagacataacggaggnggttctttctatcttagtacagtctaagtactggttactgcatttttttattggctgacaagttgctttttgttgaattttcatgttttgaatctttaaatggaatagaaagtaataattaatgaacatgtaagcataaagtgatgtgatggcccacaaatacaatgtatagtaattaaatcaatgtatttaacatatcacctcaaatacttaacactttgtggcaacaacatttgaaatttattctcttaattgtgaaatgtacgatattctatattcatcatgctgcgcaatagaactaaaaacaaaatcatactcctccctactcctcctgttggagattttatacttgactatcatctgcccattctttgcacccaccagcctctgtaaccaccattctgctctctgcttctgtgagttccattgttttagattctatatgaatatgaagtatttgtctttttgtgcctggcttatttncactgagcacaatattctccaattcattcatgttgcaaatgacagaatttccatcatttttaaagactgggtaataatccattatgtatatgtataccacatttcctttatccatttatctgttgctattaatatatagtgctgcaatgaacatgggagtgccactctcttggacaaactgatttcaaaacatttgggcaaatacctagaagtggtattactgaatctaacatgtcttctatttgacttttggccctatggtagtaggacatcacagaagttggggtttgggaaagttagcttaagatcatacataagtaaatgtatttgaacttggattatttaaccttctgattgcaaagtcttaaatattctctatcaaaattaaattttattaaaattttaaattaaatattctattctcttcagttatagtttaaaaaatatatattcctatcttttgtaggtggaaccgtcccaaaatgtcccttgctcagaagaaggatcgggtagctcaaaagaaggcaagcttcctcagagctcaggagcgggctgctgagagctaaacccagcaattttctatgattttttcagatatagataataaacttatgaacagcaactatttctgtgttaagctcttattcttatgaaccttataggaaataccctgaaatattttggaaaagcaaaggagttgacaggtttttttctccaagaaaacaagtgtaactaactttttaagaaaaaaagttgttatttcttgggcttctgttttacctgacaggagtcattatcccttatgttgtatgatgaacagctctccctaaaaatttggcaagcaacagaccaaccatcagtgggaaatattcttccatccatttattataaccaggatgatgaatgggaaaagtaccttaaagtaaacaaaactggtgctaatccatggcgttgaagggaagttttgagagaaagctgtccagtgatggtcaacatagatttttaacatgttccactttaggtaggcgaaacctttgagcagaaaatagtggatcttttctccaaaaggtgtttaattttatggagatgttgaaaggtacatgccaaatctgagtatacgtgtgaaaataatatgaaagaggagcaaatactaaaccttgtatatcaagtttacatggggaaaaaaacattagataaataaatacatttacatgcctctttaagaaatagccctttggcccacaggatatactgtttgaaaatggaaagttattactaaaaagtctgctataatttattttagtcttgcacttaacagtcccactttcacatagttcaaaatcaggatatgtggatctggatgggccttaagagtcagtttggagggg

SEQ ID NO: 30156 - DNA, 1298 bp, Homo sapiens
  SIMILAR (308)..(619): 671254mologous to Myxine glutinosa ribosomal protein L5,accession number AF152472,Smith-Waterman Score=354.
  misc_feature (1)...(1298): n = a,t,c or g
cctagcgccgctgggcctgcaggtctctgtcgagcagcggacgccggtctctgttccgcaggatggggtttgttaaagttgttaagaataaggcctactttaagagataccaagtgaaatttagaagacgacgagagggtaaaactgattattatgctcggaaacgcttggtgatacaagataaaaataaatacaacacacccaaatacaggatgatagttctgtgtgacaaacagagatatcatttgtcagattgcttatgcccgaatagagggggatatgatagtctgcgcaacgtatgcacacggaactgccaaaatatggtgtgaaggttggcctgacaaattatgctgcagcatattgtactggcctgctgctggcccgcaggtttcttcaataggtttgggcatggacaagatctatgaaggccaagttggagttgactggtgatgaatacaatgtggaaagcattgatggtcagccaggtgccttcacctgctatttggatgcaggccttgccagaactaccactggcaataaagtttttggtgccctgaagggagctgtggatggaggcttgtcctatcccctcacagtccccaaacgattcccctggtttatgattcttgaaagccaaggaatttaattgcagaagtacatcggaagccacatccatgggcccagaatgttgccagattacatgcgcctaccttaatggaagaagatggaagatgccttacaagaaacagttcgtgcgtcaatacgtaaagaacagcgtaacttccagacatgatgggaggagatgtattaagaaagctcatgctgctatacgagaggaatccagttctatggaaaagaaggcccaaggaaagaagtttaaaaagaagaggtggaaccgtccccaaaatgtcccttgctcagaagaaggatcgggtagctcaaaagaaggcaagcttcctcagagctcaggagcggggctgctgagaagctaaacccagcaattttctataaagatttttcagatatagataataaacttattgaacagcnnnnnnnnnnnnnggggggggccctttaaaaagatccctgggggggcccaattttaccggggcttgcaaggttatagctctctccttatggggagccttattatatcctatctggggatttttgggaaggacccttactttgggggggggacatcttggtccaaccttcctcgggagattaatcgcttaggggaatcctaaatttttaaaggggttagggggataatatattgattttttctggggggg

SEQ ID NO: 30157 - DNA, 2043 bp, Homo sapiens
  SIMILAR (346)..(1392): 631254mologous to Pectobacterium chrysanthemi SufD protein,accession number AJ301654,Smith-Waterman Score=1095.
atgcaattgagcagcagtgaaccttgcgtggtgatcctgaccgaaaaagaggtagaggtaagcgtcaataaccatgctacgtttacccttccgaaaaactacctggccgccttcgcgtgcaacaataacgtcattgaactctcaacgttaaatcacgtattaatcacccacatcaaccgtaacatcatcaacgattatctgttgtttttaaataagaacttaacctgtgtaaagccctggtcgcggctggcaaccccggttatcgcttgtcatagcccagcgtccgcgacagcgtctgcgcgcattattcaaagcgatataagcattggtggttgcgggagagaatccccacagcagcgtgatgccttagcgttaacgttagactccgtgcggctggtgtttgtcgatgggcgttacgtgcccgcactgagcgatgcaactgaaggcagcggatatgaagtgagcattaacgacgaccgtcagggtttacccgacgctattcaggcggaagtgtttctgcatttgacggaaagcctggcacaaagcgtgacgcatatcgccgtgaagcgcggtcaacggccggcaaagccattgctgttaatgcatatcacccagggcgtggcaggtgaagaggtgaacactgcccattaccgacatcatctggatctggcggaaggtgccgaagcaacggtgatcgaacattttgtcagcctgaatgatgctcgtcattttaccggggcacggttcactatcaacgtcgcagcgaatgcccacttgcagcatatcaagctggcgtttgaaaacccgctcagtcaccactttgctcataacgatttgttgctggctgaggatgccaccgcatttagccacagtttcctgctgggtggcgcagtgttacgacacaacaccagtacgcaactcaatggcgaaaacagcacgctgcggatcaatagcctggcgatgccggtgaaaaaggaggtgtgtgatacccgtacctggctggaacacaataaaggtttttgtaacagccgacagttgcacaaaactatcgtcagcgacaaaggccgcgcggtatttaacggtttgatcaacgtcgcgcagcacgccatcaaaacggatggtcagatgaccaacaacaatctgctgatgggcaaactggcggaagtggatacgaaaccgcagctggaaatctatgcagatgatgtgaaatgcagccacggcgcgacggtggggcgtattgatgatgaacagatattctatctgcgctcgcgcgggatcaatcagcaggatgcccagcagatgatcatttacgccttcgctgccgaactgacggaagcactgcgtgatgaggggcttaaacagcaggtgctggcccgaatcggtcaacggctgccaggagcgactttcgtcttatacgccaccgaatgctggcacctgaaaaaattgggctggacatacaaaagacgcctggaatgcaggaacatgaggcggaaattgcacagttacttcagcatattcatgataaggggccggtacgttcagccgattaagagcatcctcgataaagctactcttagaccggaacagattaacatcatcagcacagcctatactttttttaatgtggaacgtcattctctgttccacatggaaactgtggtcgatgccagccgtatgatttctgatatggcccggttgatgggggctctaaaagctgtcgttatggcgaccggcttcgagaaccctttgtcctcagttaatgaaattgagacgaaactttctgccctactgggtagtgagaccactggtgaaatcctttttgacctcttgtgcgctaacggtccagagtggaaccgcttcgttacgctggaaatgaaatatggccggatcatgctggatacggccaaaattattgatgagcaggacgttccgacacatatcctgagcaaactgacttttactttacgtaatcatcctgagtacctagaagcctctgttttgtctcccgatgatgtacgccaagtcctgtcaatggatttttga

SEQ ID NO: 30158 - DNA, 1180 bp, Homo sapiens
  SIMILAR (10)..(528): 971254mologous to Escherichia coli fecI,accession number M63115,Smith-Waterman Score=850.
tttcgtcgcatgactgaccgcgccactaccacagcttccttaacgttcgagtcgctttatggcacacatcacggatggctgaaaagctggctgacgcgcaaactccagtctgcttttgatgcacatgacattgcccaggacacttttttgcgggtaatggtcagcgaaacgctctcgacgatccgcgatcctcgctccttcctctgcactatcgccaaacgcgtgatggtggacctggttcaccgaaacgcgctggaaaaagcgtatctggagatgctggcgcttatgccggaggggggagcgccttcacctgaggaacgcgaaagccaactcgaaaccctacaactcctcgacagcatgctggacgggctaaacggcaaaacacgtgaagcgtttctgctttcgcaactggatggtctgacatacagcgagattgcgcacaaactcggtgtttccatcagctccgtgaaaaaatacgtggcgaaagccgtcgagcactgcctgctgttccgtctggagtatgggttatgaatcctttgttaaccgattcccgccgtcaggcgctgcgttcagcttcccactggtatgccgtgctaagcggcgagcgcgtcagcccacaacaggaagcgcgctggcaacagtggtatgaacaggatcaggataaccagtgggcctggcagcaggttgaaaacctgcgcaaccagcttggcggtgtgcctggcgacgttgccagccgggcgttgcacgatacccgcctcacccgccgtcacgtgatgaaaggattactgctgttgctcggcgctggcggaggctggcagctctggcagtcggaaaccggcgaaggtctgcgggcagattaccgcaccgccaaaggcacagtcagccgtcaacaactggaagatggctccctgctcacgcctgatctccggttttacctgcagtccgctgccgtccagcagttgttgcaggccgctctcgacgtcgtaatcgccgtgcaggccgttgctctgcttgccgcgcgtcaggctggcgtcaaccgagagggtaaatccgctgtgtgcggcatactgattgagcgctttatcgagcgatcccggtgcgatattaacctgtgcagcaaaagcggaaaacgagagaccggccagcggcagcaggctcaggcgaatggtgttaaccaaag

SEQ ID NO: 30159 - DNA, 649 bp, Homo sapiens
  SIMILAR (2)..(649): 1001254mologous to Escherichia coli fecR,accession number M63115,Smith-Waterman Score=1091.
aggattactgctgttgctcggcgctggcggaggctggcagctctggcagtcggaaaccggcgaaggtctgcgggcagattaccgcaccgccaaaggcacagtcagccgtcagcaactggaagatggctccctgctcacgctgaatacccaaagcgcggcggatgtgcgttttgatgcgcatcagcgcaccgtccggctctggtacggtgaaatcgccattactaccgcgaaagatgccctgcaacgccccttccgtgtcctgacccgtcagggccagctcactgctttagggacagaatttaccgtccgccagcaggataatttcacgcagcttgacgtgcagcagcacgctgtggaagtgcttctcgccagtgcccccgcgcaaaaacgcatcgtgaacgctggtgaaagcctgcagttcagcgcctctgagtttggcgcagtgaaaccgctggatgacgagagtacaagctggacgaaggacatcctgagcttcagcgataaaccgctgggtgaggtgatagccacgctaacccgttaccgcaacggcgtgctgcgctgcgatcccgccgttgccgggctgcgcctgagcgggacgttcccgctgaaaaataccgatgcgatcctgaacgttatcgcgcaaacgctt

SEQ ID NO: 30160 - DNA, 1932 bp, Homo sapiens
  SIMILAR (949)..(1407): 911254mologous to Escherichia coli fecR,accession number M63115,Smith-Waterman Score=698.
atggttggaagaccacacaaagaggcccaaggacacaacaccaggggaccagagagacaagcccgggtcaaacagaacaggggaccagaagatatggccaagcgaccagttaagaatagtccacacgtgcaggggactgcgcaggacgccccacctggaaacagacaggcacattccaacacacaaacaatccagaccggcagagcacaagtctccaagcaaggagtagggccggaaaaacaccaccagaaagaggaccgcgtaagtaacacgacaacacccacaggagcgattataccacacaaccagagaaacaatccccgaaacgctctggaaaaagcgtatctggagatgctggcgcttatgccggaggggggagcgccttcacctgaggaacgcgaaagccaactcgagaccctacaactcctcgacagcatgctggacgggctaaacggcaaaacacgtgaagcgtttctgctttcgcaactggatggtctgacatacagcgagattgcgcacaaactcggtgtttccatcagctccgtgaaaaaatacgtggcgaaagccgtcgagcactgcctgctgttccgtctggacggcgagcgcgtcagcccacaacaggaagcgcgctggcaacagtggtatgaacaggatcaggataaccagtgggcctggcagcaggttgaaaacctgcgcaaccagcttggcggtgtgcctggcgacgttgccagccgggcgttgcacgatacccgcctcacccgccgtcacgtgatgaaaggattactgctgttgctcggcgctggcggaggctggcagctctggcagtcggaaaccggcgaaggtctgcgggcagattaccgcaccgccaaaggcacagtcagccgtcagcaactggaagatggctccctgctcacgctgaatacccaaagcgcggcggatgtgcgttttgatgcgcatcagcgcaccgtccggctctgggccagctcactgcggttagggacagaatttaccgtccgccagcaggataatttcacgcagcttgacgtgcagcagcacgctgtggaagtgcttctcgccagtgcccccgcgcaaaaacgcatcgtgaacgctggtgaaagcctgcagttcagcgcctctgagtttggcgcagtgaaaccgctggatgacgagagtacaagctggacgaaggacatcctgagcttcagcgataaaccgctgggtgaggtgatagccacgctaacccgttaccgcaacggcgtgctgcgctgcgatcccgccgttgccgggctgcgcctgagcgggacgttcccgctgaaaaataccgatgcgatcctgaacgttatcgcgcaaacgcttcccgttaaaattcagtctattacgcggtactggataaacatttcaccactagttttcacgtttaacttggcagccctgcttgatttacagggtttggagaaagtgctaatccgccaggaggatggtaaagctaatattgttcaacaggaggttgcccgcacttacttgcagactgtaatggccgatgcttacccgcatctccacgtgactgccgaaaaattgctcgtttcagggctatgtgttaaactcgccgcccctgatttgcctgactactgtatgttactttatcctgaactacgcaccattgaaggtgtcttaaaaagtaagatgagtgggttaggcatgccagtacagcagccggcaggttttggaacttactttgataaacctgctgctcattacattctgaaaccgcaatttgcagctactcttagaccggaacagattaacatcatcagcacagcctatactttttttaatgtggaacgtcattctctgttccacatggaaactgtggtcgatgccagccgtatgatttctgatatggcccggttgatgggtaaaagccaaccttag

SEQ ID NO: 30161 - DNA, 773 bp, Homo sapiens
  SIMILAR (208)..(741): 841254mologous to Escherichia coli evgA protein,accession number D11142,Smith-Waterman Score=739.
atgggacatcatggtctcaacgatcccgcaggagaaagccagaaacttcgccgcatcgctgacagcactgttatggaaggtgcgaataagcggggaaattcatctcggcttagtgatctcgcctcaatccccgttataaggcaggttatccagcgaataagcaaccctgaagcaagcatcgagagcttgcaggaacggcgtttttggttgcagtcaattcgtaatttattgatcaaaaacgatattgaaatcttagcagagttgactgaaggcggaagtgccgttcagcgggtggaaacacttaagcctgatatcgtcatcattgatgtcgatatccccggagttaacggtatccaggtgttagaaacgctgaggaagcgccaatatagcggaattattattatcgtctccgctaaaaatgaccatttttacgggaaacattgtgctgatgctggcgctaatggtttcgtgagtaaaaaagaaggcatgaacaatatcattgcggctattgaagctgcaaaaaatggctactgctatttccccttctctctcaaccggtttgttggaagtttaacgtccgaccagcaaaaactcgactccttatcgaaacaagaaattagtgtcatgcggtatattcttgatggcaaggatagggccccgccgacggccagggcgacccggctcatctgcgtcaagaccatcagcaggatgacgatgccgatgagcggcaggatcaggtgcacgaacagccggggggagccgcgcctgatccg

SEQ ID NO: 30162 - DNA, 912 bp, Homo sapiens
ttaattcttcatgccgagaccctggatatttcccattatcgtgtcccttaattcttcataagggtcactattacaagacatgcctgggccatctaaagtaatatccgaaattttagcaacaagaggagcggtgaacatcacaactgtggcgtacaagtccgcagtcatattgtcttttaccaccgcatccgcagtgtctttatccagtcgcaatgtcatcggcccgctattcgccagccagccatctttcacaatccatttttcattgttcagccataacggcagtgcaccactaaatgccccggacatggcgaattgtttcggattgacggcgctaaccagttcgctggatgagagattattcagccgcaacagcgccgggtcatgttgcggcatacgtaattgtttcatcagtacgttaccgcctaacacatcgacgctaacatcagtcaacagcaagggttcttcttcagtccacggataacgcccttgcaaatcagccgtaatatttttcgctgtcaccagattaatcacttcggcaattcgcaacgtaacggggccgcgagtccccagatgccaggctccatcggcaaaacggaaaggcaggacaaaatcgacaccgttaacctgattatctggcatccaggcactaccgcctttcaacacgccgtgtcctcccgcgcggaatcgtttccgctcctctaccatatccagggctttggtaatggccgcacccattggtgtatcgccctgggcaaacaggatgggcggaaaaaaattagcggcgctggtaaagggttgttccacatgcaccgggccgaacgtcacaatgccgagttccactctttttaaagccagcggatcagcaagcagttcatcacgaaaggtaaccaattccggcgttaagttcat

SEQ ID NO: 30163 - DNA, 2775 bp, Homo sapiens
  SIMILAR (2068)..(2679): 971254mologous to Escherichia coli K12 putative transport protein,accession number AE000114,Smith-Waterman Score=1066.
atggattccgactctggcagatacagggagtggcacagccagttttcatcatcacgatccgggaagtcgaagcggctatgcgcgccacggctctcgagcacgacaggcttctatcgtagccagccagaagtcaatgatgccatcaccaaagcggcaaaagcgaaaggtgcctactctttctacatcgttcgtcaaatcgatgccaaccagggcggcaaccagcgtattactgcattcatctataaaaaagatgctaagaaacgtatcgtccagagcccggatgtgatcccggcagattccgaagcaggacgtgcagctctggctgccggtggcgaagccgcgaagaaagttgagatcccgggtgttgcgactaccgcatcaccaagttctgaagtcggtcgcttctttgaaacccagtcatcaaaaagcgggcgttacaccgtcacgctcccggatggcactaaagtcgaagaactgaacaaagcgaccgcagcgatgatggtcccgttcgacagcatcaaattctctggcaactacggcaacatgaccgaagtctcctatcaagttgcgaaacagttaagtacaagattggcctgctatcaagcgcactcgagcgctaaagctcgaaagcccatcgtctgggtacgtgacgcacagcatccctcctttagcggcgcgctgtcactggacgccgggcaaacgctgttcactggcggcagtgtgttaccgccatcaaccttaaaatttagcgtcgatgggcgcgatcctacctatttcctctttaaaggcgatttacatgctggtgagattggcccggttcgggtaaatggtcgctgggacggtattcgtctgcgcggtaacgcctggtggcctaaacaatcactgaccgtattccagccgctggtgccacccgactggaagatgaacttacgcgatggtgaactgtatgctcaggttgcattttctgctgcgcctgaacaaggattccgcgcgggaggacacggcgtgttgaaaggcggtagtgcctggatgccagataatcaggttaacggtgtcgattttgtcctgcctttccgttttgccgatggagcctggcatctggggactcgcggccccgttacgttgcgaattgccgaagtgattaatctggtgacagcgaaaaatattacggctgatttgcaagggcgttatccgtggactgaagaagaacccttgctgttgactgatgttagcgtcgatgtgttaagcggttgcaaaatcaacctggtcgtcgataacggcaaaatcgtccgggcggaggcagcgcaggggaaaaccaaccagggtaccctgtgtctgaagggttattatggctgggacttcattaacgatacccagatcctgaccccgcgcctgaaaacccccatgatccgtcgccagcgtggcggcaaactcgaacctgtttcctgggatgaggcactgaattacgttgccgagcgcctgagcgccatcaaagagaagtacggtccggatgccatccagacgaccggctcctcgcgtggctctaagttaaccctcggcgaaaccgatttcagttccaatattttcgatggtttttcttataccggcgcggcactggcgagtgacgatcgaatgttaccgtgggagctgcgtggctacgccccacaaattagcggtattgcacagaccaatgccacggtgacgatcagtcaatcaggccgcgtcatttaccagaaaaaagtcccgccaggcccgtttattattgatgacctcaatcagtctgttcagggcacgctggatgtcaaagtgacggaagaagatggtcgggtgaacaatttccaggtttcggcagcatcgaggcccttcctgactcgccagggacaggttcgctataaattggccgcggtgactattggatactcacaggacgagcagggcttaggctacggtctaattatgcaacaagatgatgcgacaacagaacgatttcgttggcgcgtatcgatcgtaggacgcgattttacagttagcgaatgtctggatccaaatccactgcagcgatggtctattgccgcgatgtggtatgtcggcgcgacctgtgccgatctggtcggctactggctttatgatgtggaaggcggctggcgctggatgctgggtagcgcggcgatcccctgtttgttgattttgattggtcgattcgaactgcctgaatctccccgctggttattacgcaaagggcgagtaaaagagtgcgaagagatgatgatcaaactgtttggcgaaccggtggctttcgatgaagagcagccgcagcaaacccgttttcgcgatctgtttaatcgccgccattttccttttgttctgtttgttgccgccatctggacctgccaggtgatcccaatgttcgccatttacacctttggcccgcaaatcgttggtttgttgggattgggggttggcaaaaacgcggcactagggaatgtggtgattagcctgttctttatgctcggctgtattccgccgatgctgtggttaaacactgccggacggcgtccattggtgattggcagctttgccatgatgacgctggcgctcgcggttttggggctaatcccggatatggggatctggctggtagtgatggtctttgcggagtatgcctttttctgtgcgggccgtgtaattggcagagcctctatcctaatgaactcctcccgacagatatcgcgcctctgccgaggcggggattatgtccttagtgtctgtatatag

SEQ ID NO: 30164 - DNA, 1389 bp, Homo sapiens
  SIMILAR (817)..(1386): 1001254mologous to Escherichia coli evgA protein,accession number D11142,Smith-Waterman Score=958.
atgagccaggcatggcggcatgtgcgtgtagtcccagctactggggaggctgaggcggtagtgcctggatgccagataatcaggttaacggtgtcgatttgtcctgcctttccgtttgccgatggagcctggcatctggggactcgcggccccgttacgttgcgaattgccgaagtgattaatctggtgacagcgaaaaatattacggctgatttgcaagggcgttatccgtggactgaagaagaacccttgctgttgactgatgttagcgtcgatgtgttaggcggtaacgtactgatgaaacaattacgtatgccgcaacatgacccggcgctgttgcggctgaataatctctcatccagcgaactggttagcgccgtcaatccgaaacaattcgccatgtccggggcatttagtggtgcactgccgttatggctgaacaatgaaaaatggattgtgaaagatggctggctggcgaatagcgggccgatgacattgcgactggataaagacactgcggatgcggtggtaaaagacaatatgactgcgggttcagcaattaactggttgcgctatatggaaattagccgttcatcgacaaaaattatgactagctcgcaagatcaaattgatgcccagaggttgaaaaacacccacgacacagcggtagggccaggatttgaaccaagtccaaagtcccaatactgggctttcaggaagggagaattatgtacagttttttgcacaattttggcctggaatgagtggggctgggaggagaggccattgcttctaaacaacgacgctgatggaccagcaattcgtaatttattgatcaaaaacgatattgaaatcttagcagagttgactgaaggcggaagtgccgttcagcgggtggaaacacttaagcctgatatcgtcatcattgatgtcgatatccccggagttaacggtatccaggtgttagaaacgctgaggaagcgccaatatagcggaattattattatcgtctccgctaaaaatgaccatttttacgggaaacattgtgctgatgctggcgctaatggtttcgtgagtaaaaaagaaggcatgaacaatatcattgcggctattgaagctgcaaaaaatggctactgctatttccccttctctctcaaccggtttgttggaagtttaacgtccgaccagcaaaaactcgactccttatcgaaacaagaaattagtgtcatgcggtatattcttgatggcaaggataataatgacattgctgaaaaaatgttcatcagcaacaaaactgtcagcacttataaaagtcgcctgatggaaaaattagaatgtaaatcactgatggatctttacacattcgcacaacgtaacaaaatcggctaa

SEQ ID NO: 30165 - DNA, 645 bp, Homo sapiens
  SIMILAR (2)..(643): 961254mologous to Escherichia coli K12 putative kinase,accession number AE000361,Smith-Waterman Score=1104.
gggtaccgggggatccatccgttgctgccgtgcgttattgaaagccgatggcacgcctgctgcgccgttgattagctgccagaatgcacgcgttccacgcccttacgaccacactacccctgacgtggcatatgtcacctctttttcgggttatctgacgcatcgcttaaccggcgagtttaaagacaatatcgccaactattttggtcagtggccggtggattataagagctgggcatggagcgaagatgctgcggtaatggataagtttaatatcccccgtcatatgctgtttgatgtgcaaatgcctggcaccgtcctcggacatatcacaccacaagccgcactggcgacacatttcccggcaggactgccggttgtttgtaccaccagtgataaaccggtagaagctctgggggccggattactggatgatgaaacggcggtaatttctcttggcacttacatcgcattgatgatgaacggcaaagcactgccgaaagatccagtagcgtactggccgattatgtcttctattccgcaaacattgctgtatgaaggttacggtattcgcaaaggcatgtggacggtgagctggctgcgcgacatgctaggcgagtcgttaattcaagatgccagggcgca

SEQ ID NO: 30166 - DNA, 1788 bp, Homo sapiens
  SIMILAR (844)..(1281): 981254mologous to Escherichia coli K12 putative regulator,accession number AE000136,Smith-Waterman Score=725.
atggcatgtctcgccaagggtgcctcagtgactctgctccaccggcccatgacccaggaactaagcatcagtcatagggctgtggagactgagcaggtcatctgcgacacaagtgctgtggaagttgaggcgcaacgaatgaagttaattcttggacacaaatctacacaagtagaaacgtctggattgaaagccagacagcccgtggatcctctcttgttaaccaagtttgtggacttttgtaaccgcctgtgcgaggtcaccaggggaggtctcaaggccacagccattaaagaactatgctttacgctggctgtgataatggtgcccagacaccccagatcaaaccgtggacaaccactggaggcggacccagtaccgaatggattgagcactgagcacatttcgagtgctgagggtcaagttgatgtggccttcgccctggtggagattctggctgagcaatgtgctcctcaccttggggaccagggaggccctgtggaggaaacaaagcctatgctggacctgaaggatgagcaagagtttgctaagagagaacatgtgccaggcaaagtgaacagcaggttcacaggaacaaggccggaaggaaccacgagggccaagtcctttgccttggtgtgtggacttccctctctgggcctcagtttctccatctttacagtgaagggagtgaactatgagttcagatccagagctcacctgagtgcaccagaagtcacagcccgtttggcaggtccaaacccccagaatcctcccaaagtgtttgcagctggcgagctatcccgaggcaaagcctgcctatcgaccggatggggaaatcgccggataattaatctatcgttggagaaaattagaaaagatttcgtgtttatcaatctcagtacggattctttatctgaatttataaaccgtgataatgaatggttatccgcggtaaaggggaaacaggtcgtattgattgcggccagaaagtcagaggccttagcaaattattggtattacaatagcaatattaggggcgtggtatacgctggactgagtcgtgatattagaaaagaactggtctatgtgattaatggcaggttcctgagaaaagatattaagaaagataaaatcacggaccgggaaatggaaattatccgcatgacggcccagggaatgcaacctaaatcgattgccagaattgaaaattgtagtgtgaagacagtgtatacccatcggcgtaatgctgaggccaagctgtactcaaaaatatataaaaatgcaatgaaaaaaaaggttctggcaatagctctggtaacggtgtttaccggcatgggtgtggcgcaggctgctgacgtaacagctcaggctgtagcgacctggtcggcaacagccaaaaaagacaccaccagtaagctggttgtgacgccactcggtagcctggcgttccagtatgcagaaggcagtaaagaagctctgggggccggattactggatgatgaaacggcggtaatttctcttggcacttacatcgcattgatgatgaacggcaaagcactgccgaaagatccagtagcgtactggccgattatgtcttctattccgcaaacattgctgtatgaaggttacggtattcgcaaaggcatgtggacggtgagctggctgcgcgacatgctaggcgagtcgttaattcaggatgccagggcgcaggatctttcaccggaagatttactcaacaaaaaagcttcttgtgatagacgggcgcaactcaaaccagaaaaataa

SEQ ID NO: 30167 - DNA, 488 bp, Homo sapiens
  SIMILAR (1)..(42): 851254mologous to Escherichia coli DNA replication protein DnaC,accession number D90774,Smith-Waterman Score=69.
acggtagcggagtggcgcgagtggcaactttccgaagccagaaacgttgtgaggagatcaaccgtcagaatcgtcagttgcgggtggaaaaaattctgaatcgctctggcatccagccattgcaccgcaaatgctcgttttcgaattaccaggtgcagaacgaagggcagcgatacgcgttgagtcaggcgaaatccatcgctgatgaactgatgaccgggtgtacaaattttgcgttcagcggaaaacctggtaccgggaagaaccacttagcggcactatcgggaatcgcctgctggaagacgttcttgatgaatttggcatcagcgcgagacgaaaaacgagcagtggtactgcaccagattgttgatcgccggacagcgtcgatgcgcagcgtggggatgctgacaaacctgaactatgaggccatgaaaacattgctcggcgagcggattatggatcgcatgaccatgaacggcgggcgatgg

SEQ ID NO: 30168 - DNA, 789 bp, Homo sapiens
  SIMILAR (582)..(226): 971254mologous to Escherichia coli ORF_506,accession number U18997,Smith-Waterman Score=580.
acttgtaggcctgataagacgcgtcaagcgtcgcatcaggcattgtgcgccaactgccggatgcggcgtaaacgccttatccggcctacggttcggcacaaacctgcaacggctgccggatgcggcgtgaacgccctatccgacctacggttatgttctggctcgttggcctttggcaacgattatcctatgagattggggcaattacgcgccctcgtcaaatcattgcgctttttctttacgcggttggcgcaacacttcgttgatttgcggatcgtccagcggacccgaaatgtgatagcgcaaaatggagactttgctccacagcggccccagcactttactggcggcaaacactgccgcgccaacaataaggttaaccgcaaaagccgcagccacgcccaccgtcgcagaaatctctggtgcgacaaccgcttccatattcaggtcgcgacgtaccagatttaccgaccctttcatggcgatatccgcctccaggccatccaccagcgtgtcgtcggtgtgcataacgccgtctttaatccacgcggtgctgggaatggagtcaaaatagaacccgtcgcttatacagagaagcggggaaggcgacggaagagggcgaaagcgcgagagcagacacagagcgacgcgaaaggaaagagaccaagaacgaagaagaaaagatggcaagagagagggggagaaaagcgcagagagacgacgacagcagaccagagcgcaaacgagcacagtcaagagcgcaagttgacccgggataaaagcaaatga

SEQ ID NO: 30169 - DNA, 291 bp, Homo sapiens
  SIMILAR (1)..(195): 1001254mologous to Escherichia coli NlpE, a lipoprotein,accession number D49445,Smith-Waterman Score=341.
atgaccctgcggggcatgtatttttatatggctgatgcggcgaccttcactgattgcgcgaccggaaaacgtttcatggtagcgaataacgcagagctggagcgtagctacctggctgcgcgcggtcacagtgaaaaaccggtgttactgtcagtagaaggtcactttacgcttgagggtaatccggataccggccggataaggcgtttacgccgcatccggcaatggtgctcaacgcctgatgcgacgctggcgcgtcttatcatgcctacaacccccctcataccttaa

SEQ ID NO: 30170 - DNA, 1059 bp, Homo sapiens
  SIMILAR (675)..(22): 991254mologous to Escherichia coli DNA replication protein DnaC,accession number D90774,Smith-Waterman Score=1110.
  misc_feature (1)...(1059): n = a,t,c or g
tcaccccatcgcccgccgtttcatggtcatgcgatccataatccgctcgccgagcaatgttttcatggcctcatagttcaggtttgtcagcatccccaccgtgcgcatcgacgctgtccggcgatcaacaatctggtgcagtaccacctgctcgtttttcgtctcgcgctgaatgccaatttcatcaagaaccagcagatccacttcgcacagttcccgcaaaaatttttcgcctgactgcccatcgtcatagctggcgtgcagggcactcataacatcagccacggtaaccacaatcactgtctgaccgtctttcagcaggcgattcccgatagctgccgctaagtggttcttcccggtaccaggttttccgctgaacgcaaaatttgtacacccggtcatcagttcatcagcgatggatttcgcctgactcaacgcgtatcgctgcccttcgttctgcacctggtaattcgaaaacgagcatttgcggtgcaatggctggatgccagagcgattcagaattttttccacccgcaactgacgattctgacggttgatctcctcacaacgtttctggccttcggaaagttgccactcgcgccactccgctaccgtcttgaatggcgcggttacatgtgacggggccagtctgcggatacgttcaagaacatcgccnatattgccaacttgccggagcgcaaccaccctgacgaccaccagagcatctgcatggtgccgccaacgttcaccaacgacttctgtggtgtagcgatcctgaccggattgatcggtccatttacgggtacgcagctgaccttcgatataaacctgagaacctttacgcagatattcgctcgccacttctgccagtttgccgaacagcacaacgcggtgccattcagtctgttctttcatctcgccggtcgctttatcacgccaggattcggaagtagccagcgtaatgttggcaactgcgccaccatttggcatgtagcgtacttccgggtcctgacccagattaccaacgagaataaccttgtttacgcctctgctggccat

SEQ ID NO: 30171 - DNA, 2355 bp, Homo sapiens
  SIMILAR (637)..(1176): 1001254mologous to Escherichia coli matches PS00017: ATP_GTP_A and PS00301: EFACTOR_GTP; similar to elongation factor G, TetM/TetO tetracycline-resistance proteins,accession number L19201,Smith-Waterman Score=928.
atgaaagcaggccagcgtttaacgcttaaacgcccgcagcacgggatgcgcagttatctggcggtcgcgggtggtattgatgttccgccgagatccccggaccggctcgttcatcccttgttgcttaccgaaaaacttctttaccgcccatcgaaacgggcacatacaggcagagtggccctgaaagaaagcaatcagcgatgtcctcctgacgggttcaagttctcttgtgataacggagagagactgcgtgtcacgttcgcgctggactgctgtgatcgtgagccactgcactgggcggtcactaccggcggcttcaacagtgaaacagtacaggacgtcatgctgggagcggtggaacgccgcttcggcaacgatcttccgtcgtctccagtggagtggctgacggataatggttcatgctaccgggctaatgaaacacgccagttcgcccggatgttgggacttgaaccgaagaacacggcggtgcggagtccggagagtaacggaatagcagagagcttcgtgaaaacgataaagcgtgactacatcagtatcatgcccaaaccagacgggttaacggcagcaaagaaccttgcagaggcgttcgagcattataacgaatgcatccgcatagtattcgatctgttcgttaacctcgacgcgaccgacgagcagctggacttcccgatcgtttacgcttctgcgctgaacggtatcgcgggtctggaccacgaagatatggcggaagacatgaccccgctgtaccaggcgattgttgaccacgttcctgcgccggacgttgaccttgacggtccgttccagatgcagatttctcagctcgattacaacagctatgttggcgttatcggcattggccgcatcaagcgcggtaaagtgaagccgaaccagcaggtcactatcatcgatagcgaaggcaaaacccgcaacgcgaaagtcggtaaagtgctgggccacctcggtctggaacgtatcgaaaccgatctggcggaagctggcgatatcgttgcgatcacgggccttggcgaactgaacatttctgacaccgtttgcgacacgcaaaacgttgaagcgctgccggcactctccgttgatgagccgaccgtttctatgttcttctgcgttaacacctcgccgttctgcggtaaagaagggtggcactgccttgaggcttattgcgcgatgagtattttcagcgctgttgctctgactttaatgagcagtatgcaagggcaacgaaatgccatcgagcgaatgcgtaacgagacgctggcattgtggatagcggatacccagcttcagtcacaagattcattcgaactggaaaacacgtccagttctggcaaagagttaataaatggcgaagagtggaactggcgcagcgatatccactcaagcaaagacggcacgcttctggaacgcaccataacggtgacattacccagcggtcagacaacctgcttacgcgttatcaaagcatcgataataaatccgggcaggcacaagatgattaatcgccagcagggtttcacattgctggaggtcatggcggcgctggcgattttctcaatgcttagcgtgctggcgtttatgattttttcgcaagcttccgagttgcatcaacgctcacagaaagaaatccagcagttcaatcagctacagcgcaccatcaccattcttgataacgatctcctgcaactggtcgcccggaggaggagaagtacggacaaaatcatggtgttgggtgaagaagctatttttaccacgcaaaggacctgcagagaattcaagtgcaacgactcggccgcgtcacacctaagcggcgacattttaagaccgttaccggactggcgcgagtgccaactttccgaaggccaggaaacgtctgtgaggagatcaacccgtcagaatcgtcagcttgcgggtggaaaaaattctgcaatccctctggcatccagccattgcaccgcaaatgctcgttttcgaattacccaggtgcagaacgaagggcagcgatacgcgttgagtcaggcgaaatccatcgctgatgaactgatgaccgggtgtacaaattttgcgttcagcggaaaacctggtaccgggaagaaccacttagcggcagctatcgggaatcgcctgctgaaagacggtcagacagtgattgtggttaccgtggctgatgttatgagtgccctgcacgccagctatgacgatgggcagtcaggcgaaaaatttttgcgggaactgtgcgaagtggatctgctcgctcttgatgacattgacatttcttctaaaccactgccagcgcagcagaaaaaacacgccagacattga

SEQ ID NO: 30172 - DNA, 1152 bp, Homo sapiens
  SIMILAR (694)..(1152): 1001254mologous to Escherichia coli DNA replication protein DnaC,accession number D90774,Smith-Waterman Score=775.
atgcgtgatctgatccttcaactcagcaaaagttcgatttattcaacaaagccgccgtcccgtcaagtgttagccggctatccagaaaaattgaaattttggatggtccccggcgtcgacgttctcccatcgttgagaacgataggtttccgggttttattctcggaccatgagatcagcgttcatgaaagcgcaaaatttagcgtaagacgttcagacagcattgcagcacagcattcgagaaataagagtttgatcagccgttcaaaaaatatcccccggaataatcgacgtctttttcctgaagaaattccgccagatgaagttttaaaaaaaatcctccggctgataacaaaggaagccccactactcccggataaaggggctccagataagtccccagtttctgcaatatggggatttgtggacaaggatcctttgcaaggaagcgcgtgtaagaccgcgcacattctcatgagagtaatcgcctctccaaagagtttccgggaagctcccgccaggcattgcgaaaaccgattcgaacggagcagggcgctaacggggcgatacgggagctggaaaaattccgcccagcagggtttttcacctgagcaggtgattcgacacagcatcgccaatgaataccagggcttgttcgcgccgaaaggtgttcgacctgagacgttactccgacaggtgcagaacgaagggcagcgatacgcgttgagtcaggcgaaatccatcgctgatgaactgatgaccgggtgtacaaattttgcgttcagcggaaaacctggtaccgggaagaaccacttagcggcagctatcgggaatcgcctgctgaaagacggtcagacagtgattgtggttaccgtggctgatgttatgagtgccctgcacgccagctatgacgatgggcagtcaggcgaaaaatttttgcgggaactgtgcgaagtggatctgctggttcttgatgaaattggcattcagcgcgagacgaaaaacgagcaggtggtactgcaccagattgttgatcgccggacagcgtcgatgcgcagcgtggggatgctgacaaacctgaactatgaggccatgaaaacattgctcggcgagcggattatggatcgcatgaccatgaacggcgggcgatgg

SEQ ID NO: 30173 - DNA, 1161 bp, Homo sapiens
  SIMILAR (675)..(181): 961254mologous to Escherichia coli DNA replication protein DnaC,accession number D90774,Smith-Waterman Score=818.
tcaccgtatgcgcacaacgccaggacgcacagtactgagcaggtggcacaactggtagaaagtattaagcaattcggctggattaatccggtgctgattgacgaaaagggcgaaattattgcgggtcacggtcgtgttatggcggctgaaatgctcataatggattctgttccggtcattgttgtgtgtggcccatcgcccgccgttcatggtcatgcgatccataatccgctcgccgagcaatgttttcatggcctcatagttcaggtttgtcagcatccccacgctgcgcatcgacgctgtccggcgatcaacaatctggtgcagtaccacctgctcgtttttcgtctcgcgctgaatgccaatttcatcaagaaccagcagatccacttcgcacagttcccgcaaaaatttttcgcctgactgcccatcgtcatagctggcgtgcagggcactcataacatcagccacggtaaccacaatcactgtgtgaccgtctttcagcaggcgattcccgatagctgccgctaagtggttcttcccggtaccaggttttccgctgaacgcaaaatttgtacacccggtcatcagttcatcagcgatggatttcgcctgactcaacgcgtatcgctgcccttcgttctgcacctggtaattcgaaaacgagcatttctttctctcccatgcacagctgaggtcaccggtaccgacagtaaacactgactgcaaacctgttctgtgccaggcactgggctcggcaccacgacctgaattatctcctttaatctgcacagcaaaccctggggtcactatgattagcatcagcgccgcaatggcgttcatgatcgccggaacggaaagctctgccagcgggatctccgccacctgtttgcgatcgcgcatgataatcacccgatcggcatagcccaccagctcttccagttcggaggagatcaccagcagcgccagaccatcggcgcatagcgtttcaatcaggcggatgatctcggcgtgggcaccaacatcaatgccgcgggttggctcatcgaggatcagaaattgcggtcgggtcagtagccaacgtgaaagcaacactttttgctgattgccgccggagagaaattcaatcggttgttcagttgaaggtgtgcgaatgccaag

SEQ ID NO: 30174 - DNA, 1740 bp, Homo sapiens
  SIMILAR (684)..(4): 951254mologous to Escherichia coli putative,accession number L31628,Smith-Waterman Score=1098.
  misc_feature (1)...(1740): n = a,t,c or g
ttattcagaaaaagtgagtaagactttgcagcaatgtttttgatcctgttcaaataaactaatggcatcagcaacatgctggaaatcaaacgtatgggtaattaatttttctggtttaattaaccctttacttaaccagtcgataacgatcgggaatttatttgcatttaagcgtgaagagaaaatagagagttcttttccggtaattccttgctgaatcacttcagacggttcactggagaaccccatcaatacaatacgtgccgctggagaagccagcgttacggcctctttcaggatagaaggatgacaagccgcatcgataattaatgtcggcttgatgcctttttcagtgaaaatctcgccaagcggtgtctggctgttattaatcgcccagtcagccccgctctctttcgctttttccagtcgttcatcaatgcgatcggcaacaatcacatttttaacgttatagacgccttttaatacctgaacgatcgtcaggccgattggaccggcaccataaaccagaacggtatcattttcagtcggttgaccatgtccggttacgttagccgcaatggtaaaaggttcgatcattaccgcatattgatcggccactgcttcaggaattttccacgcatttttgccggaacccactggtatgcctgttcccggcacatgaacgcgaatattttcgttttcatcagccagaccgtgaataccgcttgcggtcgtggcgtccacttcgcccaccataattgacgaacgctcactggtgcccnccgggcttgccaggaaacttaacaccggtttggtccgtttgactatcagtcccgcctcttcaatcgcttcgcgacgggcaacatcttccacactttcaccctcttcaatcatcccggcaaccatctccagtagccaaggggtttcgctggtgtcgtacgcggcaatccgaatctgctcaatcagcacaacttcatcacgcactgggtcaaagggtagcaagactgcggcgtgaccgcgctcaaaaatttcccgccgcacctcatgactcatttgcccgttgaatagacgatgacgaaatctataaagatctaatgaaaaaaagccgcgataaagtgtttctcgtgcaataatttctacatcgtttttgccaaatgtaacgggcaggttgtctgggtcggtctgcgcaacagtgcgatttacacgcagagtgaaaataatcagcgaaccgatgaccgccaccgctgccagcgtcagtaatcccgccgcatcgctggcaaataacgtttctgctttcacgcgcaggatcggggcaataaacccgcccactgcaccaaacaggtttacaaaaccaattcccgcagccagcgccgtaccggaaagcagttgtgtcggcatcgtccagaacactggctgcacggcaataaacccgatagctgcaacacacagcgctacgatcgccattactggagaaagcagcccggacagaccaataccaatgcccgccgccagtaatgtcagcgctgcgacattacgccgttcgccggttttatcggaatagcgcggaataagccaggtcccaaacaaggccgcaacccacggaatggcggtgaccaccgacgctgtaaagcccacttttgttcccagcaatgccgcaacctgggtcggcaggaagaaaattaatccgtaaaccgccacctgaatggtcaggtagataatcgctagttgccagacttccat

SEQ ID NO: 30175 - DNA, 929 bp, Homo sapiens
  SIMILAR (928)..(554): 1001254mologous to Escherichia coli X96,accession number M95096,Smith-Waterman Score=629.
cgtgctcacaagcgcttaagtgggtacccccaggtttttcccattccgctctagtaaggacggccaaggtctaacagtccaggccgtgggaaacctcggcaagtcccaagctcgcaggcctgcaaaaagactctagatcatggggcacctccattaggtcggccgatgaagtcttcttgcgcaaaccggcgcatattccgtggcaggtggcagaaggggcagaagcctgcgttcagcctgcacactggagtgacgatgtggatacgctggcagatatggtggtgaaaaccgctcagcctggcgaccatattctggtgatgagcaacggcggttttggtgggatccatcagaaactgctggatgggctggcgaagaaggcggaagccgcgcagtaattcggccttagccagatatagtatgcgtaggccggataaggcgttcacgccgcatccggcatttgagcatagtgcctgatgcgacgcttgatgcgtcttatcaggcctacaggtgcaccgtatccggcaaaccatactcacatcaacaacgaaaattacccttcgttctccgctaactcgcgcagatactggaaaatctggcgtgcggatttcggcggcttattcccttctttctctttcttcgcgttgcggatcagagtacgcagttgctgacgatcggcatcgggccacagatttaatacctcagcgatggcgtcatcaccttgatcgatcagacgatcgcgcaggttttccagtttatggaacagcaccacctgctggttgtgacggtttttcagcttatccagcgcctgacgaataggctctacgtcgcgctggcgcagcatcttaccgatgagctgcaactggcggcggcgaccttccatcttaatacgctgggcgagctcaatagccgcgcgcagatccgcatctaac

SEQ ID NO: 30176 - DNA, 1165 bp, Homo sapiens
  SIMILAR (647)..(1162): 1001254mologous to Escherichia coli DNA replication protein DnaC,accession number D90774,Smith-Waterman Score=885.
acggctgggagcaacatattaccgcccgctatctggtcggtgcgatggcgcaaactcgatggtgcggcgacatctctacccggatcatcaaatccgtaaatatgtcgctatccagcagtggttcgcggagaaacatccggtgccgttctactcctgcatctttgataattcgataactaactgttattcatggagtatcagcaaagacggttattttatcttctgcggtgcctatccaatgaaagacggtcagacgcgtttcacgacgctgaaagagaaaatgagcgcctttcagttccagtttggtaagacggtgaaaagcgaaaaatgcacggtgctgtttccctcgcgctggcaggattttgtctgcggtaaggacaacgcctttctgattggtgaagcggcgggatttatcagcgccagctcgctggaggggattagctatgcgctggatagcacagacattctgcgttcggcattgcgaaaaccgattcgaacggagcagggcgctaacggggcgatacgggagctggaaaaattccgccagcagggtttttcacctgagcaggtgattcgacacagcatcgccaatgaataccagggcttgttcgcgccgaaaggtgttcgacctgagacgttactccgacaggtgcagaacgaagggcagcgatacgcgttgagtcaggcgaaatccatcgctgatgaactgatgaccgggtgtacaaattttgcgttcagcggaaaacctggtaccgggaagaaccacttagcggcagctatcgggaatcgcctgctgaaagacggtcagacagtgattgtggttaccgtggctgatgttatgagtgccctgcacgccagctatgacgatgggcagtcaggcgaaaaatttttgcgggaactgtgcgaagtggatctgctggttcttgatgaaattggcattcagcgcgagacgaaaaacgagcaggtggtactgcaccagattgttgatcgccggacagcgtcgatgcgcagcgtggggatgctgacaaacctgaactatgaggccatgaaaacattgctcggcgagcggattatggatcgcatgaccatgaacggcgggcgatgggtgaattttaactgggagagctggcgtccgaatgtcgtccagccaggaattgcgaaataa

SEQ ID NO: 30177 - DNA, 2930 bp, Homo sapiens
  SIMILAR (1145)..(1645): 911254mologous to Escherichia coli NlpE, a lipoprotein,accession number D49445,Smith-Waterman Score=797.
atgcttaagccagacaacctgcccgttacatttggcaaaaacgatgtacaaattattgcacgagaaacactttatcgcggctttttttcattagatctttatagatttcgtcatcgtctattcaacgggcaaatgagtcatgaggtgcggcgggaaatttttgagcgcggtcacgccgcagtcttgctaccctttgacccactgcgtgatgaacttgtgctgattgagcagattcggattgccgcgtacgacaccagcgaaaccccttggctactggagatggttgccgggatgattgaagagggtgaaagtgtggaagatgttccccgtcgcgaagcgattgaagaggcgggactgatattcaaacggaccaaaccggtgttaagtttcctggcaagcccgccggccaccaatgagcgttcgtcaattatggtgggcgaaatggacccccccaccgcaagcggtattcacggtctggctgatcaaaaacaagatattcccgtttatgtggtcctttggcgtgagtgggttgaatttcgccaggcattgcgaaaaccaagtcgaacggagcagggcgctaaacgggcgataccgggagctggaaaaattccgccagcagggtttttcacctgagcaggtgattcgacacagcatcgccaatgaataccagggcttgttcgcgccgaaaggtgttcgacctgagacgttactccgacagacggtagcggagtggcgcgagtggcaactttccgaaggccagaaacgttgtgaggagatcaaccgtcagaatcgtcagttgcgggtggaaaaaattctgaatcgctctggcatccagccattgcaccgcaaatgctcgttttcgaattaccaggtgcagaacgaagggcagcgatacgcgttgagtcaggcgaaatccatcgctgatgaactgatgaccgggtgtacaaattttgcgttcagcggaaaacctggtaccgggaagaaccacttagcggcagctatcgggaatcgcctgctgaaagacgctatgacgatgggcagtcaggcgaaaatttttgcggggactgtgcgagtggatctgctggttcttgatgaaattggcattcagcgcgagacgaaaaacgagcaagtggtactgcaccagattgttgatcgccggacagcgtcgatgcgccaacctagagtcggctccgcttcctacggtacatgggcgcgaaccgctgacaagctggtattaaccgacagcaaaggtgaaaagtcatattatcgggcgaaaggcgatgcgctggagatgctcgatcgtgaaggcaatccgattgaatcgcagttcaactatacgctggaagcggcacaatccagtttacctatgacgccgatgaccctgcggggcatgtatttttatatggctgatgcggcgaccttcactgattgcgcgaccggaaaacgtttcatggtagcgaataacgcagagctggagcgtagctacctggctgcgcgcggtcacagtgaaaaaccggtgttattgtcagtagaaggtcactttacgcttgagggtaatccggataccggtgcgccgactaaagtattggcacccgatacggcagggaaattttaccccaaccaggattgcagtagtttggggcagtaacccgtcttgagacagaaacaaacgcaaaacaggccagaaggatatatttcaacattttgaatttgcacgttttttgtaggccggataaggcgtttatgccgcatccggcagttatgcgcagaatgccgtgattgccagacgctggcgcgtcttatcatgcctacaaacttgtgccttaccgctgggtggtgataccgcccgagccgtaggaatggcgctgacgccgacgcgaattgcgctgctgctgttagcggcttgcctgacggcgaccgcgacgatgactattggaccgttgagttttgttggtttaatggcaccgcatattgcgcggatgatgggctttcgacggacgatgccacacatcgtaatttcggcgctggtgggtggtttactgctggtgttcgctgactggtgtgggcggatggtgctgtttccattccagatcccggcggggctgctgtcaacctttatcggcgcgccatattttatgcctggacggataaagcgtttacgcgacaacggatgcccgatgcgacgctggcgcgtcttatcgggcctacaaacggccccgaatcggtaggtcggataaggcgttcacgccgcatccggcagtcggcgcataatgcatgatgcgacgcttgtcgcgtcttatcatgcctacaaacttgtgcctgaacggtaggacggataaggcgttcgcgccgcatccggcagttggagcacaatgcctgatgcgacgcttgacgcgtcttatcaggcctacgtatttccctgcccgatgatgacagcagccggagagattttcgataatcgggcagtcggcgctgtcatcgccagggcaggcattcgccagtgccagcagctggtcgcgcatggattgcagctcctcaatgtgtcgttcgatctccgccaccttctccagcgtgcgccgtttgacgtcggcgctgtgccgctgcgggtcgttaaacagattcaccagctcgccgctctcttccaggttaaagcccacctgccgtgcctggcgcagtaaggtcagttcgttgagatgctgctgcgtgtaggtgcgataaccgttttcgctgcgcatcggcggcgtcaccagccccttctcttcatagaagcgaatggctttgctggtcaggccggtaatttttgctacatcgcttatgtcatcgagcttatcatgcctgcaggtccaggccaggcagtcagcgaacaccagcagtaaaccacccaccagcgccgaaattacgatgtgtggcatcgtccgtcgaaagcccat

SEQ ID NO: 30178 - DNA, 1182 bp, Homo sapiens
  SIMILAR (208)..(429): 501254mologous to Homo sapiens 17G2 peptide sequence,accession number W99023,Smith-Waterman Score=161.
atgggggccggccctccagccccacccgtgcccatcagggtcacctgcgcccagtgtgggccagcggcccttgcccagctgtccctgggattctgggctgtggatgacattagcccagggaaggagagcctggggcccgacagctcctctgggggtcaagaggaccccgccagccagcagtgggctggtgaccacgcacaggcaggtcccagtgcacggcgcaacaagcacttggactggctggatgcgtgtctggtgacattcctggctatgtctgtgccccacctacctgagaagtgggccacgagctgcttccaggaggacttcatctccaagcacagtgctggcgcagtgccacgtcctccagcacttcctgatgtgcctcagcagcaccgagagaaggcctggaaacaaggcaagaggaaggccttctgtatggcacagcacctcttgaggaaagaaaataagaaaactgcctccgatccaagcagagcaggtcagcgagaaggtgggcatcacttgggggagtggatgtgggtatcgaagacgaacactggatacgtggcctggtcatgggaggtggttggtgcgagaaaggaggtggagagcatgattgacagcttcatatgctttctcaagaaggtggatgacggcgctgctgctcagccacagggcatggagttcacggcaagcagcccatcaaccttcactggaggtgcctacaataccatcgtcaagctcttcccagattggcccaggcaggacctggattctgtctgggacctgttactgctgtccaagcagcaacgcatcaaattcccagacatcctccacgttcacagaggagctcttaccaaagtcacggggagcaggagactcgtgggaggaggaatgatggagccctctagctgctgctgcagccacaacaagtgccaccaccaggggccttccagctgccagtgcaggctttccagagccggggactggggaacctgcagtcatcacctcagcaattctggtggcagccaggccagccagggcagcgatgatgaccgtaatgaaaagtgggatgacagctccacactggtggatgagttgagaacaccaggcagaggcatgtacctggtctttgatggttcagtggacctgcactaccattgcagtgcaaagtgcaagagttga

SEQ ID NO: 30179 - DNA, 1218 bp, Homo sapiens; identical to SEQ ID NO: 25928
  SIMILAR (1)..(624): 1001254mologous to Escherichia coli K12 putative oxidoreductase,accession number AE000495,Smith-Waterman Score=1046.

SEQ ID NO: 30180 - DNA, 1657 bp, Homo sapiens
  SIMILAR (1636)..(1058): 951254mologous to Escherichia coli K12 putative kinase,accession number AE000393,Smith-Waterman Score=926.
caccaagaaagcccgtgaaatcgcagcggttattttgcttgctttgctcatcgttcgcttcttcatattcttcctgtgccagtcttaaagatagtccagccaggcggaaaatgaggcagcttatagcgccagaaccgccgtattcagcgtttctatcggtgcccgggcgtgaaagaaaccagccttgtgcggcgaatgcgggcgagttctgaacatcacgccactcttccggcgtttctacgccctcgacaatcaccccgcgacaatagcgattcattagatgtaaaagctgagaaaagagtgtgcgtccttccggcgactgacgcagcatcacaaacagttctcgcgcgattttgatgtagtcataacgcacttcacttagcgcagagaaatttgccatcccggtaccaaaatcatccagccacagcgggccaaattcacacatcgaggcaaaggttgaatctttcggcagacggatatgctccaccagttcgaaacgcagccagggaagacgctcaatctggcgcaggatttttggttgctgacgcagggcgatgagcgtagggccatcaatattgaccgatgccagcaggccgtgctctataaagaagtcggctttttgcgccagcaaatcaatctgctctttcacaacctccatccgatggctgacggtgatttcagtaaaatagcgatccggcggcaggcgttggaagggcagatcggtaaacagatattcaaattcactgtccatttctcggccataggcgtggaatgaacttttaatcatattaatgccaccgaacgggtgtagcgcacgtttcaacggcgcatccgttgccaggccaacaattttttccagcggctggttaatatatcccgcatcatgagcggtaattgtggtggcaatattggtatcgaaatcaaccggcgcgtgggttgcattttcgatacggatgccttccattactttttcccacaattccgtggtggcaggcgtcgcttcggcgaggaaagattcatcgccttcatacggtgtatagttatgttgaataaaatcgcggacattaatttcgtttttccagtccgtaccacaggagttagagcgattattcatttctgtatcaatctctaagcctaatacagccaaatgttccatgaccagacgacgaattaagcttgaattctctcctattccgccggtgaatataattccatccaggcgacgtaatgaagctgcgtgtccggcaatatgacgggcaattcggtgaacaaaggttttaattgccagttgcgcgcgttcgtgaccttcatgccaggctttttccagaacacgtaaatccgaagaaagaccggaaatacctaataatcccgactctttattcactacgcgttccaggtcacccaggctctggttggtttggctggcgacccaggacatcgcaccaaagtcgacatcgccactgcgggtacccatcatcaagccttccagcggcgtcattcccattgaggtatcaacactctgaccgttgcgaaccgcgcagattgacgcgccattgccaagatgcgccacaaccaggccggagtcatcttccgtcagattcagcagcgaatgtgcgcgctgggaaacatagcggtgcggacgtgccggggaaaccat

SEQ ID NO: 30181 - DNA, 951 bp, Homo sapiens
  SIMILAR (774)..(373): 831254mologous to Escherichia coli O157:H7 leucine tRNA synthetase,accession number AE005243,Smith-Waterman Score=579.
tcagcctgcgcgccggttccctgcgtaccattacgcacatcctgctgccgctgctgcgcccggcgatcctctcggcgctgatttacagctttgtgcgcgccattaccaccgtcagcgccattgtgttcctcgtcacgccggatacccgcgtagcgacggcttacatcctcaaccgcgtggaagatggcgaatacggtgtagcgattgcctacgggttccattctgatcgtggtgatgctggcgattattttcatctttgactggctgatcggtgaatcacgtacctcccgttcaaaaagccaaaaaccaggcgtaatggagcgcactgctagtttagatacgaagtttgctgcccaaacgggaatttcttcgcccgttaatgggtgaaccgctttaaagccaggttccacgcttttttttcccattgtccccatttcaggctcgggcaactttggtgttacggcattcgtcaataaaggccgccagttcaggattattttccgccgctttctgcgccagcggatgacccgcagctaccgccaggtaggtacaacccataaaggtgtccgggcgggtagtgtaaacggtcagcgtgttgtcatagtcgttaacgttgaaggtgatctccacgccttcggaacgaccgatccagttacgctgcatggttttaacggtgtctggccagtgatccagtttatccagatcgttgagcagctcgtcagcgtaagcagtgattttgataaaccactgcgggatctctgttacgttcaactttggtatcgcagcgccagcagcagccgtcgataacttgttcgttcgccagtacggtccccagatcttctgattcggcaggtctggggtggtaccccaggatttgctgatgctgctggttgaggccacactttgagaaccactgtttgagcccaggaggttgaggctgcagtgacccat

SEQ ID NO: 30182 - DNA, 1978 bp, Homo sapiens
  SIMILAR (1445)..(1894): 981254mologous to Escherichia coli adenine phosphoribosyl- transferase,accession number M14040,Smith-Waterman Score=738.
ttacggcttcaatgtccggacccggacatcgtcgggactggcaatataccgtactgtcccaagttaatcagattgactgtcagatttgctggaaataatgcattaagtggaaagggggagtgagaaatcactccccctggtttttatacagggaacatgatgaaaaatattctcgctatccagtctcacgttgtttatggtcatgcgggtaacagtgcggcagagtttccgatgcgccgcctgggcgcgaacgtctggccgctgaacaccgttcaattttctaatcacacccaatacggcaaatggactggctgcgtgatgccgcccagccatttaaccgaaattgtgcaaggcattgccgccattgataaattacacacctgtgatgccgtattaagtggctatctgggatcggcggagcagggtgaacatatcctcggtatcgtccgtcaggtgaaagccgcgaatccgcaggcgaaatatttttgcgatccggtaatggggcaacctgcttacggattttgtccacccactcctgaacagtttcttcggtgttcagcttacgctcggcagctttgaagctcgggtcgccaatcagacccgtcgcgccgcctaccagcgcaaccggcttgtggcccgcctgtagagctgcaaccagtatgccaggtgctgaatatacactgctacacgagtgccgtatagtgacgaaaactgacacgcaatctagcgcagcacattgcgcacaattgcaaggtctggcagcaacatcgttgcggatagtggcagactcaggtgcgtggcactcattcgcgtatgtacagccagctggacgtgatataaaggtgtccgggcgggtagtgtaaacggtcagcgtgttgtcatagtcgttaacgttgaaggtgatctccacgccttcggaacgaccgatccagttacgctgcatggttttaacggtgtctggccagtgatccagtttatccagatcgttgagcagctcgtcagcgtaagcagtgattttgataaaccactgcgggatctctttacgttcaactttggtatcgcagactctagaggatccccgtatgaaggcgatgaatctttcctcgccgaagcgacgcctgccaccacggaattgtgggaaaaagtaatggaaggcatccgtatcgaaaatgcaacccacgcgccggttgatttcgataccaatattgccaccacaattaccgctcatgatgcgggatatattaaccagccgctggaaaaaattgttggccggatatgctgcgctgccgtaaatctggcgtgctgaccggtttaccagatggcataaccattccacgggcaatatcgacgccagtctgaccataacccgcttccagaaactggtggcgggttcttttttgagaataatctctttctttgcatgacgatcaacccagttgatccgtccccactggaagacccgaaagcttacgctctcagcatcgacttgctggttgagcgttacaaaaatgcgggcattaccaaagttgtcggcaccgaagcgcgtggcttcttgtttggcgctccggtagctctgggtctgggcgttggctttgtaccggtccgtaaaccgggcaaactgccgcgtgaaaccatcagtgaaacttacgacctggaatacggcaccgatcagctggagatccacgttgatgccatcaaaccgggcgacaaagttctggtggtggacgacctgctggcaaccggcggcactatcgaagcgaccgttaaactgatccgtcgtctgggtggggaagtggctgacgctgcgtttattatcaacctgttcgaactcgggggcgaacagcgtctcgaaaaacagggcattaccagctacagtctttgcccgttcccggggccattaattattcgccagtcttgggctgcccacgctacggacaggcacaagatgtgctttcaccccctgccgtttggaaggggg

SEQ ID NO: 30183 - DNA, 1020 bp, Homo sapiens
  SIMILAR (9)..(92): 421254mologous to Mus musculus SPR2G protein,accession number AJ005565,Smith-Waterman Score=64.
tcatagagtgtgaggtgtctccgcagctgtggtccccacagcatccacaacctccagccctccccagcctccctgtgccgcatcctccgccatgaatcctgtttcatctaggtttctctttccctctccctcctgccaaatgatgagtgctggcaacactacatgccacaccctgcttttctctctagatcccgtgctctcacaccctgtcagtttcgttactccatcttcatcaccaagcctacccccggtaggcggcccgtcctttgcagagcctctgaaaatgacccgcgccttcctttccacagtgttctttcgtccgagaccgaaaagcgcaaatgactgaagttcccaccgcagcgctggctcccggctccctagctcccgccccctgtctgcaggaaagccctcccccggagcttccgaaactgctggaggttccagagttttgtagctccgaatgggcgacctgagccgaaccgctctctggctgggtggtcggcgggatccttcaggctcctttcgggtccgggacggggcggcggcagaggtggggcgtgcgtgcttggggctgccgagtgagtgcggctccctggtgcgcgcccgagcatctccccgccctctcctgggaccagcagtctgcccgtggagggctaggagcccgcgaccaggcctgccccggccgtcgccaacctgtccttggaagcgtggcggagactggtgcgctctcagcctcgtcgcgccagccgcctcgcgccaccctccactttcagcttcagagcagaggattccgccgacctccacctgtacctgtactcggccgttaggaaatccacttgcatttttaagtcgtgccctccgcagcaataaaaactggagcgggagaagaaatgcaagacatcgctgtctgttttgcaagcctctggccgctctcagcaaactctgcccggcgcggctggtgactttgcggtgtgaacgcagccggtcgtgctcgggataatgggaccgagctggcggcat

SEQ ID NO: 30184 - DNA, 453 bp, Homo sapiens
  SIMILAR (389)..(270): 411254mologous to Arabidopsis thaliana putative cell wall- plasma membrane disconnecting CLCT protein,accession number AF098631,Smith-Waterman Score=76.
  misc_feature (1)...(453): n = a,t,c or g
tgtatcacagtccatccacctcctctgtaatccatgtcacacattacctgattagataaataatccaaggaagcttgttgctcatccatcatattccttagtagttttttggtacttcttgtgtaggaaacaatagaattttgcaaatttctacacatgaaatgtttttcttctcgtgtaattttagttttaacatcacatgattcctcacagtcttccttacaaacagtatcattacttttactttcatcttttgcattagatccatcttctacaatgttaactactgaagagtccgtagaatgatgtacacagttaccttgtacagcttctccacaaacaaaaatacatacatttaagaataagagtaaggctagggatggagacatcatatttttcttggatagatgaaaacgggncngcaaatatcagnaatacgggctcntgcgatta

SEQ ID NO: 30185 - DNA, 433 bp, Homo sapiens
  SIMILAR (361)..(2): 311254mologous to Tachypleus tridentatus techylectin-5B isoform,accession number AB024739,Smith-Waterman Score=116.
  misc_feature (1)...(433): n = a,t,c or g
tcacagtccatccacctcctctgtaatccatgtcacacattacctcaaatgggtagctagatccttctgggtgaattatgtataacccactcggtgttttggtgacagagccaatggtatccttaatatcagtgcaatctaacctacacatgaaatgtttttcttctcgtgtaattttagttttaacatcacataattcctcacagtcttccttacaaccagtatcattacttttactttcatcttttgcattagatccatctttcacaatgttaactactgaagagtccgtagaatgatgtacacagttaccttgtacagcttctccgcaaataagaatacatacatttaagaataagagtgaggcttgggatggaggcatcatatttttcgtggatatatgcnnaacacttcaatgactagtcctggccct

SEQ ID NO: 30186 - DNA, 427 bp, Homo sapiens
  SIMILAR (141)..(16): 451254mologous to Rattus norvegicus tenascin-X,accession number U24489,Smith-Waterman Score=106.
aatctttgccagtcagagccaaaattctcgtaaaagatctgcgtatccatgcagataatctcaccgcaccctctggaaatcgattctcccaccaatttttctatgtatcacagtccatccacctcgtctgtaatccatgtctcacattgctacacatgaaatgttgttcttctcgtgtaattttagtttcaacatcgcatgattcctcacagtcttccttacaaacagtatcattacttttcctttcatcttatgcattagatccatcttctacaatgttaattactgaagagtccgtagaatgatgtacacagttaccttgtccagcttctccgcaaataaaaatacatacatttaagaataagagtgaggcttgggatggagacatcatatttttcttggatagatacagcacttcaatagatag

SEQ ID NO: 30187 - DNA, 1042 bp, Homo sapiens
  SIMILAR (565)..(257): 401254mologous to Ciona intestinalis fibrinogen-like protein,accession number AB036849,Smith-Waterman Score=184.
tgaaacagatttattcttgccaggtaagttgtttttggttccccgtgccccattaattcccagttgcaagccattttccaaagaagtgatgaatgccatttagatttgctagcccacactcgttaaaccaccagccggtcttgttatggaggtgactgcagctcttcacagactgaccattgaccaggcatgcagggcgacacccatcattatcaacatctgatgtgctaaaaggcattgcattttgattatcttcttttttgagaccccggaatgcatcacctagaagatctccaaatccatccagataatcacaccacaacctctggaaatcaattatcccatcaattcttttctgtatcacagtccatccacctcctctgtaatccatgtcacacattacctcaaatgggtagctagatccttctgggtgaattatgtataaaccactcggtgttttggtgacagagccaatggtatccttaatatcagtgcaatctaaaccatgtgactgaacaggtctgtgaggaaaaggatccagctgttttctaaaaacttctgtagtcaaaaggagaactctattcatgagctcgttaacctgattagataaataatccaaggaagcttgttgctcatccatcatattccttagtagttttttggtacttcttgtgtaggaaacaatagaattttgcaaatttctacacatgaaatgtttttcttctcgtgtaattttagttttaacatcacatgattcctcacagtcttccttacaaacagtatcattacttttactttcatcttttgcattagatccatcttctacaatgttaactactgaagagtctcctctccactctatagcatcttcatgactacaggccctgctgaccaacagcagccctaggccgaccaccaggcactgggctgcagacctgaagacagtagcttcagaaaagcagagtcgttccacattcggcagtttccatagatttccccagcaagctcccccttcatagttccacttcagcagcttgggcat

SEQ ID NO: 30188 - DNA, 3456 bp, Homo sapiens
  SIMILAR (814)..(2667): 941254mologous to Homo sapiens KIAA1377 protein,accession number AB037798,Smith-Waterman Score=3018.
tttcccgaaaaccagttcctccattagaagaggccctcaaacaaattcaggaatccaacttaaaatcagaagtaaaccttcccttttcccgtagaccaacaataaactggagagctatagattctgccttgccttccgcattatcaaaaaatgatcacaagcatcagaaacaactcttatccaaaatcaattgtgagaaagaaatgaatgaaaacatgagggcaaccttggctactagcaaaaatgtgttccagcttaaactggaggaaactcagaaactcctcgaagatcaacatctaagcaatttgcaaaaattttgtgatgaagttaatcagataaccaattctgaaaccctctcaagtatagacagtcttgaggctacagagcatgaagaaatatatttaacacttaataaggagcattccacatccatccagcggaataccatttccctcaaaccagcaaatatgcaatcaactaatctcagctgctttgatgaagataaactggcattctctaaaactcaacatataaataattggcttacaaatttagatgcttcaaatactcagaatgtcacagctttctcagatattttaagtaaatctaatgttctgccttcatgggaatattttaatagtaaagaacaaaatccatctcctttgaatggaacagtggaaagagccacaaatactgctaataattcagtaccctttgtatctagcccacccatgtttgtactagataaaaaatgtgaaaagacctctgaaactagcactatgaggacaactgactccacttctggagcattcaaaagaaaaaggccatatagtttctgagagcccaacatttaaatttagcaaatcccaaagcacttcagattctctaacccaggaagtggctacatttccagaccaagagaaatattctgaattaaatcaagaaaatggaactacttcaattcctacttcatgtgtaccagtggcaacgcctttagttttgccatctaatatacagtcagctagaccttcagcaaagaacagtatacacataaaagaaattgatgcagtgcagtgttctgataagttagatgaattgaaagatggtaaagaagaagagataaaatattttaattgcaataaggaagagttgcctttattttcagacagttttcaagatgcctatatacctcacaatcctgattcaaaagatgaaaaacaaaaattagctgaaacatcatccttgtctaatgtaacttctaattatgactttgttggccagcataagaaaatgaaatacaacatccatgagagaaatggtgtgagatttcttaaaagtattttaaagaaagaatctaaatatgaacatggttatcttaaggcattaattataaatcagagctttaagtttggaaatcaaaaagcagcagctatcagagatagtattgaattaacaaaggaaaaaggtgcagaaattccaaagaccattaaaaaactgaggtggtttgatgaaactagcaatatagaaaacaatgctgaaaacagtcattcactgaagaataaaacaggaacaactcaacagcattctcaacaattccacattcaaagtggtgctggaagcaacataattagtgtttctacttgtgctgtaaattctgctgatacaaagaagtccagggaggattctatctctgaaaatgttacgactttaggaggatctggagcagaccatatgcctttgaactgttttataccttcaggttataactttgctaaacatgcctggccagcctcaaaaaaagaagaaagtaaaatccctgtacatgatgattctaaaactaagcaaggtaagccacaaagaggtagagcaaaaataattagaaaaccaggatctgcaaaagtccaatcaggctttatatgtacaaacagaaaaggcgctgtcattcaaccacagtctgcaagcaaagtcaacatatttacacaagctcagggaaaattaattataccttgtcctcctcctcaatctacatcaaatattagaagtggtaaaaatatacaagtgtctcagtgtcaaccagtaactcctgaaaatcctcaaaacattattacacataactcttttaattcaaaacatgtgcttccaacagaacacagtttgaatcagtggaatcaggaaagtagttctccactctcaaatgcttgttctgacctagtcactgtgataccatcactgccatcatattgttcttcagagtgccaaactttcgcaaaaataaatcattcaaatggcactcaagcagttgcccggcaagatgcgacattatattgcacccaaagaagtcctgtttgtgaagaaagttatccgtctgtgactctaagaactgctgaagaagaatcagttcccttatggaaaagaggtcctaatgtcctgcatcaaaataagagggctacagggtctactgttatgagaagaaaacgaattgctgaaactaagcggagaaatattttagagcagaaaagacaaaaccctggatctgtaggacagaagtacagtgagcaaattaatatttgtggtgatcaagcgtctgctgattacaaagcagcagagaaattcattgaagagtttgccaaggtcatcgctgatgaatatctgacaccagaagaagtatatgttactgatgaacatcactgcatgccagcaacagtgaacagagatgtggatgtagaaggttttcaaaacgagtttagcatgaaagatgccatacatgctgttgcaaacacttggaacacagggactaaagacacaattgtgcattcctggcacaacctctggcctgcaactatgttcagtgatgatgaacaagatagtacttctgagtttttgatggctgaaaacttagtgaaagcatcagtgccggaggatgagattctgactgtcttgaatagcaaacagatacagaaatcaaatctacctttaaataaaactcaacaattcaacatctgcacactgtcagctgaagaacagaagatcctagagtcccttaatgatctcagtgaaagactacattttaacattgtagaagatggatctaatgcaaaagatgaaagtaaaagtaatgatactgtttgtaaggaagactgtgaggaatcatgtgatgttaaaactaaaattacacgagaagaaaaacatttcatgtgtagtgatgcattccggggtctcaaaaaagaagataatcaaaatgcaatgccttttagcacatcagatgttgataatgatgggtgtcgccctgcatgcctggtcaatgtgaacaatcctgacaaccacgaaggaactcacagtggactgcccagggttgtctggaacattgtggggatccagcaccttggggccagcatctgccctctgagtccctccaacttcttcgtggttggagacaactgggtgactctcccttga

SEQ ID NO: 30189 - DNA, 209 bp, Homo sapiens
  SIMILAR (184)..(2): 321254mologous to Homo sapiens sco-spondin-mucin-like; similar to P98167 (PID:g1711548); details of intron/exon structure uncertain,accession number AC004877,Smith-Waterman Score=79.
ccagacaggactcctcgtcggcggcatccagacagtcaggatgcccatcgcagagcagggccggcgccaggcagcgtccatcggcacaggccagcaagccggcagagctcctggctacgcagcgcacgtggtgcccatgccgggcacactcatctgcataggtggcaatggccgagcagaggcactcacagtcaccccccgagtcgcag

SEQ ID NO: 30190 - DNA, 412 bp, Homo sapiens
  SIMILAR (275)..(81): 421254mologous to Homo sapiens Wiskott-Aldrich Syndrome protein,accession number AF115549,Smith-Waterman Score=89.
cctgggtccaccggcgctatcgccccccgatgtgagagagcgaagttcttgggccgcgctccctccctacctgggtgccctccccctccgggagcctgggtccccggggcggacgcggcggatgcatcctcaggccaagccgcggggggagggggcggcacggacctaccaaagcggggccatggagcccagagagtcggggaaggtaggactggaaggcccgggggccgcccgctccctcccgaggatcccccagccgggctcgggcgaggcggggcggctcgggcggaggccccgcagatgagccaggcttgcagggaaggactcgccggcccgccctctcttcccgcacttcggcgcccgaccccgggagggtggttgagaggagcggacgcttccgttcggagtccgg

SEQ ID NO: 30191 - DNA, 499 bp, Homo sapiens
  SIMILAR (194)..(54): 371254mologous to Homo sapiens dJ1118D24.3 (Tumor Necrosis Factor Receptor 2 (75 kD) (TNF Binding Protein 2, TBPII, TNF-R2, CD120B, TNFBR)),accession number AL031276,Smith-Waterman Score=71.
cggaactcctgtgtcgacccacgcatccgagatggggtccggagcatcagagacccacctggagatgttctggccagcccggagccgctcttcactgcagattgccccatattctaccccccagggcctctgggaggatttgatagcatggctgagctcctgccaagttcaagagctgaactagaggaccctgggggggatggagcaattcctgcaatgtatctagactgcatttcagatttgaggcaaaaagaaatcactgatggcatccacagctcctcagacattaatattttatataatgatgcagtagaatcctgcattcaggtaatacgtttataatgattgctgtatcttacagagaaggattctatactgagaacgatgtatatccatgctgatgatggaaaaaagaatactagtgataacccactgctaacatcataatgttggcatataccaacatgcttatcatggactaggcattggtttagacgcg

SEQ ID NO: 30192 - DNA, 6443 bp, Homo sapiens
  SIMILAR (1604)..(2476): 201254mologous to Ipomoea purpurea transposase,accession number AB004906,Smith-Waterman Score=146.
cggacgagggccagagccatggcttggcagcgtccagggccagaggagccttctggagcatcacccaggaaaaaaacagatgggctacatgggagaaatggaggtgcaaggtcccaccagggagagtggacagtccctcccgcctcagaagaaagcctacctttcccacctcagtacaggcagtggacacatcgagggagactgggccggaagaaacaggaaacttctgaagccccggtccatccagaagtcgtggtttgtgcagtttccgtggctgatcatgaatgaggagcagacggctctgttctgctctgcttgccgagaatacccctccatcagggacaaacggtcaagactaatagaaggttatacaggaccattcaaggtggagactctcaaataccacgcgaagagcaaggcccacatgttctgtgtcaatgccttggcagcgagggaccccatctgggcagcccggttccggagcatcagagacccacctggagatgttctggccagcccggagccgctcttcactgcagattgccccatattctaccccccagggcctctgggaggatttgatagcatggctgagctcctgccaagttcaagagctgaactagaggaccctgggggggatggagcaattcctgcaatgtatctagactgcatttcagatttgaggcaaaaagaaatcactgatggcatccacagctcctcagacattaatattttatataatgatgcagtagaatcctgcattcaggacccttctgcagaggggctgtcggaggaggttcctgtggtgtttgaggagctgccggtggtgttcgaggatgtggcagtgtatttcacccgggaggagtggggcatgctagacaagcggcagaaggagctgtacagagacgtgatgcggatgaactacgagctgttggcatccttgggacctgctgctgccaagccagacttgatctccaaactggagcggagggctgcaccctggatcaaggacccaaatgggccaaagtgggggaaaggtcgtcctccagggaacaagaagatggtggcagtgagagaggcagacacacaggcctcggctgcagactccgcgttgcttccaggctctcccgtggaggcccgtgcctcctgctgcagttccagcatttgtgaggaaggagatggacctaggagaatcaagaggacatacaggccccgttccattcagaggtcatggtttgggcagttcccatggttagtaattgaccccaaagagaccaaactcttctgctcagcctgcatagaaagacctaatctccatgataaatcatctcggttagtcagaggttacacggggccttttaaagtggagactttaaaataccatgaagtcagcaaagcgcacaggctctgtgtcaacacggttgaaatcaaggaagacacccctcacactgccctcgttccagagatctccagcgacctcatggccaacatggagcactttttcaatgccgcctactccattgcataccactcaaggcccctgaatgactttgagaagatcctgcagctcctccaaagcacggggaccgtgatattaggcaagtaccgcaatcgcacggcgtgcactcagttcatcaagtacatctcagagaccctgaagagggagatcctggaggacgtgcggaactcgccctgtgtgagcgtgctgctggacagctccaccgacgcctccgagcaggcctgcgtggggatttacatccgctacttcaagcagatggaggtgaaagagtcctacatcactctggcccctctctacagtgagacagcagatgggtacttcgagaccatcgtttctgccctggatgagctggacatccccttccggaagcctggctgggtggtggggctggggacggatggctcagccatgttgagctgcagaggaggccttgtggaaaagttccaggaggtcatcccgcagctgctccctgtccactgcgtggcccaccggctgcacctggctgtggtggacgcctgcgggagcatcgatctggtgaagaagtgtgaccggcacatccgcaccgtcttcaagttttatcagtcctcaaacaagaggctgaacgagctgcaggaaggtgcggcgcctctggagcaggagatcatccgcctgaaggatctgaatgcggtccgctgggtggccagcaggaggcgcacgctgcacgcgctgctcgtgagctggcccgccctggccaggcacctccagagggtggcagaggctgggggccagattgggcaccgggccaaagggatgctgaagctcatgcgcggcttccactttgtcaagttctgccacttcctgttggacttcctgagcatctacaggcctctgtccgaggtgtgccagaaggagatcgtgctgattacagaggtgaacgccacgctgggccgcgcctacgtggcactggagagcctccgtcaccaggcagggcccaaagaggaagaattcaacgccagcttcaaggatgggcggctccacggcatctgcttggacaaactggaggtagcggaacagcggttccaggcggatagggagaggacagtcctgacggggattgagtacctccagcagaggtttgacgcagaccgacccccacagctgaagaacatggaggtgtttgacaccatggcctggccaagtgggattgaacttgccagttttgggaatgatgacattctcaacctggccaggtatttcgagtgctccctcccaacaggatacagtgaggaagctctgctggaggagtggctgggcctgaaaaccattgcccagcacctcccgttctccatgctttgcaaaaacgccctggcccagcactgccgcttccccctgctaagcaagctcatggccgtggtggtctgtgtgcccatctccacctcttgctgtgagcgggggttcaaggccatgaaccgaatcaggaccgatgagaggaccaagctctccaacgaggtgctcaacatgctcatgatgacagctgtgaacggtgtggccgtcacggagtacgacccccagcccgccatccagcactggtacctgacctcctcaggccggcgtttcagccatgtctacacctgtgcccaggtgccagcccgctcccctgcaagcgccaggctcaggaaggaggagatgggagccctctatgtggaggagcccaggacccagaagccacccatcctgccctccagggaagcagcggaggttctgaaggactgcatcatggagcctcccgagagactcctgtatccccacaccagccaggaggcccccgggatgtcctgagggacagggagtccttgggactgccttggagacgcctctgtgatcactgggacaggctctgcagattctaggctgccctaggatcttctgctggtggcgatggtctctaagcaccaggaagtgggcagtggcatcccagagcagcaggggtatcaggaggtgcatgacctgtttcctgaggccccactcagcacagccatgcctcacagcacacaaatgtgccagaaggttctatatctcaagttcatttttaaggtgctgcagaaaataaccccatcatgaaaggtttcagcccctgagttttggtggcaagaggagtgtcctggtaggggagactgttggacatccctggggaatgttccagggaggctgcccacagtctaagtgggaatgggaaagaccaccttgttagagggggaggttgcccctgctctagggacagctggcctggctgcaagagcccccagaggcattgttctgggacttcctaccctggctcccacagcagaagcagtgaggccgtggtctcgtgcggaactctacctcttcccagggcttcctttagggcgaaacaatcacaagccctttgcacagagcacccaagaaagttctcttcctgcagctccagatggtggagctgggctcttctggcagggggtctggtgcttcccggagagccgagccgcgtttaacccgtggcatgcccggcccggtttacccaggagaggatgggacgaagttggagttgggaggcttgggatgcagccccagctctgctgcaggcagtggtctgattaatcccttcctctttgtgcctcagtttccctctccatgaagtggcagcagagatccaagtgcctgctgactccccatctgccctaggattagtgaatgagagcctcgagctccctgaaagacctctggctgcagtgtggacttagctgccatctgccccatcctcgtccttagtgggacaggtaggaatttgtctccaaagtccttgttgtaggagttgctctctgaatgcaccatctgcacgacaggctagtccactcttctctgagctgccctggggactctgcaccaggatctccagggcccactgagacatccccgaatgggcgctcagtgacaagggctttgaacaacctcctccagggactttgggcctgctctagcttcagaaccacagaaccaccgccctagaggcacagaggggcttctggcactgctaggttcacaccctcctcgcccatcttccttccacctaaagtgaagcacttttccttccaagggcagctccgtcttggcaggctcaggaggccgcttatcaggaggaggatgattttgtctaggttctgccttccttaaccatgggcaggaaatgaggcaagtcagcaggcagggtttctctgccctgcctgatacttgttttaaacaggcaggaagtgggcgccatccatcccagcttgcttgctgcctggctcaggcaggtcctgtgctgtgctgcaggcccctgtgggtgggccctttctccatagtctgccgcttcccattcccagggtagatgctggcatctgagcacctgagtacccttcctattcccagggtagaagctgctgtctgagtacccttcccattcccagggtagatgctggcgtccgagcccctccccggtaccgcaggtaccctggtaccccacctgccctttcatccccaccccagtacttagccttagcactgttgctttcgtgtcattttcagttctagtcaggaattcctttcttgctttctgcctttgacctgtggaaatgtctcccagccctgtgggtctggcggtcagagggaccccacaggcctgtggtgcgggagctctgggaggtgttactatctgcgtggctaaggcacacacaggcctccttctccccatcaccgtctccatgggcgttcaggaacttgcccaggtcaggcactgtggatgtgaactcgtggaaagggagggagaaaggcttttttaggtggggctatagcctctgccctacccacagggattccacatcaaggtgctgttccagcacacatgcttcctgcggcctcttcatccttgaagaatccctcagagcaggaggccatcctgtgagcagccgtgagtgggtctctgtgggagtagttctggagctgaggtggaagctaggggaagcaactcgccctctccacgtcagcatcagcgtgctccgaggacaccggccagtgccttccttaggtggtgggaaaggggtgtccctgtgcagcggggccactgagaatgctgtttgtcataaaatttgcactacccgatttctcaaggggcacaggcctgctccgttcccctttgtcagccaatggccaagaaggaagaagatgactgccatcttattcctgaacttcctcattcaggacccccgtggaaacacagtgagcatccttatcagaggccctggcccaggctggcccctttgctttgtttggagaggctggctgagtttcagcccctagtgctggagacccccttgttggagaggcttcctgtttatgcctcacaagaagaaaaaccacagggctctgggaggggaagaagcatgcactcccgctttggctggagtcccagcgcttgtcgccaccctcctccttgcctgtagtcttgacagcatccgtatgtacgtgtcctggcatttcccctccctctccctgatgactgatacccaccgggtctgacattccaagtaaccagtatgtaactggtagtttgatcccaatagccatagcgactccaggtgggagtgagggagcccagccccctgtcctggaagataccttagagtatgtgaccgcgctccagacccttgcttctctctcctgcagaggatgagtttctagggtgctaagtacctatcagaacagtgtggaggggcgggtccctcatacaggtgtgtgcttagccaaatacagtaactgtgactggcccagggatgttctctcctctattttcaaagatgaaaggaggttttaaaaaccatgtttaattcctaaccttttgctacctgaataaagcagagtctatttcaac

SEQ ID NO: 30193 - DNA, 419 bp, Homo sapiens
  SIMILAR (87)..(7): 881254mologous to Homo sapiens sco-spondin-mucin-like; similar to P98167 (PID:g1711548); details of intron/exon structure uncertain,accession number AC004877,Smith-Waterman Score=133.
gctgtccgcactagcgattaggcacgtctgctcgcagagccccagctcccccggggccacctgctgccacgtttctccagggggcactctgccagggaagaccatccaacccagctttcgggtcggccctggatccagcctcgattcctcccctcccaagctgagcacccacacgtccccatcttgccttctcagccacagcagcctccaaccacacctcctgatctttcttatccacccacccaaacactagctggacccaggccaggtctcacctcctccagaaaaggctccctgaccaatcctgtccactcggcctctattctcagcactgatgtctcaccctctgaggttctacctgcctgtcagagacctagagactgtgccctgtctctgcctggtcttggggtggggtggtc

SEQ ID NO: 30194 - DNA, 13686 bp, Homo sapiens
  SIMILAR (12206)..(12514): 261254mologous to Homo sapiens sco-spondin-mucin-like; similar to P98167 (PID:g1711548); details of intron/exon structure uncertain,accession number AC004877,Smith-Waterman Score=73.
atgctgccaccagggactcgggtcctggtgcaactgtcccctcagttccgtggtcgcgtggctgggctgtgtggtgactttgatggagatgccagtaatgatctgcggagccgccagggcgtcctggagcccacagctgaactggctgcccactcctggcgcctcagccccctctgccctgagccaggagacctgccacacccctgcacgatgaacacacaccgggctggttgggctcgggcccgctgtggggcgctgctgcagccgctcttcacattatgccacgcggaggtccccccgcagcagcactatgagtggtgcctgtatgacgcctgcggctgcgactcggggggtgactgtgagtgcctctgctcggccattgccacctatgcagatgagtgtgcccggcatgggcaccacgtgcgctggcgtagccaggagctctgctccctgcagtgtgaagggggacaggtatatgaggcctgtggccccacgtgtccccccacctgccatgagcagcatcctgagcccgggtggcactgccaggtggtggcctgtgtggagggctgcttctgccccgaggggactctgctgcacggaggagcctgcttggagccagcttcctgcccctgtgagtggggccgcaactccttcccgccggggtctgtgctgcaaaaggactgcgggaactgcacgtgccaggaaggtcaatggcattgtgggggtgacggtggccactgtgaggagcttgtgcctgcctgtgcagagggagaggccctgtgccaagagaatgggcactgtgtgccccatgggtggctttgtgacaaccaggacgactgtggcgatggctctgatgaggagggttgtgccgccccaggctgtggggaggggcagatgacttgcagctccggccactgcctgcccctggccctgctctgtgaccgccaggatgactgtggagatggcacggatgagccgagctatccgtgcccccagggcttgctggcctgtgccgatggacgctgcctgccgccggccctgctctgcgatgggcatcctgactgtctggatgccgccgacgaggagtcctgtctggggcaggtgacctgcgtccccggggaggtgtcctgtgttgatggcacctgcctgggggccatccagctgtgtgacggagtctgggactgcccagatggagccgatgaggggccgggacactgccccctaccttctctgcccacacctcctgccagcaccttgcctggcccctccccaggctccctggacactgcgtcaagtcccctggccagcgccagccctgcgccaccctgcggccccttcgagtttcggtgcggcagcggcgagtgcaccccgcggggctggcgctgcgaccaggaggaagactgcgccgacggcagcgacgagcgcggctgcggagggccctgcgcgccgcaccacgcgccctgcgcccgcggccctcactgcgtgtcccccgagcagctgtgcgacggcgtgcggcagtgtcccgacggctcggacgagggccccgacgcctgcgttgaggctcccgcgcccccggccatgcgcggcccccctggccaagccggcgggcccacctcttcccgagcgccatccccaccttcgcctcctgaggcacagggagagggcaggaagggacaggagcggagcaggacacatctcacagtgcccgcaggctccacccagctgcctctgtgccctggcctctttccctgtggtgtggctccggggctgtgcctgacccctgagcagctctgtgatgggatcccagactgtccccagggcgaggacgagctggactgcggggggctgccagccctgggaggccccaacaggacagggcttccctgcccagaatacacctgccccaatggcacctgcataggcttccagctggtgtgtgatgggcagcctgactgtggaaggccagggcaggtgggcccctccccagaagagcagggttgtggggcctggggcccctggagcccatgggggccctgcagccggacgtgtgggccctggggccagggccggagccgccgctgctccccactcggcctcctggtgctacagaactgcccagggcctgagcaccagtctcaggcctgcttcacggcagcctgcccagtggacggtgaatggagcacctggtccccctggtctgtgtgctctgagccgtgcaggggcaccatgacgcggcaacggcagtgccactcaccccagaatgggggccgcacctgtgctgcactgcccggaggcctgcacagcacccgccagaccaagccttgccctcaggacggctgccccaatgccacttgctctggggagctgatgttccagccctgtgccccctgcccactgacctgtgatgacatctctggccaggtcacgtgcccacctgattggccctgcggcagcccgggctgctggtgcccagaagggcaggtgctgggcagcgaggggtggtgtgtgtggccccggcagtgcccctgcctggtggacggtgcccgctactggcctgggcaacgcatcaaggccgactgccagctctgcatctgccaagacggacggccccgacgctgccgactcaacccggactgcgctgtggactgtggctggtcctcctggtcaccctgggccaagtgcctgggcccctgtggaagccagagcatccagtggtccttccggagctccaacaacccccgcccctccggccgaggtcgccagtgccgtggcatccaccgcaaggcacgcaggtgccagacggagccctgtgaggggtgtgagcatcagggccaggtccaccgtgtcggggaacgctggcatgggggcccctgcagggtgtgccagtgtctgcacaacctcaccgcacactgctcaccctactgcccgctcggcagctgcccccagggctgggtcttggtggaggggacgggagaatcatgctgccactgtgccctacctggagagaaccagacggtccagcccatggccactcctgccgcagctccggctcccagtccccagatcagattccctttggccacttacattctgcctccgtcaggagacccctgctattctcccctggggctggccggactggctgaggggagtctgcatgcatcgtcccagcagctggaacaccccacccaggctgccctcctgggggctcccacccaggggcccagccctcagggatggcacgctggaggggatgcttatgccaagtggcacactcggccccattacctgcagctggacctgcttcagcctcggaacctcactggcatcctagtgccggagactggctcctccaacgcatatgccagcagcttctcactccagttcagcagcaatggtctacactggcatgactatcgtgacctcctgcctggcatcttgcccctgcccaaggtatcacccgcccaaggccgatggggccagcagcccaccatgcccttttgtgggttccatagtctttgtccccaagggccttccagtgtccccgaggggcatggcctgcattcgatgcttgttgaatacctgcttttccccagaaactgggatgacctggaccctgccgtatggactttcggccgcatggtgcaggcgaggtttgtcagggtgtggccccacgatgtccaccacagcgatgtccccctgcaggtggagctgctgggctgcgagccaggggttggactccgctgtgccagtggtgagtgtgtcctgagagggggcccttgtgacggtgttctggactgcgaggatggctcggatgaggagggctgtgtgttgctgcctgagggcactggcagattccattccacagccaagaccctggccctctcctctgcccagccggggcagctgctgcactggcccagggagggcctggcagagactgagcactggccccctgggcaggaatcccccacgtccccgacagagacaaggcccgtgagtcctggcccagcctccggggtgcctcaccatggggaatctgtgcagatggtgaccaccacccccataccccagatggaggccaggaccctgccaccaggtatggcagctgtgacggtggtgcccccacaccctgtgactccagcgacccctgctggccagagcgtcgccccaggacccttcccacctgtgcagtgtggccccggccagacgccctgtgaggtgctgggctgcgtggaacaggcgcaggtgtgtgatggcagggaggattgcctcgacggctccgacgagaggcactgcgcctcaagggccctctgttccccgagccagctgagctgtggcagcggggagtgtctgtctgctgagcggcgctgtgacctgcggcctgactgccaggatggctcggacgaggatggctgtgtggactgcgtgctggccccctggtctgtctggagcagctgcagccgcagctgtggcctgggcctcaccttccagcgccaggagctgctgcggcctcctctgccagggggcagctgcccgcgtgaccggttccgaagccagtcctgctttgtgcaggcctgcccagactgcgagctgggccgtgtgtatgtgagtgccgatctgtgccagaaggggctggtgcccccatgcccaccctcctgcctggatcccaaggccaacagaagctgcagtgggcattgtgtggaaggatgccgctgtcccccggggctccttctgcatgacactcgctgcctgcccctctctgagtgcccctgcctggtgggcgaagagctgaagtggccaggggtgtccttcctcctgggcaactgcagccaatgcgtgtgtgagaagggggagttgctgtgccaaccagggggctgccccctgccctgcggctggtcagcctggtcctcctgggctccctgcgaccgctcctgtggctctggaaggtgttcggctggacgccctggacttcctggtcctcctgctcccaaagctgccttgccccgggagggggccctggctggcgcagtcgttcccgactctgccccagccctggggattcatcctgcccaggagatgccacccaggaggagccctgcagcccccctgtatgcccagatagagtgtacgggcttctgcgcccccggctgcacctgcccccctggtcttttcctgcacaatgctagctgcctgccccgcagccagtgcccctgccagctgcacgggcagctctatgcatcaggagcaatggctcgcctggactcctgcaacaactgctgcaacgtgggcattcggcgccgcttccgggcaggcactgcacccccagctgcctttgggggtgctgagtgccaaggccccaccatggaggctgaattctgcagcctgcggccatgtccagcctcctggggctgctgccaccgagtgccatgcactggggagctagagcagcggcccctgatggtctcacagatcctggaagcccaggatcaaggtgttgctcctgtgtctccgggctcatcgccaactgcagctcctggccttgtgcggagggtgagcccacgtggtcaccctggaccccttggagccagtgttcagcctcctgtggccctgcccggtgccatcggcaccggttctgtgccaggagctgggggatggggtccatgggggccctggtcccactgtagccggagctgtgggggaggcctgcggagccggacccgggcctgtgaccagcccccaccccagggcctgggggattactgcgaggggccacgggcacagggggaggtctgccaggctctgccctgcccagtgaccaactgcactgccattgaaggggccgagtatagcccctgtggccctccgtgccctcgctcctgtgatgacctagtgcactgcgtgtggcgctgccagcctggctgctactgcccaccaggccaggtactgagttccaacggggccatctgcgtgcagccgggtcactgcagctgcctggacctgctgaccgggcagcggcaccatccgggtgctcggctggcaaggcctgacggctgcaaccactgcacctgcctggaggggaggctgaactgcacagacctgccctgcccagactgcgggggtggccagagtctgcatccctgtgggcagccctgcccccgctcctgccaggacctgtcccctgggagtgtgtgccagccaggctctgtgggctgccagcccacttgtgggtgccccctgggccagctctcccaggacgggctgtgcgtgcccccagcccactgccgctgccagtaccagcctggagccatggggatccctgagaaccagagccgctcagcagggtctaggtttagctcctgggagagcctggaacccggagaggtggtcactgggccatgtgacaactgcacctgtgtggcaggcattctgcaatgccaggaggtgcctgactgcccggaccctggggtgtggagctcttggggcccttgggaagactgcagtgtttcgtgtgggggcggggagcagctgcgctcccggcgctgtgctcgtcctccctgcccagggcctgcccgccagagccgcacatgcagcacacaggtctgcagagaggcaggctgcccggctggccgcctgtaccgtgaatgccagcccggcgagggatgccccttctcctgcgcccacgtcacgcagcaggtgggctgcttctctgagggctgcgaggagggctgccactgccccgagggcaccttccagcaccgcctggcctgtgtgcaggagtgcccttgtgtgctgacagcctggctgctgcaggagctgggagccaccataggtgaccctggtcagcccctcgggcctggagatgagctggactcaggccagacacttcgtacaagctgtggcaactgctcgtgtgcacacgggaagctgtcttgctccctggacgactgcttcgaggccgatggtggtttcggtccctggagcccgtggggcccgtgctcccgctcctgtggagggctgggcacccgtacccgcagccgccagtgtgtgctcaccatgcccaccctcagtgagctgcccgtgtgccctggccctggctgtggggctgggaactgttcctggacctcctgggccccgtgggaaccttgctcccgcagctgcggagtgggccagcagcgccgcctgcgggcataccgtccccctgggcccggcgggcactggtgccccaacatccttactgcctaccaagagcgccgcttctgcaacctgcgagcctgcccagaggccggctgcccagcaggcatggaggtggtcacctgtgccaaccgctgcccccgccgctgctcagacctccaggagggaattgtgtgtcaggacgaccaggtctgccagaagggctgccgctgcccaaaggggtccctggagcaggatggtggctgcgtgccaattgggcactgtgactgcaccgatgcccagggccacagctgggccccggggagccagcaccaggatgcctgcaacaactgctcatgccaagctgggcagctctcctgcacggctcagccctgcccgcctcccacccactgtgcctggagccactggtcggcctggagtccctgcagccactcatgcgggcccagagggcagcagagccgcttccggtcctccacgtcgggctcgtgggccccagagtgtcgggaggagcagtcccagagccagccctgccctcagccctcgtgcccacccctgtgcctgcagggcactcgctcccgcaccctgggggacagctggctgcagggggagtgccagcggtgctgcggcccgggcctggcctctcgctctgggtcctgcccctgcctgatggccaaggccgaccccacctgcaacagcaccttcctccacctggacacccagggctgctactcagggccctgcccagaggagtgtgtgtggagcagctggagcagctggacgcgctgctcttgccgggtgctggtgcagcagcgctaccgacaccagggcccggcgtcccgaggggccagggcaggcgccccctgcacgcggctggatggccacttccggccttgccttatcagcaactgctctgaggacagctgcacgcctccctttgagttccatgcctgcggctccccctgtgctgggctctgtgccacacacctgagccatcagctctgccaggacctgccaccctgccagccgggctgctactgccccaaggggctgctggagcaggctgggggctgcattcccccagaggagtgtaactgctggcatacctcagcagcaggagccgggatgaccctggcccctggggaccgcctgcagctgggctgtaaggagtgtgaatgccggcgtggggagctgcactgcaccagccagggctgtcaagggtctctgggcccaggggtggtcactgggaagggcacccacaccctgtccttccagagcagcaccgccaccggctctgtctggatcctgcgacagggaggccctggactggagcccctcacctctgcaccgcacccctcagccagcagcgcctctgccctgaccctggagcctgccctgactcatgccagtggagtctgtgggggccatggagcccctgccaggtgccctgcagtggggggttcaggctacgctggagagaggcagaggccctctgtggaggaggctgccgggagccatgggctcaagacagaaagctgcaacggagggccctgcccaggctgccgctgtccccctggccagctggtccaggatgggcgctgtgtgccgatctcctcttgccgctgtggcctccccagtgccaatgcctcttgggagctggccccggcccaggcggtgcagctggactgccaaaactgcacctgtgtcaacgagtccctggtgtgcccacaccaggagtgtccagtccttgggccttggtcagcctggagcagttgctcggccccctgtggtgggggcactatggagcgacatcggacttgtgaggggggtcctggggtggcaccatgccaggcccaggacacagagcaacggcaggagtgtaacctgcagccctgccctgagtgcccccctggccaggtgcttagtgcctgtgccacctcatgcccgtgcctctgctggcatctgcagcctggtgccatctgtgtgcaggagccctgccagcctggctgtggctgccctggagggcagcattctctgccctggggcctcaccctgaccctggaagagcaggcccaggagctgcccccagggactgtgctcacccggaactgcacccgctgtgtctgccacggtggagccttcagctgctccctcgttgactgtcaggagtgccccctggggaacacgtggcagcaggtggccccgggggagctggggctctgcgagcagacgtgcctggagatgaacgccacaaagacccagagtaactgcagttcagctcgagcctcgggctgcgtgtgccagcccgggcacttccgcagccaggcaggcccctgcgtccccgaagaccactgcgagtgctggcaccttgggcgtccccacctgggcgaggagatggtgctggagccagggagctgctgtccctcttgccgcagggaggctccggaggagcagtcgccctcctgccagctcctcacggagcttcgaaacttcaccaaagggacctgttacctggaccaggtagaagtgagctactgcagtgggtactgcccatccagcacccatgtcatgccagaggagccatacctgcagagccagtgtgactgctgcagctaccgtctagacccggagagccctgtgcggatcctgaacctgcgctgtctgggtggccacacagagcccgtggtgctgccggtcatccacagctgccagtgcagctcctgccagggacctgcgttccgggagccaatagcagcttcgagagccgctcacctagagcggactacacttcccgtcacgccccgccgcctggggctgggcagtgaccgtaaagctgttcgctcggtgcgacgcaagtctcagctcagcgcgcttatcctgggtccaccggcgctaccgccccccgacgtgagagagcgaagttcttgggccgcgctccctccctacctgggtgccctccccctccgggagcctgggtccccggggcggtcgcggcggctgcatcctcaggccaggccgcggggggagggggcggcacgggcctccgaaagcggggccatggagcccagagagtcggggaaggctcctgtgacgtttgatgacatcactgtgtacttactccaggaggaatgggtgctgctgagccagcaacagaaggagctctgtggttccaacaagctggtggcaccactgggaccaactgttgccaatcctgagctgttccgcaagttcggacgagggccagagccatggcttggcagcgtccagggccagaggagccttctggagcatcacccaggaaaaaaacagatgggctacatgggagaaatggaggtgcaaggtcccaccagggagagtggacagtccctcccgcctcagaagaaagcctacctttcccacctcagtacaggcagtggacacatcgagggagactgggccggaagaaacaggaaacttctgaagccccggtccatccagaagtcgtggtttgtgcagtttccgtggctgatcatgaatgaggagcagacggctctgttctgctctgcttgccgagaatacccctccatcagggacaaacggtcaagactaatagaaggttatacaggaccattcaaggtggagactctcaaataccacgcgaagagcaaggcccacatgttctgtgtcaatgccttggcagcgagggaccccatctgggcagcccggttccggagcatcagagacccacctggagatgttctggccagcccggagccgctcttcactgcagattgccccatattctaccccccagggcctctgggaggatttgatagcatggctgagctcctgccaagttcaagagctgaactagaggaccctgggggggatggagcaattcctgcaatgtatctagactgcatttcagatttgaggcaaaaagaaatcactgatggcatccacagctcctcagacattaatattttatataatgatgcagtagaatcctgcattcaggacccttctgcagaggggctgtcggaggaggttcctgtggtgtttgaggagctgccggtggtgttcgaggatgtggcagtgtatttcacccgggaggagtggggcatgctagacaagcggcagaaggagctgtacagagacgtgatgcggatgaactacgagctgttggcatccttgggacctgccgctgccaagccagacttgatctccaaactggagcggagggctgcaccctggatcaaggacccaaatgggccaaagtgggggaaaggtcgtcctccaggctctcccgtggaggcccgtgcctcctgctgcagttccagcatttgtgaggaaggagatggacctaggagaatcaagaggacatacaggccccgttccattcagaggtcatggtttgggcagttcccatggttagtaattgaccccaaagagaccaaactcttctgctcagcctgcatagaaagacctaatctccatgataaatcatctcggttagtcagaggttacacggggccttttaaagtggagactttaaaataccatgaagtcagcaaagcgcacaggctctgtgtcaacacggttgaaatcaaggaagacacccctcacactgccctcgttccagagatctccagcgacctcatggccaacatggagcactttttcaatgccgcctactccattgcataccactcaaggcccctgaatgactttgagaagatcctgcagctcctccaaagcacggggaccgtgatattaggcaagtaccgcaatcgcacggcgtgcactcagttcatcaagtacatctcagagaccctgaagagggagatcctggaggacgtgcggaactcgccctgtgtgagcgtgctgctggacagctccaccgacgcctccgagcaggcctgcgtggggatttacatccgctacttcaagcagatggaggtgaaagagtcctacatcactctggcccctctctacagtgagacagcagatgggtacttcgagaccatcgtttctgccctggatgagctggacatccccttccggaagcctggctgggtggtggggctggggacggatggctcagccatgttgagctgcagaggaggccttgtggaaaagttccaggaggtcatcccgcagctgctgcctgtccactgcgtggcccaccggctgcacctggctgtggtggacgcctgcgggagcatcgatctggtgaagaagtgtgaccggcacatccgcaccgtcttcaagttttatcagtcctcaaacaagaggctgaacgagctgcaggaaggtgcggcgcctctggagcaggagatcatccgcctgaaggatctgaatgcggtccgctgggtggccagcaggaggcgcacgctgcacgcgctgctcgtgagctggcccgccctggccaggcacctccagagggtggcagaggctgggggccagattgggcaccgggccaaagggatgctgaagctcatgcgcggcttccactttgtcaagttctgccacttcctgttggacttcctgagcatctacaggcctctgtccgaggtgtgccagaaggagatcgtgctgattacagaggtgaacgccacgctgggccgcgcctacgtggcactggagagcctccgtcaccaggcagggcccaaagaggaagaattcaacgccagcttcaaggatgggcggctccacggcatctgcttggacaaactggaggtagcggaacagcggttccaggcggatagggagaggacagtcctgacggggattgagtacctccagcagaggtttgacgcagaccgacccccacagctgaagaacatggaggtgtttgacaccatggcctggccaagtgggattgaacttgccagttttgggaatgatgacattctcaacctggccaggtatttcgagtgctccctcccaacaggatacagtgaggaagctctgctggaggagtggctgggcctgaaaaccattgcccagcacctcccgttctccatgctctgcaaaaacgccctggcccagcactgccgcttccccctgctaagcaagctcatggccgtggtggtctgtgtgcccatctccacctcttgctgtgagcgggggttcaaggccatgaaccgaatcaggaccgatgagaggaccaagctctccaacgaggtgctcaacatgctcatgatgacagctgtgaacggcgtggccgtcacggagtacgacccccagcccgccatccagcactggtacctgacctcctcaggccggcgtttcagccatgtctacacctgtgcccaggtgccagcccgctcccctgcaagcgccaggctcaggaaggaggagatgggagccctctatgtggaggagcccaggacccagaagccacccatcctgccctccagggaagcagcggaggttctgaaggactgcatcatggagcctcccgagagactcctgtatccccacaccagccaggaggcccccgggatgtcctga

SEQ ID NO: 30195 - DNA, 454 bp, Homo sapiens
  SIMILAR (238)..(191): 311254mologous to Homo sapiens Human secreted protein HLYBA69, SEQ ID NO:147,accession number Y86232,Smith-Waterman Score =37.
tactcttggaggaagaaaaactgtccttccttctccaaaaaaggaaaaattataataatataaatgacaaaaataaaagaattctgtttcctggaataagcatttcttattcctagttgtagggactcctatttttaccttccgttacagtgttgattcataagaaatattgttacatttgagataacttcatctgtatggggtatttatttgcaatgatgtctgagtactgtattttttctgtgcattaccttagtgtcagaatgttggtctttattttaaagtcatatgcatgttctcctgccaaggaataggaaggagaaattaattgagattttcaggacacagacatatgatgtgaatgcctacaaagccagtgcgcataggaacagtgggcctgggtaaagagtcacattggtaggaccaataaagaataataaaaagccaaagcaaa

SEQ ID NO: 30196 - DNA, 415 bp, Homo sapiens
  SIMILAR (399)..(325): 801254mologous to Homo sapiens Human GEF containing NEK-like kinase substrate sGNK,accession number Y95293,Smith-Waterman Score= 103.
  misc_feature (1)...(415): n = a,t,c or g
nccatgtgttccaaggaggccccgttggtgggcttttccagtgggctcctggcgagcctggcatccagggaaaaagggtcttcggcccatacagaggcctttccacgcagcagctcgcagcatgctcaacattacagcttgttttcctcccattaagaaacgtggggaatgctattttcaaaagaattgcagtggcatatccaaaaagtttctaagtgggcttttaggttgcccttctttcctccttgtgggcctcgagagggaaggggaaggggctgcagtgtgacagggccgggtggccaagtcctcctgacagctcctccccaggctcggtgtgcctggcttggtcttagggacggctttggcacggccacgccgggtctgctcatnctccgcctcgttcccgtgaatgcat

SEQ ID NO: 30197 - DNA, 1325 bp, Homo sapiens
  SIMILAR (249)..(467): 971254mologous to Homo sapiens Human GEF containing NEK-like kinase substrate sGNK,accession number Y95293,Smith-Waterman Score= 350.
agtctcgctgtgacaaggacctggatactctcagtggttacgctatgtgccttcctaatttaaccagactccaaacctaccgctttgcagagcaccggccgattctgtgtgtagagattaaggtgacctgtcgaggggcagatggtgtgggtaaaggggaaagggtggaggagagaagggccacagccatcccctactgtgctcagcaggacacccttctcttcgtgttccctggacagagcctctataggcaggcctttggacaagcacacacaaaccacaagaaggtggctgctgacggagagagccgggaggagagcctgatccaggagtcggcctccaaggagcagtactacgtgcggaaggtgctagagctgcagacggagctgaagcagttgcgcaatgtcctcaccaacacgcagtcggagaatgagcgcctggcctctgtggcccaggagctgaaggagaagatagaaacagaggggaaacttcctaacactttctatgaagccagcattgtcctattaccaaaaccagacaaagacattaacagaaaagaaaaggacaaaccagtatttctaatgaacaaagatgcaaaagtcctcaacaaaatattagcaaatcaaatccaaaaatgtgtaaaaagaattatgctctatgaccaaggggaatttatcccaggtctgggacatggagagcacaagatgatcttggaacaatttgcatcagacatcaaggaagtaataacaataataacaaattacgatgttttgaagacatggagccagcttggaggagctcccacgggccaaatctgctaccatttgagcatcaaagcaagtattcccatgaaatgtacgatgagtacaccctattctacagaagcaaaagctgaggctcagagacgccaagaggtttgctggggtctcgcgactaagcggtcccaacacccagacaccctggctacccggggactgccggtcactaccgggcgccgaaaagccgccggctccttccgccagctacacatccggcgccgaggccggaagcttctcttccggctcccaagaccgcgttccggaaatgagtcgctctaccagtacctaagatggccgccggcccatccaccgtcgcgatcggtcggctggttcccagcgaggcgggcggcccccagctcgcgtccccgagtcctagcccgcgaggcgccagggctgcgcctgggcatggaagaggggaagatggacgagaatgaatgggggtaccacggagagggcaataagagcctggtggtggcccacgcgcagaatttgaaggctttcacctga

SEQ ID NO: 30198 - DNA, 3457 bp, Homo sapiens; identical to SEQ ID NO: 2942
  SIMILAR (2195)..(2374): 951254mologous to Homo sapiens Human GEF containing NEK-like kinase substrate sGNK,accession number Y95293,Smith-Waterman Score= 273.

SEQ ID NO: 30199 - DNA, 6616 bp, Homo sapiens
  SIMILAR (130)..(2601): 991254mologous to Homo sapiens Human GEF containing NEK-like kinase substrate sGNK,accession number Y95293,Smith-Waterman Score= 4092.
catgattacggcttgcttgaatgcgagcttatatatagggaaggctgggaaccacgctggcgtgcccaagctttatgtatttgatgcagaattcgtgatttcccgggtcgacgatttcgttcggccaccatgtcggcgccgtcggaggaggaggagtacgcgcggctggtgatggaggcgcagccggagtggctgcgcgccgaggtgaagcggctgtcccacgagctggccgagaccacgcgtgagaagatccaggcggccgagtacgggctggcggtgctcgaggagaagcaccagctcaagctgcagttcgaggagctcgaggtggactatgaggctatccgcagcgagatggagcagctcaaggaggcctttggacaagcacacacaaaccacaagaaggtggctgctgacggagagagccgggaggagagcctgatccaggagtcggcctccaaggagcagtactacgtgcggaaggtgctagagctgcagacggagctgaagcagttgcgcaatgtcctcaccaacacgcagtcggagaatgagcgcctggcctctgtggcccaggagctgaaggagatcaaccagaatgtggagatccagcgtggccgcctgcgggatgacatcaaggagtacaaattccgggaagctcgtctgctgcaggactactcggaactggaggaggagaacatcagcctgcagaagcaagtgtctgtgctcagacagaaccaggtggagtttgagggcctcaagcatgagatcaagcgtctggaggaggagaccgagtacctcaacagccagctggaggatgccatccgcctcaaggagatctcagagcggcagctggaggaggcgctggagaccctgaagacggagcgcgaacagaagaacagcctgcgcaaggagctgtcacactacatgagcatcaatgactccttctacaccagccacctgcatgtctcgctggatggcctcaagttcagtgacgatgctgccgagcccaacaacgatgccgaggccctggtcaatggctttgagcacggcggcctggccaagctgccactggacaacaagacctccacgcccaagaaggagggcctcgcaccgccctcccccagcctcgtctccgacctactcagtgagctcaacatctctgagatccagaagctgaagcagcagctgatgcagatggagcgggaaaaggcgggcctgctggcaacgctgcaggacacacagaagcagctggagcacacgcggggctccctgtcagaacagcaggagaaggtgacccgcctcacagagaatctgagtgccctgcggcgcctgcaggccagcaaggagcggcagacagccctggacaacgagaaggaccgtgacagccatgaggatggggactactacgaggtggacatcaacgggcctgagatcttggcctgcaagtaccatgtggctgtggctgaggctggcgagctccgcgagcagctcaaggcactgcgcagcacgcacgaggctcgtgaggcccagcacgccgaggagaagggccgctatgaggctgagggccaggcactcacggagaaggtctccctgctagagaaggccagccgccaggaccgcgagctgctggcccggctggagaaggagctaaagaaggtgagcgacgtcgccggcgagacacagggcagcctgagtgtggcccaggatgagctggtgaccttcagtgaggagctggccaatctctaccaccacgtgtgcatgtgcaacaatgagacacccaaccgtgtcatgctggactactaccgcgagggccagggcggggccggccgcaccagtcccgggggccgcaccagccccgaggcgcgtggccggcgctcacccatcctcctacccaaggggctgctggctcctgaggcgggccgagcagatggtgggacgggggacagcagcccctcgcctggctcctcactgccatcacccctgagtgacccacgccgggagcccatgaacatctacaacctgatcgctatcatccgtgaccagatcaagcacctgcaggcagccgtggaccgcaccacggagctgtcacgccagcgcattgcctctcaggagctgggccccgccgtggacaaggacaaggaagcgcttatggaggagatcctcaagctgaagtcgctgctcagcaccaagcgggagcagatcaccacgctgcgcactgtgctcaaggccaacaagcagacggccgaggtggcccttgccaacctgaagagcaagtatgagaatgagaaggccatggttaccgagaccatgatgaagctgcgcaatgagctcaaggccctcaaggaggacgcagccaccttctcctcgctgcgtgctatgtttgccaccaggtgtgacgagtacattacacagctggatgagatgcagcggcagctggcggctgctgaggacgagaagaagacgctgaactcgctgctgcgcatggccatccagcagaagctggcgctgacccagcggctggagctgctcgagctggaccatgagcagacccggcgtggccgtgccaaagccgccccgaagaccaagccagccacaccgagcgtaagtcacacctgtgcctgtgccagcgacagggccgagggcaccgggctggccaaccaggtgttctgcagcgagaagcacagcatttactgtgattaggggctgtggggcgccgcacgctgcagctaacatctgcttcacctcaactaacccagcagcagcgggacggcggtgctaggtcaatcttaacgtgactaatgcacagagggtaggagtctagccgaggcgccatggggcgttgcatcagcaggacacttgtgagagctttgtgtcgcttctcactcctcaaagccccctcaggagcacccagtcctcagctgctctcttaggtgggggtcagaggtggggatagagctgcacattcttgcagcagatgtgtgatgaaagcatcttctaagccctgcgcacccgtggggaaacccaagggaggagtcctggtcctgctccctcagcacccaaaaggggcagaacctgagttgagacttgcatgttcctcgcatgtgtctaatgtcagcactagaaagcagttttaggaggttccagcctgcagcataggtacgacctcagaggatggctctgcacttggcatagtttcatggaaaggagtacgttgtagtttatgcagtatctgactgcaaatcatattcaggaaagaagtgcagaatttcttccccaagcccagagaagagcagccctgagcccctgtattctgctggccagacacacatggcacagacacagctgaccataacccaggaatccagagctcggtttctcatttctgagatcaggatgcttgtatagtggcctgtgaggtgacagattggcagggcccaaggccccaggttttcatttttcatgagaaaagctttccaagtgcctggccagaccttggtccttagtgcagagcccgtccttttgtacttggggtgaccccagcagccaattatccggccttccatagggggttcagtcccaaaagacatgggggcttttgaaaaaccctagcctgaaagtctgaagccaccaaagggcttggcttgggttggacacccacaggtgtatccagagcccagcccggtgctgggaaagctttgcatacggccagggccacttgtcaggattcacaggtaggagatgtttaggtctctttatttagtgcaatctgggggatggcaacagagaaagaggaaaggtagctgtagggttctcccatttccagaggctccatccacacctgccttcccacattctgagcagaacttttctcagtacttttttcccgatcaccctgtgggaccagctggacctgaggctgcagtcttctctcctgcaggctgcttgccttgtctctcatgcggaagaggcattcgagttacctggtgagagaccgtgttgccccctcccacagctctctgccctgcgcgttcttccctttggtgccgagtatgtttcggtcccctccagactccaggacacgcccatgtatgtcccctgcgtgttcatcctgggcccagatccccctgccccagcaagactcgcagtgggatggctgctggcatgcccaccctgcatgcgctttgccctctccttgcaagcctggcacatagcttctctccatactcctaagggactttgcagacacccaagccactgggacccctgctaacacatgcaggtcttctcttctgccaactaacgtgctcgcgccctcccagcacgtggagagcttcaattgtcagataaacaggaagcgacagatgaccgctttctaacgctctcttttctcccgttttcagctgtagagtagctgccaggaggacttggccacccggccctgtcacactgcagccccttccccttccctctcgtggcccacaaggaggaaggaagggcaacctaaaagcccacttagaaactttttggatatgccactgcaattcttttcaaaatagcattccccaggtttttaatgggaggaaaaaaagctttaatgttgagcatgctgcgagctgctgcgtggaaaggcctctgtatgggccgaagacccttcattccctgggctgccaggctcgccagggagcccactggaaacgcccaccacgggggctccttggtaaacatggttcttttttttatccgatcaacctgtgcaactttgatattttgaatattaatatttgcttcccttaaaacccctcgccgtaaaaacggtcctcaggtgcccgtgggtctatggcttcgtgggtcctgtaggctgtccgccttcaggttcccaccgtgttttgtctgggtgttcagcacgagggcagagctgtgtgctccatagcgtgtagctttagactcggagatgagtgctttgacccagcgaggagctcagctaagtgtatccacgctgtggttcagcagcctttagatcatacggcattgtggttcatgtttgaaattacagattttaaatgccatgttcattaagaaatccagggtattcagattctggggtttttcatattgtattattattattcttagggaatagttcaatgtaacaaggaaggaaaacttgacctttgctctggttaaaacagtaataggcacttgaaaaaaaaaagataaattattgaatgagtagtattacctacaaattccagaattttctgggttttaggacgttgtgaagcatgactgattaacagaattttatacaactgtaccaataaaattccaaattggaattgttttgttactctggttgttgtgccaaattgtggtacacttagaaaattctacagtccgtccgatttttagggtgttctctttcaacacctttttgttagtaatcattgccagtactgccttcatcagttaaggtgaggtgtcccagcacagatcattctcaaaagccgagccagggaagagctagtgggcatgctgaaggccagccgtggaccagccagttgaggccaggtgcttcttcccccccagacctgggcatcttcattgagggaaagaaaccagtcattgtgccaaaattctgttagtcagtgattctttacttgcaaattccggggccctagaaaatgaaagcaaacacaaaccccttgagtgtgcctttgggaaccccaaatgggaccttctggggacaaggcttgaggcaagcctgttattgaacgccccacgtttgtgaagagcctgagggtatcaggagggccgacgcctgtgttggcatgcgcagtaggggatgagggttagcccatagtattctttgcaaatgtgaaagcgagacattatatcttctccttgcttgggtgtaactaatcactgttaatttcaggaaacagaactcattaaaactccttagcaaaccaggtctacatcctgttttgtttgctgagtgaggttagtggggagtggtcaaattggtactcctgggaggaagaaaaaactggtcccttccttctccaaaaaaaaggaaaaattataataatataaatgacaaaaataaaagaattctgtttcctggaataagccatttcttattcctagttgtaagggactcctatttttaccttcccgttacagtgttggattcccataaagaaatattggttaccatttgagaataacctccacctgtatgggggtatttaatttgccaatggatggtctggagtaactggtatttttttctggtggcattaaccttaagtgtccagaaatgtttggtctttattttaaagtccatatgccatgttcctcctgcccaaggaaccctttacacagaccccaaacaaaaaaataataatcaaatgccttcaatttctgagtaaaatgaggcagagcgatggaaaaggaataggaaggagaaattaattgagattttcaggacacagacatatcgatgtgaatgcctacaaagccagtgcgcataggaacagtgggcctgggtaaagagtcacattggtaggaccgaataaagaataataaaaagccaaagcccaaaaaaaaaaaaaaaaaa

SEQ ID NO: 30200 - DNA, 544 bp, Homo sapiens
  SIMILAR (72)..(299): 971254mologous to Escherichia coli ORF_o78,accession number U18997,Smith-Waterman Score=380.
atgagaagtgatgtctattatcctcaccggaagcggcgcagtaccatacagtgtgtgagtagcagtaatcggcaagcagcatcgtgcgcgatttgctggcgttacggggccgtatggaagcggcccagataagccagacattgaacactccacagccaatgattaacgccatgctgcaacaactggaaagtatgggcaaagccgtgcggattcaggaagaacctgacggctgcctctctggcagttgtaaaagctgcccggaaggaaaagcctgtctgcgcgagtggtgggcgctgcgttaaccttactccatcgcctgttttggaaagcccgggtatgcgtctgcatccgggcttttttgcgtgcggctttccataaaaatgcaactcttgcagcacggcagcgttttcgtagttcacaatttgtgcctagtacgatttatgccggccggtacacgactctacattactgtcacacactccgctccagaaagaagttgtcatacattagttgcagcgagataggctctcaattcgatacttag

SEQ ID NO: 30201 - DNA, 954 bp, Homo sapiens
  SIMILAR (31)..(609): 951254mologous to Escherichia coli IN2-2 protein,accession number D90779,Smith-Waterman Score=941.
ttaatccgttttattacagggcagggtgcgatgagcagcaatacatttactctcggtacaaaatccgttaaccgtcttggttatggcgcgatgcaactggcaggtcctggagtttttggccccccacgagatcgccacgtcgctataaccgtgctgcgtgaggcgctggcattgggcgtcaatcatattgataccagcgacttttatggtccgcacgtcaccaatcagattatccgcgaagcgctttatccttactctgacgacctgacaattgtcactaaaattggtgcgcggcgtggagaggacgcatcctggttgcccgcattttctccggcagagctgcaaaaagcggtgcacgataatctacgtaatctcgggctggacgtgctggatgtggttaacctgcgcgttatgatgggggatggtcatggcccagcggaaggatcgattgaggccagcctgaccgtgctggcagagatgcaacaacaaggcctggtaaaacatattggcctgagcaacgtcacaccgacgcaggttgcagaggcgcgcaagattgccgaaattgtctttgtgcaaaacgaccacaacttcgcgcttcgcgacgcgctgcatgcattaaagttacgagttcgtcagggcgaaggtaaagacctgaataacgaaagtacgccaatggctttcgaaaatattaaacaagttattgatgacatggcgaccgatgccaccatgtttgacgttaacaaaaagtgtttgctgttgttcaatgtattggcggatgacggatattggcgcacctccgcagctactggcaaaatagccaggactccacaaaacgcctttgtagtaatacctgaatgcaatatctggtcgatctcgtcgcagtcacctacccgatacgcctttgaggctgtttaccagactggatatcgccagtttgggaggatagttaattaa

SEQ ID NO: 30202 - DNA, 4752 bp, Homo sapiens; identical to SEQ ID NO: 9224
  SIMILAR (3136)..(3885): 921254mologous to Escherichia coli No definition line found,accession number U00039,Smith-Waterman Score=1200.

SEQ ID NO: 30203 - DNA, 1555 bp, Homo sapiens
  SIMILAR (371)..(940): 761254mologous to Escherichia coli periplasmic putrescine binding protein,accession number M93239,Smith-Waterman Score=761.
ttggaaagcccgggtatgcgtctgcatccgggcttttttgcgtgcggctttccataaaaatgcaactcttgcagcacggcgtaagttcctgtgaaagcatctcgcagggatgaaaactcgataatacacaggtgtggagtggcgcgtagagtcgcggcattcaaacaacaggtgaaggaacgccatgagcaaaaagcagagttcccccccacacgatgcgctgttcaaactctttttacgccaaccggacacggctggtgattttcttgcgtttcatttaccggcacccattcacgcgctttgtgatatgaaaaccctcaagctggagtcgagcagctttattgatgacgatctgcgtgaaagctattccgatgtgctgtggtcggtgaaaacggaacaaggaccaggatacatctattgtctgattgaacatcaaagcacctcaaacaaactgatcgcatttcgcatgatgcgttacgctattgccgcaatgcaaaatcaccttgatgctggatacaaaagcaaattgccggagtggaagaatctcgacccggaactgctgaagctggtcgccaaacacgatcccgacaataaatttgctatgccctatatgtgggcgacgaccgggattggctataacgttgataaagttaaagcggtgctgggcgaaaacgcgcccgtcgatagctgggacttgatcctcaaacctgaaaatctggaaaaactgaaaagctgcggtgtctctttcctggatgcgccagaagaagtttttgctaccgtgttgaattatctcggcaaagatcccaacagcactaaagcggatgattacaccggaccggcaacagatctgctgttaaacgtgcgcccgaacattcgttatttccattcatctcaatacattaacgacctggcaaacggcgatatttgcgtcgctatcggaagcgacgctgttcataacgcggctaccttccagcacgtaggtcaaaatttccatatctttatgcgggtgagtgccgaagccctgccctgcttcaatcacgtcgtcgttaatcacgcgcagcgcggagaagcccataaagttcggatcgtaatagttggcaaaagagaaagtatgccaggagtccagccagccatgatttgcatgaccacgttcatttgctttgctgctaagagtgacctgcaggcatgtaagtttagggccccttgtcgcctgtatcccccccccttcgcggataatctgattggtgacgtgcggaccataaaagtcgctggtatcaatatgattgacgcccaatgccagcgcctcacgcagcacggttatagcgacgtggcgatctcgtggggggccaaaaactccaggacctgccagttgcatcgcgccataaccaagacggttaacggattttgtaccgagagtaaatgtattgctgtcatcgcaccctgccctgtaataaagctttggcaacatgtccggtcaaatgcgtaccttcctcgaccagacgggcggcctgtgggcttccggcgcactatacggaaaactggcgagcgtctttag

SEQ ID NO: 30204 - DNA, 993 bp, Homo sapiens
  SIMILAR (1)..(498): 1001254mologous to Escherichia coli K12 putative regulator,accession number AE000420,Smith-Waterman Score=859.
atggaccagattatttctctgttcggtcgcccggatcacgtcgcttatgacatccgcagcctgcgtaataaagccaatcctgacgacacctttgaagcgcaactgttttatggcgacctgaaagccatcgtcaaaaccagccatctggtgaaaatcgattatccgaaatttatcgttcacggtaagaaaggttcgtttattaaatacggtatcgaccagcaggaaaccagcctgaaggctaatattatgccgggcgaaccgggattcgcagcggatgattcggtcggtgtgctggagtatgtcaatgacgagggcgtgacggtcagagaagagatgaagccggagatgggcgattacgggcgcgtttatgatgcgttgtatcaaaccatcacccacggtgcgccaaattacgtcaaggaatctgaagttcttaccaatctggaaatccttgaacgcggatttgagcaagcctctccctccacagtaactctcgctaagcagatcgggtccacactaagcccatcgaaatcattcagggggcgaatacaaatgatctacttacgcaaagcaaatgaacgtggtcatgcaaatcatggctggctggactcctggcatactttctcttttgccaactattacgatccgaactttatgggcttctccgcgctgcgcgtgattaacgacgacgtgattgaagcagggcagggcttcggcactcacccgcataaagatatggaaattttgacctacgtgctggaaggtactgttgagcatcaggacagcatgggcaataaagagcaggttccggcggtggagatcctcgccctctctgcctcatggggaggccgtctccttaatatcacccgggatggggagcccagaatggggaacggggtccccaccggctttaacgcggcttccaagttcatccgaggcattgaggggtccccttccgtgggcttcaacattgggacaaccaagtcgggactgcac

SEQ ID NO: 30205 - DNA, 4011 bp, Homo sapiens
  SIMILAR (792)..(1850): 571254mologous to Monodelphis domestica t-complex polypeptide 1,accession number AF143497,Smith-Waterman Score=798.
cgccgtcgcagccactgctgtggttcgccggtcggccgaggggccgcgatactggttgcccgcggtgtaagcagaattcgacgtgtatcgctgccgtcaagatggaggggcctttgtccgtgttcggtgaccgcagcactggggaaacgatccgctcccaaaacgataaagagagttttaatgagcaaaaaacttgcagaatctgaaggaaaaggctggtatagctgtacgaagtggcagagcatgaaattgttatggctgcagcttcgattgccaatattgtaaaaagttctcttggtccagttggcttggataaaatgttgggtggatgatattggtgatgtaaccattactaacgatggtgcaaccatcctgaagttactggaggtagaacatcctgcagctaaagttctttgtgagctggctgatctgcaagacaaagaagttggagatggaactacttcagtggttattattgcagcagaacttctaaaaaatgcagatgaattagtcaaacaggaaattcatcccacatcagttattagtggctatccgacttgctttgcaaggaagcagtgcgttaatatcaatgaaaaccctaatttgttaacacaagatgaactgggaagagattgcctgattaatgctgctaagacatccatgtcttccccaaatcattggaataaatggtgatttctttgctaacatggtagtagatgctgtacttgctattaaatacacagacataagaggccagccacgctatccagtcaactctgttaatattttgaaagcccatgggagaagtcaaatggagagtatgcttcatcagtggctatgcactcaactgtgtggtgggatcccagggcatgcccaagagaatcgtaaatgcaaaaattgcttgccttgacttcagcctgcaaaaaacaaaaatgaagcttggtgtacaggtggtcattacagaccctgaaaaactggaccaaattagacagagagaatcagatatcaccaaggagagaattcagaagatcctggcaactggtgccaatgttattctaaccactggtggaattgatgatatgtgtctgaagtattttgtggaggctggtgctatggcagttagaagagttttaaaaagggaccttaaacgcattgccaaagcttctggagcaactattctgtcaacccctggcccaatttggaaggtgaagaaacttttgaagctgcaatgttgggacaggccagaagaagtggtacaggagagaatttgtgatgatgagctgatcttaatcaaaagtactaaggcttcgtacgtctgcatcgatcatctcacgtgtgccaattgattccatgtgtgatgagatggagcgctctttaccatgatgcactttgctgtagtgaagagcagttctggagtcaaaaatctgtggttccccgttgggggtgctgtagaagcagccctttccatatacccttgaaaactatgccaaccagcatggggtctcgggaacagcttgcgattgccagagtttgcaagatcactctctggttattccccaatacacttagcagttaatgcttgcccagggactccacagatctggtgttgcaaaatttaagagctttttcataatgaggcccaggttaaacccagaacggtaaaaatctaaaatggattggtcttgatttgagcaatggtacccctcgagacaacaaacaggcgggggtgttcgaaccaaccatagttaaagttaggggtttgaattttgcaacagaagctgcaatcacccattcttcgaattgatgatcttattaaattacatccagaaagtaaagatgataaacatgggaagttatgaagatgctgttcactctggagcccttaatgattgatctgatgtttcccttttatttataacaatgttaaatgcaattgtcttgtaccgtgagttgagtattacacattaaagtaaagtacaagctgttaaacttgggtttttgtgatgtaagaaatggtttccatctgtactttggtcctctgatttcacatattgcaacctagtactttattagtttaaaaaagaaattgaggttgttcaaagtttaagcaattcattctctctgaacacacattgtcattctctctgaacacacattgctattcccaatcccaccccccaaatgcacagggctgcaaacaccacgacttctgcccattctctccagtggtgtgtaacagggtcacaaagaattcgacagccagatgctccaagaggggtgggcccaagggcttatagccccctcctttcaatattgaccttctctggggggtaatcccaaaggtctttaactattggcagcagagacagctgccaaggcctcaatttgattcaaaatatgtcaacatctttcagtgaccaacctgcttttgttacagcttgctttatgggctggaattggtcctattcccataatggaaggctccacacccacttgggaccaggaaactatccgtgctaaagggtgtaagcccacgtttatcagcttctgactccttcataagaacgaacagctggaagcaccattcatttattcctgaagcaattggctggggtgactggtcccgttccatcagtaagaaagtaaggctttagcttggacatggcttcctatgttgctcccatggcgaggaaactcatctgttttaacttcaataagacctcttctaagttgacaccaaaactggtacaatctctttgtcaaaatggccagctttctgtgcattctctgtcctgttctgggacagaactgcaaccttgtcctgatcttctctactcacttgccattttttggctacattttcagctgtaatacccatatgacagttgtgaaaatgcatctgtaaagaccatcaacagagtaatactgtcaagtcaagtggcatctcacctatctttactcctgttctcaagtaagccaagtgaggagccttgctcatattttccatggcctcctgcaaccacaatgctgggagtctcctatccctattgactggactgcaaggcacacagcttttaggcctgacccacagatcatctggcagctccatgctggaacagagtagggaattcctgcacccacactggcttgtctaacaggattctgcccacagcctgctgccaagacatgtccaaaagatgacctcaggctcatcttccggagccacagtggccctcttcaaggcttctttgatggcagtggagcccgcggtcctggtcaggcaacagcagttaaggcaccgatgaagatccgtacgatgtgggcgcgccgccgagacgatgaccacaggatctgagcctgcattcatcttgcttctcctgccgccgactgccctgcgctgcctgcaagctaggcaaagctcctcctcgcagcccacaggcctgccgcgggcgggacctgagctcaggactggaatcccacgggcgagaatctcgagtgcgagcccggcccgcagcgggtctcagcacagctctgatgggtccttttgctctcggcggcttcgggaggtcctatgcgtttctcctggcgccagtcattcgctcgcgtgaggggcttgctaggagcgtctcggtgcgagccccctgccttctaagatcaactctggctgtgaacgggtgaggacgccgggagcgtcttagcgtcacaaaagttcctttggttgacgtttggacagtgaaaggagcatgtaacaagtggggtcagttttgtttaaaaccctttctgacttcccagcctcttactgggcaaagttcataatttttctgagctttctagggtttccaggcaagcttatgaggggccaccgttacagcaacttgttgggaacacctggatagtggaacaagaaagctttgtcacaaagtcatgaaggggaaaactgttgacggacctggagaatcttcctgaagaactttaaagttgattgaaagaatcattaaatcctggaaacct

SEQ ID NO: 30206 - DNA, 975 bp, Homo sapiens
  SIMILAR (31)..(642): 931254mologous to Escherichia coli K12 putative flavodoxin,accession number AE000355,Smith-Waterman Score=1011.
atgggcacatgtatagtcctgcgaagagtacgctgtctagtgttctgtacctctcactggattgcggaaaccgacccacgcgtggcggtgaaaattttcaacgtcgcccgaagcgataaaaacgaaatcctgactaatgtcttccgctcaaaaggcgtgctggtcggcacttcgacgatgaataacgtgatgatgccgaaaatcgccgggctggtggaggagatgactggtttacgcttccgtaacaaacgcgccagtgctttcggctctcacggctggagcggcggtgcggtggatcgtctttccacgcgcctgcaggatgcgggtttcgaaatgtcgcttagcctgaaagcgaaatggcgaccagaccaggacgctctgaagttatgccgtgaacacggtcgcgaaatcgcccgtcagtgggcgctcgcgccgctgccgcagagcacggtgaataccgtagttagagaagaaacctctgtcaccacgacgggtgacctcggcccacggatgcagtgcagcgtctgccagtggatttacgatccggcaaaaggcgacccaatgcaggacgttgcgccaggaacgccgtggagtgaagtcccggataacttcctctgcccggaatgctccctcggcaaagactttaatctgcacctgtttccacaaacctgggtgacggatatcgatgccgaagcccgtgtggtgaaaagccagaataatcagtggcaatacgacaagctagtactggcaaccggtgccagtgcctttgtcccgcctgtgcctgggcgtgagttaatgctgacgttaaatagtcagcaagagtatcgcgcctgtgaaacgcaactgcgggatgcccgacgcgtgttgattgttggcggtggtttgattggtagcgaactggcgatggatttttgtcgtgcaggcaaagcggtcacgctaatcagacaacgctgccagtattctggcggtcgttaa

SEQ ID NO: 30207 - DNA, 2577 bp, Homo sapiens; identical to SEQ ID NO: 26060
  SIMILAR (1897)..(2574): 961254mologous to Escherichia coli K12 putative oxidoreductase,accession number AE000355,Smith-Waterman Score=1074.

SEQ ID NO: 30208 - DNA, 3126 bp, Homo sapiens; identical to SEQ ID NO: 18171
  SIMILAR (1998)..(2216): 891254mologous to Escherichia coli metR,accession number M37630,Smith-Waterman Score=328.

SEQ ID NO: 30209 - DNA, 1134 bp, Homo sapiens
  SIMILAR (1)..(1131): 1001254mologous to Escherichia coli K12 putative oxidoreductase,accession number AE000355,Smith-Waterman Score=1897.
atgagtaacggcattgtgatcatcggttcgggcttcgccgcccgccaactggtgaaaaatattcgcaaacaggacgccactattccattaaccctgattgccgccgacagcatggatgagtacaacaaacctgacctcagccatgttatcagtcaggggcaacgtgccgatgaccttacccgccagacggcgggtgaatttgccgagcagtttaatctgcacctgtttccacaaacctgggtgacggatatcgatgccgaagcccgtgtggtgaaaagccagaataatcagtggcaatacgacaagctagtactggcaaccggtgccagtgcctttgtcccgcctgtgcctgggcgtgagttaatgctgacgttaaatagtcagcaagagtatcgcgcctgtgaaacgcaactgcgggatgcccgacgcgtgttgattgttggcggtggtttgattggtagcgaactggcgatggatttttgtcgtgcaggcaaagcggtcacgctaatcgacaacgctgccagtattctggcgtcgttaatgccaccggaagtaagcagccgcttgcagcatcggttgacggagatgggcgttcatctgctgttgaaatctcagttacaggggctggaaaaaacggattctggcattcaggcaacgctggaccgccagcgcaatatcgaagtggatgcggtaattgccgccaccggactgcgcccggaaaccgccctggcacgacgcgccgggctgacgattaatcgcggcgtttgcgtcgatagttatctgcaaaccagtaataccgatatttacgcgctgggcgattgcgcggaaattaacggtcaggtattgccgttcctccagccgattcaacttagcgcgatggtgctggcaaaaaatcttctcggcaataacacgccgctgaaactcccggcgatgctggtgaaaatcaaaacgccggaattaccgctgcatctggcaggcgaaacccagcgtcaggatttacgctggcaaattaataccgaacgccagggaatggtggcgcgcggcgttgacgatgctgaccagcttcgcgcctttgtggtcagtgaggatcggatgaaagaggcatttggattgttgaaaacattgccgatgtag

SEQ ID NO: 30210 - DNA, 2082 bp, Homo sapiens; identical to SEQ ID NO: 26063
  SIMILAR (1438)..(2073): 981254mologous to Escherichia coli K12 putative LACI-type transcriptional regulator,accession number AE000494,Smith-Waterman Score=1063.

SEQ ID NO: 30211 - DNA, 915 bp, Homo sapiens
  SIMILAR (499)..(912): 971254mologous to Escherichia coli PHOSPHOENOLPYRUVATE- PROTEIN PHOSPHOTRANSFERASE PTSA (EC 2.7.3.9) (PHOSPHOTRANSFERASE SYSTEM, ENZYME I) (ENZYME I-ANI),accession number D90868,Smith- Waterman Score=687.
atggactactatgcagccataaaaaatgatgagttcatgtcctatggtgaacgggacgccgccttcggtaaggaagcgggaagagtaaccgccgccacgctgttgatggtcgatgacttcgcgctgctgtatatcgcgttgatcctcgtggccaccctggcctgcgtcaccctcgcccacgcctacctcggcgaaggcggcacgggttacccgggcaaccgcgaagagctgtacctgctgatcctgctggctgcgaccggcggtatcgtgctggtcagcgcgcagtgcctgggccaagagtatcgcgcctgtgaaacgcaactgcgggatgcccgacgcgtgttgattgttggcggtggtttgattggtagcgaacgtggcggcgtagtcggtgccatcaccaccatgggcgttatcgtcggcgcagacatgccgatgttcctcggttctatgattgcaggtccgctgggcggctggtgcattaagcacttcgaccgctgggtagacggatttagcaataaagagcaggcgatccagttcctgtgcggcaacctcggcgttaacgggcgcactgaacatccgtttgagctggaagaagatgtctggcagcgggaagagattgttaccaccggcgttggttttggcgtagcgatcccgcacaccaaatctcagtggatccgtcattccagtatcagcattgcccggctggcgaaaccgattggctggcagtcagaaatgggcgaagtcgaactggtgatcatgctgacgctgggtgctaacgaagggatgaatcatgtgaaagtcttctcgcagctggcgcgtaaactggtgaataaaaacttccgccagtcgttgtttgccgcgcaagatgcacaaagtatcctgacgctgctggaaacagaattaaccttctga

SEQ ID NO: 30212 - DNA, 2658 bp, Homo sapiens; identical to SEQ ID NO: 9092
  SIMILAR (919)..(1719): 1001254mologous to Escherichia coli K12 putative oxidoreductase,accession number AE000355,Smith-Waterman Score=1343.

SEQ ID NO: 30213 - DNA, 2412 bp, Homo sapiens
  SIMILAR (1)..(561): 911254mologous to Escherichia coli OrfB protein,accession number X55034,Smith-Waterman Score=849.
atgcgtatggacccaacccgtgggcagtcagccgctgaatggctacaaaccgcagaagaagccgatatcgcctgggtattgaaaacctatggtgaagagcgttttgccaaacgcattgcccgcgccattgtcgagcgtaaccgcgaacagccgatgacccgcaccaaagaactggcggaagtcgtggctgctgcaacgccggtgaaagataagtttaaacatcccgcgacccgtaccttccaggcggtgcgcatttgggtaaacagtgaactggaggagatagagcaggcgctaaaaagctcgctcaacgtgctggccccgggtgggcggctttcgatcatcagcttccactcgctggaagaccgtattgtgaaacgttttatgcgtgaaaacagccgcggtccgcaagttccggcagggttaccgatgactgaagagcagctcaaaaaactgggtggccgtcagctgcgagcactaggcaagttaatgccgggcgaagaagagttcagttctgcgtattgcagagaggacgaatgcatgatcagcagagtgacagaagctctaagcaaagttaaaggatcgatgggaagccacgagcgccatgcattgcctggtgttatcggtgacgatcttttgcgatttgggaagctgccactctgcctgttcatttgcattattttgacggcggtgactgtggtaaccacggcgcaccatacccgtttactgaccgctcagcgcgaacaactggtgctggagcgagatgctttagacattgaatggcgcaacctgatccttgaagagaatgcgctcggcgaccatagccggaaaccaaaacgtcaggaagaacatgccaactttatcagttggcgttttgcgttgttatgcggctgtattctcctggcgctggcttttctgctcggacgcgtagcgtggttacaagttatctccccggatatgctggtgaaagagggcgacatgcgttctcttcgcgttcagcaagtttccacctcccgcggcatgattactgaccgttctggtcgcccgttagcggtgagcgtgccggtaaaagcgatttgggctgacccgaaagaagtgcatgacgctggcggtatcagcgtcggtgaccgctggaaggcgctggctcgagtactactggtccggctgacggcaacgctggaccgccagcgcaatatcgaagtggatgcggtaattgccgccaccggactgcgcccggaaaccgccctggcacgacgcgccgggctgacgattaatcgcggcgtttgcgtcgatagttatctgcaaaccagtaataccgatatttacgcgctgggcgattgcgcggaaattaacggtcaggtattgccgttcctccagccgattcaacttagcgcgatggtgctggcaaaaaatcttctcggcaataacacgccgctgaaactcccggcgatgctggtgaaaatcaaaacgccggaattaccgctgcatctggcaggcgaaacccagcgtcaggatttacgctggcaaattaataccgaacgccagggaatggtggcgcgcggcgttgacgatgctgaccagcttcgcgcctttgtggtcagtgaggatcggatgaaagaggcatttggattgttgaaaacattgccgattcgcgcgaccagactcgatacgctgttggatccagcgtttttcttcggtgctggtaatgtgcatatactcggcaccaatcgggccgcagtaggtttgcttgagggcttccagcagctcgccgagtttcatgcgattatggatggcaccactcctcgcgtgctggagaacgccgaaggcgatcgcaccacgccttctatcattgcctatacccaggatggtgaaactctagttggtcagccggctaaacgtcaggcagtgacgaacccgcaaaacactctgtttgcgattaaacgcctgattggtcgccgcttccaggacgaagaagtacagcgtgatgtttccatcatgccgttcaaaattattgctgctgataacggcgacgcatgggtcgaagttaaaggccagaaaatggcaccgccgcagatttctgctgaagtgctgaaaaaaatgaagaaaaccgctgaagattacctgggtgaaccggtagctgtccctaccctcagtactcttgcttggaatgctgtgagagaagggggtctcattcccactaagtgtgagtacacttatgtccttgattgcagctggcagccatcctatgagaatgagcagaatctgatttacgataaaacagacactttgaatggcagaataaaggaaggaaaccaaatatttaaagacaccatagagcccatagatcaactaattgtaaagcctgaccattccagttatgagtcagtaagtcccctctatgatgaaatcagttag

SEQ ID NO: 30214 - DNA, 2454 bp, Homo sapiens
  SIMILAR (1298)..(1342): 931254mologous to Escherichia coli peptidase N,accession number M15273,Smith-Waterman Score=73.
  misc_feature (1)...(2454): n = a,t,c or g
atgataggggggaccactacgccatttatcctgacgccgttcagccgcctggtaacaccgaaaattaccgagatcctgggctttaacttaccagtcgatatgatagccacttcccacggcgtggtatggcgcgataacccgacgcaaattgtcgagctgtacctgaaatgggcggctgattatcaggaagacagaatcaccattttctacgacaccatgtcgaataacacccgcatgatggctgacgctatcgcccnagggattgcggaaaccgacccacgcgtggcggtgaaaattttcaacgtcgcccgaagcgataaaaacgaaatcctgactaatgtcttccgctcaaaaggcgtgctggtcggcacttcgacgatgaataacgtgatgatgccgaaaatcgccgggctggtggaggagatgactggtttacgcttccgtaacaaacgcgccagtgctttcggctctcacggctggagcggcggtgcggtggatcgtctttccacgcgcctgcaggatgcgggtttcgaaatgtcgcttagcctgaaagcgaaatggcgaccagaccaggacgctctgaagttatgccgtgaacacggtcgcgaaatcgcccgtcagtgggcgctcgcgccgctgccgcagagcacggtgaatacggtagttaaagaagaaacctctgccaccacgacgggtggacttcggcccacggatgcagtgcagcgtctgccagtggatttacgatccggcaaaaggcgagccaatgcaggacgttgcgccaggaacgccgtggaaactggcatcggaggcaaaatgagtaacggcattgtgatcatcggttcgggcttcgccgcccgccaactggtgaaaaatattcgcaaacaggacgccactattccattaaccctgattgccgccgacagcatggatgagtacaacaaacctgacctcagccatgttatcagtcaggggcaacgtgccgatgaccttacccgccagacggcgggtgaatttgccgagcagtttaatctgcacctgtttccacaaacctgggtgacggatatcgatgccgaagcccgtgtggtgaaaagccagaataatcagtggcaatacgacaagctagtactggcaaccggtgccagtgcctttgtcccgcctgtgcctgggcaaaggtttcccgcatcatacacggggaaaaaggcgagattggaccagcatccctatcagttagttccgatcagcccccacgccaaggctataatcaacagcgattataatggaccggccagcatgctgtcgtcatggtgcatcacatgctccccttcgtctcaacggcgaagactcaaactggtttctgttcatattaatgatgagccgtggaccgcctggaaagaagaagagggcgcactggttatcagtaatttgccggagcgttttacgcttaagatcattaatgaaataagcccggcggcgaataccgcgctggaagggctttatcagtcaggcgatgcgctttgcacccagtgtgaagccgaaggtttccgccatattacgtattatctcgaccgcccggacgtgctggcgcgttttaccaccaaaattattgccgataaaatcaaatatcccttcctgctttccaatggtaaccgcgttgcgcaaggcgaactggaaaacggacgccattgggtacagtggcaggacccgttcccgaaaccgtgctacctgtttgcgctggtggcaggcgactttgatgtactgcgcgatacctttaccacgcgttctggtcgcgaagtagcactggagctgtacgtcgatcgcggcaaccttgatcgcgcgccgtgggcgatgacctcgctgaaaaactccatgaaatgggatgaagaacgctttggcctggagtatgacctcgacatctatatgatcgtcgcggtggatttcttcaatatgggcgcaatggagaataaggggctgaatatctttaactccaaatatgtgctggcccgcaccgacaccgccaccgacaaagattacctcgatattgaacgcgttatcggccatgaatatttccataactggaccggtaaccgagtgacctgtcgcgactggttccagctcagcctgaaagaaggtttaaccgtcttccgcgatcaggagttcagctctgaccttggttcccgcgcagttaaccgcatcaataatgtacgcaccatgcgcggattgcagtttgcagaagacgccagcccgatggcgcacccgatccgcccggatatggtcattgagatgaacaacttctacaccctgaccgtttacgagaagggcgcggaagtgattcgcatgatccacaccctgcttggcgaagaaaacttccagacagggatgcagctttatttcgagcgtcatgatggtagtgcagcgacctgtgacaacttgtgccggggaaggaagatgcgctga

SEQ ID NO: 30215 - DNA, 2533 bp, Homo sapiens
  SIMILAR (89)..(2530): 1001254mologous to Homo sapiens cadherin-15,accession number D83542,Smith-Waterman Score=4250.
tttcgtcgcgcacttgcgctgtcactcagcctggacgcacttcttcgggtcgcgggtgcactccggcccggctcccgcctcggccccgatggacgccgcgttcctcctcgtcctcgggctgttggcccagagcctctgcctgtctttgggggttcctggatggaggaggcccaccaccctgtacccctggcgccgggcgcctgccctgagccgcgtgcggagggcctgggtcatccccccgatcagcgtatccgagaaccacaagcgtctcccctaccccctggttcagatcaagtcggacaagcagcagctgggcagcgtcatctacagcatccagggacccggcgtggatgaggagccccggggcgtcttctctatcgacaagttcacagggaaggtcttcctcaatgccatgctggaccgcgagaagactgatcgcttcaggctaagagcgtttgccctggacctgggaggatccaccctggaggaccccacggacctggagattgtagttgtggatcagaatgacaaccggccagccttcctgcaggaggcgttcactggccgcgtgctggagggtgcagtcccaggcacctatgtgaccagggcagaggccacagatgccgacgaccccgagacggacaacgcagcgctgcggttctccatcctgcagcagggcagccccgagctcttcagcatcgacgagctcacaggagagatccgcacagtgcaagtggggctggaccgcgaggtggtcgcggtgtacaatctgaccctgcaggtggcggacatgtctggagacggcctcacagccactgcctcagccatcatcacccttgatgacatcaatgacaatgcccccgagttcaccagggatgagttcttcatggaggccatagaggccgtcagcggagtggatgtgggacgcctggaagtggaggacagggacctgccaggctccccaaactgggtggccaggttcaccatcctggaaggcgaccccgatgggcagttcaccatccgcacggaccccaagaccaacgagggtgttctgtccattgtgaaggccctggactatgagagctgtgaacactacgaactcaaagtgtcggtgcagaatgaggccccgctgcaggcggctgcccttagggctgagcggggccaggccaaggtccgcgtgcatgtgcaggacaccaacgagccccccgtgttccaggagaacccacttcggaccagcctagcagagggggcacccccaggcactctggtggccaccttctctgcccgggaccctgacacagagcagctgcagaggctcagctactccaaggactacgacccggaagactggctgcaagtggacgcagccactggccggatccagacccagcacgtgctcagcccggcgtcccccttcctcaagggcggctggtacagagccatcgtcctggcccaggatgacgcctcccagccccgcaccgccaccggcaccctgtccatcgagatcctggaggtgaacgaccatgcacctgtgctggccccgccgccgccgggcagcctgtgcagcgagccacaccaaggcccaggcctcctcctgggcgccacggatgaggacctgcccccccacggggcccccttccacttccagctgagccccaggctcccagagctcggccggaactggagcctcagccaggtcaacgtgagccacgcgcgcctgcggccgcgacaccaggtccccgaaggcctgcaccgcctcagcctgctgctccgggactcggggcagccgccccagcagcgcgagcagcctctgaacgtgaccgtgtgccgctgcggcaaggacggcgtctgcctgccgggggccgcagcgctgctggcggggggcacaggcctcagcctgggcgcactggtcatcgtgctggccagcgccctcctgctgctggtgctggtcctgctcgtggcactccgggcgcggttctggaagcagtctcggggcaaggggctgctgcacggcccccaggacgaccttcgagacaatgtcctcaactacgatgagcaaggaggcggggaggaggaccaggacgcctacgacatcagccagctgcgtcacccgacagcgctgagcctgcctctgggaccgccgccacttcgcagagatgccccgcagggccgcctgcacccccagccaccccgagtgctgcccaccagccccctggacatcgccgacttcatcaatgatggcttggaggctgcagatagtgaccccagtgtgccgccttacgacacagccctcatctatgactacgagggtgacggctcggtggcggggacgctgagctccatcctgtccagccagggcgatgaggaccaggactacgactacctcagagactgggggccccgcttcgcccggctggcagacatgtatgggcacccgtgcgggttggagtacggggccagatgggaccaccaggccagggagggtctttctcctggggcactgctacccagacacagaggccggacagcctga

SEQ ID NO: 30216 - DNA, 4083 bp, Homo sapiens
  SIMILAR (3223)..(4080): 701254mologous to Homo sapiens cadherin-15,accession number D83542,Smith-Waterman Score=995.
atggccttgaccctagggtcggctctagccacaggctctgagctcatgcttggcctcgctgctcagtgcactgtccgtgctcggaagagagagagagaagctgggtggaggccgtgccgtgtccttgcgctgcgtccccgccccagtagaggcatcaccaggaagaggcgaaaggccgcctgtgatggtcctcttcttatgaaacgcccagaacagaaaaaccacggacgcggacagcagacctggtgccagcccgtcgtgtgccgggcacacacaggtcccctcatcgtggacagccccggggccatcagggcaaggcgccagccctccctggccagcaagtgtgtaaaagtgggaatgacaccagaatctgtgggcagctgttccgtggggaccccactgcctggagtacaggtgcgcattgtctcagaaaacccacagagggaagcctgctcctacaccatccacgcagagggagacgagagggggaccaaggtgaccccagggtttgaagaaaaggagggggagctgctggtgaggggaccctccgtgtttcgagaatactggaataaaccagaagaaactaagagtgcattcaccctagatggctggtttaagacagggggtccttgctcccagagctcccaagatggtagcgggcagcttccaaaatggcggcaggctgcttccaagatggtggcaagcgtcgtgttctctgacctggggttcttggccttatggattccaaggaatggaatcttgggccatgcgcccgcttctgcctcaagatcacacagcgggcttgtgaggccaggggtctccgctgctgctcaaggagatggcaaaggtctgtttcaggtaactcctctgacggccacaacgatgtcttcagacgtcaaaggtctgtctcaggtaactcctctgaccggccactacgatgtcttcagacgtcaaaggtctgtctcaggttacttctttgacggccacaatgatctctgcagatgctttgactccacttgccctcgctcagagacacacgctcacatttgccaccctggggcgagttggaaggtgaccgtggatggttgggctcctcttgccgggcagatgcgggagcagcagcagcagcagcccctcagggcgctcaaacggcgtggggccaacagtgccccatggcagcctttgccgagggagggaccttttcagaagccctggggcctttgtctcattgaccaaaaccctcctggccatgctgccttcacaggacactgggcatctctgtggggcaagggaaggaacacaggcctcctggtggggccccaagacccaaccaaggctcgtctggctggtgccagcctctgcgccaagggtgccgaccaaggggacaccgtggtgtttaaggatggccagtactggatccgaggccggacctcagtggacatcatcaagactggaggctacaaggtcagcgccctggaggtggagtggcacctgctggcccaccccagcatcacaggcaccgccactggcttcttgggggtcatttcccgtgttcaggaccccacgctctccccagccctggctggcccaggggctttccgtgtgcaccgctaccctggcacctggggcgaggctgtgtccccgccgggtgaatctcagagcctctgcctgtctttgggggttcctggatggaggaggcccaccaccctgtacccctggcgccgggcgcctgccctgagccgcgtgcggagggcctgggtcatccccccgatcagcgtatccgagaaccacaagcgtctcccctaccccctggttcagggccccggcgtggatgaggagccccggggcgtcttctctatcgcccagttcacagggaaggtcttcctcaatgccatgctggaccgcgagaagactgatcgcttcagggtgcggagctgcgtggtcggacctgtgcccctcaagcaggcctggtggaaagccagtgcccctcctccccaccaggcttctcctccccgctcggtgggcttcaggccagactgcaagatccaggcacccttaagtgagggggcagctggtgttttcagctggagacaaagtctgaacgtgctgtctctttcgcatgggcctaacgggagccacagaaatttgggggccacaagagccagcccttgctctatgtttgaacagctaagagggtttgccctggacctgggaggatccaccctggaggaccccacggacctggagattgtagttgtggatcagaatgacaaccggccagccttcctgcaggaggcgttcactggccgcgtgctggagggtgcagtcccaggcacctatgtgaccagggcagaggccacagatgccgacgaccccgagacggacaacgcagcgctgcggttctccatcctgcagcagggcagccccgagctcttcagcatcgacgagctcacaggagagatccgcacagtgcaagtggggctggaccgcgagcctcatggcaacggctccccgctggtggtcgcggtgtacaatctgaccctgcaggtggcggacatgtctggagacggcctcacagccactgcttcagccatcatcacctttgatgacatcaatgacaatgcccccgagttcaccagggatgagagcaagtctccctccggcctttgctgtatgggaagggagcacgaagttgagcccacagaggaggaccatgggggcacgtgggggacagtgactcacaaaacagacaaacctgaggacacccagtggttcttcatggaggccatagaggccgtcagcggagtggatgtgggacgcctggaagtggaggacagggacctgccaggctccccaaactgggtggccaggttcaccatcctggaaggcgaccccgatgggcagttcaccatccgcacggaccccaagaccaacgagggtgttctgtccattgtgaaggtgagcggcccccggctggcacacagatgccggcagacgcagatgccgacacacacagatgcccacacacagatgccggcacgcacagcctcccagccccgcaccgccaccggcaccctgtccatcgagatcctggaggtgaacgaccatgcacctgtgctggccccgccgccgccgggcagcctgtgcagcgagccacaccaaggcccaggcctcctcctgggcgccacggatgaggacctgcccccccacggggcccccttccacttccagctgagccccaggctcccagagctcggccggaactggagcctcagccaggtcaacgttccacctgctccgcaacaccacccactcattaccagccacgccgcttgcacccaacccggcccctggatcgccaaccccggccccctcattactaagccaccgcccttttcctccccagtgctggtcctgctcgtggcactccgggcgcggttctggaagcagtctcggggcaaggggctgctgcacggcccccaggacgaccttcgagacaatgtcctcaactacgatgagcaaggaggcggggaggaggaccaggacgcctacgacatcagccagctgcgtcacccgacagcgctgagcctgcctctgggaccgccgccacttcgcagagatgccccgcagggccgcctgcacccccagccaccccgagtgctgcccaccagccccctggacatcgccgacttcatcaatgatgtagaccttcgccccccggacgtgggcagcttccccttcctgagcccgtgccttgagctgactttgccctgggctgtggccacggcgggcttggaggctgcagatagtgaccccagtgtgccgccttacgacacagccctcatctatgactacgagggtgacggctcggtggcggggacgctgagctccatcctgtccagccagggcgatgaggaccaggactacgactacctcagagactgggggccccgcttcgcccggctggcagacatgtatgggcacccgtgcgggttggagtacggggccagatgggaccaccaggccagggagggtctttctcctggggcactgctacccagacacagaggccggacagcctga

SEQ ID NO: 30217 - DNA, 1725 bp, Homo sapiens; identical to SEQ ID NO: 26066
  SIMILAR (1151)..(1195): 801254mologous to Escherichia coli K12 putative oxidoreductase,accession number AE000355,Smith-Waterman Score=58.

SEQ ID NO: 30218 - DNA, 479 bp, Homo sapiens
  SIMILAR (139)..(477): 961254mologous to Homo sapiens Ran-GTP binding protein; RanBP6,accession number AF039023,Smith-Waterman Score=537.
  misc_feature (1)...(479): n = a,t,c or g
gcgcaatggcggcaaccgcgtctgcaggggtgccggcgaccgtgtcagaaaagcaagagttttaccagcttctgaagaaccngatcactccaagctgtatggtgcggaggcaagcagaggaaatctatgaanatatcccaggatcctcatccaagggtgagngctgcagcctgtactacacttggacagatggctacagattttgcacctaatttccaaaagaaatttcatganacagtgatngcngctctgttacgtaccatggaaaatcaaggtaatcagcgtgtgcaatcacatgcagcttctgctcttattatttttattgaagactgccctaaatcatagctagttctatatgtggatagtatggtgaaaaatctacattccgtcttggtgattaaacttcaagagttgattcggaatggaactaagttggctttggaacaacttgtgacaaccattgcatcagttgcagatac

SEQ ID NO: 30219 - DNA, 600 bp, Homo sapiens; identical to SEQ ID NO: 5379
  SIMILAR (35)..(106): 701254mologous to Homo sapiens Ran-GTP binding protein; RanBP6,accession number AF039023,Smith-Waterman Score=92.

SEQ ID NO: 30220 - DNA, 4617 bp, Homo sapiens
  SIMILAR (866)..(2938): 991254mologous to Homo sapiens Ran-GTP binding protein; RanBP6,accession number AF039023,Smith-Waterman Score=3572.
gcatgccggcaaccgcgtctgcaggggtgccggcgaccgtgtcagaaaagcaagagttttaccagcttctgaagaacctgatcaatccaagctgtatggtgcggaggcaagcagaggaaatctatgaaaatatcccaggtctgtgtaagactaccttcctcttagatgccgtcagaaatagaagagcaggttatgaggtgagacaaatggctgccgcactgctacgacggcttttgtcctctgggtttgaggaggtttatccaaatctgcctgctgatgttcagagagatgtcaagattgaactgattctggctgttaagttagaaacacatgctagcatgaggaaaaaactttgtgatatttttgcagtgctggcgcaggaatttgatagatgaggatggcactaaccactggccggaaggtctgaagtttcttattgattcaatctactccacaaatgtggctctatgggaagttgcacttcacgttttctggcactttcctgggatttttgggacccaagagcggcatgatttggatatcatcaaacggttgttggaccagtgtattcaagatcaagatcatccagcaatcaagacattatccgctagagctgcagctgcatttgtacttgctaatgagaataatattgctcttttcaaagactttgcagacttgcttcctggaatcttacaggctgtgaatgactcatgctaccaggatgatgattcagtgctagaatcccttgttgagattgcagataccgtacctaagtacttgggtccttatttagaagatactctacagttgagtttgaagttatgtggagactctaggcttagtaatctgcagcgccagctggcccctcgaagttatagtgaccttgtctgaaactgccactccgatgttgaaaaaacatacaaatattattgcacaggcagttcctcatatattagcaatgatggttgatctacaagatgatgaggactgggtaaatgctgatgaaatggaagaagatgattttgacagcaatgcagttgctgcggagagtgcactagacagactggcttgtgggcttggtggaaaagttgttttaccaatgaccaaggagcatatcatgcagatgcttcagagccctgactggaagtatcgacatgctggattaatggccttatctgccattggagaaggatgccatcaacaaatggaatcaattctagatgaaacagttaactccgttttgctttttcttcaggatcctcatccaagggtgagggctgcagcctgtactacacttggacagatggctacagattttgcacctaatttccaaaagaaatttcatgaaacagtgattgcagctctgttacgtaccatggaaaatcaaggtaatcagcgtgtgcaatcacatgcagcttctgctcttattatttttattgaagactgccctaaatcattgctagttctatatgtggatagtatggtgaaaaatctacattccgtcttggtgattaaacttcaagagttgattcggaatggaactaagttggctttggaacaacttgtgacaaccattgcatcagttgcagatacaatagaagaaaaatttgtcccatattatgatatattcatgccctcactaaagcacattgttgagcttgctgttcagaaggaactcaagcttctgagaggaaaaactatcgagtgcattagccatattggtcttgctgttgggaaggaaaaatttatgcaagatgcatcaaatgtgatgcagctgttgttgaagacacaatcagacttaaataatatggaagatgatgaccctcagacctcttacatggtttcagcatgggctagaatgtgtaaaattcttggaaaagattttcaacagtaccttccactggttatcgagcctcttattaagactgcttcagctaaacctgatgttgctctcttagacacacaggatgtggaaaatatgagtgacgatgatggctggcaatttgtaaatcttggagaccagcagagttttggaattaaaacttcaggacttgaagcaaaagcaactgcttgccaaatgttggtttactatgctaaggagttaagggaagggtttgtggaatatacagaacaagttgtgaagctgatggttcctttactgaaattttatttccatgacaatgttcgagtggcagcagcagagtccatgccttttctcctggaatgtgcaagaattcgtggcccagagtatcttgcacagatgtggcaattcatatgtgaccccttaatcaaggctattggtactgaaccagatacagatgtgctctcagaaataatgaattcttttgcaaagtccattgaagttatgggagatggttgccttaatgatgaacacttggaagaactgggaggaatactgaaagcaaaacttgaagggcactttaaaaaccaagaattgagacaggtgaaaagacaggaagaaaactatgatcaacaggttgagatgtctctgcaagatgaggatgaatgtgatgtttatattctgaccaaagtatcagatattttgcactcattatttagtacttataaggaaaagattttaccatggtttgaacaactacttccattaattgtaaatctaatttgttcaagtaggccatggccagacagacagtggggattgtgcatatttgatgacatcatagagcactgcagtccaacttcatttaaatatgtagaatattttcggtggccaatgctactaaatatgcgagataacaaccctgaagtcaggcaagctgctgcttatggcctgggtgtcatggcacagtttggtggagatgattatcgttctttatgttcagaagctgttccactgctggtaaaagttattaagtgtgcaaattccaaaaccaaaaaaaatgtcattgctacagatatactgtttctcagcaatagggaagattttgaagtttaagcctaactgtgtaaatgtagatgaagttcttccacactggttatcatggcttccactgcatgaagataaagaggaagctattcagactttgagttttctctgtgacctaattgaaagtaaccacccagttgtaattggtccaaataattccaatctttccaaaataatcagtataattgccgaaggaaaaattaatgagactattaactatgaggatccttgtgcccaacgcctaactaatgtcgtgcgtcaggtacagacttctgaagatttatgggttgggaatgtgtatccacaacttggatggatggaacagcagggaagcctttacagggagttggctaaattttgcttgaagcactttaatataacttggaatattatctattataaaagtaactacaaataagtgttgtgaatagattttattataaatcagagaactgttttctccctgctaagcagtttatagttcttctccatgtttctccagaattaatcagtgttagtcctctgtttatctcgcatgttttatcttccaaacacagaccttggtgataacctgtgcttcaaactgtcttaaacaatgtttgtcacctttccccctagttgatgtaaagtatataaattgttgctatttgtttgaactattattgatgctagccaagcagtatacttggatgtgaagatgtcatgctatcacaatatgctaaggagctcacaaaaataagatagaatttccaggacaaacatctttggaattgtgagtgaaggatatagtgggcaggcttgtccctctttaattaatactcttggtatttgtggtgatgggaggatgctgttactaggagagttttgagatactgcagtggatgtgggatgtatatgaacttcttcataatgtactcctgggaactgggtaggacatatccatattgtagttcccaaggtgtctggttgagagttagagaacttttaaattctttagcccagaccaggtctctatttttttaagttatccaggactccaagaaccatagttactgaaaagggagtcctgatacatctaatattggtagcatgtaacagtgtttgacaaagagtaagtaagcagtattcttgggagtcagtgttatgtgtttcagcagagtattattttgtatatgtatgccattttctccctgcaaagcagctcaacaagagaaaaagctctagttatagggcttaaattgatttctatttcaaataatttcctaagagattcctagagtagaactgaaagagtattcctattggaaaagtgaaaggaaagaaatgtaattttccttgaacatgaaaaagaaaacaactttgagagtagtcatttagcagtagatgctgcattattatgagaaaacagttctataagtcccagggttaattatattaattggaatgtcagtctttaatgtcgagcttattgtagggtagaaaagagctttctactcagctaacgattactcattgatccaaaacttaaatacatctataatttcctggggctattgtgagtactgtgtatgtatttagcaaatatttaagacctagtaagtgctcaataaattgtagctgttattgctgttgttgtttgtaaaaaaaaa

SEQ ID NO: 30221 - DNA, 1698 bp, Homo sapiens
  SIMILAR (1)..(726): 951254mologous to Homo sapiens Gene product with similarity to Ubiquitin binding enzyme,accession number AC002400,Smith- Waterman Score=1191.
atggtatctgcagcgttggcgggagcccaccaatggccttccgccacagccagcgcagccttgccccttaaagtcacaggccccctagcgcgaaatcccacgcccccctggacggctgcggccgcactcgccaccagggggcagaggccagagaaagggctatttcccggacccgcccccttcagcttgggaaagcgaaagcgtggcaggggccggacctgggagcggaggaggcgggtctccatagaaacctccacctgtttccggccgggctgtgagagattaggggctgctgcgggggccaatctcagccagctcgcctcttcccagcggcctctgcgggagcggtgggtgttgtacacaatcatcatggcggcggccggggccccggatggcatggaggaacctggcatggacacggaggccgagactgtggctactgaggctcccgcgcggcccgtcaactgcctggaggctgaagccgcggcgggggcggcggccgaggactccggcgccgcacgaggcagcctgcagccggccccggcccagccccctggggaccccgcagcccaggcctcggtcagcaacggcgaagacgcgggcggcggcgcgggcagggagctggtggacttgaagatcatctggaataagaccaagcatgacgtgaagttccccctggacagcacaggctccgagctgaaacagaagatccactcgattacaggcttcttgcacctgggtggcctccgcactgccttgtacaactacatctttgctaagaagtaccaggggagcttcatcctgaggctagaggacacagatcagactcgcgttgtgcctggggcagcggagaatattgaggacatgctggagtgggcagcttggcgagttttgggttcttgtcctgcaaccaagaggaatgaggtgtgcaggtatccccagggtattgctggtcttagaccatggtttatgctaacttttcagtctgggaattcctgggccatgtggaatgtacaaattaaacccatgaccaatgtgaggagagctttccaaggagttaacaactgcagccgtgctgctaatactacagctacctatatatcctgtgcaaacaccctaagagtcaaccacaaggaggttcctggtagagttacacagttgtgccgccagtatagcgacatgcctcctttgacgttagagggcatccaggaccgtgttctttacgtattgaaactctatgacaagattgacccagagaagacacccaggcccattctgggagatagccagcgctaccagtttcatgtatgtttccaaagagtgacagcgcagcacgctgctgttggggttcatccggaactgattttcatcgctaccggttcagaagttgaactggctgttgctgcctacgaaaaactgactgccgaaggcgtgaaagcgcgcgtggtgtccatgccgtctaccgacgcatttgacaagcaggatgctgcttaccgtgaatccgtactgccgaaagcggttactgcacgcgttgctgtagaagcgggtattgctgactactggtacaagtatgttggcctgaacggtgctatcgtcggtatgaccaccttcggtgaatctgctccggcagagctgctgtttgaagagttcggcttcactgttgataacgttgttgcgaaagcaaaagaactgctgtaa

SEQ ID NO: 30222 - DNA, 1355 bp, Homo sapiens
  SIMILAR (861)..(295): 821254mologous to Escherichia coli Outer membrane protein P.69 precursor,accession number D90754,Smith-Waterman Score=794.
tcaaaaatactgccatttccccagcacagtgtctttgattgcatccacatattgagttggaacccagtacacccaatagtaagaggcttccgtggggcccaactgaaacgcctccagcggctggtgagcaatgagagccagaggcgccagctggtggggaagctgcaggtccttgtggaggaggcctttggttgccagctgcaaaacagggatgtcctcaacccagtctacgtggagaggatcctcctgtggactcgccctgcagtaggtcgagcacagctggacgccatctcggagaaggtggatgtgattgccaagcgtgtgccatgcttttataacgagatcgctgtaaaaaccgttttgtgccatgtaactggcgtacattcccatgtagtctgaacgtgcggtaccgtcgcctccgctatagtccggcgatgcatgtgttgagccaatatacagaccgacatacaacggcattacatcagagagacgtttatccccaccaaactggataccgctgtaacccatgtcaaagccgctcagtttgccactggcaaaggagtccaggcttcccccataactgcgcaaccagatattaccgtctttactctgatttcgcaggtcacccatccgttgcatcagcgtacggctttcaacatagttcaataagtaaccgacattgagataattgccgccagcatctgcggtcgtggtgggtttaggcgtgggagcgggttcaggcgtaggatcggggttgactatgggaggctgctccaggcggaagcggatcgcaggcttggggtctttggccagcttctgggccacctgctcctggctcatgttcctgcaccgattgtcataccggggcgtctggtggttccgcaaggcctccttcttcaggagctccagccgctggggtgagcagaaacaggggtaagcagctccggtcttcagcagcgcttctgtggcctgggcatacagctccaaccgctgagattgcttgtagggcccagcaggaccgccccggcgggggctctcatcaggcgggatgcctgcccactccagcatgtcctcaatattctctgctgccccaggcacaacgcgagtctgatctgtgtcctctagcctcaggatgaagctcccctggtacttcttagcaaagatgtagttgtacaaggcagtgcggaggccacccaggtgcaagaagcctgtggggctgggagcgaaccgcactcgcaccgcaaccccggcatcagtgcccaggttggcctcgcgccgtcctacggggcggccagaggccgccgaaggcctctcgcgctgcagcagtctcctcaggagcgccgccatgtgggatg

SEQ ID NO: 30223 - DNA, 1977 bp, Homo sapiens
  SIMILAR (1)..(1524): 971254mologous to Homo sapiens Gene product with similarity to Ubiquitin binding enzyme,accession number AC002400,Smith- Waterman Score=2547.
atgggctcgcgctgccttaaccctcctccgcccgcccactctgacaccaccggaaaggattcattcgggaacattcgtggggcggagacgggacagggggcctcggcctgtagcgtcacgtccgccagggttacctgtggggctgggagcgaaccgcactcgcaccgcaaccccggcatcagtgcccaggttggcctcgcgccgtcctacggggcggccagaggccgccgaaggcctctcgcgctgcagcagtctcctcaggagcgccgccatgtgggatggaatagcacacgtgggcttctccctgcgtcacttccggggactgcttccagccaatcggcctccgccacagccagcgcagccttgccccttaaagtcacaggccccctagcgcgaaatcccacgcccccctggacggctgcggccgcactcgccaccagggggcagaggccagagaaagggctatttcccggacccgcccccttcagcttgggaaagcgaaagcgtggcaggggccggacctgggagcggaggaggcgggtctccatagaaacctccacctgtttccggccgggctgtgagagattaggggctgctgcgggggccaatctcagccagctcgcctcttcccagcggcctctgcgggagcggtgggtgttgtacacaatcatcatggcggcggccggggccccggatggcatggaggaacctggcatggacacggaggccgagactgtggctactgaggctcccgcgcggcccgtcaactgcctggaggctgaagccgcggcgggggcggcggccgaggactccggcgccgcacgaggcagcctgcagccggccccggcccagccccctggggaccccgcagcccaggcctcggtcagcaacggcgaagacgcgggcggcggcgcgggcagggagctggtggacttgaagatcatctggaataagaccaagcatgacgtgaagttccccctggacagcacaggctccgagctgaaacagaagatccactcgattacaggtctcccgcctgccatgcagaaagtcatgtataagggactcgtccccgaggataaaacattgagagaaataaaagtgaccagtggggccaagatcatggtggttggctccaccatcaatgatgttttagcagtaaacacacccaaagatgctgcgcagcaggatgcaaaggccgaagagaacaagaaggagcctctctgcaggcagaaacaacacaggaaagtgttggataaaggaaaacctgaagatgtgatgccatctgttaagggggcccaggagcgcctgccaacggtaccgctgtccggcatgtacaataaatctggaggaaaagtgagactcacctttaaactagaacaagaccagctgtggattggcactaaagagcggactgagaaattgcccatgggctccataaaaaaatgtggtcaagtgaccctatccgaaggacatgaagactaccacaatgatggccgtttccagttggcccccacggaagccctcttactactgggtgtactgggttccaactcaatatgtggatgcaatcaaaagacactgtgctggggaaatggcagtatttttgaaagcactttcacctcttggccccaggaggactgaccccaaagtgaaggacatttgccgggaagaggcctgcagcatccctggaatttcagagttctggaactttgttcataaaaaatctatattcaatctgaggtgatgtggtgactgaagccagaggtgatgtactttcaccattaagcttaattttaactttaaattaccagttcccttccttgcagtcaagcttcataccatttttaaagtcaatacgatggaaatcaataaatctgaattccgaacatgttgtgtggaatactcttaagtgtgtttgagagtagatctgccaattatgttgacaagggaatgatcaaaagctttgtttttttt

SEQ ID NO: 30224 - DNA, 486 bp, Homo sapiens; identical to SEQ ID NO: 4765
  SIMILAR (158)..(238): 961254mologous to Homo sapiens gamma-glutamyl transpeptidase (EC 2.3.2.2),accession number J05235,Smith-Waterman Score=122.

SEQ ID NO: 30225 - DNA, 2535 bp, Homo sapiens
  SIMILAR (670)..(2376): 1001254mologous to Homo sapiens gamma- glutamyltranspeptidase,accession number X60069,Smith-Waterman Score =2896.
gcagaccgggcgtcgggtgagcccagaagtgagagcagttggctgtgccccagtgctgtgtgacccagaggcgccgctcaccctctctgagctggtggacatcatagcgggtgcagcccaaaactgtcttctgaggaagaggtgctctcctgggcccccactgtccccaggcctcagatgctgcatattgctggcccagctcctgaggctctttggacctccaggaatcggtgtctctatcaggaacccttaaccctgacccggactcccagctgggacccggggtgtcggagtggcaagagcgctgtcaggcctggtgaagggtgtgagctgtccaacggggcagggaggaggcagggcctgttctgcagttggacagacagagccctctagctgctttctggaagactgaagggcagcaaggcaagtgaggtgctgccgtcatccaggctggacagttcagtgatttgcctgaggccccacagcaggagaacgagaaggctgcctgatcagagagtccctgaagaagattctgtggctacaggcttcagcagagtgtgagggagaccccggttatttcctcagctatttccaccaaatcctcctgtctttcgtggccaacaccccaggcaaggcttggggcccccgtctgctgctggacgcagagccatgaagaagaagttagtggtgctgggcctgctggccgtggtcctggtgctggtcattgtcggcctctgtctctggctgccctcagcctccaaggaacctgacaaccatgtgtacaccagggctgccgtggccgcggatgccaagcagtgctcgaagattgggagggatgcactgcgggacggtggctctgcggtggatgcagccattgcagccctgttgtgtgtggggctcatgaatgcccacagcatgggcatcgggggtggcctcttcctcaccatctacaacagcaccacacgaaaagctgaggtcatcaacgcccgcgaggtggcccccaggctggcctttgccaccatgttcaacagctcggagcagtcccagaagggggggctgtcggtggcggtgcctggggagatccgaggctatgagctggcacaccagcggcatgggcggctgccctgggctcgcctcttccagcccagcatccagctggcccgccagggcttccccgtgggcaagggcttggcggcagccctggaaaacaagcggaccgtcatcgagcagcagcctgtcttgtgtgaggtgttctgccgggatagaaaggtgcttcgggagggggagagactgaccctgccgcagctggctgacacctacgagacgctggccatcgagggtgcccaggccttctacaacggcagcctcacggcccagattgtgaaggacatccaggcggccgggggcattgtgacagctgaggacctgaacaactaccgtgctgagctgatcgagcacccgctgaacatcagcctgggagacgcggtgctgtacatgcccagtgcgccgctcagcgggcccgtgctggccctcatcctcaacatcctcaaagggtacaacttctcccgggagagcgtggagagccccgagcagaagggcctgacgtaccaccgcatcgtagaggctttccggtttgcctacgccaagaggaccctgcttggggaccccaagtttgtggatgtgactgaggtggtccgcaacatgacctccgagttcttcgctgcccagctccgggcccagatctctgacgacaccactcacccgatctcctactacaagcccgagttctacacgccggatgacgggggcactgctcacctgtctgtcgtcgcagaggacggcagtgctgtgtccgccaccagcaccatcaacctctactttggctccaaggtccgctccccggtcagcgggatcctgttcaataatgaaatggacgacttcagctctcccagcatcaccaacgagtttggggtacccccctcacctgccaatttcatccagccagggaagcagccgctctcgtccatgtgcccgacgatcatggtgggccaggacggccaggtccggatggtggtgggagctgctgggggcacacagatcaccacggccactgcactggccatcatctacaacctctggttcggctatgacgtgaagcgggccgtggaggagccccggctgcacaaccagcttctgcccaacgtcacgacagtggagagaaacattgaccaggcagtgactgcagccctggagacccggcaccatcacacccagatcgcgtccaccttcatcgctgtggtgcaagccatcgtccgcacggctggtggctgggcagctgcctcggactccaggaaaggcggggagcctgccggctactgagtgctccaggaggacaaggctgacaagcaatccagggacaagatactcaccaggaccaggaaggggactctgggggaccggcttcccctgtgagcagcagagcagcacaataaatgaggccactgtgccaggctcaggtggcctcctggcctttcc

SEQ ID NO: 30226 - DNA, 2633 bp, Homo sapiens
  SIMILAR (745)..(1764): 991254mologous to Homo sapiens gamma- glutamyltranspeptidase,accession number X60069,Smith-Waterman Score =1710.
cggcccaccaagcctggggaggtggccacccttccatgatggcatttggatgttccctgtgtgtggggagggcacagggactccattcgtagaccacctctgggacagtgtgtctgcctctgaggtcagacgctctgcactgggacagggtggagtggagggaaatccagcttggggctcattggaggggcttgctggcagacaccgccctttgtgggaaactgactgtgggagaggggaaccccaacctctgtcaccacatccctcttccctgttgtcacacctgtcacctgctgccatagccatgagacttcccaagggtcactgctgccactcactgcacagcctggaagggagtccacaggggacatacagtgagcaagagacctgtgccactcaggcctcctgggggtgtccccagtgcagccatgatgataatcacagctaccattcaccaagccctgcccacagtctaacctactctattcacaacactcccagcagcaaggcaagtgaggtgctgccgtcatccaggctggacagttcagtgatttgcctgaggccccacagcagagttcaactggagacagagaaaccagctagaggcagagggaggtaacacggagtcccccagaaaggtctgggctgcgcgtgcttcagctatttccaccaaatcctcctgtctttcgtggccaacaccccaggcaaggcttggggcccccgtctgctgctggacgcagagccatgaagaagaagttagtggtgctgggcctgctggccgtggtcctggtgctggtcattgtcggcctctgtctctggctgccctcagcctccaaggaacctgacaaccatgtgtacaccagggctgccgtggccgcggatgccaagcagtgctcgaagattgggagggatgcactgcgggacggtggctctgcggtggatgcagccattgcagccctgttgtgtgtggggctcatgaatgcccacagcatgggcatcgggggtggcctcttcctcaccatctacaacagcaccacacgaaaagctgaggtcatcaacgcccgcgaggtggcccccaggctggcctttgccaccatgttcaacagctcggagcagtcccagaagggggggctgtcggtggcggtgcctggggagatcgagggctatgagctggcacaccagcggcatgggcggctgccctgggctcgcctcttccagcccagcatccagctggcccgccagggcttccccgtgggcaagggcttggcggcagccctggaaaacaagcggaccgtcatcgagcagcagcctgtcttgtgtgaggtgttctgccgggatagaaaggtgcttcgggagggggagagactgaccctgccgcagctggctgacacctacgagacgctggccatcgagggtgcccaggccttctacaacggcagcctcacggcccagattgtgaaggacatccaggcggccgggggcattgtgacagctgaggacctgaacaactaccgtgctgagctgatcgagcacccgctgaacatcagcctgggagacgcggtgctgtacatgcccagtgcgccgctcagcgggcccgtgctggccctcatcctcaacatcctcaaagggtacaacttctcccgggagagcgtggagagccccgagcagaagggcctgacgtaccaccgcatcgtagaggctttccggtttgcctacgccaagaggaccctgcttggggaccccaagtttgtggatgtgactgaggccagctctggggtctcggcaggtggtccgcaacatgacctccgagttcttcgctgcccagctccgggcccagatctctgacgacaccactcacccgatctcctactacaagcccgagttctacacgccggatgacgggggcactgctcacctgtctgtcgtcgcagaggacggcagtgctgtgtccgccaccagcaccatcaacctctactttggctccaaggtccgctccccggtcagcgggatcctgttcaataatgaaatggacgacttcagctctcccagcatcaccaacgagtttggggtacccccctcacctgccaatttcatccagccagggaagcagccgctctcgtccatgtgcccgacgatcatggtgggccaggacggccaggtccggatggtggtgggagctgctgggggcacacagatcaccacggccactgcactggccatcatctacaacctctggttcggctatgacgtgaagcgggccgtggaggagccccggctgcacaaccagcttctgcccaacgtcacgacagtggagagaaacattgaccaggcagtgactgcagccctggagacccggcaccatcacacccagatcgcgtccaccttcatcgctgtggtgcaagccatcgtccgcacggctggtggctgggcagctgcctcggactccaggaaaggcggggagcctgccggctactgagtgctccaggaggacaaggctgacaagcaatccagggacaagatactcaccaggaccaggaaggggactctgggggaccggcttcccctgtgagcagcagagcagcacaataaatgaggccactgtgccaggctccaggtggcctccctggcctgtc

SEQ ID NO: 30227 - DNA, 577 bp, Homo sapiens
  SIMILAR (16)..(405): 931254mologous to Homo sapiens Ig-like membrane protein,accession number AF031174,Smith-Waterman Score=638.
atgttgcgtgtgtttctctccctcgtaggtgtggtgtcagcacagcggcaggtcaccgttaaggaaggacccttgtaccgcacggagggctcccacatcactatctggtgcaatgtgagtggctcccagggacctcctgagcagaatttccagtggtccatttacctgccttcgtcgccagagcgagaggtgcagatcgtcagcaccatggacccttccttcccctatgccatctacacccagcgcgtccgcggagggaagatcttcatagaaagagtccaggggaacccaaccctattgaacatcacagatcttcaggcccgggatgccggagaatatgaatgccacacacccagcaccgataagcaatactttgggagttacagtgcaaagatgaacctagtgggagttacactctttgtgatatggtatatgacctggtcaatcttaggctctgaagctctccctggtggaaatttatttggattgttaattattttttatagtgccattattgggggaaaaattttacaactcattagaatacctttagtgcctccacttccacctcttcttg

SEQ ID NO: 30228 - DNA, 975 bp, Homo sapiens
  SIMILAR (46)..(351): 971254mologous to Homo sapiens gamma- glutamyltransferase,accession number X98922,Smith-Waterman Score= 514.
atgctcttcaggccagctctggggtctcggcaggtggtccgcaacatgacctctgagttcttcgctgcccagctccgggcccagatctctgacgacaccactcacccgatctcctactacaagcccgagttctacacgccagttgatgggggcactgctcacctgtctgtcgtcgcagaagacggcagtgctgtgtccaccaccagcaccatcaacctctactttggctccaaggtccgctccccggtcagcgagatcctgttcaatgatgaaatggatgacttcagctctcccaacatcaccaacgagtttggggtgcccccctcacctgccaatttcatccagccaggtatggggtggagggaagcagccgctctcgtccatgtgcccgacgatcatggtgggccaggacggccaggtccggatggttgtgggagctgctgggggcacacagatcaccacagccactgcactgatatgtgtcacagcttttctccctggccgtgcccaccctgcacagcccccaagccacgctgatcacactcccatgccccaggccatcatctacaacctctggttcggctatgacgtgaagcgggccgtggaggagccccggctgcacaaccagcttctgcccaacgtcacgacagtggagagaaacattgaccaggcagtgactgcagccctggagacccggcaccatcacacccagatcgcatccactttcatcgctgtggtgcaagccatcgtccacacggctggtggctgggcagctgcctcggactccaggaaaggcggggcctaccggatactgagtgctctccaggaggacaaggctgacaagcaatccagggacaagatactcaccaggaccaggaaggggactctgggggactggcttcccatgtgagcagcagagcagcacaataaattgaggccactgtgccaggctccaggtggcctccctgccctgtc

SEQ ID NO: 30229 - DNA, 1053 bp, Homo sapiens
  SIMILAR (661)..(738): 731254mologous to Homo sapiens gamma-glutamyl transpeptidase,accession number L20491,Smith-Waterman Score=88.
  misc_feature (1)...(1053): n = a,t,c or g
gtcagactggtcatgcaaggtcctgggcctgcccttgggtcctggggagccacggaaggttgtgggtgccagagggttgcggtcagagtcacagtcaagggccttctgagacctgtgccccctccccacccttcctccccacctcctcaggccagctctggggtctcggcaggtggtccgcaacatgacctccgagttcttctctgcccagctccgggcccagatctctgacgacaccactcacccgatctcctactacaagcccgagttctacatgccggatgacgggggcactgctcacctgtctgtggtcgcagaggacggcagtgctgtgtccgccaccagcaccatcaacctctactttggctccaaggtgcgctccccagtcagcgggatcctgctcaataatgaaatggatgacttcagctctaccagcatcaccaacgagtntgggggtacccccctcacctgccaatttcatccagccagggaagcagccgctctcgtccatgtgcccgacgatcatggtgggccaggacggccaggtccggatggtggtgggagctgccgggggcacgcagatcaccatggccactgcactggccatcatctaccaaccttcttggttcggctatgacgtgaagcgggccgtggaggagccccggctgcacaaccagctttctgcccaacgtcacgacagtggagagaaacattgaccaggcagtgactgcagcccttggagacccggcaccatcacacccagatcgcgtccaccttcatcgctgtggtgcaagccatcgtccgcacggctggtggctgggcagctgcctcggactccaggaaaggcggggagcctgccggctactgagtgctccaggaggacaaggctgacaagcaatccagggacaagatactcaccaggaccaggaaggggactctgggggaccggcttcccctgtgaagcagcagatcagcacaataaatgaggccactgtgccaggcttccaggtggcctccctggcctgtctccccactcaaaaaaaaaaaaaaaaa

SEQ ID NO: 30230 - DNA, 1629 bp, Homo sapiens
  SIMILAR (205)..(1626): 691254mologous to Rattus sp. gamma-glutamyltranspeptidase (AA 1-568),accession number X15443,Smith-Waterman Score=1686.
atgaagaagaagttagtggtgctgggcctgctggccgtggtcctggtgctggtcattgtcagcctctgtctctggctgccctcggcctccaaggaacctgacaaccatgtgtacaccagggctgccgtggccgcggatgccaagcagtgcttggagattgggagggttttggtgggtgggcctgcctacctgcttcttctaggaaaagctgaggtcatcaatgcccgcgaggtggcccccaggctggcctttgccagcatgttcaacagctcggagcagtcccagaagggagggctgtcggtggcggtgcctggggagatccgaggctatgagctggcacaccagcggcatgggcggctgccctgggctcgcctcttccagcccagcatccagctggcccgccagggcttccccgtgggcaagggcttggcggcagtcctggaaaacaagcggaccgtcatcgagcagcagcctgtcttgtggtatgtctgtggaaaggtgctttgggagggggagagactgaccctgccgcggctggctgacacctacgagatgctggccatcgagggtgcccaggccttctacaacggcagcctcatggcccagattgtgaaggacatccaggcggctgggggcattgtgacagctgaggacctgaacaactaccgtgctgagctgatcgagcacccgctgaacatcagcctgggagacgcggtgctgtacatgcccagtgcgcggctcagcgggcccgtgctggccctcatcctcaacatcctcaaagggtacaacttctcccgggagagcgtggagacccccgagcagaagggcctgacgtaccaccgcatcgtagaggctttccggtttgcctacgccaagaggaccctgcttggggaccccaagtttgtggatgtgactgagaatttgattgcgggcctactgtgtgctcggatggactcgccagctctggggtctcagcaggtggtccgcaacatgacctctgagttcttcgctgcccagctccggtcccagatctctgaccacaccactcacccgatctcctacgacaagcccgagttctacacgccggatgacgggggcactgctcacctgtctgtcgtcgcagaggacggcagtgctgtgtccgccaccagcaccatcaacctctacatcaccaatgagtttggggcacccccctcacctgccaatttcatccagccagggaagcagccgctcttgtccatgtgcccgacgatcatggtgggccaggacggccaggtccggatggtggtgggagctgctgggggcacgcagatcaccacagacactgcactgcccccaagccacgctgatcacactcccatgccccaggccatcatctacaacctctggttcggctatgacgtgaagagggccgtggaggagccccggctgcacaacaagcttctgcccaacgtcacgacagtggagagaaacattgaccaggcagtgactgcagccctggagacccggcaccatcacacccagatcgcgtccaccttcatcgctgtggtgcaagccatcgtccgcacggctggtggctgggcagctgcctcggactccaggaaaggcggggaacctgctggctactga

SEQ ID NO: 30231 - DNA, 2265 bp, Homo sapiens
  SIMILAR (360)..(1226): 571254mologous to Sus scrofa gamma-glutamyl transpeptidase,accession number Z46922,Smith-Waterman Score=747.
cggggcaagtgaggtgctgccgtcatccaggctggacagttcagtgatttgcctgaggccccacagcagagttcaactggagacagagaaaccagctagaggcagagggaggtaacacggagtcccccagaaaggtctgggctgcgcgtgcttcaggtaacctcccttgaccttcaggagaacgagaaggctgcctgatcagagagtccctgaagaagattctgtggctacaggcttcagcagagtgtgagggagaccccggttatttcctcagctatttccaccaaatcctcctgtctttcgtggccaacacccccaggcaaggcttggggcccccgtctgctgctggacgcagagccatgaaaaaaaagttagtggtgctgggcctgctggccgtggtcctggagctggtcattgtcggcctctgtctctggctgccctcagcctccaaggaacctgacaaccatgtgtacaccagggctgccgtggccgcggatgccaattttgtgctcgaagattgggagggatgcactgcgggacggtggctctgcggtggatgcagccattgcagccctgttgtgtgtggggctcatgaatgcccacagcatgggcatcgggggtggcctcttcctcaccatctacaacagcaccacacggaaaagctgaggtcatcaacgcccgcgaggtggcccccaggctggcctttgccaccatgttcaacagctcggagcagtcccagaagggggggctgtcggtggcggtgcctggggagatccgagggctatgagctggcacaccagcggcatgggcggctgccctgggctcgcctcttccagcccagcatccagctggcccgccagggctttcccgtgggcaagggcttggcggcagccctggaaaacaagcggaccgtcatcgagcagcagcctgtcttgtgtgaggtgttctgccgggatagaaaggtgcttcgggagggggagagactgaccctgccgcagctggctgacacctacgagacgctggccatcgagggtgcccaggccttctacaacggcagcctcacggcccagattgtgaaggacatccaggcggccgggggcattgtgacagctgaggacctgaacaactaccgtgctgagctgatcgagcacccgctgaacatcagcctgggagacgcggtgctgtacatgcccagtgcgccgctcagcgggcccgtgctggcccttcatcctcaacatcctcaaagggtacaacttctcccgggagagcgtggagagccccgagcagaagggcctgacgtaccaccgcatccgtagaggttttccggtttgcctacgccaagaggaccctgcttggggaccccaagtttgtggatgtgactgaggccagctctggggtctcggcaggtggtccgcaacatgacctccgagttcttcgctgcccagctccgggcccagatctctgacgacaccactcacccgatctcctactacaagcccgagttctacacgccggatgacgggggcactgctcacctgtctgtcgtcgcagaggacggcagtgctgtgtccgccaccagcatccatcaacctctactttggctccaaggtccgctccccggtcagcggcactcctgttcaataatgaaatgggcgacttaagctctcccagcattcaccaatgagtttggggcacccccctcacctgccaatttcatccagccagggaagcagccgctcttgtccatgtgcctgacgatcatggtgggccaggacggccaggtccggatggtggtgggagctgctgggggcacgcagatcaccacagacactgcactggccatcatctacaacactgtgcttcggctatgacgtgaagagggccgtggaggagccccggctgcacaacaagcttctgcccaacgtcacgacagtggagagaaacattgaccaggcagtgactgcagccctggagacccggcaccatcacacccagatcgcgtccaccttcatcgctgtggtgcaagccatcgtccgcacggctggtggctgggcagctgcctcggactccaggaaaggcggggagcctgccggctactgagtgctccaggaggacaaggctgacaagcaatccagggacaagatactcaccaggaccaggaaggggactctgggggaccggcttcccctgtgagcagcagagcagcataataaatgaggccactgtgcaaggctccaggtggcctccctggcctgtctccccact

SEQ ID NO: 30232 - DNA, 2571 bp, Homo sapiens
  SIMILAR (1991)..(2458): 831254mologous to Homo sapiens gamma- glutamyltranspeptidase,accession number X60069,Smith-Waterman Score =631.
atggtcacattgcaaaagagcgtgtgggaaggagatattgttactgctgtgtctggagaatacaacctgccacggttctgcatccgtaaagtgaggtcactaggagtatttacctcagagggctgttgcaaggttaaagctggttatacaagcagagtacttggaacagtgtcagttacctggctggggctcagtgtggtgtcagcacagcggcaggtcaccgttcaggaaggacccttgtaccgcacggagggctcccacatcactatctggtgcaatgtgagtggctaccagggaccttctgaacagaatttccagtggtccatttacctgccttcgtcgccagagcgagaggtgcagatcgtcagcaccatggactcttccttcccctatgccatctacacccagcgcgtccgcggagggaagatcttcatagaaagagtccaggggaacccaaccctattgcacatcacagatcttcaggcccgggatgccggagaatatgaatgccacacacccagcaccgataagcaatactttgggagttacagtgcaaagatgaacctagtgggagaacgagaaggctgcctgatcagagagtctctgaagaagattctgtggctacaggcttcagcagagtgtgagggagaccccggttatttcctcagctgtttccaccaaatcctcctgtctttcgtggccaacaccccaggcaaggcttggggcccccgtctgctgctggacgcagagccatgaagaagaagttagtggtgctgggcctgctggccgtggtcctggtgctggtcattgtcggcctctgtctctggctgccctcggcctccaaggaacctgacaaccatgtgtacacccagggctgccgtggccgcggatgccaagcagtgctcggagattgggagggttttggtgggtgggcctgcctacctgcttcttctaggaaaagctgaggtcatcaatgcccgcgaggtggcccccaggctggcctttgccagcatgttcaacagctcggagcagtcccagaagggagggctgtcggtggcggtgcctggggagatccgaggctatgagctggcacaccagcggcatgggcggctgccctgggctcgcctcttccagcccagcatccagctggcccgccagggcttccccgtgggcaagggcttggcggcagtcctggaaaacaagcggactgtcatcgagcagcagcctgtcttgtggtatgtctgtggaaaggtgcttcgggagggggagagactgaccctgccgcggctggctgacacctacgagatgctggccatcgagggtgcccaggccttctacaacggcagcctcatggcccagattgtgaaggacatccaggcggctgggggcattgtgacagctgaggacctgaacaactaccgtgctgagctgatcgagcacccgctgaacatcagcctgggagacgcggtgctgtacatgcccagtgcgcggctcagcgggcccgtgctggccctcatcctcaacatcctcaaagggtacaacttctcccgggagagcgtggagacccccgagcagaagggcctgacgtaccaccgcatcgtagaggctttccggtttgcctacgccaagaggaccctgcttggggaccccaagtttgtggatgtgactgagaattcgattgcgggcctactgtgtgctcggatggactcgccagctctggggtctcggcaggtggtccgcaacatgacctctgagttcttcgctgcccagctccggtcccagatctctgaccacaccactcacccgatctcctactacaagcccgagttctacacgccggatgacgggggcactgctcacctgtctgtcgtcgcagaggacggcagtgctgtgtccgccaccagcaccatcaacctctactttggctccaaggtctgctccccggtcagtgggatcctgttcaataatgaaatggatgacttcagctctaccagcattcaccaatgagtttggggcacccccctcacctgccaatttcatccagccagggaagcagccgctcttgtccatgtgcctgacgatcatggtgggccaggacggccaggtccggatggtggtgggagctgctgggggcacgcagatcaccacagacactgcactgcccccaagccacgctgatcacactcccatgccccaggccatcatctacaacctctggttcggctatgacgtgaagagggccgtggaggagccccggctgcacaacaagcttctgcccaacgtcacgacagtggagagaaacattgaccaggcagtgactgcagccctggagacccggcaccatcacacccagatcgcgtccaccttcatcgctgtggtgcaagccatcgtccgcacggctggtggctgggcagctgccttggactccaggaaagttccaacacctggggcagggttctgggaagggctggtggaggtgggctggtgggaggcggtgatcacagcccagcacctggatatcaccaggggcactggggccaggggccagggaccttcctggctgtgcctcag

SEQ ID NO: 30233 - DNA, 732 bp, Homo sapiens
  SIMILAR (732)..(601): 791254mologous to Macaca fascicularis hypothetical protein,accession number AB047968,Smith-Waterman Score=183.
ctagctccttctcctcccagagcctttatcctcatattgggtctggggacacacatgccgtctcttgattcctaaggatccattacccatttctctgcacagatcttcgggtatccaacctatctgtgcctccttcagccaggagcctccggatctttccagacttctttgcaatactgcctcatgcactgaatccatttctcgcatagcctggcgcttggcaggcaggctggcgttccctggctctgccttccccatctccctgtcttttctcccacggcccatctgcccctcctttcctccacccccttctcctctctgctcccctttatttccactccccacccgcgtggctttgctctccctctcccccctcagctcgtctgtatttggagctccggaagctgccggcgactctcccctggagcagcgtgactgacaccggctcctattcagtgctttgggtagaggggtgttcgtggaagtagccgccgtatcatcacttttagggccaaaaatcaacctgcagatggccttttctttattctcatcagagtggtgttcgctgcaagttgtagcaatatttgaatggatgcattctatgagtgagaacatggggtatttggttttctgttcctgtgttagtttgctgaggatgatggcttctagtttcttccatgtccctgcaaaggacatgatctcattcctttttacggctgcatagtattccat

SEQ ID NO: 30234 - DNA, 426 bp, Homo sapiens; identical to SEQ ID NO: 7236
  SIMILAR (1)..(114): 1001254mologous to Homo sapiens dJ273P12.2 (adenylyl cyclase- associated protein 2),accession number AL034372,Smith-Waterman Score=192.

SEQ ID NO: 30235 - DNA, 3333 bp, Homo sapiens
  SIMILAR (442)..(594): 441254mologous to Homo sapiens CAP2,accession number U02390,Smith-Waterman Score=69.
tgatgcatgaactttacctttttctgttttttaagcagtattacttttccacatgagaccattagatctagataactggtgggtctcaagatctgatgggctgatgaggaaacctggctctgccttccccatctccctgtattttctcccacggcccatctgccccttctttcctccacccccttctcctctctgctcccctttatttccactccccacccgcgtggctttgctctccctctccccccctcagctcgtttgtatttggagctccggaagctgccggcgactctcccctggagcagcgtgactgacaccggctcctatttatctgggaggagggagaggggaggagaaggggagggccccgggaggagggtacgagtggccgaccacggatttgcattgccgaggacgggaccccagggcagcgaagaggaattggccaacatgcagggacttggtggaaagactggaacgagctgtcagccgcctggagtcgctgttctgcagagtcccacaggccccctgggaacttgcggggaagtcaatggtgtcattgccaggtgtggcaccctcccgtgggaagcctttgcacaagctgatggacagtatggtggccgagttttttaaagaacagtaggatcctttctggggacgtggagacccttgcagaaattgtgcacagtgctttccaggcccagcgggctttccttctgatggcctctcagtaccaacaaccccacgagaatgacgtgggccgcacttctgaaaccccatatcggaaaagatttaaggaaatccaaacttttcaaagagagaaacccgggggagtaacatgtttaatcatctttcggccgtcagcgaatagattccctgccctttggatgggatagctgtgtctcccaaacctgggtccttatggtcaaggagatgaatgacggctgccaccttttacactaaacagggtgttaaaggactaaaaacaaagtgatttgcgtcatgtggattgggtgaagtcatatttgaacatttggagtgaacttcaagcatacatcaaggaacaccacaccacgggcctcacatgggaggcaaaacaggtcctgtaggcatccacagtatcaggcgttttctgtcctctcctctggggcctggggctttcctccaccccctcctcctctgcctcctccaggggccaccttccactttttcggaggaatggaagggcaaaaaagaggaatcttctccttcacgcttcagctttatttgcccaacttaaccaggggagaaggcaattacaaaagggctccgccatgtcacaagatgaccagaagacatacaaaaatcccagcctgcgggctcaaggagggcaaactcaatctcccaccaaaagtcacactccaagtcccacatctcctaaatcttatccttctcaaaaacatgccccagtgttggagttggaaggaaagaaatggagagtggagtaccaagaggacaggattgacctcgtgatttcagagactgagctgaaacaagtggcttacattttcaaatgcgaaaaatcaactattcagataaaagggaaagtaaactccattataattgacaactgtaagaaactcggcctggtgtttgacaatgtggtgggcattgtggaagtgatcaactcccaggacattcaaatccaggtaatgggggagagtgccaacaatttccatttaataagacagaaggttgccacatatacctcagtgaagatgcattagactgtgagatccgtgagcgccaagtccatctggaaatggaacatactttatccccctcagggatgggtggattaatagagaatttccccatttccctggaacagttcaagaccagccatgggatggatcccaagttaatcactgaaccctgcagaaattatggccctaacttccctgagagaccgaaccccctcacctgaatccccctctatcaaaacaaacaaaaaagcagcagtaaagagctagaagttgcagtagcccctactggctttagcttttggcctccaacggttctgtgctattaggatacaggcactgtttctggcacgcctcgcgggcattttgaaatatttaacgtttcctcatgatttgcctttgtgtgtgatttctagttccacatgatgacttgtgaacattagggatttaaaggaaaaaaaaaaagaattctgttcccctcatatcatgaacacagtaactgataggtaaaaagactgcatgattcacttttacacttatatttcattgctagttaaaaaataaaacctttgagaatctaagatgtacatttttaccttttaggcaatttcaatataatgtagaagctcgtagtgtgccctgaaaaatgtacacgttttttcttattgttaccacatgttcacctttatcagcgtggatactgtcagcatgagtacatatttcaacccacgcttgtaaaagacataagagtttatattaaggaccaaattcagttccttggtccttggaagacctatattctctgtagttactgaaaaccgaaagtcaattctaattattcatcttacatatttttccaccatgtcatttgaaaacttgcttttcttctgcataagagattcttatgccaaaaacattaaacagaagaaatcattttttttgctatgtaatacctcgcaactttgctctaaaatcaaagctcagttattattttccaagtttgaacatgttaaatatcagatgccttgtaaattatgtctttaacgttttcttataggactaatttcctcttttcccacctggccagacttggcttaaccaggctcggaaaatggaacatggaaaaagcccataccatgtattatttctcctaaaacctaaaggcattatctgttggtttgggcttggctgctccctattttgtagtcttgatagtagatgcctcctccagccgtaagagtagcctatgatatcccctttttatccttttccagtaccatagtgcctgaaaaatcctgcaacttccttggatcatatttaatgaattatagtataatgccttgcaggcccagtacaagcatatatattgtgcctcttacagcctttggaatacattgtttaccatttttttaaatatcttctatatccatatagtattcaaattattaatgctcatgtaccaaggttttgctataaaagttttgtctgtatgaataatgtggctttagtaaataatcatttttcaactgtaaacttattctgaaataaagtaaaattcctaattgtttaaatactgtgatgaaaaaaaaaa

SEQ ID NO: 30236 - DNA, 549 bp, Homo sapiens
  SIMILAR (1)..(486): 1001254mologous to Escherichia coli K12 suppressor of ompF assembly mutants,accession number AE000296,Smith-Waterman Score= 845.
atgaccgacacgcgcatggaagggatgaacttccagcagatgattcagcaagcggtagagcgtaatggcggtgatgtgaaggccgctgaaaactttgataacgtgacgcggcttgaccgctttaccaccgatttgacgttgaaggatggcgtcgtgacgttaaacgacatgcaaggtcaatcgcctgtgctggcgctgacaggggaaggcatgttgaatctggcagatcaaacctgcgacacccagtttgatattcgggtcgtgggtggctggaacggggaaagcaaactgattgatttcctgaaagaaacgccagtaccgctgcgggtttatggcaactggcagcaactcaattacagcctgcaagtggatcagttactgcgcaaacatctacaggacgaagcgaaacgtcgcctgaatgactgggccgagcggaataaagattcccgtaatggcaaagatgtgaagaagttgctggagaagatgcctgataagacgcgtaaagcgtcgcatcaggcgttcgtggcggcatcattatattctgaatat

SEQ ID NO: 30237 - DNA, 874 bp, Homo sapiens
  SIMILAR (309)..(845): 921254mologous to Escherichia coli K12 suppressor of ompF assembly mutants,accession number AE000296,Smith-Waterman Score= 854.
ggtgtaggagagttaggattattcgaaatgagtctgagacgatacgacgaggtggtctacgtggtactgatgaggctagtcttcctaccggtctgcatacgccaagagggcgtgatgagtgtgtagacgtgaagaacagctcgagtcggctggggagacgaatggccaactgatggtggtcaccgcggaatgtccagcctgcgcgaaggctaggtatcagttgaggatccactgtgaacgagttatcggggagggcgagtgtcctgcctgcgcatagtggtcggtcactaaataaaagcggggggaatgacttccaagcacggctggaaaacgtggagattggtgccattctaaaggcgtataactatccgatttcgttgtccggaaaaatgtcactggctggtgatttctccggtaatggcatagatgccgacgcattccgcctcacctggcaaggacaggcacatgtcgaaatgtccgacacgcgcatggaagggatgatcttccagcagatgattcagcaagcggtagagcgtaatggcggtgatgtgaaggccgctgaaaactttgataacgtgacgcggcttgaccgctttaccaccgatttgacgttgaaggatggcgtcgtgacgttaaacgacatgcaaggtcaatcgcctgtgctggcgctgacaggggaaggcatgttgaatctggcagatcaaacctgccacacccagtttgatattcgggtcgtgggtggctggaacgggaaaagcaaactgattgatttcctgaaagcaacgccagtaccgctgcgggtttatggcaactggcagcaactcaattacagcctgcaagtggatccccgggtgggagtgaaaatgtaatcggt

SEQ ID NO: 30238 - DNA, 634 bp, Homo sapiens
  SIMILAR (130)..(579): 221254mologous to Plasmodium falciparum topoisomerase I,accession number X83758,Smith-Waterman Score=104.
tccgcgatttccggttcgacccacgcgtccggatagctcactctctggtacagtgatggcggagattaattttgtgaagaggagaaggaatattttgatgatagcacagaagaaaggttttacaagcagtcttccatgtctgaagatagtgatagcggtgacgacttcttcattgggaaagtcagacggacacgaaagaaggaaagtagttgtcattcttcagttaaggaacaaaaaccactagaaaaagtgtttcttaaagaagatacaggtgaaactcatggggatacaagaaatgacaaaatcaagccaagtacagaaaccagaaagttagaatcagtgtttttccactctttatctggatctaaaagctctagaagaaatttcaaagaacaggctccaaaaacaagatccctagattttccacagaatgagcctcagatcaagaatcagtttaataagaagctatcaggaagacttgaaaatacaaaacagcaattgcagctgcctcttcatccttcatgggaagcaagcagaaggcgaaaagaacagcaatctaatattgctgtgtttcaggggaaaaaaattacgtttgatgattgattagtgcctctttctgcaaacttttccatct

SEQ ID NO: 30239 - DNA, 2234 bp, Homo sapiens
  SIMILAR (1474)..(1710): 961254mologous to Escherichia coli similar to R. meliloti nodulation protein D; similar to lysR class of regulatory proteins,accession number L10328,Smith-Waterman Score=390.
  misc_feature (1)...(2234): n = a,t,c or g
atggaaggtaatttacagcgtgaagcaactgtcatcagtgagcaaaaagtcaaagaaaccgaaatattggcgaagaaaccaatacataattcaaaggaaaaaatagcaaagatggaacatggacctaaagcagtgactattgcaaattctccatcaaagccttcagaaaaggattctgtagtttcccttgagtcccagaagacacctgctgacccaaaactgaaaactctaagtcaaaccaaaaaaaacaaaggatctgatagctcactctctggtaacagtgatggcggagaagaattttnttgtgaagaggagaaggaatattttgatgatagcacagaagaaaggttttacaagcagtcttccatgtctgaagatagtgatagcggtgacgacttcttcattgggaaagtcagacggacacgaaagaaggaaagtagttgtcattcttcagttaaggaacaaaaaccactagaaaaagtgtttcttaaagaagatacaggtgaaactcatggggatacaagaaatgacaaaatcaagccaagtacagaaaccagaaagttagaatcagtgtttttccactctttatctggatctaaaagctctagaagggattgcccactttgtcacggcgcagcagcaacctggagctgggcatttggcatcgcactggccgtcgcgttgcacaatatccctgcacagagcgataaacaaaaagatgaacagaaaacggaaagaataactaaaagaaacgatgggaaaacggaatgtgaagaaaaagagaaaaaagtaacaaaaagtgaaaggcttaacttttcccgtctgctaaaaagaaaagcaaaacgaaaaaacaacctgattgacgtgaaacaaaatctcgaatatctactagaagggactcacacatccaagagtctcaatgacaatgataatactgatgaaaacactttcatgagtagagctaaaactacttggtggacaatcaactcgttgactctagaggatccccaaactgtcgacacccagtttgatattcgggtcgtgggtggctggaacggggaaagcaaactgattgatttcctgaaagaaacgccagtaccgctgcgggtttatggcaactggcagcaactcaattacagcctgcaagtggatcagttactgcgcaaacatctacaggacgaagcgaaacgtcgcctgaatgactgggccgagcggaataaagattcccgtaatggcaaagatgtgaagaagttgctggagaagatgttttggaatacgctgcaaatactccatcaacagcccggcaatggtgtgatattcacgtttttcatccagcggcagcggcacatattgcaccagaatctccagcgggatatgaccatttcgcgtccaggaaccgtccgcattcttctgaatatcctggcgggcgtgactcttcacttcggtcggaagtacggcccggttcgtgggcctaaagcgtgttttgacgacccgctctttgtgaactcaccgctgggtctgtcgcccacaccgctgatggtcagcatggagcaaaatctggcggagtggatgcaaatgagcaacctgctgctggataaaccgcaccaccagacaccgcgcggcctgaagtttgagctggcggcggaatcaccgctgatgatgatcatgcttaatgcgctgtcgaaacagatctaccaacgttaaccgcaaggcgcccatcaaattacgtaactgggattacgattccttagacggccaatactagtgggaaagtggatatcggtttttccggtcgcgaaagccatcctcgctcgcgggagctgttaagctcgctaccgttagccattgattatgaagtgctgtttagtgatgtgccctgcgtctggttacgcaaagatcatccggcactgcatcaaacgtggaatctggacaccttcttacgttatccgcatatcagcatttgctgggaacagagcgatacctgggcgctggacaatgtgttacaggagctgggacgcgaacgcacgattgctatgagcctgccggaattcgagcagtcactgtttatggcagcgcaacccgacaatctgctactggcgaccgcgccgcgctactgtcagtactacaatcaactccatcaactgccgttggttgctcttcctctcccgtttgacgaaagccagcaaaaaaagctggaagttccttttaccctagcaagatggcataaacggtaa

SEQ ID NO: 30240 - DNA, 242 bp, Homo sapiens
  SIMILAR (100)..(240): 951254mologous to Mus musculus Cdc42/Rac effector kinase,accession number AJ133881,Smith-Waterman Score=241.
gccctcactcccggctaggcggcacccccccgccgggaggaggaggaggagccgagaggagctgagcgagcgcggaagtagctgctgctggtggtgacaatgtcaaataccagcactatgattggagccggcagcaaagatgctggaaccctaaaccatggttctaaacctctgcctccaaacccagaggagaagaaaaagaaggaccgattttaccgatccattttacctggagataaaac

SEQ ID NO: 30241 - DNA, 333 bp, Homo sapiens
  SIMILAR (70)..(240): 771254mologous to Rattus norvegicus protein kinase MUK2,accession number U49953,Smith-Waterman Score=212.
atgatagctgcaaataaaaagaaagagaaagagcggccagagatttctctcccttcagattttgaacacacaattcatgtcggttttgatgctgtcacaggggagtttacggtggccattaagcagatgaatcttcagcagcagcccaagaaagagctgattattaatgagatcctggtcatgagggaaaacaagaacccaaacattgtgaattacttggacaggtatggagtggtgggtcccatcagagggaaagggcctttgggactgattggtggtgaagctgttagagaagagggcagtgccagccctcagaactgcctccatttatga

SEQ ID NO: 30242 - DNA, 3324 bp, Homo sapiens
  SIMILAR (239)..(1078): 871254mologous to Homo sapiens p21-activated kinase 3,accession number AF068864,Smith-Waterman Score=1250.
  misc_feature (1)...(3324): n = a,t,c or g
tttcgtcttcgctgtcgcgatttcgtcctgcgagagcgcgagcgtgctgcacctcgggagctggcggctgagctgccaggagcccagcccagctgaatcgagcggagccggtggagcaggggccttgtgggtacccggttgggcagggagaggtgcggctctgcgacggaaacaatcgccaggagatgccggggctagccttccccaccagtagctgctgctggtggtgacaatgtcaaataacggcctagacattcaagacaaacccccagcccctccgatgagaaataccagcactatgattggagccggcagtaaagatgctggaaccctaaaccatggttctaaacctctgcctccaaacccagaggagaagaaaaagaaggaccgattttaccgatccattttacctggagataaaacaaataaaaagaaagagaaagagcggccagagatttctctcccttcagattttgaacacacaattcatgtcggttttgatgctgtcacaggggagtttacgggaatgccagagcagtgggcccgcttgcttcagacatcaaatatcactaagtcggagcagaagaaaaacccgcaggctgttctggatgtgttggagttttacaactcgaagaagacatccaacagccagaaatacatgagctttacatcaggagataaaagtgcacatggatacatagcagcccatccttcgagtacaaaaacagcatctgagcctccattggcccctcctgtgtctgaagaagaagatgaagaggaagaagaagaagaagatgaaaatgagccaccaccagttatcgcaccaagaccagagcatacaaaatcaatctatactcgttctgtggttgaatccattgcttcaccagcagtaccaaataaagaggtcacaccaccctctgctgaaaatgccaattccagtactttgtacaggaacacagatcggcaaagaaaaaaatccaagatgacagatgaggagatcttagagaagctaagaagcattgtgagtgtgggcgatcctaagaagaaatatacacggtttgagaagattggacaagggccaatcaggcaccgtgtacacagcaatggatgtggccacaggacaggaggtggccattaagcagatgaatcttcagcagcagcccaagaaagagctgattattaatgagatcctggtcatgagggaaaacaagaacccaaacattgtgaattacttggacagttacctcgtgggagatgagctgtgggttgttatggaatacttggctggaggctccttgacagatgtggtgacagaaacttgcatggatgaaggccaaattgcagctgtgtgccgtgagtgtctgcaggctctggagttcttgcattcgaaccaggtcattcacagagacatcaagagtgacaaatatcctgttgggaatggatggctctgtcaagctaactgactttggattctgtgcacagataaccccagagcagagcaaactgagcacccatgggtagggaaccccatactgggatgggcaccagaggttgtggacacggaaagggcctatgggcccaaaggttggacatctgggtccctgggcatcatggccatcgaaatgattgaaggggagcctccatacctcaatgaaaaccctctgagagccttgtacctcattgccaccaatgggaccccagaacttcagaacccagagaagcttgtcagctatcttccggggactttctggaaccgctgtctcgagatggatgtggagaagagaggtttcagctaaaagagctgctacagcatcaattcctgaagattggcnaagccccctctcccagcctcactccccactgattgctgcagcctaaggaggcaacaaaggaacaatcacctaaaacccacactcacccccagcctcattgtgcccaagccttctgtgagataaatgcacatttcagaaattccaactcctgatgccctcttctccttgccttgcttctcccatttcctgatctagcactcctcaagactttgatccttggaaaccgtgtgtccagcattgaagagaactgcaactgaatgacctaatcagatgatggcccatttctaaataaggaatttcctcccaattcatggatatgagggtgagtttatgattaagggtttatataaataaatgtttctagtcttccgtgtgtcaaaatcctcacctccttcataaccatctcccacaattaattcttgactatataaatttatggtttgataatattatcaatttgtaatcaattgagatttctttagtgcttgcttttctgtgactcaacttgccagacacctcattgtacttgaaaactggaacagcttgggaatgccatggggtttgataatctgccagggacatgaagaggctcagcttcctggaccatgactttggctcagctgatcctgacatgggagaacaaccacatttttctttgtgtgtgcttctagcagctgttcgggaggaccttgacccaatagtggtncccatgctgtttcttgtgaaatgctctcggctatgtagcagcttttgattccctgcataccctaggctgctgcccctatcctgtcccttgtttataacattgagaggttttctaggggcacatactgagtgagagcagtgttgagaagtcggggaaaatggtgactactttttaggagcaaggctgggcattcagcacctgtccagctctacttgtgtgatgtttccaggaaactccagccccctttttctgcctagggataagggagctgaaaagattaacttggaatcttcttaatggtccaaaatcttttggtcacaataaagagtctcccaaattagagactgcatgttagttcctggatggatttggtggcctgacatgataccctgcccagctgtgaaggggaccccgtttttaaagatgcatggccaagctctctgcaaatggaaatgcttacactgggtgttggggatgtttgctacctcctgctatttttgtggatatggatcatcccactatggaaagacccctggccaagcattgtggcttgtcatgtcaagccccattgactaccttctcatgctctgaggtactactgcctctgcagcacaaatttctatttctgtcaataaaaggagatgaaaatattctattggagcatgcccttcttttttctcttgcgtttttctttcctttactgattgtttatatgaaataatgacgtatttctttcttgaccatttgagagtgggtaagttgagaatgaatgcccctttaacactt

SEQ ID NO: 30243 - DNA, 337 bp, Homo sapiens
  SIMILAR (56)..(337): 981254mologous to Homo sapiens peptide transporter 3,accession number AB020598,Smith-Waterman Score=477.
cagccaacccggccaacatctctgtggccctgagagcccagggcagcagctacacggagtcctggagatggagcgcttacactacatccaccacaacgagaccgtgtcccagcagattggggaggtcctgtacaacgcggcaccactgtccatctggtggcagatccctcagtacctgctcattgggatcagtgagatctttgccagcatcccaggcctggagtttgcctactcagaggccccgcgctccatgcagggcgccatcatgggcatcttcttctgcctgtcgggggtgggctcactgttgggctccagcatagtggcactgctgtccttg

SEQ ID NO: 30244 - DNA, 1647 bp, Homo sapiens
  SIMILAR (1412)..(1477): 451254mologous to Homo sapiens Human secreted protein sequence encoded by gene 31 SEQ ID NO:92,accession number B24467,Smith-Waterman Score=40.
atgagcaaaccccagcctctcagagctcggactctggccacactgcttttagaagcctttcccttcatctaccacccgctgaacatcaccgatggcaggccagcactctctcagctctctggggcaggagtggggggcagcagctctcagggagaaagagcacctggaactaagaacttcctcaaccactttctgtggaactcagccaacccggccaacatctctgtggccctgagagcccagggcagcagctacacgatcccggaagcctggctcctcctggccaatgttgtggtggtgctgattctggtccctctgaaggaccgcttgatcgaccctttactgctgcggtgcaagctgcttccctctgctctgcagaagatggcgctggggatgttctttggttttacctccgtcattgtggcagctcctttccaccctcaggtgcgttccccactgtctgactccatcctgggggagcaggcgctggctgtgacggacgacaaggtctcagtgctggagctgagggtgcagccagtgatgggcatctcgctgaccttgagccggggcactgcccaccccggggaggaggtggccctctccctatggctgtccttctctgatcacactgtggccccagctgagctctacgaccaccgtgacctgggactgtccgtctcagccgaggagcctggtgccatcctgccagctgaggagcagggtgcccagctcggggtggtgtggggctgcggcaaggatcaatgttctgaaggttcagagacagggcaagaaaagggcagggggctggcaggagggctgcatggccccgaagcagctcagctctttgtggactgtggccaggctcccctggaccctgtctacctgccggcagccctggagctcctagacgcccctgaacacttccgtgtgcagcaggtgggccactacccacctgccaactcctctctgagctcccgatctgagacctttctgctcctacagccctggcccagggcccagccacttctccgggcctcctacccaccttttgccactcagcaggtggtcccccctcgagtcactgagccccaccaacggccagtcccatgggacgtgcgggccgtttcagtggaagcggctgtgactccagcagagccctacgcccgggttctcttccacctcaaagggcaggattggccaccagggtctggcagcctgccctgtgcccggctccatgccacacaccctgcaggcactgctcaccaagcctgccgcttccagcagagcgatgtggagagagaagccagatggaaaaggaagagcccaaggcgggatctaggggtcgctggatctgggggtcgctggatctgggggtcacaggatctgagggttgtgggatctgggggtccctggatctgggggttgtggtacctgggggtcgctggatctggggtcactggatctgggggtcatgggatctgggggtcactggagcccactccacacctcctccaccagaacagcctcacggaagaccttcacacttcccagagcagcaccgtgctcatggaaagatcagggcacaagatgtggcaactgattctgtcagatgcaatttgtgggccatgcctggatcctggatcctga

SEQ ID NO: 30245 - DNA, 330 bp, Homo sapiens
  SIMILAR (1)..(168): 1001254mologous to Homo sapiens Human secreted protein HDPWU34, SEQ ID NO:139,accession number Y86224,Smith-Waterman Score =274.
atcccggaagcctggctcctcctggccaatgttgtggtggtgctgattctggtccctctgaaggaccgcttgatcgaccctttactgctgcggtgcaagctgcttccctctgctctgcagaagatggcgctggggatgttctttggttttacctccgtcattgtggcagctcctttccaccctcaggtgcgttccccactgtctgactccatcctgggggagcaggcgctggctgtgacggacgacaaggtctcagtgctggagctgagggtgcagccagtgatgggcatctcgctgaccttgagccggggcactgcccaccccggggag

SEQ ID NO: 30246 - DNA, 515 bp, Homo sapiens
  SIMILAR (152)..(12): 871254mologous to Homo sapiens Human secreted protein sequence encoded by gene 31 SEQ ID NO:92,accession number B24467,Smith-Waterman Score=205.
cggccgccgtccatcgggtgggccgcgaagggggcgaggaagcgcacaccggcccgctggtactgcaggtggcagccacgggcgcgccgctcggcctcatccgacgcctctgcagcgggttccgcaggcctgcagggcggggaggccgggactggccgtcagcgctgagcggacccagcctgcccagggcccagctgctggagacccgcagctcgtccccggcggctcctaatcaccagcagctcctgtttctcaaacgcacacatccgcccctcttggggtcaggcccttccacctgcaagcgagccgccccagcccactcccgactggcgctgtgcctcgatcaccgctcttgctcccaagtggaccgcaggggagacgctctcttacggggaccctgggggcgctcactctctgaagggcctggaagctagattctagaggcgtgggccacctctccctgggttttggggagccccccccgagggtgttcatttcctgagctctgtgtcatc

SEQ ID NO: 30247 - DNA, 1692 bp, Homo sapiens
  SIMILAR (970)..(1269): 971254mologous to Homo sapiens peptide transporter 3,accession number AB020598,Smith-Waterman Score=515.
atggatacaccgttaaggcgcagccgacggctgggaggcctaaggcccgaatcccccgagagcctcacctcagtttcgcggacgagacgggcccttgtggagttcgagtcgaacccagaagaaacgagggagcccgggtctcctccgagtgtgcagcgggctggcctggggtcccccgaaaggccgccgaagacaagcccaggatcaccccgtctgcagcagggtgcaggcttggagtcaccccaagggcagccagagccaggcgcagcgtccccccagcgtcagcaagacctacacctggagtcgcctcaaagacagccagagtacagtcctgaatccccacgatgtcagccgaagccaagtgaggaggcaccaaagtgttctcaggaccagggagtactggcctcggagttggcccagaataaggaggagctgaccccgggggccccccagcatcagctaccgccggtcccaggatcaccagagccttaccccggtcagcaagctcccggtccggagccctctcagccactactggagctgacacccagggcacctggctccccccggggtcagcatgagccgagcaagccacctccagctggggagacggtgacaggcggcttcggggcaaagaagcgaaaaggttcttcatcccaggccccagcgtccaagaagttgaataaagaggagcttcctgtaatcccgaaggggaagcccaaatcggggcgagtgtggaaggaccgctccaagaaaagggggtcacaggagaatggcagggccgttgatggccatgtggaactggaggaggctggttcagcaagggcagagggccagcgtgacagcttttgtatccgcactcgtggctcccgagctcttgtccagcgtccaagaaaaataaagctgcacgaacaaattaaaggacaaatgcctgggattttattgctgatcaaagtggatttcagagggaaggtgatggatctcggccgcgacgccacccgccgcttcttcaactggttttactggagcatcaacctgggtgctgtgctgtcgctgctggtggtggcgtttattcagcagaacatcagcttcctgctgggctacagcatccctgtgggctgtgtgggcctggcatttttcatcttcctctttgccacccccgtcttcatcaccaagcccccgatgggcagccaagtgtcctctatgcttaagctcgctctccaaaactgctgcccccagctgtggcaacgacactcggccaggtcaaagctgtcacaaggccagcagggaaacaatggcagtgaaagtaaactccacctgttggtggcaaaatggcagcacacgctgggaagggtggagttgacagtggctgtctttggagatgactacactaatattgtcccttttggaatctcaaaggacagtgcaaggctcttggacaaaaagagagaccgtcaatgtgcccgcgtgctggccgacgagaggtctccccagccaggggcttccccgcaagaggacatcgccaacttccaggtgctggtgaagatcttgcccgtcatggtgaccctggtgccctactggatggtctacttccagctctctgcagccgcccggaggaaccgcggggccccgcgcgtctcctcggctggctgctgggcagctgcgcagcgtccccgcagacgggccccctga

SEQ ID NO: 30248 - DNA, 1032 bp, Homo sapiens
  SIMILAR (40)..(303): 821254mologous to Homo sapiens Human secreted protein sequence encoded by gene 31 SEQ ID NO:92,accession number B24467,Smith-Waterman Score=364.
atgcaggaagtgctgaggccatgcctggcagctagcaagcatttggcttctctgtctcctttggccagcagtccccttgaactgtctgagttcctatgggtggactttgtggtggagaatagcactggtgggggcgtagcggtcactcgccccgtcacgtggcagctggagtacccaggccaggcccctgaagcagagaaggacaaaatggtgtgggaaatcctggtgtctgagcgggacatcagagcccttatcccactggccaaggctgaggagctggtgaatacagcaccactgactggagtgccccagcatgtccccgtgcgccttgtcactgtggacggcgggggggccttggtggaggtgacagagcatgtcggctgcgagtctgccaacacacaggtcctgcaggtgtctgaggcctgtgatgccgtgttcgtggctggcaaggagagccggggcgcccggggggtgcgagtggacttctggtggcgccggctccgcgcctcgctgcggctgaccgtgtgggccccgctgctaccgctgcgtatcgagctcaccgacaccaccctcgagcaggtccgcggctggagggtacctggccctgctgaagggatcaaggtgaagaaggggctgcatgtgacagccgcccgcccagcccagcccacactctggactgccaagctggaccgcttcaagggctccaggcaccacaccaccctcatcacctgccaccgtgctgggctcacagagccagattccagaaaagtacaaggtgaagcagcagatgctgttgtagaagctgcagcaagttatccggaagacctagctaagatcattgacggtgggtacactcaacaacagattttcaatgtagacggaatagccttctattggaagaaagtgacatctggaacttgcacagctagagagaagtcaatgcctggtttccaagatgcaaagatcagagtgattcccttgttagggactaatgcagctggtgattttacattgaagccaaagctcatttag

SEQ ID NO: 30249 - DNA, 1034 bp, Homo sapiens
  SIMILAR (310)..(65): 1001254mologous to Homo sapiens Human secreted protein sequence encoded by gene 31 SEQ ID NO:92,accession number B24467,Smith-Waterman Score=430.
cagtcaactgattagcgtacagacacttatcacctggaagattccaaggagcaaagtggcaatcgcgcagggtcaggaggctggctgtgaagttgtgccgaagcaggagggtagcactaaagagctggccgggccgcactggcatgtcaggcacccgcagagtcacagcctcgtccagaggtacctcctggtactgcggggggtctgctgggcgcagctccacaccccccactgggagggcctgctccccagggtcgttctcctcgccggagccacaacccccagggccctcagctgcaggctcaagcgtgtcaggccagctcggcccgtgtggtggaggcctgtgagaaccagtgcgagggaagctccagctccaccacgcaggcgcccagggatggctggaagcggcaggcttggtgagcagtgcctgcagggtgtgtggcatggagccgggcacagggcaggctgccagaccctggtggccaatcctgccctttgaggtggaagagaacccgggcgtagggctctgctggagtcacagccgcttccactgaaacggcccgcacgtcccatgggactggccgttggtggggctcagtgactcgaggggggaccacctgctgagtggcaaaaggtgggtaggaggcccggagaagtggctgggccctgggccagggctgtaggagcagaaaggtctcagatcgggagctcagagaggagttggcaggtgggtagtggcccacctgctgcacacggaagtgttcaggggcgtctaggagctccagggcatctttccaagcttgctcccttcttccctgaaccgactggtatcgagtgcaagtgtgggatgggcgggcgcggaaggtgctgaagaggtctgtgaaggcacttgcttgccctgggggtggggtggggaccaggagcctttggtcattcgtggactgtatatggaaacaagtggaggtatagatatacatggactcctgggcaggggctaagtacccgtcagcattaaactttcccacgtgccacat

SEQ ID NO: 30250 - DNA, 1772 bp, Homo sapiens
  SIMILAR (919)..(1554): 821254mologous to Mus musculus cAMP inducible 1 protein,accession number AF121080,Smith-Waterman Score=891.
atgggttctggaccactgacaggggagctctatatgaatgaagtggatagatctgaatatcaggtgatggatctcggccgcgacgccacccgccgcttcttcaactggttttactggagcatcaacctgggtgctgtgctgtcgctgctggtggtggcgtttattcagcagaacatcagcttcctgctgggctacagcatccctgtgggctgtgtgggcctggcatttttcatcttcctctttgccacccccgtcttcatcaccaagcccccgatgggcagccaagtgtcctctatgcttaagctcgctctccaaaactgctgcccccagctgtggcaacgacactcggccaggaagtgtgaggatgatcagggtcttgacagtgaagatggtagtaaggataaggatgatggtgttggtatctacactgaagacacaaacattggcaatgcggatgacagtggcattaaaggagaggatgatggggatgatgtttccaatgaaggctttctgagtgactgggctcagtcgggccgttctgcttctcgtgatggcgctggggttgcagtcatttgggacctggaaagggctagaacttctgagtctgctcacttacatggctggcagtcaatgtgggctgttggctgtgagctcagatgggactgtgtggaccagagcaccttggttcccattcgtgtggtcttaccatgtggcttgaacttctcacagcgtcgtgtcaagctgtcacaaggccagcagggaaacaatggcagtgaaagtaaactccacctgttggtggcaaaatggcagcacacgctgggaagggtggagttgacagtggctgtctttggagatgactacactaatattgtcccttttggaatctcaaaggacagtgcaaggctcttggacaaaaagagagaccgtcaatgtgcccgcgtgctggccgacgagaggtctccccagccaggggcttccccgcaagaggacatcgccaacttccaggtgctggtgaagatcttgcccgtcatggtgaccctggtgccctactggatggtctacttccagatgcagtccacctatgtcctgcagggtcttcacctccacatcccaaacattttcccagccaacccggccaacatctctgtggccctgagagcccagggcagcagctacacgatcccggaagcctggctcctcctggccaatgttgtggtggtgctgattctggtccctctgaaggaccgcttgatcgaccctttactgctgcggtgcaagctgcttccctctgctctgcagaagatggcgctggggatgttctttggttttacctccgtcattgtggcaggagtcctggagatggagcgcttacactacatccaccacaacgagaccgtgtcccagcagattggggaggtcctgtacaacgcggcaccactgtccatctggtggcagatccctcagtacctgctcattgggatcagtgagatctttgccagcatcccaggcctggagtttgcctactcagaggccccgcgctccatgcagggcgccgatgggcaagccaagtgtcctctatgcttaagctcgctctccaaaactgctgcccccagctgtggcaacgacactcggccagagaccgtcaatgtgcccgcgtgctggccgacgagaggtctccccagccagggcttccccgcaagaggacatcgccaacttccaggtgctggtgaagatcttgcccgtcatggtgaccctggtgccctactggatgg

SEQ ID NO: 30251 - DNA, 2607 bp, Homo sapiens
  SIMILAR (1)..(2286): 991254mologous to Homo sapiens A-kinase anchor protein,accession number U17195,Smith-Waterman Score=3897.
atgttaaccatgagcgtgacactttcccccctgaggtcacaggacctggatcccatggctactgatgcttcacccatggccatcaacatgacacccactgtggagcagggtgagggagaagaggcaatgaaggacatggactctgaccagcagtatgaaaagccacccccactacacacaggggctgactggaagattgtcctccacttacctgaaattgagacctggctccggatgacctcagagagggtccgagacctaacctattcagtccagcaggattcggacagcaagcatgtggatgtacatctagttcaactaaaggacatttgtgaagatatttctgatcatgttgagcaaatccatgccctccttgaaacagagttctccctaaagctgctgtcttactctgtcaacgtgatagtggacatccacgcagtgcagctcctctggcaccagcttcgagtctcagtgctggttctgcgggagcgcattctgcaaggtctgcaggacgccaatggcaactacactaggcagacggacattctgcaagctttctctgaagagacaaaagagggccggcttgattctctaacagaagtggatgactcaggacaattaaccatcaaatgttctcaaaattacttgtctctggattgtggcattactgcattcgaactgtctgactacagtccaagtgaggatttgctcagtgggctaggtgacatgacctctagccaagtcaaaaccaaaccctttgactcttggagctacagtgagatggaaaaggagtttcctgagcttatccgaagtgttggtttacttacggtagctgctgactctatctctaccaatggcagtgaagcagttactgaggaggtatctcaagtatctctctcagtagacgacaaaggtggatgtgaggaagacaatgcttctgcagtcgaagagcaaccaggcttaacactgggggtgtcatcatcttcaggagaagctctgacaaatgctgctcaaccctcctctgagactgtgcagcaagaatccagttcctcctcccatcatgatgcaaagaatcagcagcctgttccttgtgaaaatgcaacccccaaacgaaccatcagagattgctttaattataacgaggactctcccacgcagcctacattgccaaaaagaggactttttcttaaagaggaaacttttaagaatgatctgaaaggcaatggtggaaagaggcaaatggttgatctaaagcctgagatgagcagaagcaccccttcgctagtagatcctcctgacagatccaaactttgcctggtattgcagtcttcttaccccaacagcccttctgctgccagccagtcttatgagtgtttacacaaggtggggaatgggaaccttgaaaacacagtcaaatttcacattaaagaaatttcttccagcctgggaaggcttaacgactgctataaagagaaatctcgacttaaaaagccacacaagacctcagaagaggtgcctccatgccgaacacctaaacgggggactggttcaggcaaacaagctaaaaatacaaagagctcagcagtgccaaatggagagctttcttatacttccaaggccatagaggggccacaaacaaattctgcttccacatcctcacttgagccttgtaatcagagaagttggaatgccaaattgcaattgcagtcagaaacatccagttcaccagcttttactcagagcagtgaatcctctgttggctcagacaacatcatgtctccggtgccacttctttcaaaacacaaaagcaaaaaaggtcaagcctcctctccaagtcacgtcactaggaatggtgaggttgtggaggcctggtatggctctgatgaatacctagcactgccctctcaccttaagcagacagaagtattggctttgaagttggaaaacctaacaaagcttctgcctcagaaacccagaggagaaaccatccagaatattgatgactgggaactgtctgaaatgaattcagattctgaaatctatccaacctatcatgtcaaaaagaagcatacaaggctaggcagggtgtctccaagctcatctagtgacatagcctcttcactaggggagagcattgaatctgggcccctgagtgacattctttctgatgaggagtccagtatgcctctcgctggcatgaaaaagtatgctgatgagaagtcagaaagagcttcatcctctgagaaaaatgagagccattctgccactaaatcagctttatttcagattactgatgcaagatattcagcaccaagacaactatgaagccttatgggaaaaaatagaggggcttgtaaacaaactggatgaattcattcaatggttaaatgaagccatggaaactacagaaaattggactccccctatagcagagatggatgaccttaaactgtatctggagacacacttgagttttaagttgaatgtagacagtcattgtgctctcaaggaagctgtggaggaggaaggacaccaacttcttgagcttattgcatctcacaaagcaggactgaaggacatgctgcggatgattgcaagtcaatggag

SEQ ID NO: 30252 - DNA, 1986 bp, Homo sapiens
  SIMILAR (1)..(1776): 991254mologous to Homo sapiens A-kinase anchor protein,accession number U17195,Smith-Waterman Score=3029.
ggccggcttgattctctaacagaagtggatgactcaggacaattaaccatcaaatgttctcaaaattacttgtctctggattgtggcattactgcattcgaactgtctgactacagtccaagtgaggatttgctcagtgggctaggtgacatgacctctagccaagtcaaaaccaaaccctttgactcttggagctacagtgagatggaaaaggagtttcctgagcttatccgaagtgttggtttacttacggtagctgctgactctatctctaccaatggcagtgaagcagttactgaggaggtatctcaagtatctctctcagtagacgacaaaggtggatgtgaggaagacaatgcttctgcagtcgaagagcaaccaggcttaacactgggggtgtcatcatcttcaggagaagctctgacaaatgctgctcaaccctcctctgagactgtgcagcaagaatccagttcctcctcccatcatgatgcaaagaatcagcagcctgttccttgtgaaaatgcaacccccaaacgaaccatcagagattgctttaattataacgaggactctcccacgcagcctacattgccaaaaagaggactttttcttaaagaggaaacttttaagaatgatctgaaaggcaatggtggaaagaggcaaatggttgatctaaagcctgagatgagcagaagcaccccttcgctagtagatcctcctgacagatccaaactttgcctggtattgcagtcttcttaccccaacagcccttctgctgccagccagtcttatgagtgtttacacaaggtggggaatgggaaccttgaaaacacagtcaaatttcacattaaagaaatttcttccagcctgggaaggcttaacgactgctataaagagaaatctcgacttaaaaagccacacaagacctcagaagaggtgcctccatgccgaacacctaaacgggggactggttcaggcaaacaagctaaaaatacaaagagctcagcagtgccaaatggagagctttcttatacttccaaggccatagaggggccacaaacaaattctgcttccacatcctcacttgagccttgtaatcagagaagttggaatgccaaattgcaattgcagtcagaaacatccagttcaccagcttttactcagagcagtgaatcctctgttggctcagacaacatcatgtctccggtgccacttctttcaaaacacaaaagcaaaaaaggtcaagcctcctctccaagtcacgtcactaggaatggtgaggttgtggaggcctggtatggctctgatgaatacctagcactgccctctcaccttaagcagacagaagtattggctttgaagttggaaaacctaacaaagcttctgcctcagaaacccagaggagaaaccatccagaatattgatgactgggaactgtctgaaatgaattcagattctgaaatctatccaacctatcatgtcaaaaagaagcatacaaggctaggcagggtgtctccaagctcatctagtgacatagcctcttcactaggggagagcattgaatctgggcccctgagtgacattctttctgatgaggagtccagtatgcctctcgctggcatgaaaaagtatgctgatgagaagtcagaaagagcttcatcctctgagaaaaatgagagccattctgccactaaatcagctttaattcagaaactgatgcaagatattcagcaccaagacaactatgaagccatatgggaaaaaatagagtattttacgtggcttaccctacttaagtcccggaagggaggattttttcagatgaagaaactaaggcagtatgtgattaggaaacttgctcaagtcctcacagctactcacaagaaggggaaaatggagggcagccacctttcttcttatggatacgacttagaagttacacatgccacttttgctcgcatcccactggcccactttgtcacatag

SEQ ID NO: 30253 - DNA, 702 bp, Homo sapiens
  SIMILAR (1)..(669): 991254mologous to Escherichia coli beta-glucosidase precursor,accession number U15049,Smith-Waterman Score=1126.
atgattgatgaagcggtgcagacggcgaaacaatctgatgtggtggtggctgtagtcggtgaagcacaggggatggcgcacgaagcctccagccggaccgatatcactattccgcaaagccaacgtgacttgattgcggcgctgaaagccaccggtaaaccgctggtgctggtgctgatgaacgggcgtccgctggcgctggtgaaagaagatcagcaggctgatgcgattctggaaacctggtttgcggggactgaaggcggtaatgcaattgccgatgtattgtttggcgattacaacccgtccggcaagctgccaatgtccttcccgcgttctgtcgggcagatcccggtgtactacagccatctgaataccggtcgcccgtataatgccgacaagccgaacaaatacacttcgcgttattttgatgaagctaacggggcgttgtatccgttcggctatgggctgagctacaccactttcaccgtctctgatgtgaaactttctgcgccgaccatgaagcgtgacggcaaagtgactgccagcgtgcaggtgacgaacaccggtaagcgcgagggtgccacggtagtgcagatgtacttgcaggatgtgacggcttccatgagtcgccctgtgaaacagctgaaaggctttgagaaaatcagaataatgacctggcgtattcgtaaccgggttgggtaa

SEQ ID NO: 30254 - DNA, 936 bp, Homo sapiens
  SIMILAR (76)..(933): 941254mologous to Escherichia coli PUTATIVE FRV OPERON PROTEIN FRVX,accession number D90868,Smith-Waterman Score=1381.
atggagaatggcagctctaaaaggtgccgcagggacccagccacagacagaatgtgctgcaaaggtaccagtgactgtcactctagaggatccccgggattatggtgcgcagcatctcccgcgaaggggcgattggatgtgctgccggttggcaacgtacgcatggctgcccgccagctgcagccggtgcgcatcaccacccgtgaagagtgcaaaattccaggcctgcttgacggcgaccggcaggggaatgacgtcagcgccatgcgcgtggacattggtgcgcgctcctatgacgaagtgatgcaggcgggaattcgtcccggcgatcgcgtcacgtttgataccacttttcaggttctccctcaccagcgagtgatggggaaagcctttgatgaccgcctcggttgctatctgctggtgacgttactgcgcgaactgcacgacgccgaactacctgcggaagtgtggctggtggcaagttccagcgaagaggtgggattacgcggcgggcaaactgccacccgcgcggtgtcgccggacgtcgccattgtgcttgataccgcctgctgggcgaaaaactttgattatggcgcggctaaccatcgccagattggtaacgggccgatgctggtgttaagcgacaagtcgctgattgcgccgccaaaacttaccgcctgggtcgaaaccgtggcggcagaaattggcgtgccgttgcaggcagatatgttcagcaacggcggcacggacggcggggcggtgcacttaaccggcaccggcgtgcccacagtggtgatggggccagcaacccgccatggacattgcgccgcatcgattgccgattgccgcgacattttgcagatgcagcaacttttatctgcccttattcaacgtcttacgcgtgagacggttgttcaactgacggatttcagatga

SEQ ID NO: 30255 - DNA, 1494 bp, Homo sapiens
  SIMILAR (166)..(927): 891254mologous to Escherichia coli PUTATIVE FRV OPERON PROTEIN FRVX,accession number D90868,Smith-Waterman Score=1130.
atggcacttaccgtgcagaaagtgtacattctctacctctatggtgcattaccaatgctagctctttcactgagtcttaagagccagcagaacgaccagcagcaaaccgcagaagacgcatcaaacgacagccacaacgacagcgactactggaccttgatggtcttgggatcggtgctgatccgcctgaatgaatcgacaggtccgaaggtgatgatctgtgcgcatatggacgaagtgggatttatggtgcgcagcatctcccgcgaaggggcgattgatgtgctgccggttggcaacgtacgcatggctgcccgccagctgcagccggtgcgcatcaccacccgtgaagagtgcaaaattccaggcctgcttgacggcgaccggcaggggaatgacgtcagcgccatgcgcgtggacattggtgcgcgctcctatgacgaagtgatgcaggcgggaattcgtcccggcgatcgcgtcacgtttgataccacttttcaggttctccctcaccagcgagtgatggggaaagcctttgatgaccgcctcggttgctatctgctggtgacgttactgcgcgaactgcacgacgccgaactacctgcggaagtgtggctggtggcaagttccagcgaagaggtgggattacgcggcgggcaaactggcacccgcgcggtgtcgccggacgtcgccattgtgcttgataccgactgctgggcgaaaaactttgattatggcgcggctaaccatcgccagattggtaccgggccgatgctggtgttaagcgacaagtcgctgattgcgccggcaaaacttaccgcctgggtcgaaacgtggcggcaaaattggcgtgccgttgcaggcagatatgttcagcaacggcggacggacggcgggcggtgccttaacggcacgggacgagagacacgacagcagcgacagcaggcagagacccgagacgcgacacacaagccgacggagccagtatcgaggagacaacacacagaacccaagcagagcgccgggagctcagaacgacgaaccgccgggacgcgaatcacctgcgcaccccttatgttcaagtggccacaagctgtacatttcttggtccaggcaggtatcacactgatactccctggccctcaaactcccaagcaacgtgtgggatacaccaggttgttgcccaccaaacgccccagcagtcaagactacccaagaaacacactgggcagacacaccaacgatgacaacatgacttacaccacgcactgtagtagcaaccacccgagcccaccgcgcccaacacggagaagggaaaacagcgaaacgaacgacaacacaagcagcacggcaagataccggaggcaagacaagaagaggagcagagaagcgagagaggagaaagaaaacagagggagggaggacgaacagacgccgacggaagaccgatacgggagcgaacaagagcgcgaagccatgctggtagtcaagtaa

SEQ ID NO: 30256 - DNA, 921 bp, Homo sapiens
  SIMILAR (133)..(519): 961254mologous to Escherichia coli hyaE protein,accession number M34825,Smith-Waterman Score=656.
atgctcgacgactacggcggtagcctgagcgaactggcacgggagcaactgcccgctgcggaacaggcggcgctggcgcagcttgctgcgcgttcgcttgcgccagtaccggatgacacaggaggagcagggatgagcaacgacacgccatttgatgcgttgtggcaacgaatgctggcgcgcggctggacgccagtcagtgaatcccgtcttgacgactggcttacgcaagcgccagacggcgtggtgttattaagcagtgacccgaaacgcacgccagaggtcagcgataatccggtaatgattggcgaattactgcgcgagtttcccgactatacatggcaggtggcgattgctgaccttgagcagagcggacgcatcggcgatcgctttggcgtctttcgctttcctgccactttagtgtttaccggcggaaactatcgcggcgtgctgaatggtattcacccgttggcggaactgataaacctgatgcgctggcttgtcgaaccgcagcaggagcttcatcaaccgctaaccacggtacagaacgccaacgactgttgctgcgacggcgcatgttccagcacgccaactctctctgaaaacgtctccggcacccgctatagctggaaagtcagcggcatggactgcgccgcctgtgcgcgcaaggtagaaaatgccgtgcgccagcttgcaggcgtgaatcaggtgcaggtgttgttcgccaccgaaaaactggtggtcgatgccgacaatgacattcgtgcacaagttgaatctgcgctgcaaaaagcaggctattccctgcgcgatgaacaggccgccgaagaaccgcaagcatcacgcctgaaagagaatctgccgctgattacgctaatcgattcttcttatttcccacatggcacagagcttgccttctag

SEQ ID NO: 30257 - DNA, 3342 bp, Homo sapiens; identical to SEQ ID NO: 25857
  SIMILAR (3342)..(2647): 801254mologous to Escherichia coli O157:H7 evolved beta-D- galactosidase, alpha subunit; cryptic gene,accession number AE005537,Smith-Waterman Score=986.

SEQ ID NO: 30258 - DNA, 1147 bp, Homo sapiens; identical to SEQ ID NO: 21538
  SIMILAR (34)..(843): 841254mologous to Escherichia coli HyfG,accession number M63654,Smith-Waterman Score=1092.

SEQ ID NO: 30259 - DNA, 3711 bp, Homo sapiens
  SIMILAR (1417)..(2496): 991254mologous to Escherichia coli AsmA,accession number U11035,Smith-Waterman Score=1827.
atgcctgcagcaggagcacggatcacccgtcggtgggtaccgactggggagttgctgcccccgctgcctttggcagaggttaagcgcttgctttgcgcgcacgttcgggaactgcatgacttttatggtccggcaaaagggtaccgaattgcacgtaaacacgtttcctggtatctccaggaacacgctccaaatgaccagtttcggcgcacattcaacgccattgaggatgccagcgaacagctggaggcgttggaggcatacttcgaaaattttgcacacagtgtggcctataccaattcggttgaaaatgcactggggattgaggtgccgcaacgagcacatactattcgctcgattctgctggaagtcgaacggctacacagtcatttgcttaaccttggcctctcctgccatttcgttggttttgataccggctttatgcaatttttccgcgtgcgggaaaagtcgatgacgatggcggaattgctgatcgggtcgcgtaaaacctacggtctgaatctgattggtggtgttcgccgcgatattctcaaagagcaacgtctgcaaacgctgaaactggtgcgcgagatgcgcgccgacgttgccacccatccgagcgatatggcggtcgcaatgcggttgctggatgcggtggtggaaaccatcacgccggagggaaagactcgcagtatcacactggctgatttttatcaccctccgggaaaaacgccgcacattgaaaccgcaacctgctccagcgttgacaatttcagaatgcggcttaacgaagccgtcgccaagcggtttcatttgctcgcctatttcaggatagaaatggccaaggagaataccaatggctatcgctgtcaggacctgaaagtaaaggcttttaaacagagagtaattccgattaacgcttgcaccctccgtattaccgcggctgcatggctgtcgtcagctcgtgttgtgaaatgttgggttaagtcccgcaacgagcgcaacccttatcctttgttgccagcggtccggccgggaactcaaaggagactgccagtgataaactggaggaaggcgatacgccaaccaccggtatctaccgtgaaaaaggggacaccgttgccacacagtgatgaacttgatgccggtaatgtgctggcggttgaaaatctgaatattgcctttatgcaggaccagcagaaaatagctgcggtccgcaatctctcttttagtctgcaacgcggtgagaacgctggcaattgttggcgaatccggctccgagggtgggcaaacacccggagggggacctatacaatcattccccggggtgttttccccccgggaaaagctccccggggggccccccccgggggtacgaaccttgagcggaaaccgaaaaaccagattgaggataccatgagacgatttctgacgacgctgatgatactcctggtcgtgctggtggccgggttatctgcgttagtgttgctggtgaatccgaatgatttccgcgactatatggtcaagcaagttgctgcacgtagcggttatcaattgcagctcgacgggccactgcgttggcacgtctggccgcagcttagtatcctctccgggcgaatgtctctcaccgcccagggcgcaagccagccactggttcgcgccgacaacatgcgtctggacgtggcgcttttaccactactgagtcatcaactgagcgttaagcaggtgatgctaaaaggggcagtgatccaactgacgccgcagacggaagcggtgcgcagtgaagacgctccggttgcaccgcgcgacaataccttgccggatctgtcagacgatcgcggatggtcgtttgatatatccagtcttaaggtggcggacagcgtgctggtgttccagcatgaagatgacgagcaggtgacaatccgcaatattcgcctgcaaatggaacaagatccccaacatcgtggttcatttgagttctccgggcgggttaatcgcgatcagcgcgatctcacgatatcccttaacggtacggtagatgcttctgattatccgcatgatttaacggcggctattgaacaaattaactggcagttgcagggtgccgatttaccaaaacaaggtattcaggggcaggggagtttccaggcccagtggcaggagtcacataaacgcctttcatttaaccaaattagtttgaccgccaatgatagtacgctaagcgggcaagcacaggttacgctgacagagaaaccggaatggcagctgaggctgcaattcccgcaactgaatcttgacaacctcatcccgcttaatgaaaccgcgaatggtgaaaacggtgccgcgcagcaggggcagagccaatcaacgttgccgcgcccggtcatttcttcgcgtattgatgaaccggcctatcagggactgcaaggctttacggctgatattttgttgcaggccagtaacgtgcgctggcgctggaatgaattttacagatgtgccacgcaaatgaccaacagtcggggtccggctaagccgcccctgtggaccgtgtctcgttttgtcgttacgcggtatcctgttgttccagaaccgctatttcgccagtcagatgacgctcgcgttcttctggcctctaccactggtgctgctggttctggttgcgctgttactggcgattatctggacgcgcctggaagagtaccgttggcctatctgcacgtttatcggcatgacgctggtgatggtgtggctggcagcacgccaactctctctgaaaacgtctccggcacccgctatagctggaaagtcagcggcatggactgcgccgcctgtgcgcgcaaggtagaaaatgccgtgcgccagcttgcaggcgtgaatcaggtgcaggtgttgttcgccaccgaaaaactggtggtcgatgccgacaatgacattcgtgcacaagttgaatctgcgctgcaaaaagcaggctattccctgcgcgatgaacaggccgccgaagaaccgcaaggcattcacgcctgaaagagaatctgccgctgattacgctaatcgtgatgatggcaatcagctggggtctggagcagttcaatcatccgttcgggcaactggcgtttatcgcgaccacgctggttgggctgtacccgattgctcgatcaggcattacggttgatcaaatccggcagctacttcgccattgaaaccttaatgagcgtagccgctattggtgcactgtttattggcgcaacggctgaagctgcgatggtgttgctgctgtttttgattggtgaacgactggaaggctgggccgccagccgcgcgcgtcagggcgttagcgcgttaatggcgctgaaaccagaaaccgccacgcgcctgcgtaagggtgagcgggaagagtatcaagccaccggcggtacgctgagctcgattgatcatgcctgtcattcacatgcccaagtcttggggacccgtagcggtcgatatcatccgtatcttgatgagtatctgatacagcgttggagggtaattgaggatattgtcgctatccgtcttctcctgcctgctgtgatggcttggtggtgggaatgtagtggacgcgggatgaacaatggtgtcaacaacaagcacgttacaataattgaccactcgctgttaattgatgatgacatctatgttctgtatacgagaccaatgcgcgattctagtcaatag

SEQ ID NO: 30260 - DNA, 855 bp, Homo sapiens
  SIMILAR (3)..(629): 921254mologous to Escherichia coli beta-glucosidase precursor,accession number U15049,Smith-Waterman Score=982.
ttcgttatcggttgatgcccagcgtcaaccattttcccgcctccggcgcggtaaaagccggtaaagagtccacccccgtcaatatgagtccccagcgcctgtttaatgattatatgcccccgtacaaagcggggctggacgcaggcagcggcgcggtgatggtggcgctgaactcgctgaacggcacgccagccacctccgattcctggctgctgaaagatgttctgcgcgaccagtggggctttaaaggcatcaccgtttccgatcacggtgcaatcaaagagctgattaaacatggcacggcggcagacccggaagatgcggtgcgcgtggcgctgaaatccggaatctacatgagcatgagcgacgagtactactcgaagtatctgcctgggttgattaaatccggcaaagtgacgatggcagagctggacgatgctgcccgccatgtactgaacgttaaatatgatatggggttgtttaacgacccatgcagccatttggggccgaaagagtctgacccggtggataccaatgccgaaagccgcctgctccgtaaagaagcgcgtgaagtggcgcgcgaaagcttggtgttgatgaaaaaccgtctcgaaacgttaccgctgaaacacccgccccaccattgcggtggttgggccactggcggacagtaaacgtgacgtgatgggcagctggtccgcagccggtgttgccgatcaatccgtgaccgttctgaccgggattaaaaatgccgtcggtgaaaacggtaaagtgctgtatgccaaaggggcgaacgtttccagtgacaaaggcattatcgatttcctgaatcagtatgaagaagcggtcaaagtc

SEQ ID NO: 30261 - DNA, 2127 bp, Homo sapiens; identical to SEQ ID NO: 18191
  SIMILAR (1309)..(2058): 981254mologous to Escherichia coli EmrK,accession number D78168,Smith-Waterman Score=1221.

SEQ ID NO: 30262 - DNA, 3144 bp, Homo sapiens; identical to SEQ ID NO: 24627
  SIMILAR (2068)..(2304): 511254mologous to Escherichia coli dihydroxybenzoic acid- activating enzyme,accession number X15058,Smith-Waterman Score=158.

SEQ ID NO: 30263 - DNA, 438 bp, Homo sapiens
  SIMILAR (125)..(310): 931254mologous to Escherichia coli similar to Vibrio cholerae RecA protein,accession number U70214,Smith-Waterman Score=285.
atgattacgaattcgagctcggtacccacgagtgactggtttgaacgtgcaagcccacgtattatcctcgctgcacaacagctctgtaatgcgctttcacaggtgctcaagtggggattgaacaatgctcgtctattggctggatatagtcggcacagcggtatttgccatctccggcgttttgttagccggaaaattgcgtatggacccttttggtgttctggtactgggcgtggtaaccgcagtaggcggcgggacaattcgcgacatggcgctggatcacggcccggattttgggtgaaagatcccaccgatctggtcgttgcaatggtcaccagcatgctgaccatcgtgctggtttttgatttcttaggaaaactgaacggggatcttctagagtccccaaagcaggcattcaagcctgagtggctgtgctag

SEQ ID NO: 30264 - DNA, 3042 bp, Homo sapiens
  SIMILAR (736)..(1716): 981254mologous to Escherichia coli K12 soluble lytic murein transglycosylase,accession number AE000509,Smith-Waterman Score= 1658.
atgaaaccgttacattatacagcttcagcactggcgctcggactggcgttaatggggaatgcacagccagtgacgaccattccgttctggcattctatggaaggggaactgggtaaagaggtggattctctggcccaacgtttttacgccgaaaacccggattacaaaattgtaccgacctataaaggcaactacgaacagaatttaagcgcggggattgccgcatttcgtaccggcaacgcgccggctattttgcaggtttatgaagttggcaccgccaccatgatggcgtcgaaagccattaaaccggtgtatgacgtgtttaaagaggcagggattcagttcgatgagtcgcagtttgtgccgacggtttcaggttactactccgacagcaaaacgggccacttactctcccagccattcaacagctcgacccccgttctctattacaacaaagacgccttcaagaaagcaggattagacccggaacagccgccgaaaacctggcaggatctggcggactatgccgcgaaactgaaagcctccggcatgaagtgcggctacgccagcggctggcagggctggatccaactggaaaactttagcgcctggaacggtctgccgtttgccagcaaaaacaacggctttgacggcacggacgcggtgctggagttcaataagccggagcaggtgaaacacatcgccatgctcgaggagatgaacaagaagggcgacttcagctacgtcgaggatgcgcttgtggaaaaagccaaacaagttacctggcggctgttggctgccggtgtctgtctgctgacggtcagcagcgtggcgcgagccgactcactggatgagcagcgtagtcgttacgcgcaaatcaagcaggcctgggataatcgacaaatggatgtggtcgaacaaatgatgcctggactgaaggattatccgctttatccctacctggaataccgccagatcaccgatgatctgatgaatcaaccggcggtgacggtcactaactttgttcgcgctaaccccacgcttcctcccgctcgcacgctgcaatctcgtttcgtcaatgaactggcgcggcgtgaagactggcgtggcttgttagcctttagcccggaaaagcccggaactaccgaagcgcaatgtaattactactatgcgaaatggaacaccgggcagagtgaagaagcctggcaaggggcgaaagagctgtggctaaccggcaagagccagcctaacgcctgtgacaagttatttagcgtctggcgtgcgtcaggtaaacaagatccgctggcgtatttagagcgtatccgtctggcgatgaaagcgggtaacacaggcctggtaacagtgctggcagggcagatgcctgccgattaccagactatcgcctcggcaatcatttcactggcgaacaaccctaatacggtactgaccttcgcgcgtacaactggcgcgaacgattttacccgtcaaatggcggcggtggcgtttgccagtgtggcgcggcaggatgctgagaatgcacggctgatgatcccatcgcttgcccaggcgcagcagcttaatgaagatcagattcaggagctgcgcgatatcgtcgcctggcgtctgatgggcaacgatgtcaccgacgagcaggcgaactggcgcgatgacgccattatgcgctcgcaatctacttcgcttattgaacgccgtgtatatcagcacaacattacgtttgcgctggatgactttggtacgggttatgcgacctatcgttacttgcaggcgttcccggtcgattttattaagaatcgatttagcgcaacgctcctggccacgctgattgccgccagtgtgaatgcagcgacggtcgatctgcgtatcatggaaaccactgatctgcatagcaacatgatggatttcgattattacaaagacaccgccacggaaaaattcggactggtacgtacggcaagcctgattaacgatgcccgcaatgaagtgaaaaacagcgtactggttgataacggcgatttgattcaggggagtccgctggccgattacatgtcggcgaaaggattaaaagcaggtgatattcacccggtctataaggcattaaatacgctggactataccgtcggaacgcttggcaaccacgagtttaactacggtctggattacctgaaaaatgcgctggcaggagcgaaattcccttatgtaaatgccaacgtcattgacgccagaaccaaacagccaatgtttacaccgtatttaattaaagacaccgaagtggtcgataaagacggaaaaaaacagacgctgaagattggctatattggcgtcgtgccaccacaaatcatgggctgggataaagctaatttatccgggaaagtgacggtgaatgatattaccgaaaccgtgcgcaaatacgtgcctgaaatgcgcgagaaaggtgccgatgttgttgtcgttctggcacattccgggctatctgccgatccgtataaagtgatggcggaaaactcagtttattacctcagtgaaattccgggcgttaacgccattatgtttggccatgctcacgccgttttcccaggtaaagattttgctgatatcgaaggggctgatatcgccaaaggcacgctgaatggtgttccggcggtcatgcccggcatgtggggcgatcatcttggtgtggtcgacttaccactcagttatgcaccgcggtcaatggccgctacccaggctaaagcgcgagcccgaacgctctccgccttcgctctctccactccctcgcggcgcaaaccacccgcggcttacacctctccacccatcccgtcgcccacacaaatgccccaacacacccgacactccccacacttcaaccaacacccacacaacaccacccacacaaccaccacccccatcactctttctccatctaagcaccgtcaccacaacactaaccaccccccacacctgcaccacaccacctccatgaagcaaccctcccttggtagacttaccaggactccttactga

SEQ ID NO: 30265 - DNA, 1764 bp, Homo sapiens
  SIMILAR (1)..(1074): 991254mologous to Escherichia coli K12 putative oxidoreductase,accession number AE000197,Smith-Waterman Score=1881.
atgttgccgctgggcgagtgtaaggtttacagcgatttagacctctatctcggtgttcaggcgatcaactggacagagatgtttaatcctggcgcgaccttcgctgtccacttcagtggtttgaatgacaccatccgcaacagtcagtacggcgcgatgaaagtgaaagacgcgatcgtcgatgctttcacgcggaaaaatctgccgcgtccaaatgttgatcgcgatgcgccggatatccgcgttaacgtctggctgcataaagaaaccgccagtatcgctcttgatctgagtggtgatggtttacatctgcgtggctatcgcgatcgtgctggtattgcgccgatcaaagaaaccctggcagccgctattgtgatgcgatccggctggcagccaggaacaccgctgctcgatccgatgtgtggttccggtacgttgctgattgaagcagcgatgctggcgaccgatcgcgcaccaggcttgcaccgtgggcgttggggctttagcggctgggcgcagcatgatgaagctatctggcaggaagtgaaagcggaagcgcaaactcgcgcccgtaaaggcctggctgagtatagctctcatttttacggttcggacagcgacgcacgggtgattcaacgtgcacgcactaacgcccgtcttgcggggattggtgaactgatcacctttgaggtgaaagatgtcgcgcaactgaccaatccgctgccgaaagggccgtacggcacagtgttgagcaacccgccatacggggaacgtctggacagcgaaccggcgctgattgcgctgcatagcctgctgggtcggatcatgaaaaaccagtttggtggctggaatctctctttgtttagtgcctcgccggatctgctaagctgcttgcagctgcgtgcagacaaacagtacaaggcgaaaaacggcccgctggactgcgtacagaaaaattaccacgttgccgaaagcactccagacagcaaaccggcgatggtagcggaagactacaccaaccgcctgcgtaagaacctcaaaaaattcgagaagtgggctcgccagaagggattgattgggagaataagagggaaggggacgcggcccaggcgacccggaatagaaacccgcttaagaaacatccggcacttttctatttctgcccttcagaaatccttaaagtggaccgatgctcagacctgcagaccatgcaagcatccgtcccggctggtgcgcagtcccgcgcccggcggtcaggcgcaggcaaaatgcgcgatgccatccaaccagtgtaccggtgcacgattcggtaaactccagtgccggattccacatcaacgatccatagccgaagatccacaccggtccctcatcaggtcgacaagccagcgtcgccgccagcgaagccgcccgttgttctgctgaccataagagtgattcttcaatggcaccaaatgccgttttacaatcggcattcatcaagaaatcacgcgttatcaccttacacttccgccactgcatacttccctgcgacaactttttggtgtcttccggacatttttactgctcattttgaaaccactaacgggacaatatgcaatccacggaccacttgcaaggcaacaccgcacgaatagctttaactaagcgaccggttttacgattttttatgccatttatcatcatcccctttggcatattcatgcttcacagcagcccaggccactttatgcgcggtttcttcgcgactggcgtcatcacgcc

SEQ ID NO: 30266 - DNA, 1954 bp, Homo sapiens
  SIMILAR (399)..(950): 981254mologous to Escherichia coli SSP (AA1-212),accession number X05088,Smith-Waterman Score=937.
gctcccgtttcacgcaagaaaaacatcagcaaacccactccacttttcaaaacttgttgccaccaaaggcggcaggcattgcgatggcgctaaatgtactgggtaaacaattcgataaactgcttaatgttacgctgtgttatccggacaataaccgtcagccgttcttcgatatgttaagcggtaaactgacgcggattgtcgtacatgtggatttacagcctattgccgatgagttacatggcgactacatcaatgacaaaagctttaagcgccattttcagcaatggctgaactcattgtggcaggaaaaagaccggcttctgacgtctctcatgtcatcacagcgtcagaataacagtaaaaattctgactatacctggaggttttcatggcgtgtcgctgccaacaaacgttcggtaatgacgctgttttccggtcctactgacatctatagccatcaggtccgcattgtgctggctgagaaaggtgtaagtttcgagatcgaacacgtggaaaaggacaatccgcctcaggatctgattgacctcaacccgaatcagagcgttccgaccctggtggatcgtgagctgaccctgtgggaatctcgcatcattatggaatatctggatgagcgtttcccgcatccgccactgatgcctgtttacccggtagctcgcggtgaaagccgtctgtacatgcatcgcatcgaaaaagactggtacacgctgatgaacaccatcatcaacggttcagcttctgaagcagatgccgcacgtaagcaactgcgcgaagaactgctggcgattgcgccggtcttcggtcagaagccgtacttcctgagcgatgagttcagcctggtcgattgctatcttgctccgctgctgtggcgtctgccgcaactgggcatcgagttcagcggcccgggtgcgaaaagagcttgaaaggggctatattgacccgcctaacaccacgtcgtccctatctgctgcgtgcattctatgagtggttgctggataaccagctcacgccgcacctggtggtggatgtgacgctccctggcgtgcaggttcctatggaatatgcgcgtgacgggcaaatcgtactcaacattgcgccgcgtgctgtcggcaatctggaactggcgaatgatgaggtgcgctttaacgcgcgctttggtggcattccgcgtcaggtttctgtgccgctggctgccgtgctggctatctacgcccagtcgacctgcaggcatgcaagcttggcactggccgtcgttttacaacgtcgtgactgggaaaaccctggcgttacccaacttaatcgccttgcagcacatccccctttcgccagctggcgtaatagcgaagaggcccgcaccgatcgcccttcccaacagttgcgcagcctgaatggcgaatggcgcctgatgcgacaatacaaatcagcgacactgaatacggggcaacctcatgtccgagctcgcgagctcgtcgacagcgacacacttgcatcggatgcagcccggttaacgtgccggcacggcctgggtaaccagattattacccgctgtatcaacaccgccaaattgcctaaatcagttgttgctcttttttctcaccccggtgaactatctgcccggtcaggtgatgcacttcaaaaagcctttacagataaagaggaattacttaagcagcaggcatctaaccttcatgagcagaaaaaagctggggtgatatttgaagctgaagaagttatcactcttttaacttctgtgcttaaaacgtcatctgcatcaagaactagtttaagctcacgacatcagtttgctcctggagcgacagtattgtataagggcgataaaatggtgcttaacctggacaggtctcgtgttccaactgagtgtatagagaaaattgaggccattcttaaggaacttgaaaagccagcaccctga

SEQ ID NO: 30267 - DNA, 1419 bp, Homo sapiens
  SIMILAR (318)..(386): 471254mologous to Escherichia coli K12 putative ATP-binding component of a transport system,accession number AE000509,Smith- Waterman Score=53.
atgccttattcaggggccgaaaaatggccgcgcgtcccaaaatttaatgcacgggattccaaaataatcccgcgcgtagcaagtgggccaattctgttgaagaacaaatcaaaaccagaccgggctcacctgccggggtatgcttccaccacccaatggtggattttgagcgttcagccacgattcgccggaaaccttggggatcatctgaaagagcgattcccgttggctaacaacgatctttcaaaacgctacacaagcggtaagaagatcccgcaaagctatgcgatggcgattgctcgtcagaagagcgcttggaatccgaaagtgaaatcaccggtaggggccagcggcttgatgcagattatgcctggtacagcgacccatacggtgaagatgttctctattcccggttatagcagtcctgggcaattgctggatccggaaacgaatatcaacattggcaccagttacctgcaatatgtttatcagcagtttggcaataatcgtattttctcctcagcagcttataacgccggaccagggcgggtgcgaacctggcttggcaacagcgccgggcgtatcgacgcagtggcatttgtcgagagtattccattctccgagacgcgcggttatgtgaagaacgtgctggcttatgacgcttactaccgctatttcatgggggataaaccgacgttgatgagcgccacggaatggggacaggcgaagtccaacgtggctcaattcgtttataccatgcatcgtgtcggcaaagttgttccgccgaaacgtcatattttgaaaaacatctctctgagtttcttccctggggcaaaaattggtgtcctgggtctgaatggcgcgggtaagtccaccctgctgcgcattatggcgggcattgataaagacatcgaaggtgaagcgcgtccgcagccagacatcaagattggttatctgccgcaggaaccgcagctgaacccggaacacaccgtgcgtgagtccattgaagaagcggtttcagaagtggttaacgccctgaaacgcctggatgaagtgtatgcgctgtacgccgatccggatgccgattttgacaagctggccgctgaacaaggccgtctggaagagatcattcaggctcacgacggtcataatctgaacgtacagctggagcgtgcggcggatgcgctacgtctgccggactgggacgcgaaaatcgctaacctctccggtggtgaacgtcgtcgcgtagcgttgtgccgcctgctgctggaaaaaccagacatgctgctgctcgacgaaccgaccaaccacctggatgccgaatccgtggcctggctggaacgcttcctgcacgacttcgaaggcaccgttgtggcgattacccacgggggatcctctagagtcgactgcagacagtag

SEQ ID NO: 30268 - DNA, 1630 bp, Homo sapiens
  SIMILAR (171)..(1001): 801254mologous to Escherichia coli penicillin-binding protein 3,accession number K00137,Smith-Waterman Score=1087.
ggtgtacatcttcacctgacccaccctctggccttcctccaggttttgctaagctaacctcccttatcgtgacacttgttgaggtgggagtttcccctgaacctgatgaaggctggctgtatctggcagtggtcattgacctgtggtcacgtgccgttattggctggtcaatgtcgccacgcatgacggcgcaactggcctgcgatgccctgcagatggcgctgtggcggcgtaagaagccccggaacgttatcgttcacacggaccgtggaggccagttcggtgaccgctggaagggctggctaacgcgctcaatattccgctggatcagctttcagcccgcattagcgccaacccgaaaggcggctttatgttatctggcgcgtgaggtgaaccctgacatggcggactacatcaaaaaactgaaactgccggggattcatgtgcgtgaagaatctcgccgttattatccatccggcgaagtgactgctcacctcattggctttactaacgtcgatagtcaagggattgagggcgttgagaagagtttcgataaatggcttaccgggcagccgggtgagcgcattgtgcgtaaagaccgctatggtcgcgtaattgaagatatttcttctactgacagccaggctgcgcacaacctggcgctgagtattgatgaacgcctgcaggcgctggtttatcgcgaactgaacaatgcggtggcctttaacaaggctgaatctggtagcgccgtgctggtggatgtcaacaccggtgaagtgctggcgatggctaacagcccgtcatacaaccctaacaatctgagcggcacgccgaaagaggcgatgcgtaaccgtaccatcaccgacgtgtttgaacctggctcaacggttaaaccgatggtggtgatgaccgcgttgcaacgtggcgtggtgcgggaaaactcggtactcaataccattccttatcgaattaacggccacgaaatcaaagacgtggcacgcatcacgaccgaggaagactttaatcatgcgagtgcagctcgattcgtatgcgctgccgccgaaagagcgttgcaaaaccaccattaacctggtgccggaaaacgaagtgctgaacgtgctggaaggcgaaaatgctgaaaccaacgcgctgcgcgcaaaacgtagttgcccgaaatgcggcacggcgatggacagatatctcatcgatccgaaacgtatgttgcgtggatgaggcaataacccaacctgcgacggttaccagatcgaacagggcgaattccgcattaaaggttatgacggcccgatcgttgagtgtgaaaaatgtggctctgaaatgcacctgaaaatggggcgtttcggtaaatacatggcctgcaccaacgaagagtgtaaaaacacacgtaagattttacgtaacggcgaagtggcaccaccgaaagaagatccggtgccattacctgagctgccgtgcgaaaaatcagatgcttatttcgtgctgcgtgacggtgctgccgttgccgcaaggttcaacgatgatcgccaccgacgtggcctcgccgttctttacgccgatcaagctgacctttatggtgtcgctgattctgtcagcgccggtgattctctatcag

SEQ ID NO: 30269 - DNA, 1794 bp, Homo sapiens
  SIMILAR (28)..(774): 941254mologous to Escherichia coli alternate gene name srlQ,accession number U29579,Smith-Waterman Score=1161.
atgcgccgcaacgcttgccagtaccgcactccggcggttgtggccagccggcagaagcgctggcacggcgatctggggatgatcggaagccgcgatgtgatgctgtttatctcggactccgttggcgcgaaggaactggatctgattattccgcgtctggaagataaatctatcgcgctgctggcgatgaccggcaaaccgacgtcaccgctgggcctggcggcaaaagcggtgctggatatctccgtagaacgcgaagcctgcccgatgcaccttgcgccgacctccagcaccgtcaataccctgatgatgggtgacgcgctggcgatggcggtcatgcaggcgcgcggatttaatgaagaagattttgcccgctcccacccagccggggcactgggcgctcgcttgctgaataaagtgcatcatctgatgcgccgtgacgatgccatcccacaggtggcgttaaccgccagcgtgatggatgcgatgctggaactcagccgcaccggtctggggctggtggcggtatgtgacgctcaacaacaggtacaaggcgtctttaccgacggcgatttacgtcgctggctggttggcggcggcgcactcaccacgccagtcaatgaagcgatgacggtcggcggcaccacgttgcaatcgcaaagtcgcgccatcgacgccaaagagatcctgatgaagcgcaaaatcactgccgcaccggtggtggatgaaaacgggaaactcaccggcgcaataaaactgcaggatttctatcaagggcggggattatttaatccttcaatccccagagtttcgacagccgatgcaggtttggctaacagggcacgccgcaattgggttggaagttcctggaagcaagttggccagattatactccagggggggccacaaaacgccgagaagtctgggcagcgctacacggtgtcacatgaccgacaccgggacgcagagcgccagcgcgtgaagtcgggactacctcggtacgccgaatgcagcacgtatccgtcatgcccagtggcgctggatctggcgttcgcttcccacggcattcatatgcacgccccgggagaagctttacggatgctcgttacggcgatggataaagcggcggatgcacgcaccaaactggcgcgcctgctggcgaccaaaggcatcacccatgaaatccagatcccggatatctcaaccaaagagaaagcccagcagcccattggcctgaacatggaacaaatcaagcccgagaagcaggacttcatcaaaccggtgatcccgcaggccggaaaacacaatggagtgaatatgagcgtattacgttcgttattaactgccggggtgctggcgtcgggcctgttgtggagcctgaacggaattaccgctacccctgcggcgcaggcatctgatgatcgctacgaagttacccagcagcgtaacccggatgccgcctgtctggactgtcataaaccagataccgaagctgtccctcctgttcagctactgacggggtggtgcgtaacggcaaaagcaccgccggacatcagcgctatctctgctctcactgccgtaaaacatggcaactgcagttcacttacaccgcttctcaacccgccgggcagtgacgtcatcgtctgcgcggaactggacgaacagtggggctatgtcggggctaaatcgcgccagcgctggctgttttacgcgtatgcacagtctccgcgcacgacgcgttgttgcgcacgtattcggctgcacgcactatggcgacgctggggcgtcttatga

SEQ ID NO: 30270 - DNA, 3255 bp, Homo sapiens; identical to SEQ ID NO: 15733
  SIMILAR (1291)..(1698): 451254mologous to Escherichia coli dihydroxybenzoic acid- activating enzyme,accession number X15058,Smith-Waterman Score=218.

SEQ ID NO: 30271 - DNA, 945 bp, Homo sapiens
  SIMILAR (1)..(339): 1001254mologous to Escherichia coli upgQ protein (AA 1- 247),accession number X14437,Smith-Waterman Score=586.
atggtggcgctggcggcacgcgagctgtgggccggtatgacgccgccgctgctgtcatcgtttgagattgatgctttagaagctgcacaacaggcggcaccggaactgccgcgcggtttgttgctggatgagtggcgcgacgactggcgcgaactgaccgcgcggctgggctgcgtctctattcatctcaatcataagttactcaataaagcgcgagtgatgcagttgaaagacgccggactgcggattctggtttataccgtcaataaaccccagcgcgcagcagagttgctgcgctggggtgtggattgcatctgtaccgatgcgattgacgtgattgcatatgctgctgattcaacgaactatccggattacggttgctgtttaacatcccgccgttggtgttgggcagcatttgctgccgggcgggatttcgctcccccggctgtgactgcaacacccgctgagaattattgtttatctggttttctaaatgctgctgttgcaactgagtttgcgttttcagttgctgattcagcatccctttttgctggatttgctgagtctgcatctgggtttgcatccgctgctggctgggtatctgataccccggctggaagttgttttagcgccgccgccgcgcctcctgcgccgcccgtctcgtatggtgtggaggaagatgtcttccacccggtacgcgcgaaacagggaatggtagcgtctgtggacgccactgccactcaggtgggggtggatattctcaaggagggcgggaatgccgttgatgccgccgtggcggtgggctacgcgctggcggtaacgcatccgcaggcagggaatctgggcggtggtggttttatgttaatccgctcgaaaaatggcataccacggctatcgatttccgcgaaatggaacctgcaagcgacccggatatgtcctcgatga

SEQ ID NO: 30272 - DNA, 7437 bp, Homo sapiens
  SIMILAR (2266)..(2943): 761254mologous to Vibrio cholerae carbamoyl-phosphate synthase, large subunit,accession number AE004309,Smith-Waterman Score=865.
atgaacatcgacgaaacgctgattgaagcggcgatcaccgacaaaacgcgcgttatcgtgccggtccattacgcgggtgtggcctgcgaaatggacaccattatggcgttggcgaaaaagcataatttgtttgtggtagaagatgccgctcaggtcgcagacatgagggcagtgccatgcttgcatgccctgacaggggggggcagggggcagcagcccactgatgtacacacagcagagctatattattctctcgccgaaggagagcgatcgaaacaggcagcagagacagcgaccgtggggcgggaacgttggaacaccccgttgagtaaaagccacacccacataccaatgatatggtacaccgtgaggcgccggcaaaagttgtcaggggcacagagtctcacagaaaggtacgataaaaccatcgcgtgccagtttaaacgcgggctgcacgactttgttcagcggcatggtgccgtatttatccagcgccagcgagaaccgctccgtacccgattccgcctgcggatgcgttaccgccagcgcgtagcccccgcacacgcggcatcaacggcattcaccgccctccttgagaatatccacccccacctgagtggcagtggcgtccacagacgctaccattccctgtttcgcgcgtaccggcgagtaaacttaaaggatatcttcagaggaggatacgcgatgaaacgacttctgattcttacggcactcctgccgtttgtcggctttgcacagcccattaatactctgaacaaccctaaccagccggggtatcagatacccagccagcagcggatgcaaacccagatgcagactcagcaaatccagcaaaaagggatgctgaatcagcaactgaaaacgcaaactcagttgcaacagcagcatttagaaaaccagataaacaataattctcagcgggtgttgcagtcacagccgggggagcgaaatcccgcccggcagcaaatgctgcccaacaccaacggcgggatgttaaacagcaaccgtaatccggatagttcgttgaatcagcagcatatgctgccggagaggagaaacggcgacatgctgaatcagcccagcacgccgcagcctgacattccgttgaaaactattgggcccaacaaaccgcgcggcagttccggtgccgcctgttgtgcagcttctaaagcatcaatctcaaacgatgacagcagcggcggcgtcataccggcccacagctcgcgtgccgccagcgccaccattttgcccgttaatggcccggtgccggtggtgggtttgatttcgatattcgccatcatcccgtgttcgcggcaacgttccgccacctgcgaaagcaacggtagcggctcacctttaaacattttgctgtaccaactgcccgcatccacgcgcagtaaatcctgccagttcagttcacccgcgacgccccagccgttgctccgtgccggtggctctatatgcgcagggcggcagggggatttacccccgttgaaggtaatgcccgtccctacaaagacttttggcgtccacatccgtgtttctccctactgcctgccctcaaacgatttgcgcttaggatgcccacgtcttcagccacgtgatgccttctgcgatcgtcttaaagttcatccgacccacgcggatgccgtgcgcagaagcttgattcagatatggatgttccgcacggcaggtcgaacaccaggtcgcccagacgttaagcagtactggtttgccctgagtcagcacatccgcctgataaaactgccccggattgtccatgattcgagacgaaacttcggcacaggcttgccaatgagcgccgattccagattggtcggatcatccccttcggcattacgcgccagctgccacagcagcgccgcggcaatcgccaggaagataatcaacggaattaacaatactttgcgcttcatacggcctccggcgcagttttttgcggactcacgcgcttacgatagcgaggatcaaacagacacagcagtccgcccaacgccatcatcagcccgcccgcccaaatccagcgaacaaatgctcttcaccgagggccgcgtacaggtcacgcgtgatgccgccgtcaattgccgcttcggtcatcatcgacccggcagtgttgtaataacgtttttccgcatacagcaccgtttccggcttgccatcgcgcgttacgccgatagtcgccacaccgccacgccagttcgggccagtcacctctttgacatcacggaagcgaccggtttcccgattgctaaagtggcggcgaaactggcggtgggttacaccctcgacgaactgatgaacgacatcactggcggacgtactccggcctccttcgagccgtccatcgactatgtggttactaaaattcctcgcttcaacttcgaaaaattcgccggtgctaacgaccgtctgaccactcagatgaaatcggttggcgaagtgatggcgattggtcgcacgcagcaggaatccctgcaaaaagcgctgcgcggcctggaagtcggtgcgactggattcgacccgaaagtgagcctggatgacccggaagcgttaaccaaaatccgtcgcgaactgaaagacgcaggcgcagatcgtatctggtacatcgccgatgcgttccgtgcgggcctgtctgtggacggcgtcttcaacctgaccaacattgaccgctggttcctggtacagattgaagagctggtgcgtctggaagagaaagtggcggaagtgggcatcactggcctgaacgctgacttcctgcgccagctgaaacgcaaaggctttgccgatgcgcgcttggcaaaactggcgggcgtacgcgaagcggaaatccagttcgccaccgacaccgcttacatgtactccacttatgaagaagagtgcgaagcgaatccgtctaccgaccgtgaaaaaatcatggtgcttggcggcggcccgaaccgtatcggtcagggtatcgaattcgactactgttgcgtacacgcctcgctggcgctgcgcgaagacggttacgaaaccattatggttaactgtaacccggaaaccgtctccaccgactacgacacttccgaccgcctctacttcgagccggtaactctggaagatgtgctggaaatcgtgcgtatcgagaagccgaaaggcgttatcgtccagtacggcgctgctggcgtaccggttatcggcaccagcccggatgctatcgaccgtgcagaagaccgtgaacgcttccagcatgcggttgagcgtctgaaactgacacaaccggcgaacgccaccgttaccgctattgaaatggcgcgtagagaagggcgaacgagattggctacccgctggtggtcacgtccgtcttacgtcctccgcggtcgggcgatggcaatcgtctatgacgaagctgacctgcgtcgctacttccagacggcggtcacggtgtatacgatgcgccgtgtgccgcacccgtcctcgatacgcggcgccgttaccatatgtcactcctcccttgtttctgagctccccttcgcctcatcgggcatattcttttcatcccagtttctaaagtgttctcgtgccgtccgggcccttgtccctgttgcgcacaccgccctttgcctggccagttgccacacggtccgccgtctgtatccttttacgtcgtttaaccgaaaacccctgtggagtcccagagtccagcaacatagacttgggggttataaacaccaaactgaagtgtttactgtaattgctcctattaaaactcggggtaccacatgtgacgtccagctgctagcgtcagagaggtggctcccgcggagaacgaccgtcgcgggaaacattggcaagcggttggacccgaaaacgcgcgcggccgtaacaaacgggaccaccagaatttccgcaggacgctggccacggagccgtaaccagggtggaagaaaggccctgcgccgggacacgcaaattccgggcacggctggggtatgctccggcgtcacgtatcccgaggaaaccgagtcggcaagggaacgctggcccagattcaccaatgggcctgacggcgaagtgatcgccattgatgtcaatgatgagcagttaaaactggcacccgaaatgggcgcagatttagcgattaactcacacaccgaagacgccgccaaaattgtgcagaaaacttacggcggtttgttccgcctcgaggtggtgtgtaccgccgttgtcggatatggcgcctgggtatttaggggcgccatcgccgcccccgcttgttatcacccgcccgtgctggtggcccggggacatgccggacgtaagctcactgctgagatggcacgaaattacgatctgattctggcaatggagtcggaacatattgctcaggttaccgcaattgctcccgaggtccgcgggaagacaatgctgtttgggcaatggctggaacagaaagagatcccggatccctatcgtaaaagtcaggacgcatttgaacatgtctacgccgtccactcccacagcttagcaggcgtcttggcattatcttcgcttttctcaagcccggcaggtcgtagtctaggccgtagcagccctaaagcagtatcagcagtcccgcccgacgtcccaccagtcccgttcgccagatggtcaccccgggggataaccatgtcggtggcgatgccaactgtggcatctggcttgacgacccatcggcaaggttatctctattcgcccattgatccgcaaacaaataaaccgtggcccgccatgccacagagttttcataatttatgtcaacgtgcggctacggcggcgggctatccagatttccagccagatgcttgtcttatcaaccgctacgctcctggcgcgaaactgtcgctgcatcaggataaagacgaaccggatctgcgcgcgccaattgtttctgtttctctgggcttacccgcgatttttcaatttggcggcctgaaacgaaatgatccgctcaaacgtttgttgttggaacatggcgatgtggtggtatggggcggtgaatcgcggctgttttatcacggtattcaaccgttgaaagcggggtttcatccactcaccatcgactgccgctacaacctgacattccgtcaggcaggcgcttatgacgatcgtatctggacccgcagcattgttgcctggcctggcgtgcgtcatctggacggtgatgatttctctccggttatcacccaggcgcaacagatgccaggcttcccgtacagcgaaattccgcaccttatcaccgtggattttgttcgccagacgctgcttggcgctgctaatacgctgattagatctgagaaactgggctgcggtgtcaacgatctgccgctgtcgctggtgctctcctggtttgaacagaaagcgatcgtcattctgctgacgctgctttctctgggcgtgaaaaatatcgtcaccggcccgactgcacctggtttcctgacaccagacctgctggcggtgctgaacgagaaattcggcctgcgttctatcaccactgttgaagaagacatgaagcaactgttgagcgcgagtttgtcgatgacgatgccaacgaatcaatgcccgtggcggatgcaggttcatcacattacgcaagaaacgccggatgtgtggacgatttccctgatttgccacgattactacccatatcgcgccgggcaatatgcactggtcagcgtgcgaaactcagcggaaacgctgcgtgcttacaccatttcctccacgccaggcgtgagtgaatatatcaccctgaccgtgcggcggattgatgacggtgtcggctcccagtggctgacgcgcgatgtaaaacgcggtgattatctctggctttcggacgcgatgggggaatttacctgcgacgataaagcagaagataaattcctgttgctggcggcaggctgcggcgtcacgccgattatgtcgatgcgtcgctggcttgcgaagaaccgtcgggatcctctagagtcacctacagcaggcactcccctcgcgcgcccgtgtgcgtcccaactgacggtgctgacgccgggaacacacttctgtgcggacctgagtagaaatatgaccaacagcaaaggccatcgtcagaacggtcagaccgaacgccaacgccacgccggcaaaaccgatgcctattccggaagcctgagtcatgacgtccccgtcaagccggtccaggagctctggtattccgcaaaagcagagtacctggcgggagcgagatatgccgccaacaatatcaatcatatacttgaagaagcgtcacaagcgactcaaacagcggttaacattgccgggaaggaatgcaacctcgaggagcaatatcagcttggcactgaagcagctctgaaacctcacctgcgcacaatcatcattctcaaacagggaatagtctggtgtacatccctgcctgggaatcgggtcctgttgtctcgtattcctgttttcccggacagtaatttactgttggctccagcaatcgacaccgttaatagattacctatcctgctctatcagaaccaatttgcagatacgcgcattttggttacgataagcgatcagcatattcgtggggcacttaatgtacccttgaaaggggtaaggtatgtattacgcgtggcggatgacattattggaccaacgggtgatgtgatgacgcttaatggacattatccctataccgagaagttcatggacgtcacatgtggtaccccaccttgtgttataactagtgcatttcgtagcattgaacctgaattaacagtttatacgtgcttaaaaaaaatagaagcatctttcgaattaatcgaagaaaatggagatcctaaaataacgtctgaaatacagttgttaaaggcaagtggaattctccaaagtttgtatagtgtaggatttgttggtattcgtgataaaaacacctcatcctattcattttgccatgacgggcgaactccagataaaggttttgaaagtaatgagaaattattaattcatccatgttactggcttggtttgaatctaaatcgtaatgcacttgctccagaggaagcagaggagataaatgacgaatatgatattaatattatttcagataattcagccattagaaataaaacaataggtcaaataactactcatctagatcagataccgataggaaatgaaggtgccactgaatttgaacaatggtgtttagacgcactaagaatagtatttgcatcccacctaacagacatcaagtcccatccaaatggtaacgcagttcagagacgagatattataggcaccaatggtggcaaatctgatttttggaaacgagtattggaggactataaaacagacaagttgtttttgatgctaaaaattttgaagaattag

SEQ ID NO: 30273 - DNA, 1122 bp, Homo sapiens
  SIMILAR (141)..(350): 1001254mologous to Escherichia coli K12 putative transport protein,accession number AE000426,Smith-Waterman Score=349.
atggactacccaaccacacagattgtcgtcgcgaaggaacaacatcaatgtcggcggctaatccacatcggttattcagtcacctacaacctgtgcggggcggggttaattatcgcattactggtttacatcgccatgttcgtggaatggtgaaagacattggttctgaacccgacttccggccaatgagcttcagcaaactgttgtacgtgttacttggcagcgtggtgatgatcttcgtatgcgcatggctgatgcacaacgtagaagtcgccaatctggtgctgattgttctctccatcgtcgtcaccatcatcttctttcgtcaggcattcaagctggataaaaccgcggcgcaataaaatgtttgtcgcctttgtcctgatgctcgaagcggtggtgttttacattctctacgcccagatgccaacatcgctgaacttctttgccatcaacaacgtgcatcatgaaattctcggtttttccatcaacccggtcagcttccaggcgcttaacccgttctgggtggtactcgccagcccaatactggcaggcatttacacgcatctgggtaacaaaggcaaagacctctcgatgccgatgaaatttactctcggcatgtttatgtgctcactgggctttttgacggcggcagctgcgggaatgtggtttgcggatgcacaagggctgacatcgccatggtttatcgtgctggtgtacttattccagagcttaggtgaactgtttattagcgcccttggcctggcgatgattgctgccctggtgccgcagcatttgatgggctttattctcgggatgtggttcctgacgcaggctgccgcgttcttgctgggcggctatgtggcaacatttaccgcggtgccggacaacattaccgatccgcttgagacgttgcccgtctataccaacgtgtttgttttacactggcgtacctgcatagatatcaaagcgatgccctttagtgactaccgcgtttggcgtggcgacattcgccagcggtggcgcgtagtccgggcgctttaccaccacgcgtttgtcgccagcaagcgtgcaggctccagtaatccatcggcatcaagatccggtcccaccagcgactga

SEQ ID NO: 30274 - DNA, 1630 bp, Homo sapiens
  SIMILAR (1278)..(1307): 1001254mologous to Escherichia coli K12 putative transport protein,accession number AE000426,Smith-Waterman Score=59.
atgaaacgacttctgattcttacggcactcctgccgtttgtcggctttgcacagcccattaatactctgaacaaccctaaccagccggggtatcagatacccagccagcagcggatgcaaacccagatgcagactcagcaaatccagcaaaaagggatgctgaatcagcaactgaaaacgcaaactcagttgcaacagcagcatttagaaaaccagataaacaataattctcagcggaggatcccagagcaggcttttgtcacttttggtgcttttgctgcgctggtctatggcctcattttcccattggcggcctatgtcggcgaaccacctgctggggaccaaacgcaccattgttcttggagcacttgtgctggcgattggttacttcatgaccggcatgtcgatacttaagcctgtcctgattttcatcgccctggggactatcgctgtcggtaccggcctgtttaaagctaacccagccagattgctttcgaagtgctatccgccgaaagatccgcggcttgatggcgcattcaccctgttctatatgtcgatcaacatcggctcgttgatagcgttatcgctggcccctgtgatcgctgatagattcggttattcagtcacctacaacctgtgcggggcggggttaattatcgcattactggtttacatcgcctgtcgtggaatggtgaaagacattggttctgaacccgacttccggccaatgagcttcagcaaactgttgtacgtgttacttggcagcgtggtgatgatcttcgtatgcgcatggctgatgcacaacgtagaagtcgccaatctggtgctgattgttctctccatcgtcgtcaccatcatcttctttcgtcaggcattcaagctggataaaaccgggcgcaataaaatgtttgtcgcctttgtcctgatgctcgaagcggtggtgttttacattctctacgcccagatgccaacatcgctgaacttctttgccatcaacaacgtgcatcatgaaattctcggtttttccatcaacccggtcagcttccaggcgcttaacccgttctgggtggtactcgccagcccaatactggcaggcatttacacgcatctgggtaacaaaggcaaagacctctcgatgccgatgaaatttactctcggcatgtttatgtgctcactgggctttttgacggcggcagctgcgggaatgtggtttgcggatgcacaagggctgacatcgccatggtttatcgtgctggtgtacttattccagagcttagcatttgatgggctttattctcgggatgtggtcctgacgcagctgcgggtcttgctggcgcatgtgcacattacgggtgcggaacatacgatcgtgaaagtgccgctaccacggttggaaatgtcgtaccgggctgaaaaagtcggcacagcaccagaagacgcgcagagaagcaaccacgaacacaagcccacaagaggcggcacaaccaaacagagagaaaccacagctggaccagtttttatagactcattttctcatctgcaaaatggcattgacatcaccctgcttctctgtggaggtgctcgtgagacaaccgagggctttgcaaagttgcagaaactcaaggcatga

SEQ ID NO: 30275 - DNA, 1716 bp, Homo sapiens; identical to SEQ ID NO: 30102
  SIMILAR (544)..(990): 951254mologous to Escherichia coli K12 putative ATP-binding component of a transport system,accession number AE000313,Smith- Waterman Score=785.

SEQ ID NO: 30276 - DNA, 915 bp, Homo sapiens
  SIMILAR (843)..(475): 1001254mologous to Escherichia coli Phosphotransferase system enzyme II (EC 2.7.1.69) MalX,accession number D90805,Smith- Waterman Score=623.
ctgtaccagtccgaaggtggtaaaggcgtagaaccgctgatgaagatgagctggaactacaagcagccgcacgaaccgcaatctgacgaagtggctaaagagaacaacggctacgcgctggaagatctctatgacgctaatggcgtgcttattgcgaagaaaggtaagcctgttctaccttccaactggaaccgtaacaacatgcgtactagccaatacctgctctccactctcaaggagacacctgccgacgccgaggtgatcagccatcagctgatgctgcgcgccgggatgatccgcaagctggcctccgggttatatacctggctgccgaccggcgtgcgcgttctgaaaaaagtcgaaaacatcgtgcgtgaagagatgaacaacgccggtgcgatcgaggtgtcgatgctggaagatggtcagtgcgccgctgacggtttgaccgcagacttcctgcgtgccgcctgcgccgacaaggcccatcaccagcgaggagataattggtacgaagcgcgtaccgccgaagaatgccagcgcatccggcaggcggatattatggaaacgctcatgcagcatccagacgataataccggcgatcaccgcaccgaggatcccggtatcgatcgactggatcccaagaatgctctggatgttattggctttcagaaccgcggcatccgtggttggcagaatgcctttattggtcaaccagaagtttaccgcgaggttcattaccgcataaccgatgaagccagcgaatgccgctacgcctttattttcgcgtgccaggcccagcgggatggcgatacagaacatgacaggcaggaaactaaaagctgtcggtatctttttcccgcgagcccatcacccagccctttagcgccgtggagatccagaccaggatactga

SEQ ID NO: 30277 - DNA, 624 bp, Homo sapiens; identical to SEQ ID NO: 18180
  SIMILAR (423)..(172): 1001254mologous to Escherichia coli K12 putative enzyme,accession number AE000202,Smith-Waterman Score=428.

SEQ ID NO: 30278 - DNA, 2988 bp, Homo sapiens
  SIMILAR (1381)..(1839): 771254mologous to Escherichia coli O157:H7 proline tRNA synthetase,accession number AE005195,Smith-Waterman Score=548.
tggcgtgtttttaccggcagaaggagagaagctggcgcaggaaagccgcgagcgacatcagatagtcgaaaatttcttgttggtgttgggcgtcagtccggaaatcgcccgtcgcgacgcggaaggcatggagcaccatgttagtgaagagacgctcgacgcttttcgtttgtttacccagaaacacggtgccaaatgagcctgccttttttacgcacgctgcaaggcgatcgtttttttcagttattaattcttgttggtatcggattaagctttttcgtgccctttgcaccgaaatcctggcctgctgctatcgactggcacaccatcatcaccttaagcggcctgatgctgctgaccaaaggtgtggagttaagcggttattttgatgtgctggggcgcaaaatggtgcgccgctttgctacggagcgtcggctggcgatgtttatggtgctggcggcggcgctgctttctacctttctgaccaacgatgtcgcgctgtttattgttgttccgctgactatcacgctaaaaagactgtgtgagatcccggttaatcggctgattatttttgaggcgctggcagtcaacgctggttcgctactgacgccaattggcaacccgcaaaatattcttatctggggacgttctggtctttcgtttgccggatttattgcccaaatggcaccgctggctggcgcaatgatgctgacgctcctgctcctgtgctggtgttgtttccctggaaaggcgatgcaataccatacgggggtgcaaacaccggagtggaaaccgcggctggtgtggagttgtctgggggctgtatatcgtctttctgacggcgctggagttcaaacaagagctgtggggactggtgattgtggcggcaggctttgcgctgctggcacgtcgcgtggtgctcagtgtggactggacgctgctgctggtgtttatggcgatgtttatcgacgtccatttactgacccagcttccagcgttgcaaggcgtgttggcgtaacgagacacctgccgacgccgaggtgatcagccatcagctgatgctgcgcgccgggatgatccgcaagctggcctccgggttatatacctggctgccgaccggcgtgcgcgttctgaaaaaagtcgaaaacatcgtgcgtgaagagatgaacaacgccggtgcgatcgaggtgtcgatgccggtggttcagccagccgatttgtggcaagagagtggtcgttgggaacagtacggtccggaactgctgcgttttgttgaccgtggcgagcgtccgttcgtactcggcccaactcatgaagaagttatcactgacctgattcgtaacgagcttagctcttacaaacagctgccgctgaacttctatcagatccagaccaaggtccgagaccatggcgcgaccgagtttagtcgtcatgcggtccagcgaattcctgatgaaagatgcttactctttccatacttctcaggaatccctgcaggaaacctacgatgcaatgtatgcggcctacagcaaaatcttcagccgcatggggctggatttccgcgccgtacaagccgacaccggttctatcggcggcagcgcctctcacgaattccaggtgctggcgcagagcggtgaagacgatgtggtcttctccgacacctctgactatgcagcgaacattgaactggcagaagctatcgcgccgaaagaaccgcgcgctgctgctacccaggaaatgacgctggttgatacctcggtacctacatggctggctattgacgctgttgtttttcaacctagagtaaaggaacaaggatccccgacaatttataaagcgacggttaatgtggccgatctcgaccgcaaccagtttctcgatgcctctctgacgctggcgcgccatccttcagaaacccaggagcgtatgatgctgcgcttgctggcgtggctgaaatatgctgatgaacgtctgcaatttacccgtggtttgtgtgccgatgatgagccggaagcgtggctgcgtaacgatcacctgggcattgatttgtggattgagctggggctgccggatgagcggcggattaagaaagcctgcacccaggccgcagaagtggcgctgtttacctataatagtcgggcggcgcaaatctggtggcagcaaaatcagagcaaatgtgtgcagtttgccaatctttccgtctggtatctggacgatgaacaactggcgaaagtaagcgcctttgccgatcgtaccatgacgctgcaggcaacgattcatgatggcgtgatctggttatcggatgataaaaataatctggaactgtctgcagtgaactccgttgatcccccggtgcaaatcatctgcgccagtgatgatctgctggtgccaacagcatgttccagtgaacttcatgccgccctgcccgatagccagaaaatggtgatgccctatggcggacacgcctgcaacgtgaccgatcccgaaacgtttaatgctctgttactcaacgggcttgccagcctgttacatcaccgaattgctatgaacgaagccgttagcccaggtgcgcttagcaccctgttcaccgatgcccgcactcacaacggctggcgggagacacccgtcagcgatgagacgttacgggagatttatgccctgatgaaatgggggccgacatcagctaactgttctccggcacggatcgtgtttacccgcacggcagaaggaaaagaacgtctgcgcccggcactttccagcggcaatctgcaaaaaaccctgaccgcgcccgtcaccgctatcgtcgcctgggacagtgaattttatgaacggttaccactactgtttccccacggtgatgcccgcagttggtttacctccagcccacaacttgccgaagaaacagcgtttcgcaacagttccatgcaggcgggctatctgatcgtcgcctgccgggcgctgggacgccggccggcaagtttcctctga

SEQ ID NO: 30279 - DNA, 804 bp, Homo sapiens
  SIMILAR (465)..(803): 451254mologous to Escherichia coli K12 methylmalonyl-CoA mutase (MCM),accession number AE000375,Smith-Waterman Score=180.
atggtcatatcatgccgccacagcgccagcgttgaaagtccggcaaagaatccaacttcaacgccagtgttccggaataatacgcgaggcaagtgccgcaaccacccacgcacggcaattttagttaccaccagcgtaccggatttacgcagtaccgttccgtcgcgcttaattttattgacgcccccatgcaaaaaaaccacaccgccgaatgggcaccgtaccgctggtccgtttggtgatcagctcttcaaccggcaggttggcaaattctggcaggcttccagcgccgcgttggcgttgtttacagtactctgccgcaacacctatatttacccaccaaaaccgtcaatgcgcattatgccgacatcatcgcctggtgttccggacaacatgccgcgatctaatacctcagtatcagcggttaccacatgggtgaagcgggtgccaactgcgtgcacaggcttggtttgcctaccgatttctcagcacgcattgcccgcaacacccagtcatcatccaggaagaatcagaactctgccgcaccgtcgatccactggcggatcctattacattgagtcgctgaccgatcaaatcgtcaaacaagccaagctattatccaacagatcgacgaagccggtggcatggcgaaagcgatcaagcaggtctggcaaaacgaatgatcgaagaggcctcagcgcgcgaacatcgctgatcgaccagggcaagcgtgtcatcgttggtgtcaacaagtacaactggatcccgaagacgaaaccgatgtacttgagatcgacaacgtga

SEQ ID NO: 30280 - DNA, 1547 bp, Homo sapiens
  SIMILAR (199)..(1203): 991254mologous to Escherichia coli K12 methylmalonyl-CoA mutase (MCM),accession number AE000375,Smith-Waterman Score=1664.
atgccaagaaggccagggtaccagtacggcgttatatcgtcgcgagaaagcaagagtagtactgccgcaacactaatattaacccaccacaaccgtcaatgcgcattatcgccgacatcatcgcctggtgttccggcaacatgccgcgatttaataccatcagtatcagcggttaccacatggttgaagcgggtgccaaactgcgtgcagcaggtagcatttacgctcgctgatgggattgagtacatcaaagcagcaatctctgccggactgaaaattgatgacttcgctcctcgcctgtcgttcttcttcggcatcggcatggatctgtttatgaacgtcgccatgttgcgtgcggcacgttatttatggagcgaagcggtcagtggatttggcgcacaggacccgaaatcactggcgctgcgtacccactgccagacctcaggctggagcctgactgaacaggatccgtataacaacgttatccgcaccaccattgaagcgctggctgcgacgctgggcggtactcagtcactgcataccaacgtctttgacgaagcgcttggtttgcctaccgatttctcagcacgcattgcccgcaacacccagatcatcatccaggaagaatcagaactctgccgcaccgtcgatccactggccggatcctattacattgagtcgctgaccgatcaaatcgtcaaacaagccagagctattatccaacagatcgacgaagccggtggcatggcgaaagcgatcgaagcaggtctgccaaaacgaatgatcgaagaggcctcagcgcgcgaacagtcgctgatcgaccagggcaagcgtgtcatcgttggtgtcaacaagtacaaactggatcacgaagacgaaaccgatgtacttgagatcgacaacgtgatggtgcgtaacgagcaaattgcttcgctggaacgcattcgcgccacccgtgatgatgccgccgtaaccgccgcgttgaacgccctgactcacgccgcacagcataacgaaaacctgctggctgccgctgttaatgccgctcgcgttcgcgccaccctgggtgaaatttccgatgcgctggaagtcgctttcgaccgttatctggtgccaagccagtgtgttaccggcgtgattgcgcaaagctatcatcagtctgagaaatcggcctccgagttcgatgccattgttgcgcaaacgagcggtaccgagctgatgtcgagttggcttaccagcccgcccagcaggtgcagcaaggtacttttaccggaaccagagctaccgacgatcgccatcatttcaccttcgccgacgctgaaactgacattgtgcagcacatcggtttgcacactgccttcctgatagcgtttgcacaggttgtcgcattgcaacaggatcttattcataacgtaaagcctcagcgggttgagtggcggcagcgcgccatgaagggtaaagcgtagacagcagcgcgatagccatcgccaccagcgcaataacaatgacctgtaaaggttcgatagccaccggcagcgccgcgccat

SEQ ID NO: 30281 - DNA, 732 bp, Homo sapiens
  SIMILAR (1)..(729): 991254mologous to Escherichia coli Orf 2 downstream of phoQ,accession number D90748,Smith-Waterman Score=1331.
  misc_feature (1)...(732): n = a,t,c or g
atgnaaagcgaagttgacagtcgactggtcagtcaccaggatggcaaatggcaggtcagccacggcccgttcgaaagctacgatcatctcggtgaaaccaactggtcattactggtacaggcagtgaaccactggcatgagccgaccgccgcgctgatgcgaccgttccgtgaactaccggactggcgtattgatgatctgatgatttctttttctgtacccggcggcggcgtcggcccgcatctcgatcagtacgacgtgtttatcattcagggtaccggacgtcgtcgctggcgagtgggcgaaaagctgcaaatgaaacagcactgcccacatccggatctgttacaggtcgatccgttcgaagccatcatcgatgaagagctggagcctggtgatattctttatattccgccaggattcccgcatgaaggctacgcgctggaaaatgcgatgaactattccgtgggctttcgcgcgccaaatacgcgggaactgattagtggatttgccgattatgtgctgcaacgtgaactgggcggcaactactacagcgatccggatgttccacctcgcgctcatcctgcggatgttctgccgcaagagatggataaactgcgtgagatgatgctcgaattgatcaaccagccggaacactttaagcaatggtttggcgagtttatatcccagtcacgtcatgaactggatatcgcgccgccagagccgccttaa

SEQ ID NO: 30282 - DNA, 777 bp, Homo sapiens
  SIMILAR (364)..(447): 671254mologous to Escherichia coli Cytochrome b561,accession number D90743,Smith-Waterman Score=78.
tttgtgttgcaattcattctccgacacgccattttctttctctcgcaaattcgttttggatgcacttatgtcattcacaaatacccctgaacgctatggtgttatatctgcggccttccattggctaagcgcaattattgtctacggcatgtttgctttaggtctgtggatggtcacgctcagttattacgatggctggtatcacaaagcacccgaactgcataaaagcatcggtattttgttaatgatggggctggttattcgcgttctgtggcgtgtcatatctccaccgccgggtccgctgccgagttattcgcccatgactcgtcttgccgcaagagctggacatctcgcattgtaccattgcttttcgccatcggcatcagcggctatctgatctcaactgccgatgtaaaccgatcagcgtttttggctggtcagtggtttatccgtaagatcaacggtcgcaggaagaaatccagcgtttcgtcgatggtttcctgcatatcaatttcggctcccagtccaggcagcggtgggcattgcggatgctcggtttacgagctctacgtcctgatatcctttgccgtagtagctgctactttcgacaaccgaaagcccgcaaacgtaaggatatgcgcacatattcttcggaatccagtcaaataccccaacgggatcgggatattcatcggcggggcttcccacagcggcagacgaatcccattttggcgtgatctcatccatcggagtgatatggatcgcatcaccaagtaa

SEQ ID NO: 30283 - DNA, 737 bp, Homo sapiens
  SIMILAR (1)..(735): 991254mologous to Escherichia coli K12 putative transport system permease protein,accession number AE000413,Smith-Waterman Score=1186.
atggcgtttggtcttggcgctatctggggcgtgttgatccttacttgcctgttgccagtaaaccagctgctgaccgcgctgccggtggatgtattaggtagcctgggggaattaagctcgccggtggtttcagcttttgcactgttcccgctggtggcgattttctaccagtttggctggaagcaaagtctgatcgccgccgtggtggtactgatgacccgtgtggtagtcgtgcgctatttcccacatcttaaccctgaatccatcgaaatctttattggcatggtgatgctgctggggatcgcgataactcacgacctgcgtcatcgtgatgaaaatgacattgatgccagcgggctttcggtgtttgaagaacgcacgtcacggattatcaaaaacttaccctatatcgccatcgtgggagcattgattgccgccgttgccagcatgaagatttttgctggcagtgaagtgtcgatcttcacactggagaaagcatattccgcaggcgtaacgccggaacaatcgcaaacgctgattaatcaggcggctttggcagaatttatgcgcggactggggtttgtgccgttgattgccaccaccgcgttagcaacgggtgtgtatgcagttgcgggctttacctttgtttatgcggtggactatctctcgccgaatccgatggttgcagcggtattaggcgcagtggttatttagaaggaagtcttgctgcttcgttc

SEQ ID NO: 30284 - DNA, 1337 bp, Homo sapiens
  SIMILAR (873)..(1193): 471254mologous to Escherichia coli K12 excinuclease ABC, subunit C; repair of UV damage to DNA,accession number AE000284,Smith-Waterman Score=184.
gtgcaaaagaagttgtctttgccagtattgataccggactccggcgaagttttattacaattgcgcacccgcgatacgacgtatccaccaaaaaagtcacaccggacgaagtatctccagtcacgttaggcgatacctcaccagtaaccgtcgcacgattaacagatattttgtcccggatgtatggaaacctgccaattgagtatggggctgacggagctggctcgggtaactgtggaacaccatgccgtgtcacacccacggagcgccggatggaagtttattccatttcaatatggatgatgacgccctgcgttttccacatgatgggcagcgccagaaacgcgtcatattgtgatggcataacgagcaggcgcttataccttatctggggcatggtcggtgaaaaccaggtctttgatgatatggaccagtggccgttaaagatttgcgctagttgtgggcataaacgaataaggtatgttatgattttaagtgcattttctctcgaaggtaaagttgcggtcgtcatggttgtgatactggactggaaagtggttaacgtcgatttcgtgatgctgaccgaatacgccgctgactcaaaactgcggttgcttacccacccgcttccctggttaacaccttcgggagtggatggcgaaaaacgacaaaactcagttgcgtatttccgaaaccgaaaatatgcccacaagagtcgtcaaaggcgaagatcgcattctgatcaactcaccgaaagtggctacctagatctgcaaccggaaatgagctccgcagagctgaccgaaaaactggttgggccatcaagagcggcaaatacgacaccatcatctgtaactatccgaacgcgacatgatgatcaggtgcttacgcaactcatagtcgtatggaaactgccagccagaatctggagtttgaagaagctgcactattcgcgaccaaattcaggcggtgcgacgcgtcaccgaaaaacaattctttccaataccggcgacgacctcgacgttattggtgtggcgttcgatgcggcatggcttgtgtccacgtattgttcattcgtcagggcaaagtgctcgcagccgcagctatttcccgaaagtgcctggcggtacggaactgagcgagtggtagaaaccttcgtaggccagttctatttacaaggcagccagatgcgaccttaccggaactggcgggacgcaagattaatgttcaaccaaactcgcggcgatagggcgcgttatctgaaactcgcgcgcaccaacgcggcgacggccttaaccagcaaactttcgcagcaatctaccgtacaccgcgactga

SEQ ID NO: 30285 - DNA, 617 bp, Homo sapiens
  SIMILAR (231)..(554): 751254mologous to Homo sapiens homeodomain transcription factor ALX4,accession number AJ279074,Smith-Waterman Score=404.
caataattcctgggatagtcaaccaattggcagatgatcatatggactggggagatatttccatgaacatcatgggccccaatgtttcgggaaatccagttatcaagtattttaattacctgtatacctacaaaatgcctggggatatcaagaactgggtagatgctcatatgaactgtgaagatattgccatgaacttcctggtggccaacgtcacgggaaaagcagttatcaaggaggctggggtgaagaagccccaggaccggtccagctcagacctccccagcccattggagaaggccgactcagagagcaacaagggcaagaagcggcggaaccggaccaccttcaccagctaccagctggaggagctggagaaggtcttccagaagacccactacccagacgtgtatgcgcgggaacagctggccatgaggacagacctcactgaggcccgcgtgcaggctgttattcgccagcgggcagggaacgccaggaaagagacgaaccgggcgcaggttgacgtactggtcgaattcacgacgaaatttcagcagcgaaccccacaacgaaatatggtccggaacggtatccggccaccgacggcaccaaaatag

SEQ ID NO: 30286 - DNA, 1002 bp, Homo sapiens
  SIMILAR (277)..(690): 861254mologous to Escherichia coli thioredoxin reductase,accession number J03762,Smith-Waterman Score=586.
atgtcagcgctaataacatcctccaccccggcccttggtggacgcagcctgcctctctgcgcaggcccggcgggatacaccgctgctgtctacgcggcgcgcgccaacctgcaacctgtgctgattaccggcatggaaaaaggcggccaactgaccaccaccacggaagtggaaaactggcctggcgatccaaacgatctgaccggtccgttattaatggagcgcatgcacgaacatgccaccaagtttgaaactgagatcatttttgatcatatcaacaagaagcctttaaaggccgtgggggtttctgcttgtgcaacctgcgacggtttcttctatcgcaaccagaaaagttcgggtcatcggccggcggcaataccgcgggttaaagaggcgctgtatctgtctaacatcgcttcggaagtgcatctgattcaccgccgtgacggtttccgcgcggaaaaaatcctcattaagcgcctgatggataaagtggagaacggcaacatcattctgcacaccaaccgtacgctggaagaagtgaccggcgatcaaatgggtgtcactggcgttcgtctgcgcgatacgcaaaacagcgataacatcgagtcactcgacgttgccggtctgtttgttgctatcggtcacagcccgaatactgcgattttcgaagggcagctggaactggaaacaatcttaaggaatccccggcccagccccaaattcaaaaacgggctaagctgtttccctgggaaaattgttaccgttccatttccaacaaatataaaccggaaaataaaagacagtctaaaggcagcccccaagtcccagaaagctgactcccctagcatcgactacgcagagctgctgcagcactttgagaaggtccagaacaagcacctggaagtgcggcaccagcggagcgggcgtggggaccacctggaccggagggttgtcttgacaggcctggcacggaggagggcccaccgagtggtcccatga

SEQ ID NO: 30287 - DNA, 4173 bp, Homo sapiens; identical to SEQ ID NO: 1147
  SIMILAR (1224)..(1304): 771254mologous to Escherichia coli phosphoenolpyruvate carboxykinase,accession number U18997,Smith-Waterman Score=98.

SEQ ID NO: 30288 - DNA, 4488 bp, Homo sapiens
  SIMILAR (3987)..(3316): 391254mologous to Escherichia coli 3-isopropylmalate dehydrogenase (EC 1.1.1.85) (b-IPM dehydrogenase) (ImdH) (3-IPM- DH),accession number D90823,Smith-Waterman Score=272.
atggccgtggctgctgctgcgctgtcgttgctgttgttattattaatcttgagtcgaacaaacgagttcgatctcagggtctttatccaaccacagcatgattctggggaagacacttacccctattggtcccagattatcgtcaccatcattattacttgggatcagatggcacctacctcaaagggctaccatgagcagtcaatgatatcatatgcttctcctgagaaggccattagacagctgaatcaatcctacaatgttggcaaaggtccagattaccctgcaggcaaagaaggcctgcatcacatcaaggccgagaatcggctctcgaatgccgttacgtccgctaccagtccgccactaaagaaactgccgctggcgagaaccgcgaacgtggacgtagcggaatatcggcgtgattgcgggtccagatttcgttcctacgccatttttacaggtcacttttttcacttcatcgcccggcatccaacgccaccctggcgcacaaactggcgctgtaactggttttgcagacgaagcccagcacggaaggcggcagcgttggcaaaagcatcagtgaacaaggtgtttttcattcaaccaacgccacagtttgtcatcggccagaccgaagcagcgggcatcaggatcatttcgcagttaccgcttcgcactcacataccaggctacggtgcagcggccttcgctcagccaggcaggcgtgcgatcgccatgacgataaaccgagaaccgcagcggggcaggcagggagatgactttacgcaagcccattcagccatcgccgatagtcatcagtttgccaccggtgatggtgataaatccgtccagacatcgcgttcagcatggtcgagcagcacgatgccacggctgacgttacgccgctcgggtcgtcatcgctggcaaccagcgggcgcacgcagaataggccgcaaaatgcgcgttttcgccatcacgggggccagtttttccccttcaccagcagaatatcaacctcttctgccgtcactcgattatcgtcaatctcgtgtaatcaatacggatggggtggccgccgtgtggtcgtactatggtgcactggtggtcgcgaaagaacgtggcggcattgtgtcagtgtggaactggttaggtactcgggccaccgaacgcgacgggaagcgcgactgcggctcagcaaggactaagttagcaacaagacactcctactgtgcacgacatggtcgcgagcacggccatcatggaattgtgtctgacggcttggttagattcagtttatacatctttagcggaataatccttggttgctgccatcctagttcatattggagtacatctcaggcatgtacggcctggcttttccgatgtgggaaagtttgttcacttgcagctcgaattacgagagtaatgcctgcaggtccagttttcagcgatgcagaaagtcgtattgcagcagccacagaccatcatctggacatttgcggcggtggcacgacccgttcagaaatggcagcgtcaggagatagcgccttgccggaccgcaccaccatcatgaatttcgccacatgctggagcagcatcaactggcccgccaattgttcaagaccacaatcgctggctggccgaagcaggcgtcatgatgactcaaggcaccttgtcgatgccaccatcattgaggcacccagctcgaccaagaacaaagagcacaacgcgatccggagatgcatcagaccaagaaaggcaatcagtggcacttggcatgaaggcccacattggtgtcgatgccaagagtggcctgacccacgcctggtcaccaccgcggccaacgagcatgacttcaatcagctgggtaactgctgcatggagaggagcaatttgtctcagccgatgccggctaccaagggcgccacagcgcgaggagctggccgaggtggatgtggactggctgatcccgagcgccccggcaagcatcgcgtgctggtacacgacatccgcaacgcagagcgagtgtgtccacgcacacccgtgagcgcgtcccacttcgtcgtaccacactcggccctggacgatcccagctcacccgagcttgatatcgccacacggtctcgctactccccacgctgttcctggtgctcgacaacggtccacgccccggtccagtctcttccgtcactgcgacgtgcgaccaacgcatccacctgcatcccggccatcgggtcagctctcggagctggcactactgcccctcgagagctccgcgccctcactgacggccgacgacttctaatgtcgcactcgcggcggccacggcggaacacatcggcacgttccgcgcttcatacggccccagacctaaactttccagtgccagacgcccggtttcagcgcaccttcgaaggtttcacgctccggcttttcaacgcctgccgacgcaaacgaattagaagattgctcaaggcgattgaggatcaccgcagaatcggcgttgctgccatcgacagcgccaccgccaggtgcttgccagcggtacaccgcaggaactggttgagaaacgcggagccccagtctggaagaggcatttatcgcctatttgcaggaagcggcagggcaagcaacgaagccgaagcgccgcccgtggtacacgacaccacccacgcgcgcgtcagggatttagcctgcgccgtctgtttagctacagccgccgcgaacgctggaactgcgacgcgatccagtacgttcgacgctggcgctgatgggacggtgatcctgatgctgataatgggttacggcatcagtatggatgtggaaacctgcgctttgcggtgctcgaccgcgaccagaccgtcagtagccagcgtggacactcaacctctccggttcccgttactttatcgaacagccgccctcaccagttatgacgagcttgatcgtcggatgcgtgcgggcgatatcaggtggcgattgagatcccgcccaatttcgggcgcgatatcgcgcgtggtcgcctgtggaactcggcgtctggatcgacggagcgatgccgagccgtgcgaaacggtaaaaggttacgtgcaggccatgcaccagagctggttacaggttgacgccaaatacccggtcagaaaggtactgggtaaaaagaccattgccatcaacgacatttataggtacgacgagctaaattttcctgcatcacctgagcgatttcatcgccatcacgccagtccgtgctatacaggcgtcgatttcgtcaaggccgccccaaggcgatcggcaatatcctgcatccgacggcgttggtgttttcggcccgtgagcaatacttcttcaattgctgccagaataccgttatgcgcttgctggaaacgctatcgccattgccgagaaaatcgagcatcattgccccggcccaaatcgtgcgatagggttagcaatatttttcccgtagatatccggcgcggaaccgtgacaggctcgaagagcgacgggaaagtgcgttccggattcaggttggcggtggggcaatgccaatggtgccggtgcaggccgggccaagatcggaaaggtatcgccaaacaaattggacgccaccaccacatcgaatcgttccggctgatcacaaaacgcgcgcagagaatatcaatatgctgcttgtcccagcggactccggtacggctgctgatggctaaaccgttcgatttagtggcagaagtcagtgtcttacggacgggctttgcgcaagttcgaaggcataacgcaaaatgcgatcgacacacggcgggtaaataccgattcttgaatgacgacttcatgctctgtacctcattcactctaccgccgagcgaggaatattcgccttcggtgttttccctaccacgtaaaaatcgatgtcgccaggctgttttcccgccagcgggcaggaacgccaggaaagagacgaaccgggcgcaggttgacgtactggtcgaatcacgacgaaatttcagcagcgaaccccacaacgaaatatgcagttttgccatgcggcacaccaacccttcacctaaggcggtcgggccaaggctttcacggcgatacactcttccagaaattgctcagtactggaaattttccccagagcagcaagacttgagtcaacgcgtggatggcctcttcacggctggtaaagcgcgcattcgacacaacgcatcgcggatgaatttatcgggcataatggttaaattcgtattaatgagtactaaaaatgggacacaagcccttataccggcagattgccgatcgcatcgtgaacaaattgcgcgtggcagcttaaacctggcgatgcgttacccacgaatcagcgctacaaacagagtttggcgtcacgggttacggctttcgcgaagcaacgcaagggatcgtatgaacatcctgcgtcgcaagatgcctgccgagaagattaacgaaaatctgttcagcgcggcatcatga

SEQ ID NO: 30289 - DNA, 3822 bp, Homo sapiens
  SIMILAR (1)..(951): 901254mologous to Bacteriophage N15 gp4,accession number AF064539,Smith-Waterman Score=1521.
atgaaaataccatctttagtgggtcctgacgggaaaacatccctccgggaatacgcggggtatcatggcggcggcggagggtttggtggtcagttgcggggctggaatccaccaagcgaaagtgctgatgcggctcttctgcctaacttctcgcgcggaaatgcccgtgctgacgatctggtcagaaataatggctatgcggcaaacgccgtgcagctccaccaggaccacatcgtcgggtcatttttcagactcagctatcgaccgagctggcgctatcttggcatcaatgaggaggattcacgcgcattttcgcgggatgtagaagccgcctggaacgagtatgccgaggacgacttttgcgggattgatgccgagcgtaagcgaacgtttacgatgatgatccgagaaggtgtggccatgcacgcgtttaacggtgaattatgcacgcaggcgacctgggacagcgattcaacgcgtcttttccgtactcagttcaaaatggtcagtccgaagcgcgtcagcaatccgaataatatcggtgatacccggaactgtcgcgccggtgtgaaaataaatgatagcggtgctgcgctgggatattacgtcagcgacgatggttatcccggctggatggcgcagaactggacctacattcctcgcgaactacccggcggtcgaccttcatttatccatgtattcgaaccgatggaggatggacagacccgtggggccaatgcgttttacagcgtgatggagcagatgaaaatgctcgataccctgcaaaattaccagctccagagcgcgatagtgaaggctatgtatgccgctaccatcgagagtgaactggatacccatcggcgatggacttattctcggcgcggatatacaggagcagagagcaactatcgggctggcccggcgggatacaccgctgctgtctacgcggcgcgcgccaacctgcaacctgtgctgattaccggcatggaaaaaggcggccaactgaccaccaccacggaagtggaaaactggcctggcgatccaaacgatctgaccggtccgttattactggagcgcatgcacgaacatgccaccaagtttgaaactgagatcatttttgatcatatcaacaaggtggatctgcaaaaccgtccgttccgtctgaatggcgataacggcgaatacacttgcgacgcgctgattattgccaccggagcttctgcacgctatctcggcctgacctctgaagaagcctttaaaggccgcggaaaaaatccccttaaacgctggaggctaacgggacacgggacatattctgcaaaccaacgacaccggagcactccgggatcactgatgtacggctgtgagaacggtggaagtacgctccgtcagttagacaaactgaattccttgctggatggcgcgctgaaggcgggtcttaacgaaattcgttctgtgtcgctgggcgtggcgcagccggatgcctataaagacaaagcgcgtaaggcagcgattgataacgcgattcatcaggcgcaggaactggcgaacggctttcatcgtaaactggggccggtatatagcgtgcgctaccatgtttccaactatcagcccagcccaatggtgcggatgatgaaagccgatgccgcgccggtgtccgcccaggaaacttacgagcaggccgctattcagtttgatgatcaggataggctgactgaaacggttaagcggacaaggatgcgggggagggggatggacatttttatttcgaaaaagatgcgcaatttcattttattagcgcaaaccaataatattgcccgggcggcagaaaaaatccatatgacggcttcgccatttggtaaaagcattgccgcgctggaagaacaaattggctatacgctatttacccgcaaagataataatatcagcctcaataaagccggacaggaactgtatcaaaaactgttcccggtttatcaacggctttctgcgattgataatgaaatccataactcagggcgtcgttcacgagaaattgtgatcggcatagataatacttatccgacaattattttcgatcagtcgattagtctcggagataagtatcaaggcgtgaccgcccagccagttgagttcagcgaaaatggcgttatcgataatctttttgaccgccacatgtatctgcacgagttcaggacctggaaacccgactatcatgagtacagcgctgcgataggcttctcgatccacgcccgtcatttcgttatctgcgtggcggcctgcaaaatactgatgataaggcccgtgaccaacgctaccaacaatagcggggcagccagtgccagcgcgactttcatcgcttcagtccccatcatcatgaccgattcaggtgtcattttgcctctcctagctgtaaaagctctgcgccagcgaaccgaccagcaattgccagccatccaccagtacaaacagcatcagtttaaagggcagagcaatggtggctgggggaaccatcatcatccccaatgccatcaacacgctggctatcaccaggtcgataatcaaaaaagggatgaaaatcgtgaagcctatctgaaatgcggttttcaactcgctggtcacgaaaggtgtgcgggaaaccggcattgccaagcaagggatagcggaagaggtggcgaaaaacaggcgagattctacttatataacgtttcgcgagaaaactgggagaaccccggcacggagatccaaattacgcggaccccgggttattaccctttcgcgaaggaatatacacgggactcaccgcgaagccccggtaccggcggatatcttctacaaagcgaaaaatcgctaaccgacttctttgcgccattacgctctgtcccgtcgttgcagattggtcgcctggaagtgatcgatgctcgtttgcaaggtccggactgggcggtgaccgacctcgatctcagcttgcgcaacatgaccttcagtaaagatgactggcagacacaggaaggcaaactgtcgatgaacgctagcgagttcatttatggttcgctgcatttatttgacccgattataaacacggaattttccccgcagggcgtagcgctgcgccagttcaccagccgctgggaagggggtatggtcagaacgtcagggaactggctgcgtgacgggaaaacgttgatccttgatgatgcggcaattgccgggctggaatataccttgccgaaaaactggcaacagttgtggatggaaacgacacccggttggttaaacagcctgcaactgaagagatttagcgccagccgcaatctgatcattgatatcgaccctgacttcccgtggcagctcaccgcgctcgatggttacggtgccaacctgacgctggttaccgatcataaatggggcgtctggagtggctcggcgaatctgaatgccgccgccgcgacattcaatcgtgttgatgttcgtcgcccgtcgctggcgctgaccgccaacagcagcacggtgaatatcagcgaactgagtgcatttactgaaaaaggcattcgggaagccaccgccagtgtatcacaaacgcccacacgtcagacacatatcagcctgaatggacgcggtgtgccggtgacatatttgcaccagtgggatggcctgattaccgtgactgcgaagggatatcagctaccgccaagggaattaagccagtccgttaaccatcgtgggccttcttccgcctccgcccgcccgtgtgtcacacatgtggggtgttcggggaagaatcaggcgcgggagaacatcgcggagaacaccggagcataa

SEQ ID NO: 30290 - DNA, 1866 bp, Homo sapiens; identical to SEQ ID NO: 18344
  SIMILAR (670)..(1317): 981254mologous to Escherichia coli glycolate oxidase subunit, (Fe-S)protein,accession number L43490,Smith-Waterman Score=1109.

SEQ ID NO: 30291 - DNA, 1002 bp, Homo sapiens
  SIMILAR (40)..(711): 951254mologous to Escherichia coli glycolate oxidase subunit, (Fe-S)protein,accession number L43490,Smith-Waterman Score=1104.
  misc_feature (1)...(1002): n = a,t,c or g
atgaatgctagcttttcaggtaccggtaccgcgatcgcgctgcgccataagcgtgggtttaatgttggaaggctgcgccagcctacgctttcgcccaacaccaacgcggcaactgcgcgagtgctggatcgtctggggatcagcgtcatgccagctaacgaagcaggctgttgtggcgcggtggactatcatcttaatgcgcaggagaaagggctggcacgggcgcgcaataatattgatgcctggtggcccgcgattgaagcaggtgccgaggcaattttgcaaaccgccagcggctgcggcgcgtttgtcaaagagtatgggcagatgctgaaaaacgatgcgttatatgccgataaagcacgtcaggtcagtgaactggcggtcgatttagtcgaacttctgcgcgaggaaccgctggaaaaactggcaattcgcggcgataaaaagctggccttccactgtccgtgtaccctacaacatgcgcaaaagctgaacggcgaagtggaaaaagtgttgcttcgtcttggatttaccttaacggacgttcccgacagccatctgtgctgcggttcagcgggaacatatgcgtnaacgcatcccgatctggcacgccagctgcgggataacaaaatgaatgcgctggaaagcggcaaaccggaaatgatcgtcaccgccaacattggttgccagacgcatctggcgagcgccgaagaagaagaaggaggaggagaaggaacaggagaaagaagaggacgggtcggcaccaagacagaacccccactgcaccaccgaaacccaacccaaccaaaccacccccaacgacaagaccggaccgaacagacagacacgacacgcaacaaacagcaccggacaccgcacatggacacggaacaagcaaaaggaaaacgcgaaaacggacacccccggcaccacctgtgcaatacacggcacccactggcaaaaagatcagctagttcacatctatattgctttagataa

SEQ ID NO: 30292 - DNA, 1407 bp, Homo sapiens
  SIMILAR (1)..(594): 1001254mologous to Escherichia coli K12 L-idonate transporter,accession number AE000497,Smith-Waterman Score=1001.
atgatcctcggtttcggggccatgttaggcaagctgatttctgatacgggtgcggcacaacgtatcgccactacgctgattgctacttttggtaaaaaacgcgtgcaatgggcgctagtgatcaccggtctggttgtgggcctcgccatgttttttgaagtgggttttgtcctgctgttgccgttggtatttaccatcgtagcatcatcaggattacccctgttgtatgttggcgtaccaatggtagcagcgctctctgtaacccactgttttctgccgccacatccagggcctactgccatcgcgactatctttgaggctaatctcggaacgactttactgtatggatttatcattaccattccgacagttattgtcgcaggaccgctgttttctaaactgctaactcgctttgagaaagcaccaccggaaggcttatttaatcctcatctgtttagcgaagaggagatgccctccttctggaacagtattttcgctgccgtgatcccggtcatcctgatggctatcgccgccgtttgtgaaattacgttaccgaaaactaacaccgtgcgcctcttctttgaatttgtcggattttcctggcgtaaccaagaagttgaatgccatgttcagttaacagtttgttgcgaccgtgacgagcgaacagttctttcccaacgagttgttccagacgctgcatttgctgacttacggcggactgagtacgacacacagcggcagctgcggcagcaaaagtgttcagatcggcaacagcaacaaatgttctccagcagatcgagctggtcacgccttcgatttattgcaatgcgccggttgacgcccgctggtaagcggaaaatactcgacacattagcgacttatcatgagcaacatcgcgatgaacctggccctgggcgcgaacgtctgcgacgtatggcgttgccaatggaagatgaagcgctggtactgttgctgattgaaaagatgcgcgaaagcggcgacatccacagccatcacggctggctgcatctgccagatcacaagcgggcttcagcgaagagcagcaggccatctggcaaaaagcagagccactgtttggtgacgcaacgtggtgggggtcggcagcgtaccgtgtccccggccctggcccacacaggcacgctagcgccccctccgctccagtgcctcgtgctcgacttccccgcctggcctacccggtccccctgcacgctcctgtggtgcactggcccgaaccacggcaacgcgactgtaacggtcgatgaaccaaccgccggtgaagcgtccaacggtcatccccagggtaaaaccggcataaatcagcgaacaatgggtacatcaatggattcacaggggaatctgagatacagccgaaaagtttcaagttaa

SEQ ID NO: 30293 - DNA, 1046 bp, Homo sapiens
  SIMILAR (549)..(869): 981254mologous to Escherichia coli Excinuclease ABC subunit C,accession number D90832,Smith-Waterman Score=535.
accacttttgcctgcgcaccctggtccggttgccaccgcgttacggggaccgcttggggggcccacggactcagacagtggttgccgtgactcctcgaatggtgccgcaccggaacgcggttgatggaactgcgggcatagccttcttgctccattcgtgcgtccagtaccagagaggcgaggtcatctgctacggcttcgatttttggatctttttcctgatagagaattttcaggtaagtgtcgcagtcatcgcagctttcgacttaatcgcggcctgttcgtcatccacgaacagtaatttgcgttataccggttttcttaaggaaaaattacctttacagttaatgggctatggccccatccgcattccccttgctctgataaggcagttcaccaatgagcggtgccggaagttttttacccagcacatcaatgatttccgcataatgcgccagtcctgggttgattcggttagccacccagccaatgagcggcagccgcagctatttcccgaaagtgcctggcggtacggaactgagcgaggtgaactggcgggacgcaagattaatgttcaaaccaaacctcgcggcgatagggcgcgttatctgaaactcgcgcgcaccaatgcggcgacggccttaaccagcaaactttcgcagcaatctaccgttcaccagcgactgaccgcgcttgccagcgtgttgaaattgccggaagtgaagcggatggagtgctttgacatcagccataccatgggcgaacaaaccgtcgcttcctgtgtggtgtttgatgctaacggcccgctgcgtgcggagtatcggcgctataacattacaggcatcacgccgggcgatgattattgctctggcggctgccttatttttggtgctaccgtaacggtgctgaatctggattctgacgaagaacagacttatcgcatcgttggcgatgacgaagctgactttaaacaaaacctgatttctgtaaactcgcctattgctcgtggcctgatcggcaaagaagaagatgatgttgtggcctga

SEQ ID NO: 30294 - DNA, 1483 bp, Homo sapiens
  SIMILAR (812)..(1108): 971254mologous to Escherichia coli K12 putative transport system permease protein,accession number AE000413,Smith-Waterman Score=468.
atgaatccgaggaaagagactgttaaagatagtcccccttcaccaggggagacagcacttgcttttctctcaccattcttttgcaacaatcctcctgccaaatctggtcccttccccacaggcctgccggatcagcgtcgcctggtgttgcccgatgactggccggaagatatgcatccgctgcgcaaagatgcgatggattatcgactgcgccctgaaccgacgactgattccgaaacgtatccgtttatcaatgagggcaacagcgatgcgcgggtgatccctgtcggcccgctgcatatcacctccgatgaaccgggtcacttccgcttgtttgtggatggcgagcaaattgtcgatgctgattaccgcctgttttatgtccatcgcggcatggagaaactggcagaaacgcggatgggctacaacgaagtgaccttcttatcggaccgcgtgtgtgggatttgcggttttgcccacagtgtggcctataccaattcggttgaaaatgcactggggattgagtttggctggaagcaaagtctgatcgccgccgtggtggtactgatgacccgtgtggtagtcgtgcgctatttcccacatcttaaccctgaatccatcgaaatctttattggcatggtgatgctgctggggatcgcgataactcacgacctgcgtcatcgtgatgaaaatgacattgatgccagcgggctttcggtgtttgaagaacgcacgtcacggattatcaaaaacttaccctatatcgccatcgtgggagcattgattgccgccgttgccagcataacgatcatttgctgtcagagaagtgtcgatcttcacactggagaaagcatattccgcaggcgtaacgccggaacaatcgcaaacgctgattaatcaggcggctctggcagaatttatgcgcggactggggtttgtgccgttgattgccaccaccgcgttagcaacgggtgtgtatgcagttgcgggctttacctttgtttatgcggtggactatctctcgccgaatccgatggttgcagcggtattaggcgcagtggttatttcggcggaagtcttgctgcttcgttcgatcggcaaatggctggacgctacccatcgtgcgctgatatgtcagcgtcggccaggaaccggcttgtgtgaaaacctgtccgaccggggctatccacttcggcaccaagaaggagatgctggagctggcggaacagcgcgtggcgaaactgaaagcgcgtggttacgaacatgctggcgtctacaacccggaaggggtcggtggtacgcacgttatgtacgtgctgcatcacgccgatcagccggagctgtatcacggtctgccgaaagatccgaagatcgacacctcggtaagcctgtggaaaggcgcgttgaaaccgctggcagcggctggctttattgccacttttgccgggttgattttccactacatcggtattggcccgaataa

SEQ ID NO: 30295 - DNA, 4145 bp, Homo sapiens
  SIMILAR (1514)..(1137): 661254mologous to Escherichia coli 3-isopropylmalate dehydrogenase (EC 1.1.1.85) (b-IPM dehydrogenase) (ImdH) (3-IPM- DH),accession number D90823,Smith-Waterman Score=424.
atgatctcagtttcaacttggtggcatgttcgtgcatgcgctccattaataacggaccggtcagtcgtttggatcgccaggccagttttccacttccgtggtggtgccgttcagcatagtcataatctcgccttttgtattgtgaacgttcggcaatctcctcataaaacgggtgaaacgggaggtatcgccgcattgcagcagataattaaaagtgtttgtagctggctgtcattagtgaagcctctaaccgaaagcgtgggatcctgtcgaccatgccgattaaatcgcggtcgcgaatatgcttttgaatcagttccagcagagctatacgccgatgttgcatgatctcatcgtcaggtacgatggtgatatccaccaacagaaaagcttcggctgtacaactgccggccaagttgcggatcggcaaatgtacaggttgaggggtggcaatcaccggaatgcggtaccagagctcgagttcgtaatctgtcgcacagaaagccgattcggggaaaaaacccggccgcgccacaacaacctgtcgggacctacgacggtacaaagtcgagcacagataaccattaagatcggaacccataacccggaccggaacaataaaggtgatgacgcagcaatcacttcttcaattgctgccagaataccgttatgccttgctggaaacgctcatcgccattgccgagaaaatcgagcatcattgcccggcccaaatcgtggcgatagggttagcaatatttttcccgtagatatcggcgcggaaccgtggacaggctcgaagagcgacgggaaagtgcgttccgattcaggttggcggatggggcaatgccaatggtgccggtgcaggccggccaagatcggaaaggatatcgccaaacaaattggacgccaccaccacatgaatcgttccggctgcatcacaaaacgcgcgcagagaatatcaatatgcgcttgtcccagcggatctccgggtaattctcggccattgcttccactcgtcatcccatacggcatgctgatggctaaaccgttcgatttagtggcagagttagtgtcttacgtggacggctttgcgcaagttcgaaggcataacgcaaatgcgatcgacaccacggcggcgaggaatattcgccttcggtgttttccctgaccacgtaaaaatcgatgtcgccaggctgttttcccgccagcgggcagggaacgcctaggaaagagacgaaccgggcgcaggttgacgtactggtcgaattcacgagcgaagatttcagcagcgaaccccacaacgaaatatggtccggaacggtatccggccagccgacggcaccaaaatagatggcgtcgaaacggctaagttgctcatgccagtcgtccggcatcattttaccgtgatggctgtaatactcgcagtctcgcccactccatttgctcaaaactcaaggcgaagccccagcgctcagcggcagcctgtaacaggcgaatccctcaggaaggaccttctattggcaaatcccggtctcccggcgatcgcagcaatacgcatcgtttgcatcattggtaaacagctgctgaccgcgctgccggtggatgtattaggtagcctgggggaattagctcgccggtggtttcagcttttgcactgttcccgctggtggcgatttctaccagtttggctggaagcaaagtctgatcgccgccgtggtggtactgtgacccgtgtgtcgtgcgctatttcccacatcttaaccctgaatcatcgaaatctttattggcatggtgatgctgctggggatcgcgataactccgacctgcgtcatcgtgatgaaaatgacattgatgccagcgggctttcgtgtttgaagaacgcacgtcacggattatcaaaaacttaccctatatcgcatcgtgggagcattgattgccgccgttgccagcatgaagatttttgctgcagtgaagtggtaccagagctcgagttcgatactgtcttcgtgtctggtccccggagtttttccgccgccgcacaacaccctgtaaagcggctctacgctgatcattcggctttaccgcccctgctgccgtcgtcggatttgccgaagggtggatgcacaggccgtcctgcactctatacaaaatggtatcggcagcacctcggcgggctggcaatgatcctcggtttcggggccatgttaggcaagcgatttctgatacggggcctactgccatcgcgactatctttgaggctaatctcggaacgatttactgtatggatttatcattaccattccgacagttattgtcgcaggacgctgttttctaaactgctaactcgctttgagaaagcaccaccggaaggttatttaatcctcatctgtttagcgaagaggagatgccctccttctggacagtattttcgctgccgtgatcccggtcatcctgatggctatcgccgcccatatggttggctttatagtgcgtccgcatgtttgttccatcgctgcacgtcagtcagtgaactggcggtcgatttagtcgaacttctgcgcgaggaaccgcggaaaaactggcaattcgcggcgataaaaagctggccttccactgtccggtaccctacaacatgcgcaaaagctgaacggcgaagtggaaaaaccatctgtgctcggttcagcgggaacatatgcgttaacgcatcccgatctggcacgccagtgcgggataacaaaatgaatgcgctggaaagcggcaaaccggaaatgatgtcaccgccaacattggttgccagacgcatctggcgagcgccggtcgtactctgcgggacgggtgtgggggtgggcactattggtgccggggggttctggtttacgcggcaagatgccagtcctaaacgggggcagggtttggaacaaccgaacagcggacctgacgtcttgatggttgatggcatcagaagtggaagaacgcaagatagggatttataccggtcaggtgattttctaccagccaaacgggaagttagcgagtcaggtttcaggcgcactggcaaagcagctggttggctaataatctcgggtccggaaagcaccaaaccgggtactctggttccagcggcgtgccagaaaacatcgaaccagtcagtcaccgcgcgcgacgcagaaaatgagcgcggcggcaacggtgaccaggacatcaatgtttcaaagaacagaagatctatttctggcagaccttgcgaaatacccggcacttttgcaatttcctcgacgctggcgttacgtaaaccttgcaaaccgcccatatatttcaacaacatttgccgacgttttggcccgacgccttcaatggtttccagggaactggtatttttgaccttcgcccgtttttacggtgcccgccaatcgcgtgatcatgtgattcatcgcgaatatgctgcgccgatactccgcacgcagcgggccgttagcatcaaacacacacaggaagcgacggtttgttcgcccatggtatggctgatgtcaaagcctccatccgcttcacttccggcaatttcaacacgctggcaagcgcggtcgtcgctggtgaacggtagattcgctgcgaaagtttgctggttaaggccgcgccgcattggtgcgcgcgagtttcagataacgcgccctatcgccgcgaagtatacaactcgagctggtaccggagctgtatctgaaacgttggttgtaggcggttttgaacgggtattcgaaatcaaccgtaacttccgaatgaaggcgagcatgtgtttgatttcggcaaaccgtttgaaaaactcaccatgccgaagcaatcaaaaaatatcgtccagaaaccgatatggccgacctggatattttgatgctgctaaagcattagctgaatctatcggtattacggtagaaaaagctgggggttgggacgtattgtcacagagatctttgatgaagtggagaagcacatctgattcagccaacctttattacggaatatccggcagaatgtccccgctggcacgccgtaatgatgttaacccggaaatcaccgaccgtttgaattcttcatcggtggtcgtgaaatcggtaatggttttagcgaataaacgacgcagaagatcaggctga

SEQ ID NO: 30296 - DNA, 669 bp, Homo sapiens
  SIMILAR (1)..(651): 981254mologous to Escherichia coli UmuC protein,accession number M10107,Smith-Waterman Score=1107.
atggggatcaaaaccgttctcgatttggcggatacagatatccggtttatccgtaaacattttaatgtcgtgctcgaaagaacggtgcgtgaactgcgcggcgaaccctgtttgcaactggaagagtttgcaccgacgaagcaggaaattatctgttcccgctcgtttggtgaacgcatcacggattatccgtcgatgcggcaggccatttgtagttacgctgcccgggcggcggaaaaacttcgcagcgagcatcaatattgtcggtttatctccacgtttattaagacgtcaccatttgcgctcaatgaaccttattacggcaatagcgcgtcggtaaaactgctgacgcccactcaggacagcagggatatcattaacgctgctacgcgatctctggatgccatctggcaagcgggccatcgttaccaaaaagcgggcgtgatgctgggggatttcttcagtcagggagtcgcgcagctcaatttattcgatgacaacgcaccgcgccccgggagtgagcaattgatgacggtcatggatacactgaatgctaaagagggcagaggaacactctattttgccgggcaggggatccagcaacaatggcagatgaagcgagccatgctttcaccacgtgtagtacaacgcgaagttctgatttactga

SEQ ID NO: 30297 - DNA, 933 bp, Homo sapiens; identical to SEQ ID NO: 28493
  SIMILAR (127)..(717): 981254mologous to Escherichia coli ORF_f252; was ORF_f87p and ORF_f234p before splice,accession number U28377,Smith-Waterman Score=1001.

SEQ ID NO: 30298 - DNA, 2136 bp, Homo sapiens
  SIMILAR (1492)..(2127): 1001254mologous to Escherichia coli K12 homolog of pectin degrading enzyme 5-keto 4-deoxyuronate isomerase,accession number AE000368,Smith-Waterman Score=1127.
atggtgggctcgcaaatgccgattgctgtctctcatggtgaagggcgcgtggaagtgcgtgatgcggcgcatctggcggcactggaaagcaaagggctggtggcactgcgctatgtcgataacttcggcaaagtcactgaaacctacccggctaacccgaacggttcaccgaacggtattacggcagtcacgactgaaagtggtcgagtcaccattatgatgccgcacccggaacgtgttttccgtactgtcagcaactcctggcatccggaaaactggggcgaggatggcccatggatgcgcattttccgcaatgcgcgtaagcagttgggcatcaggctattcgcgtctgacgagagtaacaccttgaaacgctggcccgtttttccccgctcattacgactactggtaatgctggcatttttgctgattctgctgcccctgttggtgctggcatggcaagcctggcaaagcctgaatgcgcttagcgatcaggcggcgctggttaaccgcactacgcttattgatgcccggcgcagtgaagcgatgaccaacgcggcgctggagatggagcgtagttccgaaaagatcgcaattgttcagcagagctttgaaccggggatgacggtctccctcgttgcccggcaacatggtgtagcagccagccagttatttctctggcgtaagcaataccaggaaggaagtcttactgctgtcgccgccggagaacaggttgttcctgcctctgaacttgctgccgccatgaagcagattaaagaactccagcgcctgctcggcaagaaaacgatggaaaatgaactcctcaaagaagccgttgaatatggacgggcaaaaaagtggatagcgcacgcgcccttattgcccggggatggggaacgaaccgatgactggatggatggccgccgcagtcgtcacactgatgatacggatgtgcttctccgtatacaccatgttatcggagagctgccaacgtatggttatcgtcgggtatgggcgctgcttcgcagacaggcagaacttgatggtatgcctgcgatcaatgccaaacgtgtttaccggatcatgcgccagaatgcgctgttgcttgagcgaaaacctgctgtaccgccatcgaaacgggcacatacaggcagagtggccgtgaaagaaagcaatcagcgatggtgctctgacgggttcgagttctgctgtgataacggagagagactgcgtgtcacgttcgcgctggactgctgtgatcgtgaggcactgcactgggcggtcactaccggcggcttcaacagtgaaacagtacaggacgtcatgctgggagcggtggaacgccgcttcggcaacgatcttccgtcgtctccagtggagtggctgacggataatggttcatgctaccgggctaatgaaacacgccagttcgcccgggatgttggggacttgaaaccgaaagaacacgggcggttgcggagtccggacgaacagagcatccacagtgcgcacgcaaaaacgctggatacccaagggctgcgcaatgaatttttggttgaaaaggtatttgtcgccgatgagtacaccatggtttacagccacattgaccgaattattgttggcggcattatgccgataactaaaacggtttccgttggcggggaagttggtaaacaactcggcgtaagctatttccttgaacgtcgcgagttaggtgttatcaatattggcggtgccggtacgattactgtcgatggccaatgctatgaaatcggtcaccgcgacgccctgtatgttggtaaaggtgcaaaagaagttgtctttgccagtattgataccggcactccggcgaagttttattacaattgcgcacccgcgcatacgacgtatcccaccaaaaaagtcacaccggacgaagtatctccagtcacgttaggcgataacctcaccagtaaccgtcgcacgattaacaaatattttgtcccggatgtactggaaacctgccaattgagtatggggctgacggagctggctccgggtaacttgtggaacaccatgccgtgtcacacccacgagcgccggatggaagtttatttctatttcaatatggatgatgacgcctgcgtgtccacatga

SEQ ID NO: 30299 - DNA, 4017 bp, Homo sapiens; identical to SEQ ID NO: 15777
  SIMILAR (784)..(1617): 971254mologous to Escherichia coli 50k outer membrane protein oprK,accession number D90699,Smith-Waterman Score=1306.

SEQ ID NO: 30300 - DNA, 1335 bp, Homo sapiens
  SIMILAR (1)..(1113): 851254mologous to Escherichia coli K12 putative 2-component sensor protein,accession number AE000342,Smith-Waterman Score=1523.
atgctggcatttttgctgattctgctgcccctgttggtgctggcatggcaagcctggcaaagcctgaatgcgcttagcgatcaggcggcgctggttaaccgcactacgcttattgatgcccggcgcagtgaagcgatgaccaacgcggcgctggagatggagcgtagttaccgtcagtattgcgtgctggacgacccaaccctggcgaaggtttatcaaagccagcgcaagcgttacagcgaaatgctcgatgcccacgcaggcgtgctgccggacgataaactctaccaggcattacgtcaggatttgcacaatctggctcaacttcagtgtaacaacagcggtcccgatgctgccgccgccgcacgtcttgaagcctttgccagtgccaataccgaaatggtacaggccacgcgcacagtggtgttctctcgtgggcagcagcttcagcgtgaaatcgccgaacgtgggcaatattttggttggcaatcgctggtgctatttctggtgagtctggtaatggtactgcttttcacgcggatgataatcgggccggtgaaaaatatcgagcgcatgatcaaccgtctgggggaagggcgttctctgggcaatagcgtctcgttcagtggaccgagcgagttacgctcggttgggcaacgtattctttggttaagtgagcgcctgtcatggctggaatcccaacgccatcaatttttaagacatttatctcatgaattaaaaacgccactggcgagtatgcgcgagggcactgaattactggctgaccaggttgtcggcccgcttacgccagagcaaaaagaggtggtgagcattcttgatagcagcagccgcaatttgcaaaaactgatcgaacaactgcttgattacaaccgtaaacaggcggacacaatggcgaatctacgcaaggttcagcgactggcgcaaagtggcgttctggtggtcagcgatcgcttcccgcaggctgaaatttcgggcttttattatgatggaccggggattggcgtcgaacgtgcgaccgggaaaatcagcatgtttctggcgcagcgcgaacggcgtttataccaacaaatggcgcaatatcgcccggaatcaattattcgcctgggcattgatattgagactgccatctcccgcaagcctgaccatgactatgccgagctgcaggacaaaatcggtgtcatgtcgaagattggctataacggcacaaaaattcttgagattgattccagagcgccctacagcgaagtgctggaacaggcacagaaggcggtttctctggtcgccatcgtttctgaccgccgaagtttaacttaa

SEQ ID NO: 30301 - DNA, 1095 bp, Homo sapiens
  SIMILAR (1002)..(1094): 591254mologous to Escherichia coli K12 molybdate metabolism regulator, third fragment,accession number AE000300,Smith-Waterman Score=75.
  misc_feature (1)...(1095): n = a,t,c or g
atgggcaaaagacatgaacggccacctcacattaaaagcaacaccagtgtcctcatcgtgaaactagacgcccgatcttatcctcgaagcaatgaatctcaacaggaactggtgctccgcaggatggcaggacgcggagacgtggtgctgtcaggctgcccacgcagacagcaagccatgcaggacaccacccacgtcagtacgcatagatccacgcacgcagacatcctaccgagcagaaggcacagacccatgcacgcagcgacgcgacgcatccagggacgcgcactgctgcctactcatcccacacaggtctgcaacgatagctctgggcaccgagtgatcagccaagaatatacacgtatggttactctcttcatggttcagagagcaaagaaaactgtggcctatcctctcgctagtgtactagcagataatgacggacaaggaccatgtttggcccgaagcaaaagcgatgatgaaacgcgggcgaacgatgcggttaaccgctacaaattgctgaaaaaagatgcgcgtaccatcgccgcccagcaggtagcaaggctggaatccgccatgtgcctgcgccgccgctggtcgctggaaaacttccagctcttcctggttgagcatccgctggttcgtcacttaacccgccgtctgatttggggcgtttatagcgccgaaaaccagctactggcttgctttcgcgtagcagaagataacagctccagcaccgctgacgatgatcttttcaccctgccggaaggcgatatctctatcggcactcctcacgttctggaaatatcaccaacggatgctgccgcctttggtcagctttttgccgactacgaactgctaccaccgttccgccagctcgaccgtaacagctacgccctgacagaagccgagcgcaatgcccagtgtaacgntgaccccgctgtggcaggcagaaaatgcccgagtggtcgggtcatggggctggcgaataaaggctggataagggcgaaccacaggatggacctggatccggaggatgatcaacctttgggtcgctggtcgttatcatggaaatcgatgaaggctttgcggtag

SEQ ID NO: 30302 - DNA, 2895 bp, Homo sapiens
  SIMILAR (181)..(1032): 961254mologous to Escherichia coli K12 molybdate metabolism regulator, second fragment 2,accession number AE000300,Smith- Waterman Score=1389.
atgaacatcaacgaccgagcatgctcattatacgccttacaaggctcccccgacgaaagaagcacagtgccccacggcagcaacaggaaccgggcacgggcctgcagcccgccacagccaacggcgcaaccacgacacaacagagacacaccacgacaagcgatgcagaacccgaaccgacagaaagagctcagtggtaccaacgctgggttttggctggcgagtgagctggctcctgccgtcgcccgtgccttcaacaaactgaaaacgctacgcgaaaacgcccgtagctggctgttgaaatacccggaacatgcccttaccggcctgctgcctgcggcgctcggcaaagccggtgaagcacaggataacgcccgcgctgccttgcgtatgcttaccgaaaacggtcatcagccattactgcaagaaatcgcccgacgttataaccagccggaagtaaccgatgcggtgaacgctctgcttgcgctcgatcccttagataatcacccgacaaaaatccccactcttccggccttttatcagccatcgctctggacgcgcccggtattaaaagcaaatgcccaatcactgccagatagcgccctcctccacctcggtgaaatgctccgcttccctcaggaagaggctctgtatccgggattattgcaggtgaaagacgtctgttccgccgactcactggcgggatttgcctgggatctgtttaccgcctggcagaccgctggcgcgccgtcgaaagagagttgggcgttcactgcgttaggcgttctcggtaacgatgacaccgcccgcaaactgacgccattaatacgcgcctggcctggtgaatcccagcataaacgcgccaccgttgggttggatattctcgctgctatcggtagtgatatcgcccttatgcagcttaacggcatcgcccagaaactgaaattcaaagcattacaggagcgggcaaaagaaaaaattgccgacattgccgagagccgcgaactcacggtggcggagcttgaagatcggttcaccgtcagctttgatgaaaccttaaaaccgtttgtgcgtgatgtttccggcagccgcctgaaagacctgcccaaaccgaacaaaagcgatgatgaaacgcgggcgaacgatgcggttaaccgctacaaattgctgaaaaaagatgcgcgtaccatcgccgcaacagcaggtctcggggaagtgtttgccttcctgggctttcggtgccagtggcgtacccggaggcgtggcgaaggcgatgccgccacggataaactggttaaaggtgccggttttcactacgccgccccaatgggtaaagtctggtttatcgttggtttagttgtcagcaggtattatatcgccatagatgctacgaatattattggattctccttatattgctgcgcttttttacataccggaggtaccgagctgagctcagtattatgtcgagatcctgattccacttacggcaaccctggacgatttggacgactggtgacgcagtcaaattcgcgcgggattcgtatcattctcgatatggtgtttaaccatacctctacccaacatgcctggtttcgcgaggcgctgaacaaagaaagcccttaccgccagttttatatctggcgcgatggagaaccagaaacgccaccgaacaactggcgttcaaaatttggcggtagtgcgtggcgctggcatgcggaaagcgaacagtactatttgcatctctttgcaccagaacaggcggatctcaactgggagaatccagcggtacgcgcagagctgaaaaaagtctgtgagttctgggccgatcgtggggtcgacgggttgcgcctggatgtggtgaatctgatctccaaagacccgcgtttccctgaagacctggacggcgacgggcgtcgcttctacaccgacgggccacgagcacacgagtttttgcacgagatgaaccgcgatgtgtttacgccacgcgggttaatgaccgtaggtgaaatgtcctccaccagccttgagcattgccagcgatacgcggctctgacaggcagtgaattgtcgatgacctttaattttcatcacctgaaggtcgattatcccggtggaagaagccctactatgactcaattcccgaagaaaattctggtgacgtgcgcactgccgtacgctaacggctcaatccacctcggccatatgctggagcacatccaggctgatgtctgggtccgttaccagcgaatgcgcggccacgaggtcaacttcatctgcgccgacgatgcccacggtacaccgatcatgctgaaagctcagcagcttggtatcaccccggagcagatgattggcgaaatgagtcaggagcatcagactgatttcgcaggctttaacatcagctatgacaactatcactcgacgcacagcgaagagaaccgccagttgtcagaacttatctactctcgcctgaaagaaaacggttttattaaaaaccgcaccatctctcagctgtacgatccggaaaaaggcatgttcctgccggaccgttttgtgaaaggcacctgcccgaaatgtaaatccccggatcaatacggcgataactgcgaagtctgcggcgcgacctacagcccgactgaactgatcgagccgaaatcggtggtttctggcgctacgccggtaatgcgtgattctgaacacttcttctttgatctgccctctttcagcgaaatgttgcaggcatggacccgcagcggtgcgttgcaggagcaggtggcaaataaaatgcaggagtggtttgaatctggcctgcaacagtgggatatctcccgcgacgccccttacttcggttttgaaattccgaacgcgccgggcaaatattttacgtctggctga

SEQ ID NO: 30303 - DNA, 1215 bp, Homo sapiens; identical to SEQ ID NO: 14956
  SIMILAR (334)..(1212): 981254mologous to Escherichia coli K12 molybdate metabolism regulator, third fragment,accession number AE000300,Smith-Waterman Score=1510.

SEQ ID NO: 30304 - DNA, 2001 bp, Homo sapiens
  SIMILAR (748)..(1332): 661254mologous to Escherichia coli O157:H7 putative regulator (fragment),accession number AE005438,Smith-Waterman Score=689.
atggcacagcttgtgccactgtgcctgtctgtatttaccaaccggtacgttgacttgggcaaacagcctgtgctgtataccccaagctataacatcgcctttggcaggcaccatcccccctattatcgccaagactgtgcgtcaatcagctgcaagcagggccctgccacctgcatctggccctatccaccaacgagtttggcgccagaccttgacattgggcgaactgggctgccgtggattgcgggtacatttatacctaccctttacggcattcttggtgccgggtattaccagcacccggtcatacttggttgcaactcttcaaggaagagcctatatcttcacacattccggagtcgccatactcccgttaatgtattgcaggtgaaagacgtctgttccgccgactcactggcgggatttgcctgggatctgtttaccgcctggcagaccgctggcgcgccgtcgaaagagagttgggcgttcactgcgttaggcgttctcggtaacgatgacaccgcccgcaaactgacgccattaatacgcgcctggcctggtgaatcccagcataaacgcgccaccgttgggttggatattctcgctgctatcggtagtgatatcgcccttatgcagcttaacggcatcgcccagaaactgaaattcaaagcattacaggagcgggcaaaagaaaaaattgccgacattgccgagagccgcgaactcacggtggcggagcttgaagatcggttcaccgtcagctttgatgaaaccttaaaaccgtttgtgcgtgatgtttccggcagccgcctgaaagacctgcccaaaccgaacaaaagcgatgatgaaacgcgggcgaacgatgcggttaaccgctacaaattgctgaaaaaagatgcgcgtaccatcgccgcccagcaggtagcaaggctggaatccgccatgtgcctgcgccgccgctggtcgctggaaaacttccagctcttcctggttgagcatccgctggttcgtcacttaacccgccgtctgatttggggcgtttatagcgccgaaaaccagctactggcttgctttcgcgtagcagaagataacagctccagcaccgctgacgatgatcttttcaccctgccggaaggcgatatctctatcggcactcctcacgttctggaaatatcaccaacggatgctgccgcctttggtcagctttttgccgactacgaactggtaccaccgttccgccagctcgaccgtaacagctacgccctgacagaagccgagcgcaatgccagtgaactgagccgctgggcaggcagaaaatgccgagtggtcgggtcaggggctgggaatacggtggagaagatgatgaaaaagactgccgcaattatttctgcctgtatgctgacttttgccctgagcgcctgttccggttcgaactatgtgatgcacaccaatgacggacgtaccatcgtctctgacggcaaaccacagactgataacgataccgagcctcgccaagttgatcgtcatcaaatcaagtctcttgaggattttttggggctaaaactgttccgccgccgtaatcgttcactcctgctgaccgaggaagggcaaagctatttcctcgatatcaaagagatattttcgcaattaaccgaagcgacgcgtaaactccaggcccgtagcgccaagggggcgttgacggtcagtttactccccagtttcgccattcattggttggttccgcgactttccagctttaattcagcttatccgggaattgacgttcgaatccaggcggttgatcgtcaggaagataagctggcggatgatgttgatgtggcgatattttatggtcggggcaactggccggggctacgggtggaaaaactgtacgccgaatatttattgccggtgtgttcgccgctactgctgactggcgaaaaacccttgaagacgcccacgcgcatgccgcggaaaaaaaaaacagcaaaaacaaagtag

SEQ ID NO: 30305 - DNA, 1281 bp, Homo sapiens
  SIMILAR (707)..(760): 941254mologous to Escherichia coli K12 molybdate metabolism regulator, third fragment,accession number AE000300,Smith-Waterman Score=92.
  misc_feature (1)...(1281): n = a,t,c or g
atgcttaaacggagcgaaaagccccttaccgtttgctatattcggtgtcccaccctcgtcagtcagtgctgggctaaatatcagattgaagcgtggcaacttatttttgaagtcaccgaaagtaatgctctgaccaatgttaagcaggcgcaaatcaccttgcagcatcttcaggaattaggctgccagattgcgattgatgatttcggcaccggctacgccagctatgcgcggcttaaaaatgtgaatgccgatctgcttaaaattgacggcagttttatccgcaatattgtgtcaaatagtctggattatcagatagtggcatcgatttgccacctggcgcgaatgaagaaaatgctggtagtggcagagtacgttgaaaacgaagagatccgcgaggcggtgctctctttggggatcgattatatgcagggttatcttattgtattaagcggcgatttctggtgtactttcttcttcaattttcaaccgccagccagccacgccttcccagtattcttgctccttttccagatcaagcagtaccagcgcattctgactaaaccagtcatgcgggaaacgcagtgtccagtgactgtcatcagtaatcagcgtcaatgttggcgtgatatcgcccttatgcagcttaacggcatcgcccagaaactgaaattcaaagcattacaggagcgggcaaaagaaaaaattgccgacattgccgagagccgcgaactcacggtggcggagcttgaagatcggttcaccgtcagctttgatgaaaccttaaaaccgtttgtgcgtgatgtttccggcagccgcctgaaagacctgcccaaaccgaacaaaagcgatgatgaaacgcgggcgaacgatgcggttaaccgctacaaattgctgaaaaaagatgcgcgtaccatcgccgcccagcaggtagcaaggctggaatccgccatgtgcctgcgccgccgctggtcgctggaaaacttccagctcttcctggttgagcatccgctggttcgtcacttaacccgccgtctgatttggggcgtttatagcgccgaaaaccagctactggcttgctttcgcgtagcagaagataacagctccagcaccgctgacgatgatcttttcannccctgccggaaggcgatatctctatcggcactcctcacgttctggaaatatcaccaacggatgctgccgcctttgtcagcttttgccgactacgaactgctagcgagctggctcacaattgtgtctgtgtgtgctcgaaacaattga

SEQ ID NO: 30306 - DNA, 780 bp, Homo sapiens
  SIMILAR (780)..(247): 821254mologous to Escherichia coli hypE product,accession number X54543,Smith-Waterman Score=719.
atggcttctgtgaccaaagacttatatcacagcacccaagttctttcaaatacttggaaagccttccaaagaaaaatgagtccaaacaaccccaagagtgcggaatcgaagaaagcagattcgcggcaaaaaggcccacggttggagggtccggggggcccccttgtgcctacggggagcccaggctcccggcaaaagagagacaggaaccaacacacaaaagaaactgatacagagaaggccagacacaagacaagaagaggagataacgccccacagagagccgtaaggagcggaaagaaacaaaagaagacacaacagcgtagcgaacctgagcacggttccgctcggtacccagtgaatattcgccggaattgcgcccatgccagcggtgttgataaacagtttatctaccgcgccgcgctgcaccactttagtatcgccagtaacgatggcaatgcctgccgcgcgggcggtttctgccatgctggtcactacggctttcagtgtctccatcggcaatccttcttcgaggataaagccacaggagagatagcgcggaataacgccactgaccgcaacgtcattggctgtgccgcaaatcgccagcttgccgatattaccgccagggaagaacagcgggtcaataacgtaactgtcggtggagaacgccagacggtcgccttccgctaccagctgcgccaaatcaagacgtgcctgatcttcctgctctgccagccacgggttggcaaaggcttccataaacaggctgttgattaa

SEQ ID NO: 30307 - DNA, 858 bp, Homo sapiens
  SIMILAR (1)..(636): 961254mologous to Escherichia coli O157:H7 Z4462 gene product,accession number AE005540,Smith-Waterman Score=1027.
atggtggggctgccgattgccgcggcgctgggggcgttaggtggaaatgccaacgccgggctggaagtgctgaaagacgcaacagcgcaggcaattgccgatgccaaagcactgctggcggcggggaaagtctccgttaagatccaggaaccttgcgatgaaatcctcttctcacgcgccaaagtctggaacggtgagaagtgggcgtgtgtcaccatcgtcggcgggcataccaacattgtgcatatcgagacgcacgatggtgtggtgtttacccagcaggcgtgtgtggcagagggcgagcaagagtctccgctgacggtgctttccagaacgacgctggctgagatcctgaagttcgtcaatgaagtcccgtttgcggcgatccgctttattctcgattccgcgaagctaaattgtgcgttatcgcaggaaggtttgagcggtaagtgggggctgcatattggcgcgacgctggaaaaacagtgcgagcgcggtttgctggcgaaagatctctcttcatccattgtgattcgtaccagcgcggcatccgatgcgcgtatgggcggcgctacgcttccggctatgagtaactccggctcgggtaaccaggggattggtaccgagctgaatgtatcatgtagattcccagccaccaacttgtttgtgcatgatccgacccagcaggctatgcagcgcaatcagcgccggttcgctgtccagacgttccccgtatggcgggttgctcaacactgtgccgtacggccctttcggcagcggattggtcagttgcgcgacatctttcacctcaaaggtgatcagttcaccaatcgccctgcaaagatcgtggcgttttaa

SEQ ID NO: 30308 - DNA, 797 bp, Homo sapiens
  SIMILAR (525)..(797): 781254mologous to Escherichia coli O157:H7 putative AraC-like transcriptional regulator,accession number AE005208,Smith-Waterman Score=390.
atgagcgacgcagaagacggtgcaaggacgaccctggggtcgggtaacgccgttgagcgtctggcagatgctttaagccagcaaaatgttaccgtgattaaatccacctccttggatgatggttttgccattctctcttcaaacgaagccattgactgcctgatgttcagctatcaaatggaacatccggacgaacatcaaaacgtcagactattgatcggtaagcttcatgagcgccaacaaaacgtgccggtcttcctgttgggcgatcgggaaaagccctcgccgcaatggatcgcgacctgctggagcttgtcgatggaattcgcctggatatttggaagataccgccgactttatcgccggagcgcgccgttgccgcgatgacccgctaccgccagcagctgttgccgccactgttcagcgcgctgatgaaatatagtgacatccgagtgaatattcctgggcagcgccaggccaccagggcggcgttggttttgaccaaaacacccgccggacgtttctaccatgactactaccgtttgttgcgtgtcgcttgggttcttcataagacggagtgtagattaatcaactttcctgagacacctatttttggcaactcatttagatatgacattgaagtgtcgaatgaatcaccggatgaagaagtcaaactacgacgtcatcatttagccagatgtatgaagaattttaagacggatatctatttcgtttccacgtttgaaccgtcgacaaaatcggtcgatttgctcacggttgaaacttttgctggtacg

SEQ ID NO: 30309 - DNA, 1624 bp, Homo sapiens
  SIMILAR (344)..(796): 921254mologous to Escherichia coli K12 putative transport system permease protein,accession number AE000392,Smith-Waterman Score=675.
atgcagcaattaatcaacagcctgtttatggaagcctttgccaacccgtggctggcagagcaggaagatcaggcacgtcttgatctggcgcagctggtagcggaaggcgaccgtctggcgttctccaccgacagttacgttattgacccgctgttcttcctggcggtaatatcggcaagctggcgatttggtttttacttcgcgctggcacacattgtggttccgcttggttctatggggatggatgtttacgtggtggaacgcctggggctcgggacaacccattatacgtccgttacccgaccggattcggtaaccagaccattccgggcaatgaatattcgcgtttggcattttgtttgtcaccgtctttttctacgccgtgtcgttcacgctggcgatgggacatgacgaagcggtaaaagcctatgagcagaatatttccgcgctggcgattgccgcacagtttattagcggtgacggcgcagcgtgggtgaaagtggtcagcgtcattctcaatatctttgctgtcatgactgcattctttggcgtctatttaggctttcgcgaagcaacgcaagggatcgtaatgaacatcctgcgtcgcaagatgcctgccgagaagattaacgaaaatctcgttcagcgcggcatcatgattttcgccattttgctggcctggagcgccatcgtactgaacgcaccggtgttgagcttcacctctatctgtagcccgattttcggcatggtttttaatatgtttgattcgactttaaatccgttatggcagcgttacatcctcgccgttcaggaggaagtaaaaccggcgctgggatgtactgaaccgatttcactggcgctggcggcggcggttgctgcggcagaactggaaggtccggttgaacgtgtagaagcctgggtttcgccaaatctgatgaagaacggtctgggcgtcaccgttcccggcacgggaatggtggggctgccgattgcggcggcgctgggggcgttaggtggaaatgccaacgccgggctggaagtgctgaaagacgcaacagcgcaggcaattgccgatgccaaagcactgctggcggcggggaaagtctccgttaagatccaggaaccttgcgatgaaatcctcttctcacgcgccaaagtctggaacggtgagaagtgggcgtgtgtcaccatcgtcggcgggcataccaacattgtgcatatcgagacgcacgatggtgtggtgtttacccagcaggcgtgtgtggcagagggcgagcaagagtctccgctgacggtgctttccagaacgacgctggctgagatagtgggttacacctcgaacgaacctgttatgctgtgcctgatgtcggctatcgaaacaggggtcattttcctgattaatgatggtatcgaccgtggtcttaatctcaggtcgaacttcatcgacaagctccagcaggtcgcgatccattgcggcgagggctttttcccgatcgcccaacaggaagaccggcacgttttgttggcgctcatgaagcttaccgatcaattgtctgacgttttgatgttcgtccggatgttccatttgatagctgaacatcaggcagtcaatggcttcgtttga

SEQ ID NO: 30310 - DNA, 2958 bp, Homo sapiens
  SIMILAR (2544)..(2350): 501254mologous to Escherichia coli O157:H7 phosphoglucomutase,accession number AE005247,Smith-Waterman Score= 147.
atgagcatagagagcaggcactcgttcaccattccaggggtgtttaaagcaaatcggcgctatacgatggctgtagtcagtagcagcaggcgacctgtttgccgttgtggggcggatctcctcaagcagctccatccggcaggagccgtactaacagccgaagtgacgaaaggacgtcagaaccttcggcaaaaaggaggagaccaagaaaaagaagagaagaagaagggtaacaagacccaggagagaaaagagaaagggaacagcacactgacaacagtgaccaatatttcaccgggttcccccgctcatccaaacttgtccgtcatcattttcagcagttgccatcgcccaattcatttcgatgcgttttgcgtccccagctttaagtgtaccggtagtaatgcatgctccccgctcgctacggtcgtagttgttgtcggccgcctatccgtcccatgtattcgtgacctgttatcccgcctcaagtacttatcaaggaccgtcaacagctatagcaggttgtggttggcgatcgatggtttctatggccgtcatgccgttgaagtactgtatcaaaaccaggcgcgctacagcgtctgcttcaactgctggaaccttacctgccaccgaaacgcattgaggttgttatgcaaaaacgggcgatttatccgggtactttcatcccattaccaatggtcatatcgatatcgtgacgcgcgccacgcagatttcgatcacgttattctggcgattgccgccagccccagtaaaaaaccgagtttaccctggaagagcgtgtggcactggcacagcaggcaaccgcgcattggggaacgtggaagtgcgccacataaacgtgcaccatctgtgcttattttgcgcagcaatcagcgtaatacgacgcagcaagcgacggacgaattgacccagtttagcatgaacgcgggatgcctgctgagagtgcgacctaaatgcatgcaagctggcatggcctgctttgttttggctgttgtgtgtgtgccatggtgtggtcctcagtccggccccggccaatgccgttatagcgcgctcctttttactattgtgtacttcctaattctctatcccaatacgtacgtgtgcggcagcttggttagtgtctttcctcgtattggccccttgcggggtgagtgtaggttgctcatcgccgtaggaccgtgctcaagccgcattcgtatttctagtgggattacttcatcccgcagcgtccacttcagccatatactcaacttacatcacgttcgcttcagtccccttcaagctcttgcttaccgtgtccttgcgctgtgtctgcccactaagcccgcgactgattgcatcgcttacccaacattctccgtgccatctaccagggtattccgcataaaagccttacccattatcctcccgccgcccttttcctttcgccccatctaccacatcgtcccacccgccaacggccggatcaggtccactccttatagcttcgcacgcaacggttcgtgtcttctctccaggctctccgttacccgtctcccgctgtctcccatctttgtccgtgtctatccccggcgcacagcagtatgtttttccccgccgttcaacacgcatttaaataaggcagttggtgctggtttgtgctatgccatacgtattcgcatcccgtttcccgcttactccccatgcggttcgggcatgcgggttactagtcgccaaaggcagggtaaagccccaggcaagttcggtatctcgtccgcaatcgcctccgttatggcggttatcaactggcgctgctacgagtttttggtgtactcctccaaatccataagggctcggcagtgtgtccagccgcaggttatcctggcgcacaatgcgtgtattcaggcctcggtggtcgacaactccgggcacacgttcaaatttgctgttgtagtgttcgtccccctgtacttcctcggtccagtcattctctcaatgcattgtccatccgcaatcgtgtgtccacttctctcgctaaaatcggcgctatacgatgggcagttccgtagcgtccaagtccccacctcttctcggcattgtatgcttatgtatctcgaccctacctaccaaccccctacaccaccgtgtcgcccgtcccggctacatcgccgaggctaccaccacggtcctccaattacaatactaaatcggcgctatacggacgtagccatcagcgggaccaccgcccactacggaccctccctggaggtgcccaccacggtcccgtacaaagcgctccaactgggggaccaattcggctcggcgcaccaagagcgtttgccagttctggtagtgttcctgcgggttcttaccggtgacagcggtgatttccgccgcagcagacacatgatgatgccgtctttgtcggtggaccacggcgtgccgcgaaacgcaggaaggaagcccctgcactctcttcgccgccaaagccgaactgccgtcgaacagaccatcgacaaaccatttgaaacctaccgggactttaccagtttacggcccaagtcgttgaccacacggtcgatcatcgcagataaaccagcgttttaccgacggcaacatctttgccccactgcggacgatgtggaacagcaacgccagatcgaacttatcacgcagtgccagcaggcccgccatcgcacctcggaggagcagtccatacggatcgcgccgtctttatcaagtattcgatacgggaaccgcccagcgatcaacgccaagcgtcaggcccgctttctgaatcgcggcaatatcaacgtatcggccagaccttccacgaacggctgcaccagatcctgctctttcactgaccggatgccatcgcttcgtcgagggagatacgcttcacgcctttcagccatcggccagcagtgcgttggccctgtcttccaccacttatag

SEQ ID NO: 30311 - DNA, 670 bp, Homo sapiens
  SIMILAR (520)..(470): 941254mologous to Escherichia coli O157:H7 phosphoglucomutase,accession number AE005247,Smith-Waterman Score= 77.
tccaagtccccacctcttctcggcattgtatgcttatgtatctcgaccctacctaccaaccccctacaccaccgtgtcgcccgtcccggctacatcgccgaggctaccaccacggtcctccaattacaatactaaatcggcgctatacggacgtagccatcagcgggaccaccgcccactacggaccctccctggaggtgcccaccacggtcccgtacaaagcgctccaactgggggaccaattcggctcggcgcaccaagagcgtttgccagttctggtagtgttcctgcgggttcttaccggtgacagcggtgatttccgccgcagcagacacatgatgatgccgtctttgtcggtggaccacggcgtgccgcgaaacgcaggaaggaagcccctgcactctcttcgccgccaaagccgaactgccgtcgaacagaccatcgacaaaccatttgaaacctaccgggactttaccagtttacggcccaagtcgttgaccacacggtcgatcatcgcagataaaccagcgttttaccgacggcaacatctttgccccactgcggacgatgtggaacagcaacgccagatcgaacttatcacgcagtgccagcaggcccgccatcgcacctcggaggagcagtccatacggatcgcgccgtctttatcaag

SEQ ID NO: 30312 - DNA, 1755 bp, Homo sapiens
  SIMILAR (658)..(1143): 1001254mologous to Escherichia coli similar to,accession number D90868,Smith-Waterman Score=810.
atgctggggctgagttcccccggacggcaatggttgggtaaacccattgttgaagtggtcaggcccgccgatttctttaccgaacagattgatgaaaaacgtctggatgtggtggcgaactttaacggtctgagcgttattgccaaccgggaagctattcgttcaggatccagcggcgcggggaccaccaccaccagcctcgcgtttcgtaaaatattcgcgcagttaaatctgcatgcagctgaggtggaaggcgacagttttcaccgttacacccgcccggaaatggacatggcgatccgcaaagcgcgcgacgccgggcggcatatcagctacttcggccccgaggctaacgacttcggcctgctggaacaaaccttcattgaatacgtctgttcgaccgcaacttctgctttggcgggcgaaaacagtgcaggggcttccttcctgcgtttcgacagcactccctggtccaccgacaaagacggcatcatcatgtgtctgctggcggcggaaatcaccgctgtcaccggtaagaacccgcatgaacactacaaccaactggcaaaacgctttggtgcgccgaactacaaccgtttgcaggcagctgcgacttcctcacaaaaagcggcgctgtctaatctgtctccggaaatggaaatggcggtcggtctgtcgcaaatcatctccacgcaactggaggtttcacgcgccgagcagctacgtgaaatggcaaataaggcagagcttcgcgccctgcaaagcaaaattaatccccattttctgtttaacgctctgaacgctatttcatcgtcaatccgtctgaatccggataccgctcgccagttgatctttaatctgtcgcgttatctgcgctataacattgaattaaaagacgatgagcaaatcgatatcaaaaaagagctgtatcaaattaaagactatattgccattgagcaggcccgctttggtgacaagctgacggttatctatgatattgatgaagaggtgaattgctgcattcccagcctgctgatccagccgttggtggagaacgccattgtccacggtattcagccttgcaaaggtaaaggcgttgtcaccatcagcgttgcagagtgcggaaatcgggtacgcattgcgtggtcgatagaaaaacaatccgtcatctttgaaaaagccggtaacagcaccgactccgcactggcagcggtatttgtaccgactggctacgatgaatacaccagctcagcctatagctctctgttggggcagatcgtacagccgtggttctacaatcagttgcgtaccgaagaacaattgggctatgccgtgtttgcgtttccaatgaacgtggggcgtaaagcgggtgaaacttataacattggtgggcacaacaaagagaaaaacatcgatgtagtgctcactatttgtgatttgctggatgaaattgtaccgaaagagaaatcttatcgtgagcaaatcacttatgttgctgatcgtccgggacacgatcgccgctatgctattgaggctgagaagattggtcgcgcgttgggatggaaaccacaggaaacgtttgacagcgggattcgtatatcggtggaatggtacctgtccaatacaaaatgggttgataatcatccaccatgcaaccggggtcattgcttttggattcagatcaataaattcctggcaggtcatatctttagcggattcattggctgccaacgcagattgtgcgttcaccagtga

SEQ ID NO: 30313 - DNA, 700 bp, Homo sapiens
  SIMILAR (82)..(507): 781254mologous to Escherichia coli PTS system, Fructose- specific IIA/FPR component (EIIA-FRU) (Fructose- permease IIA/FPR component) (Phosphotransferase enzyme II, A/FPR component) (EC 2.7.1.69),accession number D90849,Smith-Waterman Score=536.
atgggacacgcggcggaaagttatacgctattgaccattggcgacggtctggtggcacaaattccggcgctggtgatttctaccgccgcgggggtcatcgttacgcgtgtcagcaccgatcaggatgttggcgagcagatggtgaatcagctttccagtaacccaagcgagatctttttgcttgctgaacgggatgcggcaacgttgctggcgctgctgaccagcgatgatgcgccgaccgacgacgtgttaagcgcggagtttgtggtgcgcaatgaacacggcctgcatgctcgtccaggtaccatgctggtcaataccattaaacaatttaacagtgatattaccgtgacaaaccttgatggtaccggcaaaccggcaaacggacgtagtctgatgaaagttgtggcacttggcgttaagaaaggtcatcgcctacgctttaccgcccagggtgcagatgctgaacaggcgctgaaacatatcggcgacgctatcgctgctgggcgcataatgagcagacgtgttgctactatcacccttaatccggcttatgaccttgttggtttctgcccggaaattgaacgcggcgaagtgaacctggtgaaaaccaccggtctgcatgcggcgggtaaaggcatcaacgtggccaaagtattaaaagacctgggaattgatgtcaccgttggcggcttcctgg

SEQ ID NO: 30314 - DNA, 1613 bp, Homo sapiens
  SIMILAR (1048)..(1263): 561254mologous to Escherichia coli HisP-like nucleotide binding protein (phnK),accession number J05260,Smith-Waterman Score =174.
atggtgctgtttccattccagatcccgcggggctgctgtcaacctttatcggcgcgccatattttatctatttgtgagaaagcagagccgttaatttttccatataacggccctgtacgcctggcggataaagcgtttacgcgacaacggatgcccgatgcgacgctggcgcgcttatcgggcctacaaacggccccgaatcgtttgtgccgaaccgtaggccggataaggcgttgcgccgcatccggcagttggagcacaatgcctgatgcgacgcttgacgctcttatcaggcctacaagtctgtgccgaaccgtaggccgtatccggcattcacaaatagagcgccggaaatatcaaccggctcaccccgcgcacctttacgcatcagccaacggctcaacgtcttccggcgtggcgctcgcccagcttgcgcctcgccatacacgccgtgggcatgaaacgcgttcaggcgtaccgaacatcgccgagtcccttgataaacgccgccagttcttcagatgtgttgaaataatccacctggctgtcatctccaaccgtctgtatggggctgaccgtgttctcccatcatgcctttcatccggctctgaagctttggttgtggtggtgctggcgctcaccatttccggagacagcttagacagcgccgcttttgtgcggaagtcgcagctgcctgcaaacggttgtagctcggcgcacaaagcgttttgccagttcgttgtagtgttcctgcgggttcttaccgccgaagctgccgtcgaacagaccatcgacaaaacatttgaaactaccgggacttctaccagtttacggcccaagtcgtttgacaccggtcgatcatcgcagatgaaaccagcgttttaccgacggcaacatctttccccactgcgggagatgctggaacaggtaattgattgccaacggcaggagtggttcggattcatcaaaactggccgaatgacgatacgtggacgcgggggaaattcactacgagaaccgttcgctgtatgcaatgagcgaggccaccgccgtcgcctgctgcgtaccgaatggggcgtggtgcatcagcatccctcgacggcctgcgccgccaggtgtcggcaggcggcaatatcggcgagcgctgatggcgaccggggcacgtcattacggcgatattcgtgccaccgcgagaagtggctggaaaaagtggaaatttcccccaaccggaatgaccacctgccaaccactttttccggcggggcaagtggtgagagtgggttaaccgaccgcgtgctcgacgacccgcatcatccgtataacagctgctggtgtcatcggttttgcagaattgagccggtgccggatgcgcgtaaacgccttatccggcctacaaatgcgctcccccgtattgtcattcttctggatcgccgctatctgcgatcgcgccagcttctacaagatgaaatgaagcgaaagagaagctggtggcgctggggcatcttgcggcagcgttgcccacgaatccgtaacccactttcctcgattaaaggactggcgaaatactttgccggcgcgcgcctgcagggggagaagcgcatcaactggcgcag

SEQ ID NO: 30315 - DNA, 1056 bp, Homo sapiens
  SIMILAR (1)..(1053): 991254mologous to Escherichia coli Phosphoglucomutase (EC 5.4.2.2) (glucose phosphomutase) (pgm),accession number D90708,Smith-Waterman Score=1795.
atggcatccggtcatgtgaaagagcaggatctggtgcagccgttcgtggaaggtctggccgatatcgttgatatggccgcgattcagaaagcgggcctgacgctgggcgttgatccgctgggcggttccggtatcgaatactggaagcgtattggcgagtattacaacctcaacctgactatcgttaacgatcaggtcgatcaaaccttccgctttatgcaccttgataaagacggcgcgatccgtatggactgctcctccgagtgtgcgatggcgggcctgctggcactgcgtgataagttcgatctggcgtttgctaacgacccggattatgaccgtcacggtatcgtcactccggcaggtttgatgaatccgaaccactacctggcggtggcaatcaattacctgttccagcatcgtccgcagtggggcaaagatgttgccgtcggtaaaacgctggtttcatctgcgatgatcgaccgtgtggtcaacgacttgggccgtaaactggtagaagtcccggtaggtttcaaatggtttgtcgatggtctgttcgacggcagcttcggctttggcggcgaagagagtgcaggggcttccttcctgcgtttcgacggcacgccgtggtccaccgacaaagacggcatcatcatgtgtctgctggcggcggaaatcaccgctgtcaccggtaagaacccgcaggaacactacaacgaactggcaaaacgctttggtgcgccgagctacaaccgtttgcaggcagctgcgacttccgcacaaaaagcggcgctgtctaagctgtctccggaaatggtgagcgccagcaccctggcaggtgacccgatcaccgcgcgcctgactgctgctccgggcaacggtgcttctattggcggtctgaaagtgatgactgacaacggctggttcgcctgcgccgtcctgtcaggcacggaagacgcatataagatctactgcgaaagcttcctcggtgaagaacatcgcaagcagattgagaaagaagcggttgagattgttagcgaagttctgaaaaacgcgtaa

SEQ ID NO: 30316 - DNA, 2305 bp, Homo sapiens
  SIMILAR (200)..(1195): 761254mologous to Escherichia coli PTS system, Fructose- specific IIA/FPR component (EIIA-FRU) (Fructose- permease IIA/FPR component) (Phosphotransferase enzyme II, A/FPR component) (EC 2.7.1.69),accession number D90849,Smith-Waterman Score=1169.
atgtgtctgctggcggcggaaatcaccgctgtcaccggtaagaacccgcaggaacactacaacgaactggcaaaacgctttggtgcgccgagctacaaccgtttgcaggcagctgcgacttccgcacaaaaagcggcgctgtctaagctgtctccggaaatgaggctgaatcgtttcaattcagcaagagaggagaactatgttccagttatccgtacaggacatccatccgggcgaaaaggccggagacaaaaagaggcgattcgccaggtcgctgcggcgctggtgcaggccggtaatgtagcagaaggctacgtcaatggcatgctggcgcgcgaacagcaaacctcaacgttcctcggcaatggtattgctattccacacggcactaccgacacccgcgatcaggtgctgaaaaccggcgttcaggtatttcagttcccggaaggcgtccacctggggtgacggtcaggtagcgtacgtggcaatcggtattgctgccagctcggatgaacatctgggcctgctacgccagctgacccacgtactgagcgatgattccgttgctgaacaactgaagtcagcaacaacagcagaagaacttcgcgcattactgatgggcgaaaagcagagtgagcagctgaagctcgacaacgaaatgctgacactggatatcgtcgccagcgatctgctgactcttcaggcgctgaacgctgcgcgtctgaaagaggcgggggcagttgacgccactttcgtcaccaaagccatcaatgaacaaccgctgaatctcggacagggtatctggctgagcgatagcgccgaaggcaatctgcgtagcgcgattgcggtaagccgtgcggcaaatgcttttgatgtggacggcgaaacggcagccatgctggtgagtgtggcgatgaatgacgatcagcccatcgcggttcttaagcgtctcgctgatttattgctcgacaataaagctgaccgcttgctgaaagcggatgcggcaacgttgctggcgctgctgaccagcgatgatgcgccgaccgacgacgtgttaagcgcggagtttgtggtgcgcaatgaacacgggctgcatgctcgtccaggtaacatgctggtcaataccattaaacacttaccaggatattacggggacaacctggatggtcgcagcaaaacgtgtaccacccaaagtggcggccacaagaagactgcaccaaccaccaagagaaaaaaagcatcgtgcacctgtgacaacgcacacgcgggtgatatcaagcagccggcaaaacaagcggtctcttgtgatatcacatggcatgtggcctctggaaaaactccgctgtctagttgtaaaagaatacaagctttccagtcaataatgatcatgacgatgcttgatcatacacatgagtacttgaatgcaaagctgaagtgcttcatgccatctattctgaatttcaaggtactgatcttcacaaccgaaaaagcccaaataaacgaggaaataaagaagggagagcttggaaaccaagagtctatgagctcgaagggagcatgcaaaggctgggcccgctacccaggccctgtgaaccggaatggccgagaatcgcgggctttccttcagccagacaactccaacaagcttctctctgtgatcactaccaaacagacacaaagcagacaatatgatgaagaggcagaggggacgcgagagagcaaaacgataacaaagaatcaagacaagagacaaaacaccacacaacacaacaaaacaacaacacaaacagcgacgcacaccgcacacacgacaccaaccacgagccacccaggccagccggccggcgacgacgccacacaacgcaacgagcggccaccactcaccccacacaccaacccacacccgcaaacggcagccccacacacaacaagaccaccaccccgagccacacgacaccacgcaagccgccgcgcacaacggacacaaacaccgaaaccccgcacgcccacgagacacaccagcgcaaacaacccgcgaacgcagcgcacagaatggccaacagacagcccccagcacacacgcgcgaacaaagacagaagaagccagaaccgaagccaagaaaaacccgccagcacgcgacaaccagagcaaccacagaccccacagccacagacaccagacacaagccagcacagaacagaaaagaaagactaccacaccgcaaccgaaagggacaaacataccgaccacaccaacacagcaccgccagcgcaccccgacgaggaccactcggtagtggtgtaa

SEQ ID NO: 30317 - DNA, 723 bp, Homo sapiens
  SIMILAR (1)..(528): 841254mologous to Escherichia coli Maltose transport system permease protein MalG,accession number D90769,Smith-Waterman Score= 763.
atggcaacaaataaacgcacactcagtcgcatcggtttttactgcgggctggcgctgtttctcatcatcacgctgtttccattttttgtgatgctgatgacctcgttcaagggcgcgaaagaggcgatctcactgcatcctacgctgctgccgcagcagtggacgctggagcattacgtcgacatttttaacccgatgattttcccgtttgtcgactacttccgtaacagtctggtggtgtctgtggtttcatccgtggtggcggtattcctcggcattcttggggcttacgcgctttcccgcctgcgctttaaaggtcggatgaccatcaacgccagcttttacacggtgtatatgttctctggcattttgctggtggtgccgcttttcaaaatcatcaccgcgcttggcatttacgacactgagatggcgctgatcatcaccatgctacttcgacaacatcccgatgagatccgaagaagcggggataatggatggctcaaccggcttgcaaatttcttccggataccgggccgtgcgaaatcccgcgaaatccgggtcgccaagagaataggggggcgggagcacaactggtgggggaaatcccccgggccagataccaccggggggacacacacgccacaccatcactgcgagcgaaggacgaacacaaagcggagagattattacgcaaaaagcacggcgcagagagagcccgagtaa

SEQ ID NO: 30318 - DNA, 2691 bp, Homo sapiens; identical to SEQ ID NO: 24290
  SIMILAR (700)..(1479): 901254mologous to Escherichia coli K12 putative EC 2.1 enzymes,accession number AE000230,Smith-Waterman Score=1255.

SEQ ID NO: 30319 - DNA, 2322 bp, Homo sapiens
  SIMILAR (1918)..(2319): 981254mologous to Escherichia coli paaI,accession number X97452,Smith-Waterman Score=679.
atggtcacggattttgccgatttcggaaccaccatcaaacaggattttcgcctgctggggcaaaccagcgtggaccgcttgctgcaactctctcagggccaggcggtgaagggcaatcagctgttgcccgtctcactggtgaaaagaaaaaccaccctggcgcccaatacgcaaaccgcctctccccgcgcgttggccgattcattaatgcagctggcacgacaggtttcccgactggaaagcgggcaggattttgccgattttcggaaccaccatcaaacaggattttcgcctgctggggcaaaccagcgtggaccgcttgctgcaactctctcagggccaggcggtgaagggcaatcagctgttgcccgtctcactggtgaaaagaaaaaccaccctggcgcccaatacgcaaaccgcctctccccgcgcgttggccgattcattaatgcagctggcacgacaggtttcccgactggaaagcgggcagtgagcgcaacgcaattaatggattttgccgatttcggaaccaccatcaaacaggattttcgcctgctggggcaaaccagcgtggaccgcttgctgcaactctctcagggccaggcggtgaagggcaatcagctgttgcccgtctcactggtgaaaagaaaaaccaccctggcgcccaatacgcaaaccgcctctccccgcgcgttggccgattcattaatgcagctggcacgacaggtttcccgactggaaagcgggcaggattttgccgatttcggaaccaccatcaaacaggattttcgcgtgctggggcaaaccagcgtggaccgcttgctgcaactctctcagggccaggcggtgaagggcaatcagctgttgcccgtctcactggtgaaaagaaaaaccaccctggcgcccaatacgcaaaccgcctctccccgcgcgttggccgattcattaatgcagctggcacgacaggtttcccgactggaaagcgggcaggattttgccgatttcggaaccaccatcaaacaggattttcgcctgctggggcaaaccagcgtggaccgcttgctgcaactctctcagggccaggcggtgaagggcaatcagctgttgcccgtctcactggtgaaaagaaaaaccaccctggcgcccaatacgcaaaccgcctctccccgcgcgttggccgattcattaatgcagctggcacgacaggtttcccgactggaaagcgggcaggattttgccgatttcggaaccaccatcaaacaggattttcgcctgctggggcaaaccagcgtggaccgcttgctgcaactctctcagggccaggcggtgaagggcaatcagctgttgcccgtctcactggtgaaaagaaaaaccaccctggcgcccaatacgcaaaccgcctctccccgcgcgttggccgattcattaatgcagctggcacgacaggtttcccgactggaaagcgggcaggattttgccgatttcggaaccaccatcaaacaggattttcgcctgctggggcaaaccagcgtggaccgcttgctgcaactctctcagggccaggcggtgaagggcaatcagctgttgcccgtctcactggtgaaaagaaaaaccaccctggcgcccaatacgcaaaccgcctctccccgcgcgttggccgattcattaatgcagctggcacgacaggtttcccgactggaaagcgggcatccagtgaccaccattgtctttcacaaggaacagccccctaagtggcttccacgcttcataaattctctaccccaagccactcttcagaaatactgttatcagaaagggatccttatccataccccaagagatggttcttggatgtcgtgccagaaagaatttggggaaacagctatgaccatgattacgaattcgagctcggtaccccaaaatgcccatgcaatgtatgagaacgatgcctgcgccaaagcgcttggcatcgacattatctcaatggatgaaggctttgctgtagtgaccatgaccgtcactgcacaaatgcttaacggtcatcaaagttgccacggcgggcagctattttcactggctgatactgcctttgcctacgcctgcaatagccaggggctggcagccgtcgcttctgcctgcacgattgattttttgcgtccaggctttgccggagacacctcccccgctactgcgcaggtacgtcatcagggcaagcaaaccggtgtttacgacatcgaaattgttaaccaacaacaaaaaacggttgcgctgtttcgcggtaaatctcaccgcatcggcggcaccatcacaggagaagcctga

SEQ ID NO: 30320 - DNA, 2677 bp, Homo sapiens
  SIMILAR (860)..(1672): 981254mologous to Escherichia coli nitrogen regulator I homolog,accession number D90885,Smith-Waterman Score=1332.
atgagtaggggctatggaaatccttggcaggtcaggacttcgagcttcctggggcctttctatatctctttggcgggtggtgtagtattttccccttggtgtatcgttggggggtaccgatgcctcctagtacctgggtcctttcggtctgacctcgtcctgcaacagcagggcaaaacagtgctgcaaattgcagattacccaggaatgctgattttgcgatcggtagcaatgatcatcaatgaagcccttgatttgcttcaaaaaggcgtggcctctgaacaggatatcgataccggcagccgtcttgttgtgaattatccatatggcccacttgcctggggagcgcaacttggctggcagcgaatattaaggctccttgaaaatctacagcatcactatggcgaagaacgctatcgcccatgttcattgctgcgccaacgggcgcttctggagagcggttatgagtcataaggcctggcaaaatgcccatgcaatgtatgagaacgatgcctgcgccaaagcgcttggcatcgacattatctcaatggatgaaggctttgctgtagtgaccatgaccgtcactgcacaaatgcttaacggtcatcaaagttgccacggcgggcagctattttcactggctgatactgcctttgcctacgcctgcaatagccaggggctggcagccgtcgcttctgcctgcacgattgattttttgcgtccaggctttgccggagacaccttaactgctactgcgcaggtacgtcatcagggcaagcaaaccggtgtttacgacatcgaaattgtaaccaacaacaagaaggatccagggccaatcagcgtcagctttgattaccgagggcaccggaaagagattttcgcacaggctatccacaacgccagcccgcgcaacagcaaaccagttattgctattaactgtggcgcatggcccgagcaattgctggagtcggagctgtttgttcatgcgcgtggcgcgtttactggcgctgtcagcaatcgcgaaggtttattccaggcggcggaaggcggaacgctatttctcgatgaaattggcgatatgcctgcgccgttacaggtcaaactgctgcgcgtgttgcaggagcgtaaagtgcgcccgctgggcagtaaccgcgatattgatatcaatgtgcggattatttctgccactcaccgtgatctgccaaaagcgatggcgcgcggggaattccgcgaagatctctattaccgcctcaacgttgtcagcctgaaaattccggcactggcggagcgcacagaagacattccgctactggcaaatcacctgttgcgccaggcggcagagcgacataaaccgtttgtccgcgcgttctctaccgatgcgatgaaacgcctgatgaccgcgagctggccgggtaatgtgcgccagttggtcaacgtgattgaacagtgcgtggcgctgacctcatctccggtgattagtgatgcgctggtggagcaggcgctggagggtgaaaatacggcgctgccaacctttgttgaggcacgtaatcagtttgaactcaactatttgcgtaagctgctgcaaatcaccaaaggcaacgtcacccacgcggcgagaatggcggggcgcaaccggacagaattttataaactgctttcccgacacgagctgatgcaaacaatttcaggaggtaccgcgatttccagcttcaggttttccgatattcggctcacgataaccgtgattcagtcgctaatcacgttcggttggcatcggcgtacacgaactcatgccgcccgtaccgccgcccatcagcaccagtttgccgacgcgctccggccatttaagggtgaacgccacagaactatggccccccatcgagttgcccagcaggtggattttggcgatatccagttgatccaccacgcttttcaggattcgtgcattaagatccgatcgcgaaccactattaacgaccgaatcgctcttgccccaacccggacaatccagcaggatcacccgatagcccgcctctaccagcggatcgatattgcggctgaagttcgcccagccagtagcacccgggccggaaccatgcagcaggacaacggtttcgtcgccttgtccgcagtcattaaaatggatgcgcagcgttttacccgcttcttctacattcagaaaacggctggtggcggcttcggtttgtggctgataactcatcatcttctcctgcatattcagttctctgttctggcgcttaacgagccaaatccggcaatccactccgggattgggcgaaatagcggcaaaagcggcgacccaggttttgatttcatgtgtcgactttccggcaatggcggaaagctcttcgttactgacggcatccagttcctgtatgcgtccctgctccagcaaagtcatgaactggttatcccaaatcgggttgagcggatgcagcgttctctgatcctcaacaacttctcagcggcgctatcacccgtgctggtcagaaatggacgctatcttcggcaaccacgtatggcaaaacatttgcgcaatacttcccgccaggacttgaaataccgtctgtgtagaataaaccatagctatggtgttatctgccgacaacgccatccggagaagccgaatgacgttgtcggagtaagcgctggttaa

SEQ ID NO: 30321 - DNA, 1237 bp, Homo sapiens
  SIMILAR (1)..(924): 961254mologous to Escherichia coli Respiratory nitrate reductase 2 a chain (EC 1.7.99.4),accession number D90787,Smith- Waterman Score=1583.
atggacaaacttggcaatggcggtaaagggatttcgtggaatacccaggatgaaatcgatttcctcggcaaactcaattacaccaagcgtgatggcccggcacaggggcgtccgctgattgacaccgccattgacgcttcagaagtgattctggcactggcaccggaaaccaacggtcatgttgcagtcaaagcgtggcaggcgctgggcgagatcaccgggcgcgaacatacccatctggcgctgcacaaagaggacgagaagattcgctttcgcgatattcaggcgcagccgcgtaaaattatctccagccccacctggtccggtctggaaagcgatcacgtctcctataacgcgggatacaccaacgttcatgagttaattccgtggcgcacgctgtcgggacgccagcagctctatcaggatcatccgtggatgcgtgcttttggtgaaagcctggtggcttatcgcccgcctatcgacacccgtagcgtcagtgagatgcgccagataccgccaaacggcttcccggaaaaagcacttaacttcctgacgccgcaccagaaatggggcattcactcaacctacagtgaaaacctgctaatgctgacgctctctcgcggtggaccgattgtctggatcagcgaaacagatgcccgagaactgaccattgtcgataacgactgggtggaagtattcaacgccaacggcgcgctgactgcccgcgcggtggtcagccaacgtgtaccgccgggcatgaccatgatgtatcacgcccaggaacgcattatgaatattcctggttcggaagtaactggcatgcgcggcggcattcataactcggttacccgcgtttgcccgaaaccaacgcatatattggcggttacgcgcagctggcctgggcttaaatactacggcaccgtcgatcgaaccggaagagtttatatgaccagcgacgtcaacgcatgggcgatggcgaacggctgtgttcgtgtctacagtggcctgatggacatgatgaatgacaacgaaattgaaggcgttctgggccatgaactgggccacgtcgcgttgggtcactcgcttaccgccatcaggaacagattcgcccccggttctttcgccagttttacgcgcagacggtcgataatttgctgcgccgtttcgctgcgttcgtcgagtgaacagcgggatgatgtttatcaccctcaagagtaaccagcaaaatctgctgtga

SEQ ID NO: 30322 - DNA, 906 bp, Homo sapiens
  SIMILAR (337)..(903): 991254mologous to Cloning vector pZC320 SopB,accession number U26464,Smith-Waterman Score=936.
atggtagttgcgaaatcggcaatccctttaatcaaagatagcccagataggtttttcgatatgcttcgtgatctgctcaagaacgttgatcttaaagggttcgagcctgatgtacgtattttgcttaccaaatacagcaatagtaatggctctcagtccccgtggatggaggagcaaattcgggatgcctggggaagcatggttctaaaaaatgttgtacgtgaaacggatgaagttggtaaaggctcgattatgtcagctacggaccgctactctcatcaactcctctacgctaccgtccgccagcgagggtaccgagctcgaattcgtaatcatgtgctccggggtgatagtgttgagaagacctctcgggtatggtcaggtaatgaacgtgaccaggagctgcttactgaggacgcactggatgatctcatcccttcttttctactgactggtcaacagacaccggcgttcggtcgaagagtatctggtgtcatagaaattgccgatgggagtcgccgtcgtaaagctgctgcacttaccgaaagtgattatcgtgttctggttggcgagctggatgatgagcagatggctgcattatccagattgggtaacgattatcgcccaacaagtgcttatgaacgtggtcagcgttatgcaagccgattgcagaatgaatttgctggaaatatttctgcgctggctgatgcggaaaatatttcacgtaagattattacccgctgtatcaacaccgccaaattgcctaaatcagttgttgctcttttttctcaccccggtgaactatctgcccggtcaggtgatgcacttcaaaaagcctttacagataaagaggaattacttaagcagcaggcatctaaccttcatgagcagaaaaagctggggtga

SEQ ID NO: 30323 - DNA, 2865 bp, Homo sapiens; identical to SEQ ID NO: 15928
  SIMILAR (199)..(918): 881254mologous to Escherichia coli yojH,accession number U00008,Smith-Waterman Score=1065.

SEQ ID NO: 30324 - DNA, 825 bp, Homo sapiens
  SIMILAR (374)..(805): 991254mologous to Escherichia coli K12 putative transcriptional regulator,accession number AE000413,Smith-Waterman Score=732.
cgcttgccggggcaagagcttaccgctttcgacttctccgacagtgggacagcccgctctggcagacactggtgccgcatctcgattttgccttgcctccgccgcagaagacgaaacgctgcgtctgaagatgaaagcgattgttgcccgtggcgcaggaacagtgattgtcacgctgggtgaaaacgccagcattgcctgggatggcgcgcagttctggcgtcaggctcctgaaccggtgacggttatcgacaccatgggtgccggagattcgttcattgccggattcctttgcggctggtctgcggggatgacattaccgcaggcgatagcgcagggaacggcgtgcgcggcgaaaaccattcagtaccacgggtcgattatgtcagctacggaccgctactctcatcaactcctctacgctaccgtccgccagcgactgctggatgatatcgcgcagggggtttaccaggccgggcaacagatccctaccgaaaacgagctttgtacacaatataacgtcagccgcattaccattcgcaaagccatcagcgacttagtggcagacggcgtactgatccgctggcagggaaaaggcacctttgtacaaagccagaaagttgaaaacgccctgcttactgtcagtggttttaccgattttggcgtctcacaaggcaaggcgacgaaagagaaagtgatcgaacaggaacgggtcagcgccgcgccgttttgcgaaaagctgaacatccccggaaacagcgaagtgttccatctctgccgggtgatgtatctcgataaagacccccgtgtttattcatagctcat

SEQ ID NO: 30325 - DNA, 783 bp, Homo sapiens
  SIMILAR (310)..(489): 901254mologous to Homo sapiens nuclear factor IV,accession number X57500,Smith-Waterman Score=275.
atgatgatgcaagtaatttcagcagtcgctgaatttgaacgagaccttttacttgaacgcactcattccgggatagtaagagcccgcggcgcagggaaacgttttggtcgacctcctgtgttaaatgaagaacagaaacaggtggctcccgaacgaattaagtcaggtcctcacaatatagttaaatgcgatgtttttgacggtgttttccgcgttaacagcagcgttaacggtgattgtgtgtccatgttaaaccattgccacggagtgggtattagccccaataccgacagtatgcgcgtgtgcacctgcgcttgcagcagtgccggacacttgcctttctcacttggcaaggaagatggaagtggggacagaggagatggcccctttcgcttaggtggccatgggccttcctttccactaaaaggaattaccgaacagcaaaaagaaggtcttgagatagtgaaaatggtgatgatatctttagaagagggaacctttgtggtatgccgagtgcaagaacgatgcgtggaccgaacgatccttcaccgcttctcctctcgtagtaggaatggcgtgcatgacccgaaatctgttggtcgattacgaaggacggttaaaaatacctattttgtaaagttgttctcacatgtgggtattgaagagcttaatagtgtgggtggtgttttaaaggtgacgcatccttacaacaggaaagggcttaccctcttccgcagttctggcttcgaggaggtcaagccctttaaggtggcatcgccctaa

SEQ ID NO: 30326 - DNA, 410 bp, Homo sapiens
  SIMILAR (3)..(371): 941254mologous to Escherichia coli Transposon TN2501 resolvase,accession number D90775,Smith-Waterman Score=570.
gcctgggttgtaatccaatggatatcaggaaaccagtggatcacttgcccgaaacaggtatcagagggcattgcttagcattggggggcattgacctgaccagtccaacaagaaaaatgatgatgcaagtaatttcagcagtcgctgaatttgaacgagaccttttacttgaacgcactcattccggaatagtaagagcccgcggcgcagggaaacgttttggtcgacctcctgtgttaaatgaagaacagaaacaggtggtattcgaacgaattaagtcaggtgtaagtataagtgccattgcccgggaattcaaaacctcgcggcaaaccattttaagagccaaagcaaaacttcagacacctgacataataaaaataatcttcgggggagatgctttaccgttttcc

SEQ ID NO: 30327 - DNA, 840 bp, Homo sapiens
  SIMILAR (1)..(501): 991254mologous to Escherichia coli Transposon TN2501 resolvase,accession number D90775,Smith-Waterman Score=839.
atgtctcgaatttttgcttactgtcggatatcaacgctggatcagaccaccgaaaatcaacgccgggaaatcgaaagtgcaggttttaaaatcaaacctcagcaaataatcgaagaacacattagcggctcagcagcaaccagtgagcgtcctggttttaaccggttgcttgctcgcctgaaatgtggtgatcaattgattgtgacaaaactggatcgccttggttgtaatgcaatggatatcaggaaaacagtggaacaactgaccgaaacaggtatcagagtgcattgcttagcattgggtggcattgacctgaccagtccaacaggaaaaatgatgatgcaagtaatttcagcagtcgctgaatttgaacgagaccttttacttgaacgcactcattccgggatagtaagagcccgcggcgcagggaaacgttttggtcgaccacctgtgttaaatgaagaacagaaacaggcggtattcgaacgaattaagtcaggtgcagtattgctgcttgttgtgtacacgctgatggcggctgaggctcgagtggcaccgaaaggctttctggcaacgttgacactgataaagtgtctcctgggtgtgaactctcaggtgctggttgagatgggcactgaggacaaaagctttgccacacacattacaggatctagtcacctcttggctcacctcctccggtacgagctcgagttgtatactgcctacagtttgaaggtcaagccaagaggctttgctgatggaaggaaagagttggtggtgggaggcaagtggaagacgcagaaagcaactcccaaggccaccttcagggccaatagctaa

SEQ ID NO: 30328 - DNA, 945 bp, Homo sapiens
  SIMILAR (343)..(933): 981254mologous to Escherichia coli 2-oxoglutarate/malate translocator (SODiT1) homolog,accession number D90715,Smith- Waterman Score=987.
atggttcatgatggccagtttgccgcctgctgggagataagccagggctatgaaatgccgattggcttgtatcgtgatctggcggttggcgtagcggaagattgccagaccatcgctggtcgaggctttcacgccgttaatggtgacattgactttcaccacctggatccagacgcggcgttcagcggcaagctgatgcagcgactgctcatctttcagcaacgccccaccggtacagttccatatcctgatgcactgtcaatgaaccatcacccgcagcgggtaacacctgttcgccagccagaatactttcgcgtacccaatggtaggaccgatgaaaatcgcgaaaaaatgctgctcggtgtctttgtgctggcgctgctgggctggattttcagtaagtctctgggggttgatgaatccaccgtggcaatcgttgttatggcaaccatgctgctgctgggtatcgttacctgggaagacgtggttaaaaataaaggcggctggaataccttaatctggtacggcggtattatcggcttaagctccttattatcgaaagttaaattcttcgaatggttagctgaagtctttaaaaataacctggcatttgatggtcacggtaacgttgctttcttcgttattattttcctcagcattatcgtgcgttatttcttcgcttccggtagtgcctatatcgttgctatgttaccggtatttgccatgctggcgaacgtctccggcgcaccgttaatgttaaccgcgctggcactgttgttctccaactcctatggcggcatggttactcactatggcggcgcggcaggtccggtcatctttggcgtgggttataacgatattaaatcctggcggttggtcggtcgagtactgacgatattaaccttcctggtgcatatcaccctcggcgagtggcccctgcattag

SEQ ID NO: 30329 - DNA, 2108 bp, Homo sapiens
  SIMILAR (247)..(1131): 991254mologous to Escherichia coli yehQ,accession number U00007,Smith-Waterman Score=1514.
atgaattgccgatttaacaagcacttttctttgcttttgcgcaaacccgctggcatcaagcgccacacagacgcaacagggactgttaaccggggaagatatgtcctaaaatgccgctcgcgtcgcaaactgacactttatatttgctgtggaaaatatgggaaattgtggggcaaagtgggaataaggggtgaggctggcatgttcccggggagcaacgatagtcaagctggtaccgagctgatttttaatgccggagaatgcttacatcagcttgcggcattaaacagtcgattaaattgcgcacaagagatggcccggcgcgacagtattggtgaagttcctcctgtgccgtggcgcacggtcgttggctctggcattgccggagaagcaaagcttgatcatctgcggctggtgtctttaggtatgcgttgctggcaggatattgagcattatggtttacgcatctggtttaccgatcccgacaccggcagtattttgcacctttcgcgcagttggccgcgaagtgaacaggaaaactcaccggcagctacgcgtcggctgtttagttttcaggctggcgcactggcgggcgggcaaattgtttcacaagcagcaaaacgcagtgccgatggcgagctgctgttagctacccgcaaccgcttaagcagcgttgtgccgctgtcgcctgatgcctggcaaatgttgagcgcgccgttacgccagccgggcattgtggctttgcgggaatatttacgccagcgtccccccgcctgcatacggcctcttaatcaggtcgataacttatttattctgccggtcgctgagtgtatttcgctcggttgggacagcagccgccagacgctggatgcgcaggtcattagcggcgaaggggaagataatgtgctgacgttatcattaccagcctcagccagcgcaccttatgccgttgaacgcatggcggcgcttttgcaacaaacagacgaccccgtgtgtctggtttctggctttgtcagttttgttgaagggcaattgacactggaaccacgggtgatgatgacaaaaacccgtgcctgggcgctggacgcagaaactacgcctgtggcaccgctaccttctgccagcattttgcattccgcactattcgccatcaaatttcattcccgactgtctctaacgattaacctttatgcctggataaagaagtacggtccggattcttccactaataaagaacagtcagatgctcaggccgagatccgccgtctccagaaagagctgaaacgggttaccgacgaacgggacatattaaaaaaagctgctgtagattcaatctgtcaatgcaacacccctttcaattatctctttcggtgttttgaacttcagtgtctttctcgctggggtggatgggcgctggcagccggattgccgggcatcattatgctgctggtcacccccgctggtgaatttacaccatgtatcccaccagaaattaaacaagttggataacaaaaccatcgctaaaagcgggccttgccgaactaggaccgatgaaaatccgcgaaaaaatgctgctcggtgtctttgtgctggcgctgctgggctggattttcagtaagtctctgggggttgatgaatccaccgtggcaatcgttgttatggcaaccatgctgctgctgggtatcgttacctgggaagacgtggttaaaaataaaggcggctggaataccttaatctggtacggcggtattatcggcttaagctccttattatcgaaagttaaattcttcgaatggttagctgaagtctttaaaaataacctggcatttgatggtcacggtaacgttgctttcttcgttattattttcctcagcattatcgtgcgttatttcttcgcttccggtagtgcctatatcgttgctatgttaccggtatttgccatgctggcgaacgtctccggcgcaccgttaatgttaaccgcgctggcactgttgttcccaactcctatggcggcatggttactcactatggcggcgcggcaggtccggtcatctttggcgtgggttataacgatattaaatcctggtggttggtcggtgcggtactga

SEQ ID NO: 30330 - DNA, 2457 bp, Homo sapiens; identical to SEQ ID NO: 24451
  SIMILAR (545)..(661): 301254mologous to Escherichia coli O157:H7 isoleucine tRNA synthetase,accession number AE005179,Smith-Waterman Score=44.

SEQ ID NO: 30331 - DNA, 1199 bp, Homo sapiens
  SIMILAR (461)..(1090): 881254mologous to Escherichia coli coenzyme A ligase,accession number X97452,Smith-Waterman Score=968.
atgcggtggatcctgttcatcctcttctgcctgctgggcgcacctgcccacgcggtatccatacccggcgttacaaccacaacgacaacggactcaacgactgaaccggccccggaaccggatatcgaacaaaaaaaagcggcctatggcgcactggcgggattgtgctgggataatggacacctcgccgtaaagaagtggatcgaaccagttgcgcaccgttgccgctacgccccctgctgaaccggtaccaaaaatagtgccgccgacgctggtcgaagagcaaaccgtgctgcaaaaggtcaccgaagtcagccgccattatggtgaagccctttccgcccgcttcgggcaactttatcgcaatatcaccggctccccgcataagccgtttaatccacaaaccttcagcaatgcgctgacccatttttcaatgcgtgcaagcacagcgtctgaaatgacgctcatacacgcgtatgaaaatgtgccgatgtatcggcgcaaattcgacgcagcagcgtacatcgtgatgatttcagggaactttcagacctgcgatctgcgcgacaactatccctttgacacctttgccgtgccaatggaacaagtggtgcgcattcatgcttcttcgggaaccacaggtaaaccgacagttgtcggctatacgcaaaacgatattgataactgggccaatattgtagcgcgttctttgcgtgcggcagggggctcgcccaaagacaaaattcatgttgcctatggttacggcctgtttactggtgggctgggtgcgcactatggtgccgaacgtctgggcgctacggtgatcccgatgtctggcgggcagacggaaaaacaagcgcaactgatccgtgattttcaaccagatatgatcatggttacgccatcttattgccttaacctgattgaagagctggagcggcagttgggcggtgatgccagcggttgctcgctgcgggttggagtatttggtgctgagccgtggacacaggccatgcgtaaagagattgagcgtcgcctggggatcaccgcactggatatttatggcctgtcagaagctgatggggccgggggtggcgatggagtgtctggaaactaccgacggcccaaccatttgggaagatcatttctatcctgaaattgttaatcctcatgacgagcacaccgcttgccgatggtga

SEQ ID NO: 30332 - DNA, 4733 bp, Homo sapiens
  SIMILAR (2439)..(1876): 991254mologous to Escherichia coli primosomal protein replication factor,accession number L19201,Smith-Waterman Score= 963.
gccatcatcgccggtgccggcggggccgcccacctgccgggcatgctggccgccaagacgacggtgccggtgctgggcgtgccggtggccagccgccatctgcagggcgtcgactccctgcattccatcgtgcagatgcccaagggcatcccggtcgccaccttcgccatcggcacggccggcgcggccaatgcggcgctgttcgccgtggccatgctggcgaccggcaatgtggccctgctggccaagctggatgccttccgcgcgaagcagacggcggcggcccaggccatgagcgaggaactgcgctgatggcggctctggttcccggcgccgccaccctcggcgtcctcggtggcggccagctcggccgcatgttcgtccacgccgcccaggccctgggctatcgctgcatcgtgctcgatcccgacgccatcagccccgccggcgccgtggcggagaagcatgtgagggccgactacctcgattccttcggcctggcccagatggcgcgcgactgtgacgccatcaccaccgagttcgagaacgaccgggccgtcgagaaggctcatttcgaggccgccggcgtgccctgcgccccgcatgccgtcatcacgaacgagatcgagctggccgccgtcgaccccggcctgctgcccggcatcctgaagaccagccgcatgggctatgacggcaagggccagcgccgccgagctggcccgggcctgggacgacctggggcgcgtgccctgcgtgctggagcagctgctgccgctgaagttcgagctcagcgtgctggtggcgcgcggcgccgacggccagatcgtcaacttccccgtgcagcagaacctgcaccgcggcggcatcctggccgtcaccgaggtcccggcccccgatgtgccggccgaggtcgagaagctggccgtcgctgccgcgcgccaggtggcccaggcctgaactatgtcggcgtgctgagcatcgagttgggtttaatggaagagatttcctacgacgccagcgatttaagcggtcaaaatatcactattgacgcagattatgcgtggctggaaagtttacgacctaaaaccctccccctcgcctttgctgcaattatcgtcgggacagcgctggcatggtggcaaggtcacttcgatccgctggtcgccctgctggcactaattaccgccgggctattacagatcctttctaacctcgccaatgattacggcgatgcggtaaaaggcagcgataaacctgaccgcattgggccgctacgcggcatgcaaaaaggggtcattacccagcaagagatgaaacgggcgctcattattaccgtcgtgctcatctgtctctccgggctggcactggttgcagtggcatgccatacgctggccgattttgtcggtttcctgattcttggcgggttgtcgatcattgccgctatacctacaccgtgggcaatcgtccttatggttatatcggtctgggctcatacattgattccggcactgatccttccggcgaccgcatgcggcctgctggcaacggcagtactgaatattaataacctgcgtgatatcaatagcgaccgcgaaaatggcaaaaacacgctggtggtgcgcttaggtgaagtgaacgcgcgtcgttatcatgcctgcctgctgatgggctcgctgcaagcccgttatgtgatgcgggaaatggacccggtggcgatgcagaccaatgctggaacgtactgtcaagggagcgttagaccttttgccttgagggcaacgtctttcatggtcgcggcagtttcctgcttcttcgcatttcacagctcagctcccgtcgacctgggcaaacgctctacggcagtacatcacatgccagtgccagagccggaaccggaccgagaacccacagtttctcgtctgccagtgggctggagaggatcagattacgcagttgttgcaggaacaatggcgcgtgctgattgttatgatcttccgcacgcacaatcacatggctggtccacggcggtagctgcatcattcgccgctcagccagcgcctgttcggcaaaggcgtcgtagcctttatagagcaacgtttgcaacagaggatgttccggatggtgcgtttgcagcaccacttcgccctgtttacccgcacgcccggcacgaccggcgacctgggtgtaaagctgagcgaaacgctctgccgagcgaaaatcggcagaaaacagcgcgccgtccacgtccagtaatgcaaccagcgtcacatccgggaaatggtgacctttcgccagcatttgtgtaccaatcaaaatccgcgcgccgccgcgatgtacttctgccagttgctgttccagcgcccctttgcggctggtggtatcgcggtcgatacgagaaatgggcacgccggggaacaacggcgcgagcgtctgttcaagctcgcattgttctagtcaatcagctcggtacctcatcgcttatggacgttatccgcaaagagttgcagtcgttgctgcgcgaaccgcaaacccgcgcgattctgattttacccgtgctaattcaggtgatcctgttcccgttcgccgccacgctggaagtgactaacgccaccatcgccatctacgatgaagataacggcgagcattcggtggagctgacccaacgttttgcccgcgccagcgcctttactcatgtgctgctgctgaaaagcccacaggagatccgcccaaccatcgacacacaaaaggcgttactactggtgcgtttcccggctgacttctcgcgcaaactggataccttccagaccgcgcctttgcagttgatcctcgacgggcgtaactccaacagtgcgcaaattgccgccaactacctgcaacagatcgtcaaaaattatcagcaggagctgctggaaggaaaaccgaaacctaacaacagcgagctggtggtacgcaactggtataacccgaatctcgactacaaatggtttgtggtgccgtcactgatcgccatgatcaccactatcggcgtaatgatcgtcacttcactttccgtcgcccgcgaacgtgaacaaggtacgctcgatcagctactggtttcgccgctcaccacctggcagatcttcatcggcaaagccgtaccggcgttaattgtcgccaccttccaggccaccattgtgctggcgattggtatctgggcgtatcaaatccccttcgccggatcgctggcgctgttctactttacgatggtgatttatggtttatcgctggatggcgtggatcaggatgatacccgcagccgcgtggatcagcaggctgtagcgaacaacctgcatcgggaagtactgcgcaaagtacggacgccagataatcaccccggtcaccagcagcacgaaaatcatgctcatgatcgaccagaacatcatcttttgcccggcgttgtacttaccgacatccgccactttatgctcattgcctttcaatacttcgacaatgttcaacagccacggaatatctttcttatccgggatgttgtgatgcacaaaacgcacaaacataaacatcagtgcgacgaaaatcgcaatgccgaagaacgggtgcaaaatgcgtcccatctgcggcgtaccgaaggtttgcgtcagccattgcagcgtcgggaagaagaacgaaatcccggacagcgccaccaggaagaagcaaatcaccacggtccagtgacaggcgcgatcaataaatttggtgcgcacaatcattttcgacttactcatgatgatcctcctcgtcatcgtccacttccttattcgggccaataccgatgtagtggaaaatcaacccggcaaaatggcaataaagccagccgctgccagcggtttcaacgcgcctttccacaggcttaccgaggtgtcgatcttcggatctttcggcagaccgtgatacagctccggctgatcggcgtgatgcagcacgtacataacgtgcgtaccaccgaccccttccgggttgtagacgccagcatgttcgtaaccacgcgctttcagtttcgccacgcgctgttccgccagctccagcatctccttcttgagcgtgcatttatatacccggttatcctctttgttgaggcgcggaatattaaacggacacccggcaatgcagtaaccacagccgatgcagttttccgactggaaatcgacaatcccgttagcgtactgaatgattgcaccagcagacgggcacgccttcaggcagccgggatcttcacagtgcatacagccgtctttacggatcagccactccagcttgccgttctgttcggtttcgctaaagcgcatcaccgtccaggacttggcgctcagatcggcggggttatcgtaaaccccgacgcagtgccccattcatcacggaggtcgttccactcgaacacgccactgacaggctttacagcgatacagccccagtggattggaatacccaccgtttcaactgctgaccattacattcagcggtttcagacgacgcgttaccacagccaccgcgcggataaagccacgcttgctggagacagtgacacgatcgccattattaatgcctttcgccgccgccagcgtttcgctgatttccacaaactgttccggctgagcaattgcgttgagcaatgcgtgcttggtccaggtgtggaagtgctcggtcagacgatagtcgtaccaacatacggaactgctctttttaccagggatccttag

SEQ ID NO: 30333 - DNA, 964 bp, Homo sapiens
  SIMILAR (291)..(82): 521254mologous to Escherichia coli primosomal protein n',accession number M33293,Smith-Waterman Score=169.
atggggacctttccccacaatggggacccaatcaaaatccgcgcgccccgcgatgtacttctgccagttgctgttccagcgcccctttgcggctgggtaatcgcggtcgatacgagaaatgggcacgccggggaacaacggcgcggcgtctgttcaagctgttcggtgcccagccccacggggaccaggtgcgtgaaccgcaggaagggcactggcgcggcaccggacgctgactgtcacagtgtggcagcgcagatggtgctgcgcctgatgcagcgtgtagtagtgatcgaaccacatgttgaattgccggacgcgcattccctgcccgacgggtcaggcgcagcaggcggtattttttctgctggacgttgcataacgtttccagcgcgggcgttgcggagccaagaataatcgggatttgctcgctgtgcgcacgatacaccgccaggtcgcgggcatgatagcgccagccttcctgctgcttgtaggagctgtcgtgctcttcatcaatgacaatcacgcgagatttttaaacggcgtaaacagcgcggagcggtgccgatcacaatcgcccggttcaccccccccatgccccagtttcccggaagcccaaaacagcgactatacacaaaaaccataccggagggggatgatgtctcagccagcgaaagttttgctgctgtatgcccatcggaatctcaggactcggtggcaaaccgggtactgcttaaaccggccacgagctcagcaatgttaccgtgcacgacctttacgcgcactatcccgattttttattgatatcccccggcccgacggcccaaaccaacaagtggttgtttgtcccctctccgtcccggtattaaatataaattggtttgtggccaccaaagcctctcctttcggtaaatccctggtttggcttttgaataacgggaattataaagcccccccaaatttttga

SEQ ID NO: 30334 - DNA, 4527 bp, Homo sapiens
  SIMILAR (808)..(1608): 1001254mologous to Escherichia coli topoisomerase IV subunit,accession number M58408,Smith-Waterman Score=1357.
atgacggaagtctgccccgatgccaccatgctcaactatgttaacccaatggcgatgaatacctgggcgatgtatgcccgctatccgcatatcaaacaggtcgggctgtgccattcggtgcagggaacggcggaagagttggcgcgtgacctcaatatcgacccagctacgctgcgttaccgttgcgcaggtatcaaccatatggcgttttacctggagctggagcgcaaaaccgccgacggcagttatgtgaatctctacccggaactgctggcggcttatgaagcagggcagcaccgaagaattgcttcgctggaagatctcgggccaagtttttgcgcttggcaacgcacgaattctggagaattcggcggcgcgggtgaactgcttggcgaagaacaaagcggctcaatggaaaccatcggtttctcgctgtatatggagttgctggaaaacgccgtcgatgcactgaaagccggacgcgagccgtcgctggaagatctcaccagccagcaaacagaagtcgagctgcggatgccgtcgctattgccagatgatttcatccctgacgtgaacacgcgtctgtcgttctacaaacgtattgccagcgccaaaacggaaaacgaactggaagagatcaaagtcgagcttatcgatcgcttcggcctgctgccagatccggcgcgtaccctgctggatattgcccgtctgcgccagcaagcgcagaaactggggatcaggaagcctggaagaaagaactgcagccagacgcgcaagcttacgttgacgatcgtcgttcgccgttgccaggaacgcgaagaagcgaaagcgatgagcgagcacgacatgctgccgtctgaacctgtcaccattgtgctgtcgcagatgggctgggtacgcagcgctaaaggccatgatatcgacgcgccgggcctgaattataaagcgggtgatagcttcaaagcggcggtgaaaggtaagagcaaccaaccggtagtgtttgttgattccaccggtcgtagctatgccattgacccgattacgctgccgtcggcgcgtggtcagggcgagccgctcaccggcaaattaacgttgccgcctggggcgaccgttgaccatatgctgatggaaagcgacgatcagaaactgctgatggcttccgatgcgggttacggtttcgtctgcacctttaacgatctggtggcgcgtaaccgtgcaggtaaggctttgatcaccttaccggaaaatgcccatgttatgccgccggtggtgattgaagatgcttccgatatgctgctggcaatcactcaggcaggccgtatgttgatgttcccggtaagtgatctgccgcagctgtcgaagggcaaaggcaacaagattatcaacattccatcggcagaagccgcgcgtggagaagatggtctggcgcaattgtacgttctgccgccgcaaagcacgctgaccattcatgttgggaaacgcaaaattaaactgcgcccggaagagttacagaaagtcactggcgaacgtggacgccgcggtacgttgatgcgcggtttgcagcgtatcgatcgtgttgagatcgactctcctcgccgtgccagcagcgtcgtcatccggcagcgtattcaacccccggaaacgataaaattcccggtacccgaacgccgcactgactctcattgcaaaaacaggaataaccatgcaaccgtccagaactttgacgatctcaattctcctctattcaccgccgcattttgctgtggggaagcggtggtccgtttttctggaatgggttatatggttaaccctcggcaactgacgccggcgctgaaactggacgctgactggattggcttgctgggcgcgggaacgctcgccgggctgttcgttggcacatcgctgtttggttatatttccgataaagtcggacggcgcaaaatgttcctcattgatatcatcgccatcggcgtgatatcggtggcgacgatgtttgtttcatcccccgtcgaactgttggtgatgcgggtacttatcggcattgtcatcggtgcagattatcccatcgccacctcaatgatcaccgagttctccagtacccgtcagcgggcgttttccatcagctttattgccgcgatgtggcccggtacttggccggcaacggataacttggtcttgaccaaatcgttttggcgctgccaacggcacggcaccgctgaatggttacccgtcgatagcgtcatgagtacgcaacgcttccgggcgcaaccaacgctgaacgcgagaaggcatatccagcccaatcagcaggatcaccacgaacgtcagactgaacgagagcgatgccagcgcagtacccagatccagacgttgagcgatcaacgcgccgatgattggggccagtgcaccgcccaatgcgccaacgttgtaggtaaagcccaggcccgctgcacgctggtcggtatcgaaataaccgccaatcagttttgcatttgctggaagaacagtaacagaccgagcacccagacgtttgcgccgccaatcgcaaataccggaataatcagcagctgcgaggccagcaggctacaaacgtacgctttgcgggttcccagccagtcaccgaggaagccacctacgcagcatcccaccgccgcgccaaagccactaaagaacagcacattggctacacccaagaacagcgacgatcgcggcattttgcaggttaccggcgaagcagaaccacagcgcagtagccgccgccagtgtcattacgatatgagcgtcagcatcatggccccatatgtcaacagagtatgcgcgactgccgcgaccgcctctcgcagcgctcctcttaggagatacaccacaggactccaaggcgcttctcagacagtgagtaaaaactttagcaacaacgcccgcgccaacggtacggccgccttcacggattgcgaaacgcagaccgtcgtccatcgcgatcgggtggatcagggtaacaaccattttgatgttgtcgcccggcattaccatctctacgccttccggcagttcgatggtaccagtcacgtcagtagtacggaagtagaactgcggacggtagcctttgaagaacggagtatgacggccgccttcatctttggacagaatgtacacttcagattcgaacttggtgtgcggcttgatggtgcccggcttagccagtacctgaccacgttcgatttcttcacgtttgataccacgcagcagaacacctacgttctcaccagcacggccttcgtccagcagtttgcggaacatttcaacgccagtacaggtagacttctgagtctctttgataccaacgatttcaacttcttcaccaactttgatgataccgcgttctacacgaccggtaacaacggtaccacgaccggagatggagaatacgtcttcgatcggcagcagaacggctgtcaatcgcacgctctgttccgatatagatccggtgccccccaatcggtaccagatcaccctgacgcccgctggctgttgcccgatcccatcgaaaccctgaaagccgccgaaacgctggtacaacagggatttgtcgtgctgccttactgcggggccgatccggtattgtgtaaacgtctggaagaagtcggctgtgcagcggtgatgccgctcggcgcgccgattggctcgaatcagggactggaaacccgcgccatgctggagattattatccagcaggccacagtgccggtggttgtcgatgctggcatcggcgttcccagccatgccgcgcaggcgctggaaatgggggccgacgcggtgttagtgaatacggcgattgccgtcgcggacgatcccgtcaacatggcgaaggcatttcgtctggcggtagaagcaggcctactggcactccggaccgggcagccgcagttattttgctcatgccaccagcccgctgaccggatttctggaggcatcggcatgaaaaccttcagcgatcgctggcgacaactggactgggacgacatccgcctgcgtatcaacggcaaaacggctgctgacgtagagcgggcgctaaatgcctcgcaactcacccgcgacgacatgatggcgctgttatcgcctgccgccagtggctatctggaacaactggcccaaacgggcgcagcgtcggacccgtcagcgattgggcaaacacagttagtttctacgtcccgctttatctttccaatctttgcgctaacgactgcacaacatcaactgtctctggaaggtcactgtgcccgtcaaatcagccgccgtctgtgtcgcaactacgacctgattttgaccatggaaaagcgccatatcgaacgcttatgcgagatggcaccggagatgcgcggcaaagtgatcctgtttggtcactgggataacgaatgtgaaatccccgatccgtatcgcaaaagccgggaaacgtttacagcggtgtacacattacttgaacggtctgcccgccagtgggcgcaggcattgaacgcagagcaggtataa

SEQ ID NO: 30335 - DNA, 2460 bp, Homo sapiens
  SIMILAR (596)..(372): 891254mologous to Escherichia coli O157:H7 glutamate-1- semialdehyde aminotransferase (aminomutase),accession number AE005191,Smith-Waterman Score=341.
atgagggtaaacaccttcgtccagcatcatatggaagaaacgcttaaagcgttccacgtcacaggccatcacatcctgatagcacgtcacggactcggcgtcggtaaagaaaataccgaacatgccgccaacgtggttaacgaccagcggaattccggcttcttctgccgcttccagcagaccttctgccagacgtgttgtcagctcatccagcgtttcgtgaacgcccggctgcgcgacttcattcagacaggcgaaacccgctgccatcgcaatcgggttaccggaaagcgtacccgcctgatagaccggacccgtcggggccagcgcatccattacatcacgacgaccaccgaatgcgcctaccggcattccaccgccgatgattttgccgaggcagctagcgctacgcggaaaccggtcatcacttcatcgatgatcagcaacgcgccaaattcgtcgcacagcgcgcgcagacctggcaggaactctggcagcggcggaacacagttcatattgcctgccaccggctcgacgataatacaggcaatctcttgcgggtattgctcaaatgcggcgcgtacagaagccagatctcttataagttaccggttaaagtatatttggagaaatctgcggaaagcccgggagttgggttggctaaaaaaacaacacagacggagaagcaacagggacaacaaaaagcagagaggcaagaacaagaaagaggaggaccacggagcggagcagaacagacagggcgagcaacggaagagacgagcaacgcgcgaagaaaaggaacgagcagaaacaccattagtttgttgttcactagtcattggagaacagatgattgatgtcttagggccggagaaacgcagacggcgtaccacacaggaaaagatcgcaattgttcagcagagctttgaaccggggatgacggtctccctcgttgcccggcaacatggtgtagcagccagccagttatttctctggcgtaagcaataccaggaaggaagtcttactgctgtcgccgccggagaacaggttgttcctgcctctgaacttgctgccgccatgaagcagattaaagaactccagcgcctgctcggcaagaaaacgatggaaaatgaactcctcaaagaagccgttgaatatggacgggcaaaaaagtggatagcgcacgcgcccttattgcccggggatggggaacgaaccgatgactggatggatggccgccgcagtcgtcacactgatgatacggatgtgcttctccgtatacaccatgttatcggagagctgccaacgtatggttatcgtcgggtatgggcgctgcttcgcagacaggcagaacttgatggtatgcctgcgatcaatgccaaacgtgtttaccggatcatgcgccagaatgcgctgttgcttgagcgaaaacctgctgtaccgccatcgaaacgggcacatacaggcagagtggccgtgaaagaaagcaatcagcgatggtgctctgacgggttcgagttctgctgtgataacggagagagactgcgtgtcacgttcgcgctggactgctgtgatcgtgaggcactgcactgggcggtcactaccggcggcttcaacagtgaaacagtacaaagcttcgcatgctgcagacagactccagtcctggcaggccctctgaatacagcaggaacaaaaaatttctggcggaaaaggtgttactgggtggtaattctcttctacagcctctggtggttggctccatgtgtatctgtgtggcccgtgtctgatctggtgcactcctgtgtgagagaggtagtgtggaagggtggcaagagcgtgtcctttggagacagacccaggctcaaatgggtggactggggtcagcagccccagtctttcggctacatacttgatcctttcagcgaaggtacttttggtctgggctttgcggagaggcagtacgcccatgatactcagtactttcttccagtcttggcccagttcgctatcggaatcaggatgaccatgagctacaaattacacacgggaacaagattctatgtggaattgtgtgggtctcttgcaggcatgctccctttgattctcccattcattgtccaggagcaccagattggacaaccatccacacaaaaaagtaccttcatgagaaccacaattcagtggccacatggcacagacagaatctgtgtgattgtgggagggagagaacagcgatcatgggacttggccttggaattcagtgctgccctatcacagtggaaagcaacacagggcagaacgcagccgacacccacagacggaacatttagaccagaccagggcaagctggagggtcagaaccatcccagtggacagaacctgagatccagtagtataggtttgcctaatctggccattgattataaacagaagcatacactatgtggcctttgtgactga

SEQ ID NO: 30336 - DNA, 1854 bp, Homo sapiens
  SIMILAR (535)..(1248): 991254mologous to Escherichia coli glutamine-1-semialdehyde aminotransferase,accession number U70214,Smith-Waterman Score=1242.
  misc_feature (1)...(1854): n = a,t,c or g
atggatgcgctaatggcaacgccgctgtggcaggccatgccgtttgtccgcgccggacgctttcagcgcgtacctgcagtctggttttatggtgcgacgctctcggcaatgcactttgtgcgcgttctggataacgccatcggagtgattgtcgctacggcgctcacctggatgaacttctcgcaggcgctgccgcgtagccagtgggcgcaggctgcctggtcgccggatattgacgtcatcgagcagatgatttttcactacagcttgttgccgcgtctggcgatttcgctgctggtgggcgcgggtctggggctggtgggcgtgctgtttcagcaagtgctgcgtaacccgctggcggagccgacgacgcttggcgttgctacaggcgcgcaactggggattaccgtcactacgctctgggcgatccctggtgcgatggcgagccagtttgctgcgcaggcaggggcttgtgttgttggcttaattgtctttggcgtcgcgtgggggaaacggctgtcgccggaaccctccatgagtaagtctgaaaatctttacagcgcagcgcgcgagctgatccctggcggtgtgaactcccctgttcgcgcctttactggcgtgggcggcactccactgtttatcgaaaaagcggacggcgcttatctgtacgatgttgatggcaaagcctatatcgattatgtcggttcctgggggccgatggtgctgggccataaccatccggcaatccgcaatgccgtgattgaagccgccgagcgtggtttaagctttggtgcaccaaccgaaatggaagtgaaaatggcgcaactggtgaccgaactggtcccgaccatggatatggtgcgcatggtgaactccggcactgaagcgaccatgagcgccatccgcctggcccgtggttttaccggtcgcgacaaaattattaaatttgaagggtgttaccatggtcacgctgactgcctgctggtgaaagccggttctggcgcactcacgttaggccagccaaactcgccgggcgttccggcagatttcgccaaatataccttaacctgtacttataatgatctggcttctgtacgcgccgcatttgagcaatacccgcaagagattgcctgtattatcgtcgagccggtggcaggcaatatgaactgtgttccgccgctgccagagttcctgccaggtctgcgcgcgctgtgcgacgaatttggcgccgtgctgatcatcgatgaangcaggttcagagagcatgcctgcaggtcgactctagaggatccccaggctgagtttgctgcagaaggcttggaaattaaaaagaaatggatggaagaggaacaagcaggaaaaaataaattaagtgggaaacagctacttgaaacagatccaaatcttgacacatctgatatccagttcttggaggatgctggaaacaatgtgcagacaagctgtgaccgtctccgggagctgcatgtgtcagaggttttcaccgtcatcaccgaaacgcgcgagacgaaagggcctcgtgatacgcctatttttatagaaacgctggtgaaagtaaaagatgctgaagatcagttgggtgcacgagtgggttacatcgaactggatctcaacagcggtaagatccttgagagttttcgccccgaagaacgttttccaatgatgagcacttttaaagttctgctatgtggcgcggtattatcccgtattgacgccgggcaagagcaactcggtcgccgcatacactattctcagaatgacttggttgagtactcaccagtcacagaaaagcatcttacggatggcatgacagtcgactctagaggatccccatag

SEQ ID NO: 30337 - DNA, 1407 bp, Homo sapiens
  SIMILAR (917)..(1000): 641254mologous to Escherichia coli Transcription-repair coupling protein mfd,accession number D90747,Smith-Waterman Score= 93.
  misc_feature (1)...(1407): n = a,t,c or g
atggaagataaccacaaactggctcgccatcgcaccagggatcgcccagagcgtagtgacggtaatccccagttgcgcgcctgtagcaacgccaagcgtcgtcggctccgccagcgggttacgcagcacttgctgaaacagcacgcccaccagccccagacccgcgcccaccagcagcgaaatcgccagacgcggcaacaagctgtagtgaaaaatcatctgctcgatgacgtcaatatccggcgaccaggcagcctgcgcccactggctacgcggcagcgcctgcgagaagttcatccagttcccgttcggcagcacaagagcaaccaaatctcggaatgcggaagggaaatcgaaatccgatcggacgcacacctgctgccaaatgacgtcaagttaaagattaggcctctgattgtcgatgaagaacaccgcttcgggtgcgtcataaagagcgcattaaagcgatgcgcgcgaacgtggatatttctgacgcttactgcaacgccgatcccacgtacgctgaatatggcaatgagcggaatgcgtgacctgtcgattatcgccacgccgcccgcccgtcgtctggcagttaaaacctttgtccgtgagtatgacagcatggtggtccgggaggcgatcctgcgtgaaattttgcgcggaggacaggtttattatctctacaatgatgtggaaaacattcagaaagccgccgaacggctggcagaactggtgccagaagcgcggatcgccatcggtcacgggcagatgcgcgagcgcgaactggaacgggtgatgaatgatttccatcatcaacgtttcaacgtgctggtttgtacaaccattatcgaaaccgggatcgacatcccgacagccaacactattatcattgaacgcgcggatcacttcggtctgggcgcagctgcaccagttacgcggtcgcgtcggacgttcgcatcatcagggcatatgcatggttgctgacccggcatccaaaagcgatgcctcccgatgcacaaaaacgtcttgaagcaattgcctcgctggaagatctcggggcaggttttgcgctggcaacgcacgatctggagattcgcggcgcgggtgaactgcttggcgaagaacaaagcggctcaatggaaaccatcggtttctcgctgtatatggagttgctggaaaacgccgtcgatgcactgaaagccggacgcgagccgtcgctggaagatctcaccagccagcaaacagaagtcgagctgcggatgccgtcgctattgccagatgatttcatccctgacgtgaacacgcgtctgtcgttctacaaacgtattgccagcgccaaaacggaaaacgaactggaagagatcaaagtcgagcttatcgatcgcttcggccccctgccanatccgg

SEQ ID NO: 30338 - DNA, 444 bp, Homo sapiens
  SIMILAR (16)..(84): 691254mologous to Escherichia coli K12 putative ATP-binding component of a transport system,accession number AE000184,Smith- Waterman Score=80.
  misc_feature (1)...(444): n = a,t,c or g
naaaaagtccactgtgtggaatcggttatcatggggcataaagagcttgtggaaagtaagcaagagcgcggccgattttatgcttggcggaaatgagtaagaaagcgctaataaagtggcgattggaaagttaatacggcgaaatgcacggttactctgcgnaagctcgggccggtgaactgtgcttgggcgtgggaattccagtggaacagcactacggcccgatgagtgaagttgctcctggctgaaagctgcgtgtgcttctggcgcaggcgctgtttgctgatccggatattctcctgctcgacgaaccgaccaacaacctcgacatcgacaccattcgctggctggaacaggtgctgaacgagcgtgacagcaccatgatcatcatctcgcacgaccgtcacttccttaacatggtctatacccacaagacggaccgga

SEQ ID NO: 30339 - DNA, 2280 bp, Homo sapiens
  SIMILAR (2007)..(2225): 311254mologous to Escherichia coli Ribonuclease e (EC 3.1.4.- ) (RNase E),accession number D90744,Smith-Waterman Score=57.
atggggttaccaagcggatattcagcgggctacagctacgaatattttggcggcaatgccacttatatgattattcccgaaatcgccattaatttgggctgcgtattaccgtatcacggctcttattttgctgcggcgtcgctggcagagcctatgtgctgcattattggtgcttatcatgccaattatcacaccacgcaatatgtttatgagcatcgcatgggcgtcaaacctggcggcaatattgcactgctggcgtgtgcaggtccgatgggcattggcgctatcgattacgccattaacggcggcatacaaccgtcgcgggtggtggtggtcgatatcgacgacaaacgtctggcgcaggtacagaagctgctgccggtggaactggcggccagtaaaggcattgagctggtgtatgtgaataccaaaaggatgagcgatcctgtccagatgctgcgggcgctgacaggagaatgccggttcgatgacattttttgttatgcggcgcatatcgctgcattaggtcgcccggatttcagcagcaaaatcaaactgtacaccggcgagatcccgctgttcagccactaccagatcgagtcacagatcgagtccgccttccagcgtgaagttcgtctgccgtctggtggttccattgttatcgacagcaccgaagcgttaacggccatcgacatcaactccgcacgcgcgacccgcggcggcgatatcgaagaaaccgcgtttaacactaacctcgaagctgccgatgagattgctcgtcagctgcgcctgcgtgacctcggcggcctgattgttatcgacttcatcgacatgacgccagtacgccaccagcgtgcggtagaaaaccgtctgcgtgaagcggtgcgtcaggaccgtgcgcgtattcaaatcagccatatttctcgctttggcctgctggaaatgtcccgtcagcgcctgagcccatcactgggtgaatccagtcatcacgtttgtccgcgttgttctggtactggcaccgtgcgtgacaacgaatcgctgtcgctctctattctgcgtctgatcgaagaagaagcgcttgaagagaacacccaggaagttcacgccatttggtttcccggaaaaacctacgaattcgagctcggtaccccagaaagtattaaacaacaggtcgatgcttcgcgttcgatggtgatagggcacacgggtgacaaaattttcgacagtattaccagcaacgcggtagcggaaccagacggtagcgcttctgaaaccaatctttttgccatgctggatagtgccatcgcagccctgaaaacgccggtcgcggatagcgaagcggataaagaaaccgccgctgcggcgttagataaaaccaaccgcggactgaaaaactcgctgaacaatgtgctgactgttcgcgcggaattaggcacgcagctgaacgaactggagtcgctggattcattaggtagcgatcgcgctttagggcaaacgcagcagatgagcgatctggttgatgtggactggaatgcaactatttcatcttacatcatgcagcaaacggcattgcaggcatcgtataaagcatttaccgatatgcagggattgtcgctcttccagctcagcaaataatttcgctttaaaacatatcatgaaactgggtatgttttgtctgcctgctctgggatcgctggggcgggcatttttttgcctattttgcattggtggctagcaaggatgccattcgatgaattttaatatgtcgattcaaagatgaaataaaaaagccctggcagctaccagggcttgattactttgagctaattattactcaacaggttgcggacgcgcaggagcgcgagaggcatgatgtgttgccgtatgaccacctgcggcacctttaccttcgaaggccaaagtagggccctgccagccactgtgacccggggcctcccgtacatattccggggctgcagcgcgcgtcatttggcccggcaccccgcgccatcgcccgcccggccactgaagtatcgctctcgaaggtgcggcctaccctctcggcgcgcacgccgccccccaccacccccccccgggcgtcacgcgtcatcgtccccgcgccccacgcgcgacgtcctgccccgcgagccaagcatgcgtcgctcactcccatagtcaataccctacccgcccctccgcccacaactcctcgtgacgacccggcgtccctctgccgtcagcgcgtccacactaccgctacgccgatcgtcgttgcctccc

SEQ ID NO: 30340 - DNA, 2099 bp, Homo sapiens
  SIMILAR (720)..(55): 971254mologous to Escherichia coli hook-associated protein 3,accession number U02514,Smith-Waterman Score=1068.
  misc_feature (1)...(2099): n = a,t,c or g
ttaagccgaaattatttgctgagctgaaagagcgacaatcctgcatatcggtaatgctttatacgatgcctgcaatgccgttgcttgcatgatgtaagatgaaatagttgaattccagtccacatcaaccagatcgctcatctgctgcgtttgccctaaagcgcgatcgctacctaatgaatccagcgactccagttcgttcagctgcgtgcctaattccgcgcgaacagtcagcacattgttcagcgagtttttcagtccgcggttggttttatctaacgccgcagcggcggtttctttantccgttcgctatccgcgaccggcgttttcagggctgcgatggcactatccagcatggcaaaaagattggtttcagaagcgctaccgtctggttccgctaccgcgttgctggtaatactgtcgaaaattttgtcacccgtgtgccctatcaccatcgaacgcgaagcatcgacctgttgtttaatactttctgctccaccgacgtatttccctttctcttcgctaaacggcgcagtctctgttttataaccggcaaaaatgtagcgcccgttaccgtcagtggtgtttgccagattcagcaactggtcacgaagcccctgaatatccgtagccagcgaggcccggtcatcgtcactcaaggtgccattgctggcgtagacaattttttcctgagcattctggatagcagtggtgctctgttgcccaggagctttggtatggcatggttctgccaggtcgtagccatgtttgtacgctaactttgtggtcagttgtagcggtatctttgccaactgcccaatgccgaacggcagcacgttaacggtgttggtcccttccggatagtaataaagacgcatctcagcactgttaatgacgatgccgtcatgaacggtatccggcaggatcagctgctgcggaatgttcagtacagtaccgcctttcggcaggaaggtatccacacccgggttcgcttccatcatattggaaagccccatctggtactcggcggcaaaatactccagcggctgagtgttaccttcaggaatggtgatcacctgattctgaccaaccaggcgactcccgtcggttggcagaggataagttaccgcagaggcggtactgcaaaagccgacaacagcgaaggccgctgcgaataatgttttcaatttcatattcatgttaagcgagattttgtgcctggcaggccattgggttgagaatattagagtattggaagcgcattataagttcattccagctcacagtgaaattatgatgtgtacgaaatcacattttttgcctttggcttgagtgtagaccttaagcgaggagcaggatcttctttcagacttatggcataatgcgcggtttgtcatatctcttttcaggatacgcctgtgttagtttccagtaacgtcaccatgcagttcggcagtaagccgttgtttgaaaacatttccgtcaaatttggcggcggcaaccgttacggccttgattggcgcgaacggtagtgggaaatccacctttatgaagatcctcggcggcgaccttgagccgacgctgggtaacggttccctcgatcccaacgagcgccattggtaaactgcgtcaaggaccagtttgcctttgaagagttcactgtgctggatacggtgatcatggggcataaagagttgtggaaagtgaagcaggagcgcgaccgcatctatgctttgccggaaatgagtgaagaagacggctataaagtggccgatctggaagttaaatacggcgaaatggccggttactctgcggaagctcgcgccggtgaactgttgcttggcgtgggaattccagtggaacagcactacggcccgatgagtgaagttgctcctggctggaagctgcgtgtgcttctggcgcaggcgctgtttgctgatccggatattctcctgctcgacgaaccgaccaacaacctcgacatcgacaccattcgctggctggaacaggtgctgaacgagaataacagcacacatgatcatcatctcgcacgaccgtcacttccttaacatggtctgtacccacaagacggaccgga

SEQ ID NO: 30341 - DNA, 486 bp, Homo sapiens
  SIMILAR (453)..(485): 1001254mologous to Escherichia coli RstB,accession number U41101,Smith-Waterman Score=57.
atgagcgataacctgagcgccgccgaatcccaggcgttgaatcgtgatatcagtcaacttgaagctttaattgaagagctgctgacttatgcccgactcgatcgcccacaaaacgagcttcatcttagcgaaccagacctgccgttgtggctgtcaacgcatctggcagatattcaggcagtaacgcccgataaaacggtacggataaaaacgctcgtgcaaggccattatgcggcgttggatatgcgcttaatggagcgcgtgctggataatttgctcaataacgccctgcggtactgccattcaacggttgaaaccagcctgctactgtcggggaatagagcgacattaattgttgaggatgatggcccagggattgccccagaaaaccgcgaacatatctttgaaccttttgttcgcctcgatcccagccgggatcgctcaaccggcgctgcgggctggggctggcaattgtccactctatag

SEQ ID NO: 30342 - DNA, 1260 bp, Homo sapiens
  SIMILAR (1)..(642): 1001254mologous to Escherichia coli K12 putative transport protein,accession number AE000261,Smith-Waterman Score=1048.
atgttccttgccatggtttcttacattaaacgcgcccgctccatgcgcgatattcgtaacgaaaaaggcaccgcaaaacccgatcctgcggttatgaaacgactgattcaactcggtttgccgattgcgctggcactgttctttgaagtgacactgtttgccgtcgtggctctgttagtgtctccgctcggtattgttgatgtcgcaggacaccagattgccctgaactttagttcactaatgttcgtgcttccaatgtcgctggcggcagcggtaactatccgcgtaggttatcgtctgggtcagggctcaacgctggatgcgcaaaccgctgcgcggaccgggcttatggtgggtgtctgtatggcaaccctgacggccattttcacggtttcactgcgggagcaaatcgccctgttgtacaacgacaatcccgaggttgtaacgctggctgcgcatttgatgttgctggcggcggtatatcagatttctgactcaatccaggtgattggcagtgggattttgcgtggttataaagatacgcgttccattttctatattacctttacggcttactgggtgctgggcttgccaagcggctatattctggcactgaccgatctggtcgttgaacctatgggccagcaggcttctgatagcttattattgcctacaacactgcactggattaagatgaaaacgattgaagttgatgatgaactctacagctatattgccagccacactaagcatatcggcgagagcgcatccgacattttacggcgtatgttgaaattttccgccgcatcacagcctgctgctccggtgacgaaagaggttcgcgttgcgtcacctgctatcgtcgaagcgaagccggtcaaaacgattaaagacaaggttcgcgcaatgcgtgctggcggcaacgttgacgttgatggctccgtttccagccaattcctcaccgcactgttaatgactgcgcctcttgcgccggaagatacggtgattcgtattaaaggcgatctggtttctaaaccttatatcgacatcacactcaatctgatgaagacgtttggtgttgaaattgaaaatcagcactatcaacaatttgtcgtaaaaggcgggcagtcttatcagtctccgggtacttatttggtcgaaggcgatgcatcttcggcttcttactttctggcagcagcagcaatcaaaggcggcactgtaaaagtgaccggtattggacgtaacagtatgccagggtga

SEQ ID NO: 30343 - DNA, 749 bp, Homo sapiens
  SIMILAR (79)..(11): 691254mologous to Escherichia coli bifunctional penicillin- binding protein 1C,accession number U88571,Smith-Waterman Score=79.
ttagtagggatttttcgccttcgcttttaccgagcattcatgcgcgaaacagcggtgccagttgcggcattgttcgggggccagccagatgggttcttcccttgactcttttacctgctcacgggaccacacaccttgcacggccatccgttcgagcactttattacgcgcggcttcggcacgctccggccaacgatccgggcgaagacggctgggcgcttgcggcaaaaccgccagcattgccgcctcggaatagcttaaattcgcaggcgattttccgagataagcccaacttgccgcaccgatcccctgcaacgtaccgccaaacggagcgcggttaagatacaaggtcagaatttcacgcttagacagatgccattccagttgcaacgcgcgccagagctggcgaattttgccgccaaatgttttggggtgaggatcaagcagacgagcaacctgcatagtgagcgtgctgccaccggaaataacccgtcccgaagtgagatcttgccatgctgcgcgcgccaccgagaatggattcacccccggatgcttccagaaccagcgatcttcataattgatcagcgcttcaaggtaacgtggagaaacatcttcgattgttaccggataacgccagatgccgtcagcatcggcgaagcgccagagcggcgtaccatcctgcgccacgaccactcgtgcgggattgacttcatgcagcggtagaggccagagtttatctgctccccacg

SEQ ID NO: 30344 - DNA, 834 bp, Homo sapiens
  SIMILAR (241)..(516): 961254mologous to Escherichia coli K12 putative ATP-binding component of a transport system,accession number AE000350,Smith- Waterman Score=452.
atgataaccctttttactattaacttgggcgtttccccctggttaaaaagttttcggcgactaacgggcggccagcgcattggttcttgggagggggggcccacgaacacgccaggattaactggaggggcgggtaaaccgaggggaaagaacacggctcacaaacaagtgaagaacccctacacggggtataaagaggagacgcccacaatccacacggatctccatcggaaacaggaaacaacaacgaataatgtaacgccagttaaactcgaaggggcggtccggattaccgatagcgcgacattgactctgggaaatggcgtcgataccacgcttgccgacctgacggctgccagccggggcagtgtctggcttaacagcaataattcctgtgcaggtaccagcaactgcgaatatagagtaaacagtttgctactcaacgacggtgatgtttatttgtcagcacaaacagcagcgcctgccacaactaacggtatctacaatacgctgacaattgccgtaccatctttctcaacaacctgccggctcccggaggatataattgttgtgtcagctttcccgccgcttttgatattttgcgttccgctgttgatattggtttgccccgactgggaaagccggcccagtgaagcgcatacgcaagtgaatggtggagttgagctgcactgcattgaggcacccacaggctttgacacgttgatggcttcccggctgcgtatggttcgtgtgggaattgttgagcggatgaacaatgttgcacacaaggatacaagctatggaccatggattacagaattgcgagctcggtga

SEQ ID NO: 30345 - DNA, 1632 bp, Homo sapiens
  SIMILAR (322)..(882): 951254mologous to Escherichia coli K12 enhanced serine sensitivity,accession number AE000339,Smith-Waterman Score=898.
  misc_feature (1)...(1632): n = a,t,c or g
atgatcattgatttggcgaccctcaccggggcggcgaaaactgcgctgggtaatgattatcacgcgctgttcagttttgacgatgcgctggccggtcgcttgctggcgagagaacgaaccgttctggcgtctgccgctggcggagttccaccgcagcttctgccgtctaactttgccgaactgaacaataccggaagcgcggcgtatccggcaggcgcgagcacggcggcgggcttcctgtcgcactttgttgagaactatcagcaaggctggctgcatatcgactgctcggcgacttaccgtaaagcgccggttgaacagtggtctgcgggcgctacgggacttgggcgagctgtggttgaagatagcgcgcttgatttacagcactgggaaaaagaagacggcaccagcgtcattccttttttcacctcgttagaagcacttcaacaggcggttgaagacgaacaggcatttgtcgtaatgcccgttcgcacgctgtttgagatgacacttggcgaaacgctcttccttaatgccaaactgccaaccggtaaagaatttatgccgcgtgaaatcagtttgttgattggtgaagagggaaatccgctgagcagccaggaaatcctggaaggcggtgaatcgctgatattatcggaagtcgcagagccgccagcacaaatgattgattcactcaccaccttatttaaaaccattaagccggtgaagcgtgcttttatttgttcaattaaagagaacgaagaggcacagcctaatttacttattggcattgaagccgatggtgatatcgaagaaattattcaggcgacgggaagtgtagcgacccatacattacctggcgatgaaccaatcgatatttgtcagtatggtgcgcgcagcacgttgcaaaatcctgccgatcccgaaagttctgtgatgtatgttgccgcaccgattatggacggctcgcggcttattggcgttttgagcgtaggcaaaccgaacgcggcgatggctccggtcattaagcgtagcgagcggcgaattttatgggccagcgccattttgttggggattgcactggtgattggcgcaggcatggtttggtggatcaaccgctctattgcccggctcactcgctatgctgattccgtcactgacaataagcccgttcctctccccgatctcggtagtagagagttgcgtaaactcgcgcaggcgctggaaagtatgcgcgtgaagctggaagggaaaaactatattgagcagtatgtttacgcattaactcatgagctaaaaagcccactggcggcgattcgtggagcggcggaaattttacgccaagnagttcatcgcttactacatgacggcgcgtcggcggcgctggcggaaacgctgggatcgatggccggatttatgatgacccgcgacggacagtgtgtggtaggcacagaacttaatgcaacacaccatcgcccggtgtctgagggaaaggtacgcggcgtctgccagccgctgcatcttggtcggcaaaatcagagctgggaaatcgtcgtctctatgaacaggggcggcgttgctgcacttgtcggctgggtacggcagttttgggatgaacccgacagaattagatga

SEQ ID NO: 30346 - DNA, 4831 bp, Homo sapiens
  SIMILAR (2810)..(3799): 981254mologous to Escherichia coli similar to,accession number D90889,Smith-Waterman Score=1755.
atgggggggcccttcccttgcaatggaaagactttatcggatcgctggacgagatcgaaagagcgtaaccgtcgacgaaccactgcaactgatgaagatgttatctacttatatcaatacatggtcccaccaacgtgcaacccggcactggcggctctgttggataaatcactgcaaaaagagtgggctaacgatctcgatcagctgatcaatctggaaaaattcgctgatgatgcgaaattccgtcagcaatatcgcgagatcaagcaggcgaataaagtccgtctggcggagtttgtgaaagttcgtaccggtattgagatcaatccacaggcgattttcgatattcagatcaaacgtttgcatgagtacaaacgccagcacctgaatctgctgcatattctggcgttgtacaaagaaattcgtgaaaacccgcaggctgatcgcgtaccgcgcgtcttcctcttcggcgcgaaagcggcaccgggctactacctggcgaagaatattatctttgcgatcaacaaagtggctgacgtgatcaacaacgatccgctggttggcgataagttgaaggtggtgttcctgccggattattgcgggccactgctcggtacgctggaatatggtctgccacataaaaacctgattgaaggtattgccgctgcaatgcacttccgcagtgaagatgatccgcaggctcaggaactggcagcactgatcgctgacaaaggtccgcaggcggcgctggcacagatttccggtcttgatgccaacagcgaggttgtatccgaggcggcaacaatggaacaaacccaggcctttgaaaaccgtgtgcttgagcgtctgaatgctggcaaaaccgtgcgaagctttctgatcaccgccgtcgagctcctgaccgaggcggtaaatcttctggtgcttcaggtattccgcaaagacgattacgcggtgaagtatgctgtagaaccgttactcgacggcgatggtccgctgggcgatctttctgtgcgtttaaaactcatttacgggttgggcgtcattaaccgccaggaatacgaagatgcggaactgctgatggcattgcgtgaagagctaaatcacgacggcaacgagtacgcctttaccgacgacgcaatccttggaccctttggtgaactgcactgcgtggcggcgttaccaccgccgccacagtttgaaccagcagactccactgccctccaaaccgggacttgtgtggggacacagacactgttcccagcactgggcctgatacaacgtggcacccaagaaaactccagtatgactgatgcagcacattacctgcgctcagatcgtttcagccgacgctgccctatcggtactatcgctgagtcaaccgcgagaccgactatctcctgggaaaccaatgtacgcgataccaccagctatgcgggcccagtcttaatgggccaaacggtacttaaacgctcggtcgggctgctgacctacttccacactgggccgaagagctgcatccgcaggttacgccctgaagtcagctcagatcctgggccaggcactgcatgggagacaggcatgagcaggacctctttctgccttcgaggaaaacacgggggcatctggggctcacttggcactcatccaccttgtgctgtacctggggacctccgggtgggtggctgtcatagaattcggctccaaaccaggatgcttttgggaattgagggagagccctggcttccacgtggaccacacgggcgagctgcggggaatccggtggaccagcaatttgcggcgggagacctcggactattaacggacgctgatgcccacctggagggctggggcccggagaaaacggtgcccggggtaaccgaagagggaggcggtacgctgacagtcaacgataatggcaaagcgacagatatcgtccagaacagcggtgccgctctccagacgagcacggctaacggtattgaaatcagcggtactcatcagtacggtactttttccatttccggcaatttagcgaccaatatgttgctggaaaatggcggtaatttattggtattagcaggtaccgaagctcgcgactccacggttggcaagggtggggcaatgcaaaacctgggtcaggactccgccacaaaggttaactctggcgggcaatatacccttgggcggtcaaaagatgagtttcaggctctggcccgggcagaagatctccaggtcgctggcggtacggcaatcgtctacgcaggtacgctggcggatgcatcggtcagtggcgcgacaggaagcctgtcgttaatgacgccacgggataatgttacgccagttaaactcgaaggggcggtccggattaccgatagcgcgacattgactctgggaaatggcgtcgataccacgcttgccgacctgacggctgccagccggggcagtgtctggcttaacagcaataattcctgtgcaggtaccagcaactgcgaatatagagtaaacagtttgctactcaacgacggtgatgtttatttgtcagcacaaacagcagcgcctgccacaactaacggtatctacaatacgctgacaaccaatgaactttccggtagcggtaatttctacctgcataccaacgttgcaggctcccggggcgatcaactggtcgtcaacaacaacgccactggtaattttaaaatctttgttcaggataccggcgtcagcccacagtctgacgacgcgatgacgctggtgaaaacagggggaggggatgcttcgtttacgctgggcaataccggcggtttccgttgatcttgggacctatgagtatgtcctgaaaagtgacggcaccagcaactggaccctgaccaatgatgtcaaacccaacccggaccccatcccaaatccaaagccagacccaaaacccgatccaaagccagacccaaatccaaaaccagaccctactcccgatccaacgccgacacccgttccggagaaacgcattacgccttctacggcagccgtactcaatatggcagcaacattaccgttggtatttgatgctgagctaaacagtattcgcgagcggttgaacataatgaaagcgagtccaaacaacaataatgtctggggggcgacgtataacacccgtaataatgtcaccaccgatgcgggtgccgggtatgagcagacgctgaccggaatgacagtggggatcgacagccgtaatgatattccagaaggaattaccacgctaggcgcttttatgggctattcccattcacatatcagttttgatcgcggaggacatggcagtgtgggcagttattctctgggcggctatgccagttgggaacatgaaagtggtttctatctggacggtgtcgtgaagctgaaccgttttaaaagtaacgtagcaggtaaaatgagcagcggtggagccgccaatggcagttaccacagcaacgggctgggcggtcacattgaaaccgggatgcgatttaccgatggtaactggaacctgacgccgtatgcatcgttaacggggttcaccgctgataaccccgaatatcatttatccaatggcatgaaatcgaaatcagtcgatacccgcagtatatatcgtgaactgggcgcaacgctgagttacaacatgcgtctggggaacggtatggaagttgagccgtggctgaaggcggctgtgcgcaaagaatttgtcgatgataaccgggtgaaagtgaatagtgacggtaatttcgtcaattatttgtcgggcagacgtggaatataccaggcagcaggttaccccattcatcgtattctgcgtaccattctgtgtcccttccgtgctgacaagcgccagcggcagcccgcgatggtcgcagtggtacaggtgaatttttcgcgccggcgtgtataccgggtccatctggctttgcatctgcgccaccgtcaggccgcacgatgccagccagcggcggctttcctcactcacccggtcagccaggatttcactttccagccggtcgagcatctgcaccagcaccggcgggaacaccacactgccaccgtcttcgccaccggactgctgaagggtatccgccaggctgcggcgctgcgttttcgccagctcaccggtggcggtttcaaccctgatgagtggcgtgaagctccccggctgataaatcgtctggatgcgggttctgtcgataagtatcgtggtcaggcggtcgccgtcccagccgtaccagaacgccacacgggcagtctgaatgatgaatggatgatggcgggagatctgattgtcgccagtcccggtgttgcactggcgcatccatccttaagcgctgacgctgatgccggaatcgaaatcgttggcgatatcgagctgttctgtcgcgaagcacaagcaccgattgtggcgattaccggttctaacggcaaaagcacggtcaccacgctagtgggtgaaatggcgaaagcggcgggggttaacgttggtgtgggtggcaatattggcctgcctgcgttgatgctactggatgatgagtgtgaactgtacgtgctggaactgtcgagcttccagctggaaaccacctccagcttacaggcggtagcagcgaccattctgaacgtgactgaagatcatatggatcgctatccgattggtttacaacagtatcgtgcagcaaaactgcgcatttacgaaaacgcgaaagttagcgtggttaatgctgatgatgccttaacaatgccgattcgcgttgaatgggttttgcggtttaccgagttcatggcaaaacccgatggctattgtttgaagacctga

SEQ ID NO: 30347 - DNA, 1593 bp, Homo sapiens
  SIMILAR (403)..(1185): 891254mologous to Escherichia coli phoM,accession number M13608,Smith-Waterman Score=1131.
gacttcgttcgaaccgcgattttggtgctggtgtggttgcaggtaaaagccagtaacagcgtgccggatgcgttagtcgtggatctgctgcctgcgggtctggaactggaaaaccagaatctggcgaacggtagcgccagcctggagcaaagtggtggcgaagtgcagaacttactgaaccagatgcagcaggcgagcattaagcacattgagttccgtgacgatcgctttgtggcggcggttgccgttgatgaataccaaccggtaacgctggtgtatctggcgcgggcggtgacgccgggaacgtatcagcgtggggagcagataaactctggcctctaccgctgcatgaagtcaatcccgcacgagtggtcgtggcgcaggatggtacgccgctctggcgcttcgccgatgctgacggcatctggcgttatccgagcaaacactgaactgcggcagatggcatcgcaggtcattcaagcggatagcgaatcgacgaatattttatgggccagcgccattttgttggggattgcactggtgattggcgcaggcatggtttggtggatcaaccgctctattgcccggctcactcgctatgctgattccgtcactgacaataagcccgttcctctccccgatctcggtagtagcgagttgcgtaaactcgcgcaggcgctggaaagtatgcgcgtgaagctggaagggaaaaactatattgagcagtatgtttacgcattaactcatgagctaaaaagcccactggcggcgattcgtggagcggcggaaattttacgcgaaggtccgccgccggaagtggtggctcgttttactgacaacattctgacgcaaaatgcgcgtatgcaggcattggtagaaacgttactacgccaggcaagactggagaatcgtcaggaagtcgttctgactgctgttgatgtggcggcattattccgccgcgtcagcgaagcgcgcaccgtgcagttggcagaaaaaaaaatcactctgcatgttacgcccaccgaggttaacgttgctgctgaaccggcgttactggagcaggcgctgggaaatttactggataacgccatcgattttacccccgagagcggttgcatcacgctaagcgccgaagtggatcaggaacacgtcacgcttaaggtgctggataccggtagtggtatcctgactacgcgctgtaccagcaactgcgaatatagagtaaacagtttgctactcaacgacggtgatgtttatttgtcagcacaaacagcagcgcctgccacaactaacggtatctacaatacgctgacaaccaatgaactttccggtagcggtaatttctacctgcataccaacgttgcaggctcccggggcgatcaactggtcgtcaacaacaacgccactggtaattttaaaatctttgttcaggataccggcgtcagcccacagtctgacgacgcgatgacgctggtgaaaacagggggaggggatgcttcgtttacgctgggcaataccggcggtttcgttgatcttgggacctatgagtatgtcctgaaaagacggcaacagcaactggaacctgaccaatga

SEQ ID NO: 30348 - DNA, 737 bp, Homo sapiens
  SIMILAR (1)..(600): 1001254mologous to Escherichia coli Outer membrane usher protein PmfC precursor,accession number D90710,Smith-Waterman Score =1043.
atgcaaaacagtagccacagcaccatacaccgcatgtcgtggaacgatacgctggatgaacgtaatagctggggcatgtctgccggactgcaatccgatcgtccggacaatggagcccaggtgagcggtaactatcagcacctgagttcagcgggtgagtgggatatttctggtacctatgccgccagtgattacagttccgtcagcagcagctggagcggttctttcaccgcaacccaatatggtgcagcatttcatcgccgcagctccaccaatgaaccacgcctgatggtcagcaccgatggcgtggcagatattccggttcagggcaatctcgactacaccaaccattttggcattgcggtggtgccgttgatttccagttaccagccttccaccgtggcggtgaacatgaatgacttacccgacggcgtaacagttgcagaaaacgtcatcaaggaaacatggattgaaggcgcgataggttacaaatcactggcttcccgttccggtaaagacgttaacgtcatcatacgcaacgccagcggtcagttccctcccctcggtgcggatatccgccaggatgacagcggcattagctcatctcaatggtgatattgtggtcgcggaagaaacgctgcatatagccgggatactggccacgcgcctgaacatcaccaaagaacatccagcgccggttctcttccatggcctgcaacatatcctgtggctggcag

SEQ ID NO: 30349 - DNA, 3513 bp, Homo sapiens
  SIMILAR (2104)..(2877): 971254mologous to Escherichia coli AraG protein,accession number D90832,Smith-Waterman Score=1283.
atggacggcggtcagttaaatatcagtggtctggttgttgataacacctgtgaaacccgcgttgacggcggtaacaaggatggtctgatcctgctgcaaaccgcaaccgttggtgaaatcgatgctggcgtactgaatgacaccgttggcgctaaagctaaacctttcagcatcaccgttgactgcagcaaagcaaatccgaatccaggtagcacggctaaaatgaccttcggttctgttttctttggtaacagcaaagggactttgaacaacgacatgtctattaacaacccatctgacggcgttaatatcgctctacacaatattgatggttccactatcaaacaggttcaaattaacaaccctggcgatgtgtatactaaagccctggatgcaacgacaaaatctgctgtttatgattttaaagcgtcttacgttcgtgccgtcgcagaccaaacagcaactgctggttatgtaaaaactaacactgcatacaccattacttatcattcatcgtctattgcggacattgtcatttcgggtactcgcgtaatatataaaagcgatcaaaaaagtgtcaacgtacgtctggaaaataaagggaataacccgttgcttgtccagagttggttagatactggcgatgacaacgctgagcctggcagtattacagtcccttttactgctacgccgccagtatcgcgtattgatgccaaacgtgggcaaacaatcaaattaatgtacacagccagcacctcactgcctaaagacagagagagcgtgttctggtttaacgtactggaagttccaccaaaaccagatgcagaaaaggtcgcgaatcaaagcctgctgcaactggcatttcgcacacgtataaaacttttctatcgcccggatggattgaagggaaatccctctgaagccccgttagccctgaagtggttctggtcaggttcagaaggttttgtacttactatggaatggattgccgatccgtctatctgggccgggttaatcacgctgattgtgatcgaactggtcctcggcattgataacctggtctttattgccatcctcgccgaaaaactaccgccgaagcagcgtgaccgcgcacgggttactcgggctgctgctggcaatgttaatgcgcctgttactgctggcgtcaatctcctggctgaaacaaattttgctcggggcgatccccgcttattatttcatattttcggcggtaccttttcttcgcttcgcatgcggttatacgtcaaaatacgagaaatgccgccgcatgattatcaaagtacgcttagcgactatatcgtcgtgcaatttgacggtgccggtagcgttaacgaagaccctactgcccaaaacctgaaatatcatattactggtctggaaaacattcgcgtgctggattgcagcgtcaatttttccatttcaccggaaacacaggtgattgattttggtaaatttaatttgctggatatacgtcgccacacaatgtcgaaaacgttcagtattaaaacgaccaagagccaaaacgatcaatgcaccgacggatttaaagtcagttcctccttttataccgaagaaacgttggttgaagaagataaagcattgttgattggtaatggtctgaagctacgtttactggatgaaaacgcctcgccttataccttcaataaatatgctgaatacgccgatttcaccagtgacatgttggtctacgaaaaaacctatacggctgaacttcggtccttcaggcaccccatcgaggtggccctcgataacaccgtgctgggcggcgtacgcgcgacggaaggtcagggctttaaagcggccgatatcatcggcatgggcattaacggtgtggatgcggtgagcgaactgtctcaagcacaggcaaccggcttctacggttccctgctgccaagcccggacgtacatggctataaatccagcgaaatgctttacaactgggtagcaaaagacgttgaaccgccaaaatttaccgaagttaccgacgtggtactgatcacgcgtgacaactttaaagaagaactggagaataaaggtttaggcgtgattcacggagacgttatgcaacagtctaccccgtatctctcatttcgcggcatcggtgaaacgtttcccggcgttaaggcgctgacggatatgagttctgactgctatgccggtcaggttcatgcgttgatgggtgaaaatggcgcaggaaaatcaactctcttaaaaatcctcagcggcaactatgcgccaaccacgggttctgtagtgattaatgggcaggaaatgtccttttccgacacgaccgcagcacttaacgcgggcgtggcgattatttaccaggaactgcatctcgtgccggaaatgaccgtcgcggaaaacatctatctcggccagctgccgcataaaggcggcattgtgaatcgctcattgctgaattatgaggcgggtttacaacttaaacatcttggtatggatattgacccggacacgccgctgaaatatctctccattggtcagtggcagatggttgaaatcgccaaagcgctggcgcgtaacgccaaaattatcgcctttgatgagccaaccagctccctctctgcccgtgaaatcgacaatcttttccgcgttattcgtgaactgcgaaaagaggggcgggtaatcttatacgtttctcaccgtatggaagaaatatttgccctcagcgatgccattactgtctttaaagatggacgttatgtcaaaacctttaccgatatgcagcaggttgaccacgacgcgctggtgcaggcgatggtcgggcgcgacattggcgatatctacggctggcacccgcgcgcgctggatgaaggtgtaatctgcgatatgtttgaaggtcatgcgccgtacaaaccgcgctatgtcttacccgattacgcccgttttctggcgaacggttccgaatggctggagctggaaggcgcgaaagatcttgatgacgcactctctctgctgaccattctttaccaccacgtaccgtcggtcacatcgatgccggtctacctggggcaactggatgcgttgttgcaaccgtatgttagaattctaacacaagacgagatcgatgttcgaataaaacgtttctggcgttacctcgacagaaccctgccagacgcctttatgcacgccaatatcggcccgtctgattcgcccattacccgcgcgatcttacgtgcagatgcagagttgaagcaggtttcaccgaacctgacctttatctacgatcctgaaatcacccctgatgacctgctgctggaagtggcgaagaacatctgtgaatgtagcaaaccgcacatcgccaacggtccggtgcatgataaaattttcacaaaagggggctacgggattgtgagctgttacaactcactgccgctggcgggtggtggcagcacgctggtacgccttaacctgaaagccattgcgcgagcgcagcgaatcgctggatga

SEQ ID NO: 30350 - DNA, 1666 bp, Homo sapiens
  SIMILAR (95)..(406): 801254mologous to Escherichia coli K12 putative transport protein,accession number AE000174,Smith-Waterman Score=385.
gagctttggccaaaaccggtcggttcaaaggttcccgcacccacctgtggccgttcttcgtctccggagatttcttctttccgggcgcaagataattcgcctggtggcgtttatggcaaaatctgcggagtgctgttcgtcgccgggggccgctgttctggtcacccgcatgatgctgggcgataacgctgaagcgtgtaaccagcatatcgtctggttgccgccagtgagcattaatctcctgcttactattttgctcgcggtcgtggccggtacagtgggatgcctgctgcgtcttccttccggcacgatgctcatcccgatgctggcgggcgcagtgctccagtctggtcagctcatcaccatcgaactaccgctatttgtgcgcggtatgcgtgggggctggacccggtttatgcacattgattttatgactgcctacctcggcaccagccccggcggcttgtatagcgtgtgcgtcatcgcgcagggaggcaatgtcggagatgggtcgcatcatggtgatgaaagcctaggcctgttcagttattttgctggcagcgcctcgcattgcgcgtgttatttcaacctatggtccgaagcgtatggctattgcttgcatgcaggggaccgtaaaaagtgcgcgatcactctgacggtctctgccgccatttataccaacgtacgtggtggaggaggcggttcgaagaagatctcgcgtatggagctccgtatgaagaaagatcacaaggtgcgcgctggtacagtcctgtatcaccacagccgagctcagagaagagatgctctgtttgataaaagcaaaagcttgagttttaaatccagatctgccattgccctcttgaaacttgagaacaagagctcaggatggattcagacccggatcaggatgggcaagaaaaactggaacactcttggagagggagtctgcagctgcaggatgtttttgcccgatgcgaacacattggccaagaacagtgcttgctctgcagccagcgctgtccaagcagcagaccggccagacagccaggaagcagacgccctggagcacatggcccacagtcgctgtgcactcgggtcgactctagaggatcccctgaatttgctggaaatatttctgcgctggctgatgcggaaaatatttcacgtaagattattacccgctgtatcaactccgccaaattgcctaaatcagttgttgcccttttttctcaccccggtgaactatctgcccggtcaggtgatgcacttcaaagagcctttacagacggaagaggaattacttaagcagcaggcatctaaccttcatgagcagtgtaaagctggggtgatattcgcagctgaagaagttatcactcctttgactcctgtgcttagaacgtcatctgcatcaagaactagtttaagctcacgacatcagtctgctcctggagcgacagtattgtataagggcgagaaaatggtgcttaacctggtcgactctagaggatcccctgttgaaacctactacatcatcctagataagaaagatgctcgtgaaatagacatctttttgcgtcagtgccgttctcaaaatctagggctcattaaaccactgtacgagcacgagtacttgttcgtcaaagggcttggacaacatgaaccataa

SEQ ID NO: 30351 - DNA, 2667 bp, Homo sapiens
  SIMILAR (2007)..(2093): 651254mologous to Escherichia coli K12 putative transport protein,accession number AE000174,Smith-Waterman Score=95.
atggttacaatcagggttcccgttccggtaaagacgttaacttcatcatacgcaacgccagcggtcagttccctccccctcggtgcgtatatccgccaggatgacagcggcattagcgtggtactgttgggcgaggaagtacatgcctgcttgggttgcaatgctgcggtgcaacccgatcgcacacactgtgagaataactgccaatgaccaagtcaccagcctgggtatcgaaaaccaaagtgacaaactgccttatcttgcttattcctggatagaaaatgaaaaaggggagaaaagcgatgctcttctggtcgctttgccccctattcaacgtctggaaccgaaagcgacatcgcaggtgcgggttgtgaaacaagcctcaaccacacaattacctggcgatcgtgaaacgctatttttctacaatatgcgcgaaattcctcccgctccggataaaagcagcgaccatgcgatacttcaggtcgctattcaaagtcgtattaaattgttctggcgaccggctgcattacgcaagaaagcaggagaaaaggtcgaactgcagttacaggtcagccagcagggcaaccaactgacactgaaaaatcctaccgcgtattatctgagccatggcctatctggggagaaatgaaaaaaggcgttctcccaggcttwcaaaaccgtgatggttgcaccttttagtacggtcaavacaaacmccggragttatagcggcagccagttttatctcggttacatggatgattacggcgcattacgcatgaacgacgctcaactgcagcggacaatgccgtttacaagcagtggagscgaaatgagtgctggcaaggvgattgttgctcgtcatctgcctgttatttctgccgttgaagtctgcaatgccgctgaactgctattttggtacatctggtggcgcagtagaaaaatcagaagcgattcacccgtttgctgtaccaggcaatgccaaacccggtgataagatctgggaatctgacgatattaaaattcccgtctattgtgacaacaataccaacggcaactttgaaagcgagcatgtctacgcctgggtaaacccctatccgggggtgcaggatcgttattatcaactcggcgtgacatacaacggtgtcgattacgatgccagtctgggaaaaagtcgcatcgacactaaccagtgtatcgacagtaagaacattgatatttatacccctgagcagatcatcgcgatgggatggcagaacaaaatttgctcgggcgatcccgctaatattcatatgtcgcgtacctttctcgctcgcatgcggttatacgtcaaaatacgagaaatgccgccgcatgattatcaaagtacgcttagcgactatatcgtcgtgcaatttgacggtgccggtagcgttaacgaagaccctactgcccaaaacctgaaatatcatattactggtctggaaaacattcgcgtgctggattgcagcgtcaatttttccatttcaccggaaacacaggtgattgattttggtaaatctaatttgctggatatacgtcgccacacaatgtcgaaaacgttcagtattaaaacgaccaagagcctaaacgatcaatgcaccgacggatttaaagtcagttcctccttttataccgaagaaacgttggttgaagaagataaagcattgttgattggtaatggtctgaagctacgtttactggatgaaaacgcctcggccttataccttcaataaatatgctgcatacgccgatttcaccagtgacatgttggtctacgaaaaaacctatacggctgaactttcgtccattccaggcaccccccatcgaggctggccccttcgatacagtggtgctttttaagattaactataactgatttaccatgatgccctttgccgccggaaagggcatctctttcagaaaattgctgattttccccttttccttgattgctgatattttttcctggcccagctttctttatgctgtatcgatacaccacagagaaaataatgagggagcgaaggatgccagtttttgcagtggggaatgttatgtgtgctatcacttctcctttctattgagttactcgcgggacatctcccggcggcgctattacttgtgccgatgatcgccgggatcatctttagtatgcgcggaagtactctgcaacttccccgctctgcttttctcgccgcccaggccattcttggctgcatgattgcgcaaaacctcactggttcgattctcaccaccctggccgtcaactggccgatcgtgcttgcaattttactggtaacgctgctttccagcgccattgtgggttggttattggtgcgctatagctcattgcctggaaataccggtgcctggggctcctctcctggcggcgcggcggcaatggtcgctatggcgcaagattacggcgcagatattcgcctggtggcgtttatgcaatatctgcgagtgctgttcgtcgcgggggccgctgttctggtcacccgcatgatgctgggcgataacgctgaagcggttaaccagcatatcgtctggttcccgccagtgagcattaatctcctgcttactattttgctcgcggtcgttgccggttccgtgggatatgctccttggaagtacaagtaa

SEQ ID NO: 30352 - DNA, 1692 bp, Homo sapiens; identical to SEQ ID NO: 26091
  SIMILAR (859)..(1557): 961254mologous to Escherichia coli K12 putative chloride channel,accession number AE000255,Smith-Waterman Score=1142.

SEQ ID NO: 30353 - DNA, 218 bp, Homo sapiens
  SIMILAR (160)..(26): 951254mologous to Escherichia coli K12 putative glycosidase,accession number AE000463,Smith-Waterman Score=241.
atgattacgaattcgagctcggtaccccccggaacgcttcacccgtccaggcgtggacccagttatcctccggcagatagagcgtccagtcgctacggcattcttcatgcaccggagcgaccagaatgtcgcgacctaacaggtactgatatttcagggaacagcgggcgcataaccggcaggccggacttcgcattcagcgcgacggcctctttcag

SEQ ID NO: 30354 - DNA, 3198 bp, Homo sapiens; identical to SEQ ID NO: 29650
  SIMILAR (1318)..(1854): 981254mologous to Escherichia coli ORF_f325,accession number U28377,Smith-Waterman Score=936.

SEQ ID NO: 30355 - DNA, 1207 bp, Homo sapiens
  SIMILAR (41)..(1123): 911254mologous to Escherichia coli K12 putative glycosidase,accession number AE000463,Smith-Waterman Score=1827.
  misc_feature (1)...(1207): n = a,t,c or g
tttaaacaggaaagagagagaacgagagaaaagaggacccatccctctgctggaaaaattaaccgccctgctgggacgccagccagaactgcccgactggatttatgacggagtaacgctcggcattcagggcgggacggaagtgtgccagaagaaactggacaccatgcgtaacgcgggcgtgaaggtcaacggcatctgggcgcaggactggtccggtattcgtatgacctctttnggcaaacgcgtgatgtggaactggaagtggaacagcgaaaactacccgcaactggattcacgcattaagcagtggaatcaggagggcgtgcagttcctggcctatatcaacccgtatgttgccagcgataaagatctctgcgaagaagcggcacaacacggctatctggcaaaagatgcctctggcggtgactatctggtggagtttggcgagttttacggcggcgttgtcgatctcactaatccagaagcctacgcctggttcaaggaagtgatcaaaaagaacatgattgaactcggctgcggcggctggatggctgacttcggcgagtatctgcccaccgacacgtacttgcataacggcgtcagtgccgaaattatgcataacgcctggcctgcgctgtgggcgaagtgtaactacgaagcccttgaagaaacgggcaagctcggcgagatccttttctttatgcgcgccggttctaccggtagccagaaatactccaccatgatgtgggcgggcgaccagaacgtcgactggagtctcgacgatggcctggcgtcggttgtcccggcggcgctgtcgctggcaatgaccggacatggcctgcaccacagcgacattggcggttacaccaccctgtttgagatgaagcgcaaccaaaggagctgctgctgcgctggtaaccgtcctggcgacaactggcagtttgacggcgacgcagaaaccatcgcccatttcgcccgtatgaccaccgtcttcaccaccctgaaaccttacctgaaagaggccgtcgcgctgaatgcgaagtccggcctgccggttatgcgcccgctgttcctgcattacgaagacgatggtaccgagccctcggtccaactcgcttatgacgagcgcgcaccagctggtacttactgtgtcagatactccaccgatgtgtatcagacgcgagaacgggaacagcaggaataa

SEQ ID NO: 30356 - DNA, 1491 bp, Homo sapiens
  SIMILAR (223)..(1356): 771254mologous to Escherichia coli O157:H7 putative outer membrane protein,accession number AE005365,Smith-Waterman Score= 1494.
atggttcttgattcctttaatggcgagatccccttaaacggattatctgccagactagtcattggagaacagatgattgatgtcttagggccggagaaacgcagacggcgtaccacacaggaaaagatcgcaattgttcagcagagctttgaaccggggatgacggtctccctcgttgcccggcaacatggtgtagcagccagccagttatttctctggcgtatgaacggtaacaacggtaatagcagcgaagtgcattatcgcgactatacgttgccggatgtgccgaagcccaatacggttagtgtaacgtcgggaagtgatgaggctggtggcagcatgaacaacctcaacggctatgtcgtcggtaccaacgtttacggcagcgccgggaagctgaaggttcacaatgccagcatgaacggcgtggagattaacacgggctttaccgctgtggaaggtagcaacctgaccgacgctgacgccatcacctcaacgtccgtggtatggactgccaaaggcagcaccgatgccagcggtaacgttgacgtcaccatgagccacaatgcctacaccgatgtggcaacagatgcctcggtgaatgacatcgcgaaagcactggatgcgggttacaccaacaacgaactgtttaccagcctgaacgtcggcacgactgctgaactgaacagtgctctgaaacaggtcagcggtagccaggcgaccacggtattccgcgaagcgcgcgtgttaagcaaccgctttagtatgctggcagatgccgcgccgaaagtgggtaacggtctggcgttcaacgttgtcgcgaaaggcgatccgcgtgccgagttaggtaataataccgaatacgacatgctggcattgcgtaaaactatcgacctgagcgaaagccagacgatgagtctggagtacggtatcgctcgtctccatggtgatggtgcgcagaaagcgggtgataatggcgttacaggcggttatagccagttttttggcctgaaacatcagatgtcgttcgataacggcatgaactggaataacgccttgcgttacgacgttcacaaccttgacagcagccgctcgattgcatttggcaacacgaacaaaacggctgataccgacgttaaacagcagtacctggagttccgcagcgaaggggcgaagactttcgaaccgagcgaaggactgaaggttacgccatatgcgggtgttaaactgcgtctcacactggaacaaagaaacaaagaaaaagaaaggagcaggggagcgagaacgaaagaagggaacgacgaacacgcagaagaggcgctacaaggcgaaagagacacgagagcgagagagggaaaaaccggcacgaggagccggaagagagagggacgaagaaaagaagaagaaggggaaggagcgaagcgacaagaacacgagagaaaggaaaaacgacgggagaaagagattcttcacagacggttgattgtctga

SEQ ID NO: 30357 - DNA, 4024 bp, Homo sapiens
  SIMILAR (2987)..(3895): 991254mologous to Escherichia coli flagellin,accession number M14358,Smith-Waterman Score=1490.
atgcgccgcagacatctgggtacgaatacgcgcctgacctttcggaacgaccggatagaagaaaccggtaacgtaaatgccctctttttgcagctcacgggcaaatttctgcgccactaccgcatcaccaagcatgaccggaataatggcgtgatcggctcacgccagggtaaagcccgccgccgacatttgctcacggaactgacgcgcgttcgcccacagacggtcacgcattcgctgcccgctttcgacatctccagtactttgatggacgcggcaacaatggccggtgccagcgagttggagaacagacggtgtatcaatatcaatgtggactggtcagcgtttataacgatgcacagaacaattgttaactatggtacaatctgcactttcggcgtgtgccaatcggggaatgagtacaataatacagatgatttcacctcactgatctataccggtggcgatacgattacacgaagcggagaaactgtaacgctaaataaatctgctgctgtgactgataagctggctgggaatgttgttaatagcggaacgctttccggtgatcaaattacggtatcaagcggtcttctggaaaataccagcggtggcatcatcaataacttagtaaaacttgacaagggtgccgtcattaaaaatgccggggtgatgacgaataacgtcgatgttagcggtggaatcctcaataatgccggagaaatgactgcgcaaattaccatgaatgctggtgctgatagttcgttagtgaacaacaccggaaccatcaataaaatcgtgcagaacgcgggggtattcaataatagtggcagtgtaacagggcggatgatgtcggctggcggggtctttaataatcaaactgacggggcgattatgagaggtgctgcgctgacaggtactgcagtggcaaataacgaaggaacctggaacctcggaagtagtagtgagggtaacaacaccgggatgctggagagttaataataattcagctttcaatagccgcggcgagtttattcttgataacgacaagaatgctgtgcacatcaaccagtccggtacgctttataataccggtcacatgaacatcagtaattcttcccacaacggagccgttaatatgtggggcggaaatggtcgttttatcaatgacggaacgattgatgtttctgcgaagtcactggtagtcagcgctaataatgccggcgatcagaatgccttcttctggaaccaggataacggggtcatcaacttcgatcacgacagcgccacaactttattgcccagaatgacggcatcatttgctgcccgtggtgttgatgaacgccgctggatgcgcttcggttgcgctactcgcccaatcccgaatctaccagaagcgcgcgccagccgaatgtgttcatcgccggaaaccggattatcactggaaacggccgctaaactaagtgaagtcatgccaggagctggcggacgttcctgcctggaacgctacgaatatgccaaacacggtgcctgctttggttttgatccggacgcatacttcggtacgatggtacgcctgaatcaagaaattaaagagagcgaacgcggaaaattccttgcggataattacggtaaaacagtgagccgccgtgactttgacgccgcctttgccaaaagctggggaaaagagaacgtgaaagcagttaagctaacgtgccagggtaaccctgcgtatttgactgaaattcagatctcgatcaaagctgacgccatcaacgctccgctttctgcaaactcattcttgccacaacctcacccagaggatgcactcgcatcctctttacgcaaaatcagcaatttttcctggttctcactgttcacttttgctgcaaaattattccgtttcgtttgtgggaataaccatggcagaagcattttacatcctgataggatgtctgattatggcggcgattatcgtcatggctgtcctttacctcgaaaaccactcctgacgatcatattgttccccccggcatcgcattcaccagacctgaaaccgccttctgcgccgcctctgcgctttgtgcaccgggtaccagaatcaccttacggcactcctcttcacgtttttcgaaaatctcatatccccgggcggcctcttcaaacggcatatagtggtgtcgaggtgataggcattcagtcggagaaactcagtcgctatcttgagcgtttacatactgccggactcaacgtgacgcgggttttgccagatggctgctatcttccctgggaagtagatagctggactctggttaaccagcaaacaagctggctcattcgcagtgccgcacatgccttcaacgaactggatgaacactggttacagcatcttgctgcccagtttccgcctgagaatatgctttgttatggtgtagtacctcacggcgttgcagcggccaatccacttatccagcatcctgaaataccatcactgagtttgtattctgccgatattgcattccagcgctatgacatgctgcatggtatttttcgtaaacagaaaactgtaagcaaatcgggaaaatggctcgcccgcctggcagtaagctgtctcgttctcgccattctttcttttgttggcagccggagcatcgcgctctggcatacgcttaagattgaagatcaacttcagcaacaacagcaagaaacctggcaacgttatttcccgcagatcaaacgcacccacaattttcgtttttactttaagcagcaactcgctcagcaatatcctgaagctgtgccgttgctctatcatttacaaacacttctgctggaacaccctgaactgcagttaatggaggcgaactatagccagaagcaaaagtcgctgaccttaaaaatgagtgctaagagtgaagctaatatcgatcgtttctgtgagttaacacagtcctggcttccgatggataaaacagaaaaagatccgaaccagtctgcgctgtcgagttctatcgagcgtctgtcttctggcttgcgtattaacagcgcgaaggatgacgcagcgggtcagtcgattgctaaccgtttcacctctaacattaaaggcctgactcaggcggcccgtaacgccaacgacggtatctccgttgcgcagaccaccgaaggcgcgctgtccgaaatcaacaacaacttacagcgtgtgcgtgaactgacggtacaggccactaccggtactaactctgagtctgatctgtctgctatccaggacgaaattaaatcccgtctggatgaaattgaccgcgtatctggtcagacccagttcaacggcgtgaacgtgctggcaaaaaatggctccatgaaaatccaggttggcgcaaatgataaccagactatcactatcgatctgaagcagattgatgctaaaactcttggccttgatggttttagcgttaaaactaacgatacagttaccactagtgctccagtaactgcttttggtgctaccaccacaaacaatattaaacttactggaattaccctttctacggaagcagccactgatactggcggaactaacccagcttcaattgagggtgtttatactgataatggtaatgattactatgcgaaaatcaccggtggtgataacgatgggaagtattacgcagtaacagttgctaatgatggtacagtgacaatggcgactggagcaacggcaaatgcaactgtaactgatgcaaatactactaaagctacaactatcacttcaggcggtacacctgttcagattgataatactgcaggttccgcaactgccaaccttggtgctgttagcttagtaaaactgcaggattccaagggtaatgataccgatacatatgcgcttaaagatacaaggcgcttcgcgaagtatgtcgcggccttttggaggatagccagctcttcatcccgttctgccagctggcgtttgagacgtgcaatctcggtagacatctccagttcacgttcagaagacgtctgctga

SEQ ID NO: 30358 - DNA, 3316 bp, Homo sapiens
  SIMILAR (544)..(1239): 761254mologous to Escherichia coli O157:H7 putative outer membrane protein,accession number AE005365,Smith-Waterman Score= 932.
atggccgcattaccatacatgcaactgtacatagctgattacctggctgacaccatgcatttgtcagcagaggagcatggtgcgtatttgttgctgatgttcaattactggcaaacaggaaagccaatacctaaaaacaggctggcaaaaattgcccgtctgactaacgagcgatgggctgatgttgaaccatccttgcaggagtttttttgcgataacggcgaggaatgggtgcatcttcggattgaggaagatctggcatcagtcagggaaaaattaaccaaaaaatcagccgcaggaaaagcatctgttcaggccagaagaagcagaaaggaagcagatgttcaaacaaaacaagagagaaatttaacaggtgttcaaacagatgttgaagtggtgtttgaacatgatgtcaacacaaaggcaactaataaagatacagataaagatctaaaaacagatccccccctaaatcccccccgggggaatcgaggtgtcaaaaagtttgaccctctggatattactttgccgaactggatttctgtctcgctttggctcagcgctaataatgccggcgatcagaatgccttcttctggaaccaggataacggggtcatcaacttcgatcacgacagcgccagtgccgtgaaagtcacccacagcaactttattgcccagaatgacggcatcatgaacatcagcggcaccggtgctgtggctatggaaggtgataagaacgcgcagctggttaacaatggcaccatcaacctcggtaccgcaggcactactgacacgggtatgatcggtatgcaactcgatgccaacgccacggcggatgcggtaatcgaaaacaacggcaccatcaatatcttcgccaatgactcgtttgcatttagcgtactgggtacagtaggtcatgtggttaacaacggcacggtggtgattgccgatggggttacgggttctggactgatcaagcagggcgacagcatcaatgttgaaggtatgaacggtaacaacggtaatagcagcgaagtgcattatggcgactatacgttgccggatgtgccgaagcccaatacggttagtgtaacgtcgggaagtgatgaggctggtggcagcatgaacaacctcaacggctatgtcgtcggtaccaacgttaacggcagcgccgggaagctgaaggttaacaatgccagcatgaacggcgtggagattaacacgggctttaccgctggctacggcagacaccactgtgagttttgataacgtagtggaaggtagcaacctgaccgacgctgacgccatcacctcaacgtccgtggtatggactgccaaaggcagcaccgatgccagcggtaacgttgacgtcaccatgagcaaaaatgcctacaccgatgtggcaacagatgcctcggtgaatgacatcgcgaaagcactggatgcgggttacaccaacaacgaactgtttaccagcctgaacgtcggcacgactgctgaactgaacagtgctctgaaacaggtcagcggtagccaggcgaccacgggattccgcgaagcgcgcgtgttaagcaaccgctttagtatgctggcagatgccgcgcccgaagggggtaacgggctggcgttcaacgttgtcgcgaaaggcgatccgcgtgccgagttaggtaataataccgaatacgacatgctggcattgcgtaaaactatcgacctgagcgaaagccagacgatgagtctggagtacggtatcgctcgtctcgatggtgatggtgcgcagaaagcgggtgataatggcgttacaggcggttatagccagttttttggcctgaaacatcagatgtcgttcgataacggcatgaactggaataacgccttgcgttacgacgttcacaaccttgacagcagccgctcgattgcatttggcaacacgaacaaaacggctgataccgacgtgaaacagcagtacctggagttccgcagcgaaggggcgaagactttcgaaccgagcgaaccggatggcaacgccaaaccggctattttactgatgatccgcaaactgccggaagccaatataatccagacggatcgctcccccaccattcgcgcctcgctggaagaagtcgagcaaacgctgattatctcggtggcgctggtgattctggtggtgtttttattcctgcgctcgggtcgcgccactattattcccgccgtttcggtgccggtttcgctgattggtacgtttgcggcgatgtacctgtgcggattcagtctcaataacctttcgttaatggcgctcaccatcgctactggtttcgtggtggatgacgccatcgtggtgctggaaaacattgcacgtcatctggaagcgggaatgaaaccgttgcaagccgcactgcaaggtactcgcgaagtcggttttacggtgctgtcgatgagtctgtcactggtggcggtgttcctgccgctgctgttgatgggcggattgccgggccgactgttacgcgaatttgccgtgacgctttctgtcgccattggtatatcgttgctggtttctctgacattaacgccaatgatgtgtggctggatgctgaaagccagcaagccgcgcgagcaaaagcgactgcgtggttttggtcgcatgttggtagccctgcaacaaggctacggcaagtcactaaaatgggtgctcaatcatacccgtctggatttcatgaaaattatccgtgacgatccggcagtggataatgtcaccggctttacaggcggttcgcgagtgaacagcgggatgatgtttatcccagtgccgcgcttaatactggcattaacacatcgcgcatccagcgatggcgagtcaggacatcttcgcccgccaaaacgcatcactttgccgataccttcgttgaggttgcagtacgcccggttgccgtcggtcacgttctcaaccaccagcatcggcatactggcagaagtaataccgcccattggcccgacggcattcacatggccccacccagctaagaaaaccttctacccgggcccgcgcaacaacgggcaaaagaacgatgaggagcgggtcaccgcgcgcgcaggcccagaccactcgagaacgacaagaccagaccacaacactcaccccggcccgggagagcaggagacagctgtggaccttcttggtacaatcagcaggtggtccagtcggtacttcggaaatgatccttgcacaagttctacagcgaggaaaccctttgcgttacgcacaccaattcaccaggcagcatcgccccgtttactgcggtttttttcgccgtcataa

SEQ ID NO: 30359 - DNA, 1342 bp, Homo sapiens
  SIMILAR (269)..(526): 971254mologous to Escherichia coli K12 putative glycosidase,accession number AE000463,Smith-Waterman Score=460.
atgcgcaccggttctaccgctagccagtatacttcccccatgatgtgggcgggcgaccacgacattggcggttacaccaccctgtttgagatgaagcgcagcaaagagctgctgctgcgctggtgcgatttcagcgccttcacgccgatgatgcgcacccacgaaggtaaccgtcctggcgacaactggcagtttgacggcgacgcagaaaccatcgcccatttcgcccgtatgaccaccgtcttcaccaccctgaaaccttacctgaaagaggcccgtcgcgctgaatgcgaagtccggcctgccggttatgcgcccgctgttcctgcattacgaagacgatgcgcacacttacaccctgaaatatcagtacctgttaggtcgcgacattctggtcgctccggtgcatgaagaaggccgtagcgactggacgctctatctgccggaggataactgggtccacgcctggacgggtgaagcgttccggggcggggaagttaccgttaatgcgcccatcggcaagcccgccgaatcgcccaaggagtccggccttatctggtgctcctccgcgctctgggagccctgtggccgtggttccgaaggtaattcttcccacaacggagccgttaatatgtggggcggaaatggtcgttttatcaatgacggaacgattgatgtttctgcgaagtcactggtagtcagcgctaataatgccggcgatcagaatgccttcttctggaaccaggataacggggtcatcaacttcgatcacgacagcgccagtgccgtgaaagtcacccacagcaactttattgcccagaatgacggcatcatgaacatcagcggcaccggtgctgtggctatggaaggtgataagaacgcgcagctggttaacaatggcaccatcaacctcggtaccgcaggcactactgacacgggtatgatcggtatgcaactcgatgccaacgccacggcggatgcggtaatcgaaaacaacggcaccatcaatatcttcgccaatgactcgtttgcatttagcgtactgggtacagtaggtcatgtggttaacaacggcacggtggtgattgccgatggggttacgggttctggactgatcaagcagggcgacagcatcaatgttgaaggtatgaacggtaacaacggtaatagcagcgaagtgcattatggcgactatacgttgccggatgtgccgaagcccaatacggttagtgtaacgtcgggaagtgatgaggctggtggcaggatgaacaaactcaaaggatatgtcgtcggtaccacgttaacggagggccgggaactgaacgttaacaaggccggatga

SEQ ID NO: 30360 - DNA, 912 bp, Homo sapiens
  SIMILAR (816)..(908): 521254mologous to Escherichia coli K12 putative transcriptional regulator, sorC family,accession number AE000249,Smith-Waterman Score=67.
acaaactgtgggtgccatcacagatataaatgagcaagaactgaacaattgcattaaagatttaaatatgttcaaagtgaagaatgaattatgacaatcaacgattcggcaatttcagaacagggaatgtgtgaagaagaacaggtcgcgcggatcgcgtggttttactatcacgacgggctgacccagagcgagatcagcgatcgtctcggcctgacacgtttgaaagtgtcgcgattgctggagaaagggcatcagtccggcattattcgcgtacagattaattctcgctttgaaggctgtctggaatatgaaactcaattacgtcgtcagttttcgctgcaacatgtccgggtgatccctgggcttgcggatctcgatgtcggagggcgactggggataggcgcggcgcatatgttgatgagtttacttcaaccacaacagatgctggcgattggttttggcgaggcaaccatgaatacgctgcaacgcttaagtggttttatttcgtcacagcaaattcgcctggtcacgctctccggtggcgtcggttcttatatgacgggaatcgggcagcttaacgcggcgtgcagtgtgaatattattccggctccgttgcgggcatcctccgctgacattgcccgtacgctaaaaaatgaaaattgcgtcaaagatgttctgttagccgcgcaacgagcggatgcggcgattgtcggcattggtgctgtgagtcaacaggacgatgcgacaatcattcgctccggttatatcagccagagcgaacagttaatgattggcccgaaaagggcggtagggacattttaggctacttttttgatgcaaaggtgacgctgcacgaatatcaaaatacataacgaactgttggcctaccctcaagcgccgtgagaccat

SEQ ID NO: 30361 - DNA, 700 bp, Homo sapiens
  SIMILAR (254)..(517): 971254mologous to Homo sapiens RNA helicase,accession number X98743,Smith-Waterman Score=469.
  misc_feature (1)...(700): n = a,t,c or g
gaataccccaggatttatgtataaaaacctgcagtgtctggttattgatgaagctgatcgtatctttgatgtggggtttgaagaggaattaaagcaaattattaaacttttgccaacacgtagacagactatgctcttttctgccacccaaactcgaaaagttgaagacctggcaaggatttctctgaaaaaggagccattgtatgttggcgttgatgatgataaagcgaatgcaacagtggatggtcttgaacagaagaaccgaaagaagaagcttatggtcttcttttcatcttgtatgtctgtgaaataccactatgagttgctgaactacattgatttgcccgtcttggccattcatggaaagcaaaagcaaaataagcgtacaaccacattcttccagttctgcaatgcagattcgggaacactattgtgtacggatgtggcagcgagaggactagacattcctgaagtcgactggattgttcagtatgaccctccggatgaccctaaggatatnttcatcgtgtgggtagacagcnagagccnaattggagaaggcatnccttcgccatttgccgccagaagaatgggtttcttccntacttgaaacnatcaaggttccattaagtgaattganttccctgnctaaattctganatcagctccgcttgagaaatgatgaaagattcntcttcat

SEQ ID NO: 30362 - DNA, 507 bp, Homo sapiens; identical to SEQ ID NO: 7773
  SIMILAR (282)..(341): 601254mologous to Homo sapiens RNA helicase,accession number X98743,Smith-Waterman Score=57.

SEQ ID NO: 30363 - DNA, 2679 bp, Homo sapiens
  SIMILAR (40)..(1497): 941254mologous to Homo sapiens RNA helicase,accession number X98743,Smith-Waterman Score=2367.
atggaaaaattttttcggattttgtcttttaaaaccaaagatacgaaaaaagcaaaaactgaaaacaaagggaaatctgaagaagaaagtgccgagactactaaagaaacagaaaataatgtggagaagccagataatgatgaagatgagagtgaggtgcccagtctgcccctgggactgacaggagcttttgaggatacttcgtttgcttctctatgtaatcttgtcaatgaaaacactctgaaggcaataaaagaaatgggttttacaaacatgactgaaattcagcataaaagtatcagaccacttctggaaggcagggatcttctagcagctgcaaaaacaggcagtggtaaaaccctggcttttctcatccctgcagttgaactcattgttaagttaaggttcatgcccaggaatggaacaggagtccttattctctcacctactagagaactagccatgcaaacctttggtgttcttaaggagctgatgactcaccacgtgcatacctatggcttgataatgggtggcagtaacagatctgctgaagcacagaaacttggtaatgggatcaacatcattgtggccacaccaggccgtctgctggaccatatgcagaataccccaggatttatgtataaaaacctgcagtgtctggttattgatgaagctgatcgtatcttggatgtggggtttgaagaggaattaaagcaaattattaaacttttgccaacacgtagacagactatgctcttttctgccacccaaactcgaaaagttgaagacctggcaaggatttctctgaaaaaggagccattgtatgttggcgttgatgatgataaagcgaatgcaacagtggatggtcttgaacagggatatgttgtttgtccttctgaaaagagattccttctgctctttacattccttaagaagaaccgaaagaagaagcttatggtcttcttttcatcttgtatgtctgtgaaataccactatgagttgctgaactacattgatttgcccgtcttggccattcatgtaagtgatgatgatgagctcattgaaaacaggggaaagcaaaagcaaaataagcgtacaaccacattcttccagttctgcaatgcagattcgggaacactattgtgtacggatgtggcagcgagaggactagacattcctgaagtcgactggattgttcagtatgaccctccggatgaccctaaggaatatattcatcgtgtgggtagaacagccagaggcctaaatgggagagggcatgccttgctcattttgcgcccagaagaattgggttttcttcgctacttgaaacaatccaagcttgagaaattgattgaaaagaattactttcttcataagtcagcccaggaagcatataagtcatacatacgagcctatgattcccattctctgaaacagatctttaatgttaataacctaaatttgcctcaggttgctctgtcatttggtttcaaggtaatgtataggaaagaacagagagagggttcagtgttgtccacagtttcagacatccactggggatccaggaatgtatccctggaggataagggggaactaccgtattcgctgggtgctgtttgtgattgtagtggcaggatggtccaggctagggacaagagacaaccagacttgaccagcctggccagattcagatatgaaggagccagttactggtatcacgtacaaaggcagtgctcaggacagtgccctggtgctgagtgctctgtccatggtaccggcctccgtgcatcctacgtgaaaaacttgctgccatacagcagcaggtacagaggctcatcccaaaccgtgagccagtctgggctttggcatacaggatttctaacagtctggatctcttggaattctggagagcagacttgggctttggaaagcggtccagtcctgcagcaccttcctaagaatggaaggaatgaaaacacaaggattaggtgtacagtcaggccaagtcagatcttagaaacaagacctaacgacactattatcaggaacatcaggaaaaggggaagaagcagagggctctcggctgtgcactcaggacagctgctgcgacggggccggctacgcttgtcagagcagcagctggtgattttggacttgcctttgctggcaggggagcgctatcgagggttcattttatccagcttgaggaaagaaaggtcggagtgtaggggaagagtgggacaaacacgcgacccagtcatgccgagagcatgcgctgagggggacgtggagcgaggagtggggctcaggctgctgaggctccggaccaagtgccccctgcactttcaacgccgtctcccggcagccctggaaggacagtcttacccggacgccacggtggtctcccggcagccctgggaaggacagtcttacccggacgccacggtggtctcccggcagccctgggaaggacagtcttacccggacgccacggccgagctgcccttccctccctgctgcccccagggaaggctgctggtgtcctcagatgcgggcaggaggaacccgccagcgcctgagagcctggcccgaaccaggcctggaggtgctggggcgaagacacagaggatgtggcctccatccctggtaacagacggttaccagggcggctttgggtga

SEQ ID NO: 30364 - DNA, 1071 bp, Homo sapiens; identical to SEQ ID NO: 7774
  SIMILAR (1)..(402): 681254mologous to Drosophila melanogaster helicase pitchoune,accession number U84552,Smith-Waterman Score=504.

SEQ ID NO: 30365 - DNA, 348 bp, Homo sapiens
  SIMILAR (1)..(348): 901254mologous to Homo sapiens RNA helicase,accession number X98743,Smith-Waterman Score=537.
ggatatgttgtttgtccttctgaaaagagattccttctgctctttacattccttaagaagaaccgaaagaagaagcttatggtcttcttttcatcttgtatgtctgtgaaataccactatgagttgctgaactacattgatttgcccgtcttggccattcatgtaagtgatgatgatgagctcattgaaaacaggggaaagcaaaagcaaaataagcgtacaaccacattcttccagttctgcaatgcagattcgggaacactattgtgtacggatgtggcagcgagaggactagacattcctgaagtcgactggattgttcagtatgaccctccggatgaccctaag

SEQ ID NO: 30366 - DNA, 711 bp, Homo sapiens
  SIMILAR (624)..(710): 891254mologous to Homo sapiens RNA helicase,accession number X98743,Smith-Waterman Score=135.
atggctgaaattcagcataaaactatcagaccacttctggaaggcagggatcttctagcagctgtaaaaacaggcagtggtaaaaccttggctgttctcatccctgctattgaactcgttgttaagttaaagttcatgcccaggaatggaacaggggtccttattctctcacctactagacaactagccatgcaaacttttggtgttcttaaagagctaatgactcaccatgtgcacacctatgggttgataataggtggcagtaacagatctgctgaagcacagaaacttgctaatgggatcaacatcattgtggtcacaccaggccgtctgctggaccatacgcagaataccccagggtttatgtataaaaacctgcaggttgaggacctggcaaggatttctccgaaaaaggagccattgtatgttggtgttgatgaagataaagctaatgcaactgtggatggtcttgagcagggacactttgtttgtccctctgaaaagagataccttctgctctttacattccttaagaagaaccaaaagaagaagctcatggtcttcttttcagcttgtatgtctgtgaaatacccctacgggttgctgaagtacattgatttgctgtcttggccattcatggaaagcaaaagcaaaataagcatacaaccacattcttctagtactgcaacgcagattcaggaacactattgt

SEQ ID NO: 30367 - DNA, 987 bp, Homo sapiens
  SIMILAR (472)..(410): 571254mologous to Homo sapiens neuronatin alpha,accession number AB002392,Smith-Waterman Score=66.
  misc_feature (1)...(987): n = a,t,c or g
tttgttcattttcaatcttcacagcaaatgtattttttgtttcagggcccgggaagaggtatttttttcctcagaaagaagctaccattaatgtgtgctgggcaccgtctgacagcttggctctaactccaagtaagttgcccttgtcttctaagtactctacagagtgcaaaggcttaccaaatccaaaccaccttgaattaagcaaatcttaatgaggagcatcatcgttctttgtatgaaagtctttgttatgttaccaaatgaagaaatgcagtacattacacctcctattgatgtcaaatgaggctcaaaacatctcaattccatcctcttcctaccccccagccatcaaacgttataactgcttagtgacactttattcaaattacaacccatagtttttgctccaaaaaatgcaacacctgagaaaggcctgttgctttaaaatcaagaatctataaaagccaatgcccacccctaatccttaaggtgccttccttaggtanttcccccaaagcctctttgcctctttttatactgccagcatttttcaggaggagtcatttagatactgtcaaggtcccaagaaataactaaaaaaaaaaaataacctgagactctttttctgcanccgccaccagctgcccagtacactaggtcaccttttacagcagtgagcacagcaatccatgccacaaaaatcttcgcaaagcaagaaggaaagatacaaaaagaattatattaaaatggtaacatacacttgtatgagggagggatatttaaaattaaaatattatcatcacaagaaacaccagatattccttgctctgcccttgggcaaccaagaaacttaaagcctgttttatatcccagaaataaaagagagacgtgatagaacgtaacagtgctcagtgcttgcaacccaagtcaatttatactcttgttaggtaagtccaaattctaaagtctacaaaaatcctgtta

SEQ ID NO: 30368 - DNA, 3175 bp, Homo sapiens
  SIMILAR (188)..(835): 991254mologous to Homo sapiens Human RNA-associated protein- 10 (RNAAP-10),accession number Y70229,Smith-Waterman Score=1064.
  misc_feature (1)...(3175): n = a,t,c or g
ggaaaaaaaatttgcccgcctgctggaattccgcacgagggaagtaacgtcagcctgagaactgagtagctgtactgtgtggcgccttattctatgcacttgttgggcagaatgtcacacctgccgatgaaactcctgcgtaagaagatcgagaagcggaacctcaaattgcggcagcggaacctaaaagtttcagggggcctcaaatctgaccctatcggaaactcaaaatggagatgtatctgaagaaacaatgggaagtagaaaggttaaaaaatcaaaacaaaagcccatgaatgtgggcttatcagaaactcaaaatggaggcatgtctcaagaagcagtgggaaatataaaagttacaaagtctccccagaaatccactgtattaaccaatggagaagcagcaatgcagtcttccaattcagaatcaaaagggaaaatgaagaaaaagagaaaaatggtgaatgatgctgagcctgatacgaaaaaagcaaaaactgaaaacaaagggaaatctgaagaagaaagtgccgagactactaaagaaacagaaaataatgtggagaagccagataatgatgaagatgagagtgaggtgcccagtctgcccctgggactgacaggagcttttgaggatacttcgtttgcttctctatgtaatcttgtcaatgaaaacactctgaaggcaataaaagaaatgggttttacaaacatgactgaaattcagcataaaagtatcagaccacttctggaaggcagggatcttctagcagctgcaaaaacaggcagtggtaaaaccctggcttttctcatccctgcagttgaactcatttgttaagttaaggttcatgcccaggaatggaacaggagtccttattctctcaccctactagagaactagccatgcaaacctttggtgttcttaaggagctgatgactcaccacgtgcatacctatggcttgataatgggtggcagtaacagatctgctgaagcacagaaacttggtaatgggatcaacatcattgtggccacaccaggccgtctgctggaccatatgcagaataccccaggatttatgtataaaaacctgcagtgtctggttattgatgaagctgatcgtatcttggatgtggggtttgaagaggaattaaagcaaattattaaacttttgccaacacgtagacagactatgctcttttctgccacccaaactcgaaaagttgaagacctggcaaggatttctctgaaaaaggagccattgtatgttggcgttgatgatgataaagcgaatgcaacagtggatggtcttgaacagggatatgttcgtttgtccttctgaaaagagattccttctgctctttacattccttaagaagaaccgaaagaagaagcttatggtcttcttttcatcttgtatgtctgtgaaataccactatgagttgctgaactacattgatttgcccgtcttggccattcatggaaagcaaaagcaaaataagcgtacaacccacattcttccagttctgcaatgcagattcggggaacactattgtgtacgggatgtgggcagcgagaggactagacattcctgaagtcgactggattgttcagtatgaccctccggatgaccctaaggaatatatttcatcgtgtggggtaggaacagccagagggcntaaatggggaggaggggcatgccttggcttcatttttgcggcccaggaaggatttggggtttttctttcgtttactttgaaaacattccaagggtttccctttaagtggaatttggactttttcctgggtctaaaaatttctgacattcagttctcagcttggagaaattggattggaaaagtaattactttccttcataagtcagccccaggaagcatataagtcatacattacggagcctatggattccccattcctctgaaacaggtcttttaatggttaataacctaaatttggcctcagggttgctctgtcaatttggtttcaagggtgcctcctttcgttgatctgaacgtcaacagtaatgaaggcaagcagaaaaagcgaggaggtggtggtggatttgggctacccaggaaaacccaagaaaagttggagaaatcccaaaatcttttaaacacattaggcaaggaaatcatctggacaggcagggcagttctctcactgaacacatgccttcctttcatcttgaataactttgtcctaaaatgaattttttttccccttgatttaacaggatttttgtagactttagaatttggaacttccctacaaagagtataaattgacttggggttgcaagcactgaggcactgttacttctatcaccgtctctccttttatttctggggatattaaaacagggctttaagtttcttgggttggccccaagggcaggagccaagggaatatctgggtgttttccttgtggatgataataattttaattttaaatatccctccctccatacaagtggtatggtaccattttaatcataattctaattagtacctttccttcttgttttgtgaaggtttttgtggcatgggattgctgtgctcactggctgtaaaaggtgacctagtgtactgggcagctggtggcggtgcagaaaagagtctcaggttattttagatttgtttaattcaaggtggtttggatttggtaagcctttgcactctgtagagtacttagaagacaagggcaacttacttggagttagagccaagctgtcagacggtgcccagcacacattaatgttagcttctttctgagaaaaaaatacctcttccagggccctgaaacaaaaaatacatttgctgtgaagattgaaaatgaacaaagttaggaaaaaaaaacaggcaaaatcagtgatttagtcaggtgagttttttcgttgtagggagcacttgatttctagtgtgttttgtacagtatataactacaagatagtacattttgtagcagttcaaagccaaagttgctagcatcattttgctgttgtgccagttaatcataggatcccattaaataagtgtgctaacatcgaatatagagaaaactggtaaagaacattccagtaggaaaagaaaagaacaatcttccatttctgggcttggccaccatcaccctggtcggacctgtcctggac

SEQ ID NO: 30369 - protein, 17 aa, Homo sapiens
MNNLILRRHLNKNYFCY

SEQ ID NO: 30370 - protein, 244 aa, Homo sapiens
MSGDISGNGMFLREEGIQNTRLYTAKPVDLVMAMDLHQSVARRLGTPGVTSCPSYNEKLVPDKKLKIRYHSSDFQKSILCNTLTIIMDQLVKGGGAIMVKGLTQPCSGLSVCQNQHTIRTSGFFRADPKISIYPDVDILMSNRQSSEDMLLIPTRRNLKPRIQAKNNDSQVPMKSWMDVELGNVLADSRGRCEPQQSSRAGTSRERRSLPPIYGLQLLCPVIFGWPLPTGSTGRKSEDEKRDSK

SEQ ID NO: 30371 - protein, 260 aa, Homo sapiens
MPSERRAGLPPSLPDRGRAGEHDGSSNSRGGAGRQARSIARRHSEAIRAAGSAQKYDQRDLHANIPNSIVHANQNVHQPRMHEQQGNGHEKKLLRHGPTWMNLKNARPAASIELHHLFGVHNRTQRATRLQTPLPSPRAPTNIRQGAPYLVGSTLSHLGSGKRPEGGRGSSGQGSGVGSRPAERIDGAPLPRPPLPAFLNAFVFLDPGTQPRAPTGGNSSQGLLSPARGFTGAPGPGTSFSATTTCQETPPQLPICPQMF

SEQ ID NO: 30372 - protein, 65 aa, Homo sapiens
  misc_feature (1)...(65): Xaa = X or * as defined in Table 2
XIPYHTPWNPRQEKYDQRDLHANIPNSIVHANQNVHQPRMHEQQGNCPWKGTAETWAYMDEPQKR

SEQ ID NO: 30373 - protein, 370 aa, Homo sapiens
MKRPNSDLSTNCSGTKVCLDPAYGEEDEGLPGRLPEGEGLREPTECDGWTSLQAAGWMSVHTGGSQEMRLQGQKIAMANAECLCRARPCASALSCPTAQQARHPDTILPRQLGHWKAVTRVKLLNSYHGRSPFTTLRHSKTRKESIWNKQSIANQNALFQFPTQVSLTAFITGLKRPCKSFSASTGCRFLIVTTGMVSAVQPETQDGQLRSFDTIWQLRAQRNSIISVNQRINSLQGLCIYYQKGINTDLKSTYFQKPDAGRSHSGSRSHKLRTEPASSQHKGRCSKTSSIGGLAVELMLLTVSVPWSQSMSQQATQGPASPCSPFVKRAEPPECLLGKWLPSCRLISSAPPQLGVPTKSLFPQADKQTK

SEQ ID NO: 30374 - protein, 53 aa, Homo sapiens
MFRIQYFWYVPPPTNRHMMHMIHFQQRYSEDHTSRTISKASVTLSLSRSPGEQ

SEQ ID NO: 30375 - protein, 56 aa, Homo sapiens
MSPYKGVAGPASRCGECGGARKLRDASKHGAPREQKHCQSSLLWSGRQECVTACSL

SEQ ID NO: 30376 - protein, 37 aa, Homo sapiens
EKEEEENVEEILRGGDWPNRQVSMGCWDTLAVRETET

SEQ ID NO: 30377 - protein, 228 aa, Homo sapiens
MSHRAWPPCCTGPNAPSQVPLVLLEDVSNVYGDVEIDRNKHIHKKRKLAEGREKTMSSDDEDCSAKGRNRHIVVNKAELANSTEVLESFKLARESWELLYSLEFLDKEFTRICLAWKTDTWLWLRIFLTDMIIYQGQYKKAIASLHHLAALQGSISQPQITGQGTLEHQRALIQLATCHFALGEYRRREGMGIKTGAVAVDLLKVVKDMIQGIGNLTTLFHFPLLGDF

SEQ ID NO: 30378 - protein, 84 aa, Homo sapiens
MLLSCSSWVLVASCWQTLSDIFSGGKTKCISLGCQINSALTSFHTALELAVDQREIQHVCLYEIGWCSMIELNLKDAFDSFERL

SEQ ID NO: 30379 - protein, 319 aa, Homo sapiens
MGQAAVHSHGLLNTSHRAFQGLEANDKEGVLTGQPWGTTGARVKDTQAERKAPRSGKRRCVHHVFTEPQCGHLSATNEKTWRRRSLRAYVKIEEYSGLSPGEEISGELAERAHVDRSKREKSAAAQMQKLLVGQGFFPLRASGHCAEANFNHERISPTMVACKGKATSRMRLEACERADEGLQDSESERSLSRLEAVTARSFEEEGEHLGSRKHRMSEEKDCGGGDALSNGIKKHRSLNGGSGLQRRHQSTLQSGECCIRKELWLMIELRSLTRSKSGDEDSYNTGAVPSNKNTMANTARNALCSEMAVEGTERADMRL

SEQ ID NO: 30380 - protein, 103 aa, Homo sapiens
  misc_feature (1)...(103): Xaa = X or * as defined in Table 2
XRPFFALDGSDNKAGLDEAKEILLKKEAAYPNSSLFMFFKGRIQRLECQINSALTSFHTALELAVDQREIQHVCLYEIGWCSMIELNFKDAFDSFERLKNESS

SEQ ID NO: 30381 - protein, 67 aa, Homo sapiens
  misc_feature (1)...(67): Xaa = X or * as defined in Table 2
XVHTTLFVIGFKPLESPVAGVEEPVAVDSCLPHPAVLCFPTELDVEKWQCTQHCFRVARLHPSSCQA

SEQ ID NO: 30382 - protein, 357 aa, Homo sapiens
MIELNFKDAFDSFERLKNESRWSQCYYAYLTAVREKQKVAANMYGGPSVPGPLHEVSHVMSSKPHSCYKGRHLNSNGNYVARKPARWAGRVLEEKLQASQRTGPPPADLGSSPQHVTAGGLGETRAPMSQQVIFRTACDSGTLKVETAAFNPLSPFMNADQNVSRWAITTELFPPVSPMVHDSAIARCPSEDRKLIRKHLLGNRYVPGTGSGDKKMSPNKALNLRKGKRNPVTHIGEKRTLSTMEAEPGVMLPQVKEGQQPPEAGRGKEGFSPQPPEGLKALRPGYGAQWHYAESKVHTTLFVIGFKPLESPVAGVEEPVAVDSCLPHPAVLCFPTELDVEKWQCTQHCFRVARLHP

SEQ ID NO: 30383 - protein, 232 aa, Homo sapiens
LVTELTAIQALMGNHFQNLQNHRDRRFSEGGFGAETLLLKHCCRNVGWSLLPARLTQGMWFASRVVSAVLRALRGPPGIILTTRLRDAVHTPLTDVDVCTRCVCRIQAIRMLCRGCPCEARVKPAPCVCSYPLRSNPSGVLPGKLLSCAEVGGLSMGDAWVPAPSWTRSCVVCRDACCAAGRLVESFRWHRALLLGVAVGSILVILPWAYCDLGSSSCIKGLLAVRALQSCT

SEQ ID NO: 30384 - protein, 123 aa, Homo sapiens
MAGYSHVIKFSPTKPDKQTCQCPSFDYGGESTCTHQETIQQALFGLSVSPGPLCLNGWMFTGDREPCLNLQRSPRYNNQAPAETLENKIYPKLPSGQEQLRQARKSHQDEVPAKGPASSINFS

SEQ ID NO: 30385 - protein, 467 aa, Homo sapiens
MVGLLFHAPKAPEMAPLRCCIMNKIIMVRRPKQSTADYGMRTSGPVESGLSADSLQLLCSYAAIKNSAELLMVGPQGRSAGREIIDTRKIAKSGSRGVTAFCSHGANNALDIPAFIIKFGERAGEGYTHRDTLISQTWRGLQRSGIYMDLIGICMDLIIGSIQWIMWISEKPANVAGWKGVVLFYAFDEKTMFIAFKLIALDRNTSCARLRELHVSEVFTVITETSEAAAVKLISVVVKRFADVEGRGGGTFAHELLAVEYAGWISPAFRLKVNQTFIDYRTGRLQPAIPQSLPEALRLAADLAEQKQRLEQKMLMDAPKVEFAERVATASGVLIGNYAKVLGLGQNYLFTWLRDNGILIATGERRNVPKQEYISRSVTEDEVEGRGGGTFAHELLAVEYAGWISPAFRLKVNQTFIDYRTGRLQPAIPQSLPEALRDELLAVTGRDFTFLGGGAKSIRGINTKMGP

SEQ ID NO: 30386 - protein, 250 aa, Homo sapiens
MAPLRCCIMNKIIMVRRPKQSTADYGMRTSGPVESGLSADSLQLLCSYAAIKNSAELLMVGPQGMRPAREIIDTRKIAKSGSRGVTAFCSHGANNALDIPAFIIKFGERAGEGSRSLHEVSWQGIQISEDVKAALDLGNGQRYQKISEEDRKMQECFKLIGDLLSGFDQIADRNMDNEGQADEVSDGNEEFTGKGHPCYNLHLADPAPPMAQSAPDTVQATALEDTSYKTWWLPHGVMSAGEQNARVKKA

SEQ ID NO: 30387 - protein, 126 aa, Homo sapiens
MGAVLTRCDGFISGFSFGLALILSCLPPGRSAGREIIDTHKIVKTGSRGVTTFWSHGAANALDIPAFIIKFSEGGARYQSTVTVAAKAGYKQSVETGCEARQPVRPEILRREYALTLKRPRRAVAR

SEQ ID NO: 30388 - protein, 50 aa, Homo sapiens
MTLNPSLTFPCPLTKLNNKCRYIQCVVGTVGAEGGDPPGPRFWYLACVYY

SEQ ID NO: 30389 - protein, 303 aa, Homo sapiens
MVAVNYVGEELWSYFNAPWEKRVDLAWQLMEIAEQLTNNDFEFALYLLDVSFDNFAVGPRDGKVIIVDAENVLVADKRLIRQNKPENWDVWYESKFDDCDKEACLSFSKEILCARATVDHNYYAVCQNLLSRHATWRGTSGGLLHDPPSEIAKDGRLEALLDECANPKKRYGRFQAAKELREYLAQLSNNHIPPTHPPYLCVPDGNYRSGWSYIKLCPSFECLTETYAALPFNRYMGKSRGIEGSLYSPGRPVTAMWSGLVGGTAVVLQLTNSTPADPVSTLEAVPFGASILTLEGLHMRVTH

SEQ ID NO: 30390 - protein, 63 aa, Homo sapiens
MQCLYFILILKGYFHQQHHTLLDHHSFMQQQETNLLANLTTNDARDNSKGLSKTANVAAAATL

SEQ ID NO: 30391 - protein, 88 aa, Homo sapiens
  misc_feature (1)...(88): Xaa = X or * as defined in Table 2
MLLTLAPSDLWMVITCPHLVYHQRTQQHVCHPRSIEQTLTRQPTSWXXXXXXXXXXXXXXPLLCPDPTVNRSQSHLEEHATTRNKFIS

SEQ ID NO: 30392 - protein, 109 aa, Homo sapiens
MAKRSQGTAQAMASEGASPKPWQLPQGVESAGTQKIRIKALLFLPSCEEGRVCFPFHHDCKFPEGSSAKQKCKHKATNINNNQEQMTPLKKQNKVPATIPKETEMYELT

SEQ ID NO: 30393 - protein, 136 aa, Homo sapiens
MATSKALLKGCTQTKASLRILQGLKAEPKEPVLVQVPDFTKKGGEVGPKTTLHAKLLSLNTQWMEQLHPSVQDPWVQDAQYPTITAADPGCFLPCNGHIGLKAGAACCTTLHVWNGRGLGAIFSRASLNGEKHIIS

SEQ ID NO: 30394 - protein, 37 aa, Homo sapiens
SSHPSYEVPGVIGPSHRKNTKAQRRDVPMITQLIRYQ

SEQ ID NO: 30395 - protein, 198 aa, Homo sapiens
  DOMAIN (136)..(157): Plant thionins proteins domain identified by eMATRIX, accession number BL00271B, p-value=7.818e-09, raw score of 13.11
MRTHRSKSHRRDSITPWLCDESSSEVTAVSIMVRLCDENSPAMVVVCIVVEAEAIPGSGSVNRGQESESSHPSYEVPGVIGPSHRKNTKAQRRDVPMITQLIRYQCLLAIHGSKAPEASGDGGQTFCSTFYAPAICSTVKAKSLPSGARCVTDKDKCMWISREIKFERGRKSGEEAILVALTSGKLLGLGQHLAAGDG

SEQ ID NO: 30396 - protein, 184 aa, Homo sapiens
  DOMAIN (135)..(161): Translation initiation factor IF-3 domain identified by PFam, accession name IF3, E-value=0.00048, PFam score of 15.1
MPGIATFSSRPQAVQGGKALILSFLIHAKAFSTAEDTQNEGKKTKKNKTAFSNVGRKISQRVIHLFDEKGNDLGNMHRANVIRLMDERDLRLVQRNTSTEPAEYQLMTGLQILQERQRLREMEKANPKTGPTLRKELILSSNIGQHDLDTKTKQIQQWIKKKHLVQITIKKGKNVDVSENEMQK

SEQ ID NO: 30397 - protein, 88 aa, Homo sapiens
MKYLLHFIFLTRLHFFPFFMGNLGLGCFFLIHWLNLFRSLWSKSWLSNIWKTKIQFPSQGLGPSFGGSAFSISLSLCRSWRICNPVMS

SEQ ID NO: 30398 - protein, 194 aa, Homo sapiens
MIESFLKAPQPCFLDSLQNPEPIKPPFFINYPVSARLAADETVATKIEENTIFVEMELDFPSASGCGKLHSSVLKATKESLVCAGPCSGLFVKSSVTAADSETTLQLRTQQVKGCLDRAITLRSRRHSVWACEWWRYESHPVCADLQAKILQCYRENTHQTLKCSATGHPVYALCQSCQTEACLRKGRIKTFQE

SEQ ID NO: 30399 - protein, 38 aa, Homo sapiens
MQIGREYNHEQLCQSQGHIVLEALACQYQSLSHPPAPG

SEQ ID NO: 30400 - protein, 689 aa, Homo sapiens
  DOMAIN (112)..(140): Granins proteins domain identified by eMATRIX, accession number BL00422C, p-value=3.824e-09, raw score of 16.18
MTDCVTPFTPTVQSQAEKCEKRDWPSVPAYILFPCWMLPAFKHLTPSSSVLELRLALLALQPADGLLWDLVIILGHVFISSMKMDEYSKLVPIEQSIAEKIPENMEGTLEVEKEEVEEQEEEEEQEVEEEEYGEKKKTLFLCKTLMTLILFSYEEKKLAVPDWLGCRIFALPLVHNQLGVGVGRPTSAGPGRTSIVNGCGSKWLWVLLRLVRRRSSSYSIKKFVKQATVLTFTTALLAGGATQAFAKENNQKAYKETYGVSHITRHDMLQIPKQQQNEKYQVPQFDQSTIINIESAKGLDVWDSWPLQNADGTVAEYNGYHVVFALAGSPKDADDTSIYMFYQKVGDNSIDSWKNAGRVFKDSDKFDANDPILKDQTQEWSGSATFTSDGKIRLFYTDYSGKHYGKQSLTTAQVNVSKSDDTLKINGVEDHKTIFDGDGKTYQNVQQFIDEGNYTSGDNHTLRDPHYVEDKGHKYLVFEANTGTENGYQGEESLFNKAYYGGGTNFFRKESQKLQQSAKKRDAELANGALGIIELNNDYTLKKVMKPLITSNTVTDEIERANVFKMNGKWYLFTDSRGSKMTIDGINSNDIYMLGYVSNSLTGPYKPLNKTGLVLQMGLDPNDVTFTYSHFAVPQAKGNNVVITSYMTNRGFFEDKKATFAPSFLMNIKGNKTSVVKNSILEQGQLTVN

SEQ ID NO: 30401 - protein, 252 aa, Homo sapiens
MGSMVALFQDPTAWGSKSCQAVSLLYPEVRHPAGQPLRAIQPPSPNTKFTSCLSRQGGNLFLGDLKGHETFQELTNQSALVIPEQMCGSIVVDLYWTLCQSLTPVPPGPEAAHHSRFTSIPLRKRWRRARPPLRGLFPDLSDGPADAFQSGQLRRKRPDTRPAPTYLERRRTSRSNTHSHFEPQPLTMLVRPGPAEARGGFDGNCRSINSQMSNSAHQLPRSDVLHCPLEPKTCDASSLLLSKSQKKSHDQC

SEQ ID NO: 30402 - protein, 385 aa, Homo sapiens
MAEGEANTSFFTWQQEEVPSKGGKFPYKTIRFVRTHYQEKSMKTLFHTVATVIFKCKSDPIAYNQSPLQPAVFVLQVYFHADDASLTTLLRAQPRMPPAHPSIPLTAPPSTREPSHPQRTFYWTVSSLRAALDSALLLTATPCLVDAGSCVGAEQVKEPLTGRKWSNCCSGKAKYEMLDVPLLRRLCQSYPQPGRVRKAQKQPQQVEAVTLQSQQPPCFLAAPAGNTQGPSLEAGAQAVPSNSLQEVVVNSCALENDHRPQAPREHRDTQWIGFLICKMGMLTGEVVGLAKPSASGRGAGTEELQQQTRLRSQDILPQTVNQGPTHCEQGVLRCGQGDLGSWMVLDSYWQGLATEDERGKGKGRKPILFRLLLTAVIGKRRRVPT

SEQ ID NO: 30403 - protein, 50 aa, Homo sapiens
MTILGKLNSSHESPSARRNCWLLPAYCILSEQLSQRRLLPCRSFCAQLTG

SEQ ID NO: 30404 - protein, 93 aa, Homo sapiens
MAGEPSGNLQSWRKGKQTHPSSHGSSEKCQAKGGKSPYKNFRSHDNSLSQEQHGVALTMASGIGSPSHGLFDRSTWPAIQKVSSPTVAVFFQW

SEQ ID NO: 30405 - protein, 56 aa, Homo sapiens
MACYPESFFTNSGCFFPVVNMLSITRSKLQPWLKGRGTLLVLRSTFPQLRCSSFFF

SEQ ID NO: 30406 - protein, 33 aa, Homo sapiens
MTILGKLNSSHESPSARRNCWLLPAYCILSEQL

SEQ ID NO: 30407 - protein, 374 aa, Homo sapiens
  DOMAIN (3)..(11): SNAKE CYTOTOXIN SIGNATURE domain identified by eMATRIX, accession number PR00282E, p-value=8.527e-09, raw score of 9.13
MGEICNTDKCWPECGPTGALIIAEQCGTHGGEGSTLEGSRPDVPQDLFSPTLGFYGSTSSFSLLNEIEPEEQTPPNTSCINVHKAADTCAYRNLGNSQVERGKSAHCGQGHMNPKVIRKENVGSKPEFNREVVFLLGLEAGGLIPGAEGPPEDMGLVRGPPAVAAGPPPRWLSPEFCLLQYSEEEGCKEPLWLKVEAEVSTLYRFMPTGFTRKLAFSLLENQNIRPLPSIRILSGLPQFLFGSKFEANLDVLVPREVIFQGAHWHHMWKLLKVYSLESQKREEDISKRLPNFLKSSRRPWEDLILMLRKSPEMSKEYRASPLSLSAALRSKDRQSRHRCVTSTFHIREVRCCKSQGLPLCMHETAAHICPSLLA

SEQ ID NO: 30408 - protein, 276 aa, Homo sapiens
MGMVRKQALERTEWALVCRQAWSSRMGYSTTVSPTQCQYTCSRGLLDSQLQLYKCTQALPEIHSLGHVCPSLITVKYSHYVLAAATLFIWDNNESLRTGLLSVSTCKSGTRDFMRISGMVSLTSEVDNVEVFHYFPLHIQGKKFWAVGAIMTIFVISIYYEPGAHWHHMWKLLKVYSLESQKREEDISKRLPNFLKSSRRPWEDLILMLRKSPEMSKEYRASPLSLSAALRSKDRQSRHRCVTSTFHIREVRCCKSQGLPLCMHETAAHICPSLLA

SEQ ID NO: 30409 - protein, 79 aa, Homo sapiens
MTGESKQWKQESWGDLSHFPSCFHWVCPYHSNYHGKGLWHIGGDCLTGLPDHRKTIRVEISSESFLTPSKYSPSDYFTP

SEQ ID NO: 30410 - protein, 108 aa, Homo sapiens
MAAATELNRPSSGDRNLERRCRPNLSREVLYEIFRSLHTLVGQPFLAKLQSPIKEENTTAVEEIGRTEMGNKNEVNDKFSIGDLQEEEKHKESDLRDVKKTQIHFDPE

SEQ ID NO: 30411 - protein, 46 aa, Homo sapiens
  misc_feature (1)...(46): Xaa = X or * as defined in Table 2
MAAATELNRPSSGDRNLERRCSPNLSREVLYEIFRSLHTLVGQGRX

SEQ ID NO: 30412 - protein, 228 aa, Homo sapiens
MAAATELNRPSSGDRNLERRCRPNLSREVLYEIFRSLHTLVGQRPGAARPAEVWDAVPKPRCGRSPGPASSVGVRRTAVPVAESFTLQLSSPRVGEVGLSENPAPREAGLERMNVEKLHCEFRRRLAFRVLFPPTYSLWELVAKLQSPIKEENTTAVEEIGRTEMGNKNEVNDKFSIGDLQEEEKHKESDLRDVKKTQIHFDPEVVQIKAGKAEIDRRISAFIERKQA

SEQ ID NO: 30413 - protein, 67 aa, Homo sapiens
MPRRRASCPSRCRAAGRSQSRQERTLEYYTSVFSLPLALTVPENSSICASSVGVPAFLTISSAGQVA

SEQ ID NO: 30414 - protein, 143 aa, Homo sapiens
MKKGGALPVGPYQTAAARGRTEQTHDAHYVVGSERVPGKGHTALLMGGQWGVPPSGIPPVGSDGPGLLMFIWPRDTKAQRVNHEGTIPENTLNPKEIDYSPNWLTLGGNFRDDEIAGKDTFATDKRPPELLIQCQWNGGLWPP

SEQ ID NO: 30415 - protein, 82 aa, Homo sapiens
MKERETSKDIQREAQGELGHHINPYAITKHPGLIYQSLSVWPSVDLAAYEQPAISFLVYTLPVENGQGKLHFYQELKQAILL

SEQ ID NO: 30416 - protein, 265 aa, Homo sapiens
MKIVREHYLRDDIGCGAPGCAACGGAHEGPALEPQPQDPASSVCPQPHYLLPDTNVLLHQIDVLEDPAIRNVIVLQTVLQEVRNRSAPVYKRIRDVTNNQEKHFYTFTNEHHRFKTFELILLEISRILNTGLDMETLSICVRLCEQGINPEALSSVIKELRKATEALKRVQHQEDGAKPFMRDEFSQLPPGPTSNIGDYNGDYNIGNYISRVKPPWLLSWAGIVECLQLFKAQGTSCQWIYHSGVGERWPSSHSSIRQFPSEDIV

SEQ ID NO: 30417 - protein, 71 aa, Homo sapiens
  DOMAIN (3)..(18): TYPE I ANTIFREEZE PROTEIN SIGNATURE domain identified by eMATRIX, accession number PR00308A, p-value=6.400e-09, raw score of 5.90
MASSSGAGAAAAAAAANLNAVRETMDVLLEISRILNTGLDMETLSICVRLCEQGINPEALSSVIKGASQGY

SEQ ID NO: 30418 - protein, 74 aa, Homo sapiens
MSELQQQEGYSGSTAWRVPPSTGGKRGIQKQYFDLDSVTSLPWQHSVETLMLERMRGEQVHNVALEHAMVRPKH

SEQ ID NO: 30419 - protein, 890 aa, Homo sapiens
  DOMAIN (546)..(566): HEPARIN BINDING GROWTH FACTOR FAMILY SIGNATURE domain identified by eMATRIX, accession number PR00263D, p-value=4.822e- 09, raw score of 12.89
  DOMAIN (473)..(600): Fibroblast growth factor domain identified by PFam, accession name FGF, E-value=3.5e-30, PFam score of 106.5
MIKTRSFPNRIDPLRLLPIDGANDLFFQPPPLTPTSKVYTIRPYFPKDEVIVSLPTNLVYGYGPKVVSKEIPVESIEEVSKIIKRAPVIWDNIHANDYDQKRLFLGPYKGRSTELIPRLKGVLTNPNCEFEANYVAIHTLATWYKSNMNGVRKDVVMTDSEDSTVSIQIKLENEGSDEDIETDVLYSPQMALKLALTEWLQEFGVPHQYSSRQVAHSGAKASVVDGTPLVAAPSLNATTVVTTVYQEPIMSQGAALSGEPTTLTKEEEKKQPDEEPMDMVVEKQEETDHKNDNQILSEIVEAKMAEELKPMDTDKESIAESKSPEMSMQEDCISDIAPMQTDEQTNKEQFVPGPNEKPLYTAEPVTLEDLQLLADLFYLPYEHGPKGAQMLREFQWLRANSSVVSVNCKGKDSEKIEEWRSRAAKFEEMCGLVMGMFTRLSNCANRTILYDMYSYVWDIKSIMSMVKSFVQWLAKLIVETDTFGSRVRVRGAETGLYICMNKKGKLIAKVRPQQAGGPRDLGSGLGWLDSSKTVLGSDPNKSNGKGKDCVFTEIVLENNYTALQNAKYEGWYMAFTRKPGPARAPRRGSTSVQVHFMKRLPRGHHTTEQSCPFGPDSTVERPGPPCERPIPAISAPSHGRAEAGPRCHAGQARKESLSDSRDLDGSYDQLTETELEALGLGSAMWCPACPPNHLAARASSLSHMGRLSPGTPPVSEHLYLPQAWQALSPLKPMGRAIINHFNPKIESYAAVNHISQLSEEQMSLIQPPNQRVIKTFKAHYIWYSMQRTVNAVGENPIGENIMKIWKDYNTEDAITVTEKAMGEQHKYPSQLDLTYYTPHSLFFTPAVQARYLVPIFHKGYYTKYYPYLFDWNQTTLRNTIPSYKDYETPT

SEQ ID NO: 30420 - protein, 85 aa, Homo sapiens
MVLEVVRANYDTLTLKLQDGLDQYERYSEQHKEAAFFKELAVREDAIRGSIAYFSFAAMETALAQLQLGLGFDVCSQQQIWLIIP

SEQ ID NO: 30421 - protein, 207 aa, Homo sapiens
MDTKDKRTFAFILITRNLSNFTLGYAPTIGSRTFKTKTSTVLGVSVFGTSLSHSGIQKPFAYGCGKYSVNIGWLAGWLAGCIKGWRKGKEGRKLKKDGELPQMPHKSRNCFQTSISNGKAEGLAMGDVAVDKSLAKCGNGEQREAGELLRGDKVPISRQRNLRPREAEQVAKAKQSARNRRGSKATRIYYVSTVGYELHYQSSTDII

SEQ ID NO: 30422 - protein, 55 aa, Homo sapiens
MLQPRNLVSTWMGDHLGLPKDVGCLLDYSPLRARWAPCSWFHPKPQHSSGCMVSH

SEQ ID NO: 30423 - protein, 27 aa, Homo sapiens
  misc_feature (1)...(27): Xaa = X or * as defined in Table 2
XLLCGPSLLDEHHPLLHGAQSHRPPKG

SEQ ID NO: 30424 - protein, 80 aa, Homo sapiens
MCSVSSFCWVRGLAGSGVKLQTFALRERAPALASPERGLLQCSGGPKDSSSAAKVGAQAEEAPRASEGCEDCRHAVTSQY

SEQ ID NO: 30425 - protein, 53 aa, Homo sapiens
  misc_feature (1)...(53): Xaa = X or * as defined in Table 2
MAGCRSRALPRREAAKVRREMERSASGPALLGDLVHPPQPLARPRKGLPQCSX

SEQ ID NO: 30426 - protein, 148 aa, Homo sapiens
MRLHSSALGRSMGLGAVEQGAALVGEAPAAQEPTEAGEGSGMAGCSPKACPAGRQLRPGPAGCSECGAAKPTPPRNSSWPASAARSPGSRSRVSLHTSLQAEGAGCGLRQPRKGLPQCSGGLKGSSSAAKVGAQAEEAPRASESCEDC

SEQ ID NO: 30427 - protein, 192 aa, Homo sapiens
MISFDLMSHIQVTVMPKVFGPVMRGAAMKDFAEKKSTAKALEDVKANFYCELCDKQYHKHQEFDNHINSYDHAHKQTQEPSWLHPVDPTPGCRWSCLPVLHHAPTLLSPWVVDGTGRYGAGGGTRWGGSGGTGAHGAAEGPSSGLGQPRKGLSLCSGGLKGSSSAAKVEAQAEEALRVSEGCEDCQHAVTSQ

SEQ ID NO: 30428 - protein, 352 aa, Homo sapiens
MPSPEIKVNNLKPNTDELAFLTQPRWCVRNWWVLGLTDFKNEAADPQGVTALKVARLEFVPSDVRMCLEFLPSGVKLQTFTVSVTALKAARLELFVPPGGLVGSLASGVKLQIFVLSVTAYKSSVDPKSEQYQDLLQRAREQSFHSVERDPSGPWVVDRTGRGGAGGGARRGGSGCTGTHGGGVRLRHGGLQSRGLPRGKAAKARREIERSTGGLALLGDPVHPSQPLARVLSPLLPGASRASQLLPSAGPAKPTPTRNSSWPAGAARSPGSRSRFSLHTSLQAEGVGSGLGQPRKGLPQCSGGLKGSSGAAKVGAQAEEAPRASEGGADFQHAVTSQWDHLVSGKQAQGSH

SEQ ID NO: 30429 - protein, 271 aa, Homo sapiens
MLAVLTAFARSRRLLCLGSHFGRTSGALQPTAALWEPLSGLAKTGAVSLSLQGDLSQTLSSVVGRDRNAKKGEMIMLVNVAGTHANGLSPHDGEDGCQDISHIGLGHTQVISFHFNYLLKGPIFTYTHIPRDWRTATSSESLCVSGSGNAIKAEYFESPFKNSEATNETTVLAPHETIFRAEDLSVILKAYVLVTSLTPLRAFIHSTGTVWNPPKKKRFTVKPASPWSHQGKVYAGMRMGPSYGLEKSKCCFSELDPGSVLPVNFTEALKN

SEQ ID NO: 30430 - protein, 185 aa, Homo sapiens
MKPRTLAVSVTALKVARLEFVPSDVRMCSEFLPSGGLVVSLASGVKLQTFAVSVTARNSVDPKNSGAQLASPSGSSTRAASGAACQSRCRVPALLSPWVVDGTGRRGAGGGARRGGSGRTGAHGGAEGVGSGLGQLRKGLPQCSGGLKGSSSAAKVGAQAEEAQRASEGCEDCQHAVTSQCPGRK

SEQ ID NO: 30431 - protein, 179 aa, Homo sapiens
MAGCRSRALPHGKAAKARREIERSAGGLALLGDPVYPLQLLARVLSPSLPGAGGAGQPAAPSAGPAKPTPTRNSSRPASAARSPGSRSRLSLQAEGVGSGLGQPRKGLPQCSGGLKGSPSAAKVEAQAEEALRAREGCEDCQHAVTSHWDYSRCSADIGEGMGVIRHHSNRVLQFSDGS

SEQ ID NO: 30432 - protein, 184 aa, Homo sapiens
MLAVLTALALSQRLLCLGSYFGGTRGALHPTAALWEPLSELAKAQAHSLSLQGGVEGESGAGIGAARGACGPAGVPAIFQYLSSNEHTQIPDFGVKYHSPPTNLQLLEEIAPPGLGQGVGIPENQATVNTAAPLGLAAQWGYHTPDDIFLLHSHMTEEYKEGQMLCPDLVEEVEGPGGSRKPLL

SEQ ID NO: 30433 - protein, 215 aa, Homo sapiens
MKPQTLTVSVTAFKVAHLEFVPSDVQMCSEFLPSGGFVVSLASGVKLQTFAVSFTAHKSSVDPKNSEAQLASPSGFCTRAADGAACQSRAMHLHSSALGWSMGLGTVEQGVALVEEAWAAQEPTEELRERALALASPERGSHSAAVGQRAPQVPPKWEPRQRRRRERARAVRTASTLSPLNPPSKQDTLTAVGNLADDHSSYFLLDRGEEGALQL

SEQ ID NO: 30434 - protein, 265 aa, Homo sapiens
MDDSNEHVGIERRKAQQEVTSQEEPPHQKLALAAPLSWTLSLQDYGGTLGWSMGLGAVEHGVALIGEARVAQEPTEWRGGSGMAGCRSRALLAGRQLRPGEKLSTAAAGPGAKLLTARGRWGRPGECGVRGAYAHSELALARKHRARPGSRPRLSLQTSLKAEGASSGLGQPRKGLPQCSGGLKGSSSAAKVGAQAEEVPRASEGCEGCQQAVTSQPDSFSNPSLAFWTVPCFPSSDILMTFCLQHCQALGPAHGSQDTEALCHS

SEQ ID NO: 30435 - protein, 484 aa, Homo sapiens
MKPWALAVSVTALKVARLEFVPSDARMCSEFLPSAAGRGAKPLIARGRQGQLAAPSAGPAKPTPTRNSSWPASAVRSPGSRSRLSLHTCLQAEGAGFGLAQPRKELSQCSGGLKGSSSAAKVGAQAEEAPRASEGCEDCQHAVTSHYAMLFIGTRECLCSGQIAKSDSIHHMSHSQGQPELPPLPASANEEPSGLYQTVMSHSFYPPLMQRTSWTLAAPFKEQHHHRGPSDSIANNYSLMAQDLKLKDLLKVYQPATISVPRDRTGQGLPSSGNRSSSEPMRKKTKFSSRNKEDSTRIKLAFKTSIFSPMKKEVKTSLTFPGSRPMSPEQQLDVMLQQEMEMESKEKKPSESDLERYYYYLTNGIRKDMIAPEEGEVMVRISKLISNTLLTSPFLEPLMVVLVQEKENDYYCSLMKSIVDYILMDPMERKRLFIESIPRLFPQRVIRAPVPWHSVYRSAKKWNEEHLHTVNPMMLRLKELWFAE

SEQ ID NO: 30436 - protein, 425 aa, Homo sapiens
MFLQAAQKAWNPHLLLVRTQAASTHGRRADPHVGRCGETPQSWGKGESLALAPLSLTKAALEDCSQISPSHQGTLLCLLILDLRTGKLSLEHTEEPSDVPSHLLYRWSISSAITEVFQALASSDSTSQPVNVHTKEDMKVQDIALVLPSRKSRNACRTTTSTCKALLMRQLAARVILQNCVSKSSRGIHVPQKNLTLPVRGDSVLAVLTALLALGASSAWAPTLAALEEPFSPPLHCGSPLLGWPRPEPAPSACREALAAFPRGRARDLQPAMPEPPPPPWAPVQPESPRQAPPPAPRSPVPSTTQGLRSAGTRHRTGRQLHLQPRWGIHWVKPAGLLSLVGTWRTFMCSSGIVNTPMGTLYLAQVKFPAEYFETLCKLTSAPLWDIPFHCQPLVVRNSVFGKHATFSRTNLDTLEMMDDDDDDE

SEQ ID NO: 30437 - protein, 975 aa, Homo sapiens
  DOMAIN (166)..(213): kw TRANSCRIPTASE REVERSE II ORF2 domain identified by eMATRIX, accession number DM01354V, p-value=1.000e-40, raw score of 12.97
  DOMAIN (7)..(179): Reverse transcriptase domain identified by PFam, accession name rvt, E-value=0.00027, PFam score of -8.5
MTNVARISRFGAEEYESLYTSHIWIPSSWCSLTEGPECDVTDDITATVPYNLRVRATLGSQTSAWSILKHPFNRNSMLEVLARAIRQEKEIKGIQLGKEEVKLSLFADDMIVYLENPIVSAQNLLKLISNFSKVSGYKINVQKSQSFLYTNNRQTGSQIMSELPFTIASKRIKYLGIQLTRDVKDLFKENYKPLLNEIKEDTNKWKNIPCSWIGRINIMKMAILPKVIYRFNATPIKLPTTFFTELEKTTLKFIWNQKRARIAKSILSQKNKARIKLEASLFKLYYKATVTETAWYWYQNRDIDQWNRTEPSEIMPHIYNYLIFDKPEKNKQWGKDSLFNKWCWENWLAICRKLKLDPFLTPYTKINSRWIKDLNVRPKAIKVLEENLGNTIQDIGMGKDFMTKTPKAMATKAKIDKWDIINLKSFCTAEETTIRVNRQPTEWEKNFAIYPSDKGLISRFYKELKQIYKKKKTIKKWAKDMNRHFSNGDIYAANRHMKKCSSSLVIREMQIKITMRYHLIPVRMAIIKKSGNNRCWRGCGEIGTLLHCWWDCKLVQPLWKTVWRFLKDLELEIPFDSAIPLLGIYPKDYKSCCYKDTCTQLRGGGGAQASCRYGHHGGRSGVLEPSSGSSSTSRHKHFSDEGRDGERLCSLKTPCRNCLSSECPLVSGIGGFLISLTSRMKPQTLAVSVTALKVARLESVPSDVRMCSEFLPSGVKLQIFTVSVTALKAARLELFVPPGGLVVSLASGVKLQTFAGCRWSCVPVLRPASALLSPWVVDGIGRPGAEGGPCWGGSGRTGAHGGAEGAGSSLGQPRKGLPQCSGGLKGSSSAAKVGAQAEDAPRVSEGCEDCQHAVTSHTDPREGRFSPEHAPPLSNPRPVIRVALLVLQYLGLKGKYNSITSNQGVETICVGPSVLGKSTLSGAGFDSPVVLPTAILTRPGMEITKDGFHLVIELEDLGPQFEFLVAYWRREPGAE

SEQ ID NO: 30438 - protein, 363 aa, Homo sapiens
MVTKQAVPDPAHSVLWYSLPDSGAQLASPSGSRSGAADGAACQSRAVRPHSSALGWLMGLGAVEQGMALLEEARAAQEPTEGVGGSGMAGCRSRALPHGKAAEARREIERSAGGLALLGDPVHPPQPLARVLSPSLPGSGRAGRLLRVQGRPAAPSAGPAGCSECRAGRLLRVQGRPAAPSAGPAGCSECRAGRLLRVQGRPAAPTQKGAPTVQRWAEGGSSSAAKVGAQTEEAPRASEGCEDCLHAVTSQYLYKRESRLKNDCGLWEEHVYLFLDSGHVSEQGLMAHPIKTINKTAFGLISHLNGSPEVDQLLPVEEGQDMMKDADEQPGEGEVLSTGASVPMMPGSISERPRLIRLPRQAL

SEQ ID NO: 30439 - protein, 152 aa, Homo sapiens
MEQGAELVGEAQAAQEPTEGRGEAQAWRAAGPQPCPAGRQLRPSEKSSTAAAGPGAKPLIARGWWGPAGRSECGVRRAHAHPELALARKHHAQPGSRLHLSLHTSSQAEGAGSDLGQLRKGLPQCSGGLKGLLKCCQSGSPGRGGAKSERGL

SEQ ID NO: 30440 - protein, 95 aa, Homo sapiens
  misc_feature (1)...(95): Xaa = X or * as defined in Table 2
XLSDNKLEDWHECSGGLKGSSSAAKVGAQAEEAPRASEGCEDCQHAVTTASTLSPLSMATVKSSLSGEDHEKSGVKCTRWMLHGYSVDRLTSELS

SEQ ID NO: 30441 - protein, 412 aa, Homo sapiens
  DOMAIN (197)..(248): CALCIUM-BINDING PRECURSOR SIGNAL R domain identified by eMATRIX, accession number PD00919D, p-value=8.981e-12, raw score of 17.80
MIDVTEAPPFQTKPVFILHTLIDVTEALPFWTKPMFILHRLIDVTEALPFRTKPMFILHMLIDVTEAPPFRTKPMFILHMLIDVAEALPFRTKPMFILHMLIDVTEAPPFRTKPMFILRRCESPDLIKRPLGGFPVPADTRHSSAPTSSLAGCAHPMPPSMSGYWNHSGPHPGDHLHSHNNTNDDGHDDGDEDDDDDGDDDGDEDYDDDDGDDDGIEDDGDDDGDEDDGNEDDGDDDGHDDAWEHDPRVTRLLAGPVEKRAAALGELFWGEGKKGTGKALKGMLVQSLRRPTSQEDGPRWGARGVEATLLPGLRDPNLQAPENKRVATVISLKRRLLEKRCLQSSEERWAATRSICTGRKRDESVTRCHRGTHGVSVSPLVLEVRGDSVLAVLTALACSPRLLCLGSYFGGT

SEQ ID NO: 30442 - protein, 357 aa, Homo sapiens
MQPPEAGLGHVLGKVTPWLCLETTPTSVHLNEEFYNLNSKGPVKLVQGSKKCEFQGQGSPEMPASWDPALSVVSIFKVAPAGWSPQSQSSDRTLTPATCTMRSAKCALEVAPASLGQPVISLEWCRTTAPGTERNLQYNTADASPSLSPERWMPSNEHPWASGIRQSLFQALFSALGVQGGHQIAPLRCVMDTCTLTHLTPLPAFPAAWIIFIPRLSMLLGSSSPSHSPCSVPHQACQLCLPPFPCFPAEVARSPFTHTPTPNSGKRQEIKAELFWRLASYRMDEEPTVMGIKPREQQQIPSMFQTVWMRGGVMAAEPSRKIVSSPWIVEMINHFSTKEHKERFVKNKQGTECQLQG

SEQ ID NO: 30443 - protein, 128 aa, Homo sapiens
MMRGVRIMHMGASWETACASVILEGKKEGAPVEPKNSNLSGRKEKASNSNKNFLQMWNLKESRESKPIFSRRNKILKLKANRRGFYGALCEGPSVDSGLMITLTAETVGAVISEAADTHSDGWPSPLI

SEQ ID NO: 30444 - protein, 80 aa, Homo sapiens
MRLQYFTESLPAHLGNTCWDYFFRLTQQKAKEGILLLTVSDCKHPRLEAVKPQMGFQSDVCSCLLPRTSRGYFRSNYLVY

SEQ ID NO: 30445 - protein, 72 aa, Homo sapiens
MGVELMMELEPLQGNEETRALFMPREDTARPQSASQEESSREPDHAGTLIVDISTSRTVIQNAYVSLEETLK

SEQ ID NO: 30446 - protein, 325 aa, Homo sapiens
MSVQRCCWLLFECEIPLQSHNLTQLRRASHLNCIVPRQAEKPFPVSTEEGESGGGVYGAAEAVIRLLSLLLNTTAPGTAKPRTLWMTLSTGVSQPLPGQLSRDQQPCSCHPLQTQSLRKTKQGHNSNWHDTAVLYTTENALIPSRREEIALITVKKMQPVKTFHCEIWAGVHVLRDLWSVGKHLEEALLSDSQGEACALKTRSDRLMEASGRAYGRTHDEGRACGGFIQDKSGADVSISILHRHGGPHAPWSQVAAAYRGSTGGKVEASPGLAPIPLQVHLYSPTWGQFGHPSDPNMCSLGTWEDMSAAEKTHADLPRRCNLHRQ

SEQ ID NO: 30447 - protein, 215 aa, Homo sapiens
VHEGTVLDYIHPSWIQAHEGTVLDYIPLSWIQVHKGTVLDYIHPSWIQVHPSWIQVREGTVLDYIHPSWIQVREGTVLEYIHLSWIQVREGTVLDYIHLSWIQVREGTVLDYIHPSWIQVREGTVLDYIHPSWIQVREGTVLDCIHLSWIQVREGTVLDCIHPSWIQVREGTVLDCIHPSWIQVREGTVLDCIHPSWIQVREGTVLDYIHPLGFS

SEQ ID NO: 30448 - protein, 431 aa, Homo sapiens
MLDKSERPRGNHGMTAGGARALREATEGPHQTFQQPIRNGKEAADILEKKQVELRLSCSPLRVHSFNKCKVSRWQIGLHLPKTYQKKTAELMANYIHTRAHARTPGFLKSKLTASFLRQGPDVSANLRHSGCCKSSGKIGPGDEGLPGVLYTCRAISSAPGRLQTAVLATRNFQPVDLSLLGSVGLGPAEQDHLAFWSQPLSRSHQLLSNGSKPEEEISELPKISHQLISNGSKQEEISEMPEKEFKRFLCRNMKTYDHKDLYVNVYSSFIHNCPKLKTIQIYLNWGVEKQLADYINSIAPAMQNSIIRDVDPIILLPPAKDILLVRCISDITKMGPDARKIIGTLDALGHIYRFQGLGPVILGGHYSAYYRGSTNHAASLAKSSNSTHEEQMCSSFHGEDGAAGLQALGRVIEDIAISGCHGAWRHLVGL

SEQ ID NO: 30449 - protein, 34 aa, Homo sapiens
  misc_feature (1)...(34): Xaa = X or * as defined in Table 2
LLKSSQPPILPCLYAESFQIYTTAQNFLQSPEPX

SEQ ID NO: 30450 - protein, 132 aa, Homo sapiens
MSHPLHGGFYRGSMRCQPVLASRDEAVDKRGQVLPIPGGRECTRDLRNERATAERGRERRTAALGGAGRGRWGGTAVFGEGTAVLPEGPCPGPWRVQTTELWQVLLGFCLKVLLFLSTPLPLRKAQLHGKDT

SEQ ID NO: 30451 - protein, 177 aa, Homo sapiens
MMVLEEQLAPSALALDAAEPGTKGTALSAALDLWRPAGPFHRAGLTTTDAHITRAEKSHKLFFKRSYYVPSSMLNVEDSKIKAKFLFQGSYCLVKGEKQTNGQLQYNMKKDRNGEVHSTQQPLLRAYYKDTQVTRTQSLLRAYYQDTQVTRTQSLLRAYYKDTRQMTCTDDLFGHLL

SEQ ID NO: 30452 - protein, 53 aa, Homo sapiens
MVDSAILSVKYQLPQLPRCFSVSHTSSGDTGASGKQSGPYDASSGRKTSVRTF

SEQ ID NO: 30453 - protein, 88 aa, Homo sapiens
MVEGEANTSFFTWQQQGEVPSKEGKAPYKTISSRENSFTIMRTAASGSCELFFLKTLDSPIPVTLWSLPPPFLRTSSPPTWATEIAPP

SEQ ID NO: 30454 - protein, 208 aa, Homo sapiens
  DOMAIN (24)..(33): FIBRONECTIN TYPE I REPEAT SIGNATURE domain identified by eMATRIX, accession number PR00012B, p-value=6.949e-09, raw score of 8.28
MAKRGQALKREEEDQGASVVGFYCTCGGGGVGDEKEEEDDHRLCTHSVSSTVLSTFACITTSSSFYDNPLRISHKTSVKVFARAVFICSLNWGRICFCTHCHGCQQSSVPHYVGLSTGCLTAWQLASPSEEFKSEKDPDSLEGDLHRLRINLLWHSATHKYRLHLGFSSVGLLAASDEGLFKGFHGGPLTLTLGFKLVVNRFDPGIYT

SEQ ID NO: 30455 - protein, 39 aa, Homo sapiens
MPGRGLLLMFLRMVVNPPGPIINWNFILLTIIFLTLEQL

SEQ ID NO: 30456 - protein, 108 aa, Homo sapiens
  DOMAIN (7)..(62): Sushi domain (SCR repeat) domain identified by PFam, accession name sushi, E-value=2.7e-15, PFam score of 64.3
  misc_feature (1)...(108): Xaa = X or * as defined in Table 2
XCKVVKCRFPVVENGKQISGFGKKFYYKATVMFECDKGFYLDGSDTIVCDSNSTWDPPVPKCLKGPRPTYKPPVSNYPGYPKPEEGILDSLDVWVIAVIVIAIVVGVA

SEQ ID NO: 30457 - protein, 87 aa, Homo sapiens
  DOMAIN (31)..(86): Sushi domain (SCR repeat) domain identified by PFam, accession name sushi, E-value=2.3e-14, PFam score of 61.1
  misc_feature (1)...(87): Xaa = X or * as defined in Table 2
XPFSLIGESTIYCGDNSVWSRAAPECKVVKCRFPVVENGKQISGFGKKFYYKATVMFECDKGFYLDGSDTIVCDSNSTWGPPVPKCS

SEQ ID NO: 30458 - protein, 478 aa, Homo sapiens
  DOMAIN (298)..(317): SELECTIN SUPERFAMILY COMPLEMENT-BINDING REPEAT SIGNATURE domain identified by eMATRIX, accession number PR00343C, p-value= 2.286e-11, raw score of 16.85
  DOMAIN (161)..(323): Sushi domain (SCR repeat) domain identified by PFam, accession name sushi, E-value=2.9e-30, PFam score of 114.0
MGKKQNRKTGNSKKQSTSPPPKERSSSPAMEQSWTENDFDELREEGFRRSNYSELREDIQTKGKEVENFEKNLEECITRVTNTEKCLKELMELKTKARELREECRSLRSRCDLLEERVSAMEDEMNEMKFQLKGSSASYCVLAGMESLWNSSVPVCERKSCETPPVPVNGMVHVITDIHVGSRINYSCTTGHRLIGHSSAECILSGNTAHWSTKPPICQRIPCGLPPTIANGDFISTNRENFHYGSVVTYRCNLGSRGRKVFELVVCQPPPEILHGEHTPSHQDNFSPGQEVFYSCEPGYDLRGAASLHCTPQGDWSPEAPRCAVKSCDDFLGQLPHGRVLFPLNLQLGAKVSFVCDEGRDTAVPHYAFPAVALRLFPVTSLILSYLIFSGDLQNGITGSPPTDSSGILPWYEPEDKLKTRVVCSPKSQGVRTLQAEESEGRVISSSHVIKRVIQTIKEETVRRSLTRRRPFNDSESS

SEQ ID NO: 30459 - protein, 99 aa, Homo sapiens
  DOMAIN (1)..(42): Sushi domain (SCR repeat) domain identified by PFam, accession name sushi, E-value=0.0015, PFam score of 25.2
MKKVDHYGDYVTLKCEDGYTLEGSPWSQCQADDRWDPPLAKCTSRAHDALIVEKAIMHMKTLKKWLSIYILKEAAAFIPELCKQMKKIAGSFLDKVLYS

SEQ ID NO: 30460 - protein, 280 aa, Homo sapiens
  DOMAIN (188)..(198): Sushi domain proteins (SCR repeat proteins domain identified by eMATRIX, accession number PF00084C, p-value=1.000e-08, raw score of 11.25
  DOMAIN (131)..(197): Sushi domain (SCR repeat) domain identified by PFam, accession name sushi, E-value=3.4e-15, PFam score of 63.9
MGQIPVKPDLQAEDSLKPSYKFQALSNAKSYYHAVTPPLGFGVVGTPVWAPTHSLQCDMPGPATSLARSPLLCQCLARPAGTPTCSLTHPLPEAEHVVAAAMGSASEHKPGTAWVGQVDEVSPALILDIFCPNPPAILNGRHTGTPSGDIPYGKEISYTCDPHPDRGMTFNLIGESTIRCTSDPHGNGVWSSPAPRCELSVRAVIPQTHTVSPRIMDTHKQRIIPLDSGRSRRQTNHRQMGRIPVKPDLQAEDSLKPSYKFQGPSERSKKPALRKENFET

SEQ ID NO: 30461 - protein, 851 aa, Homo sapiens
  DOMAIN (751)..(792): kw TRANSCRIPTASE REVERSE II ORF2 domain identified by eMATRIX, accession number DM01354I, p-value=1.000e-38, raw score of 15.55
  DOMAIN (142)..(193): Integrase DNA binding domain identified by PFam, accession name integrase, E-value=3.8e-20, PFam score of 80.4
  misc_feature (1)...(851): Xaa = X or * as defined in Table 2
XEPPQKISTGVYGPLPEGTVGLILGRSSLSLKGVQIRTDVVDSDYNGEIQLVISSSIPWSASPGDRIAQLLLLPYIKVGNSEIKRTGGFGSTDPTGKAAYWASRVSENRPACKAIIQGKQFEGNQTTTSAEQHFTGKKNSPHEGKLIWWKDNKNKTWEIGKVVTWGRGFACVSPGENQLPVWIPTRHLKIYDEPIGDAKKSATAEMETPVTWMDNPIEVYVNDSVWVPGPTDDHCPAKPEEEGMMINISIGYHYPPICLGRAPGCLMPAVQNWLVEVPTVSPISRFTYHMVSGMSLRPRVNYLQDFSYQRSLKFRPKGKPCPKEIPKGSKNTEVLVWEECVANSAVILQNSEFGTIIDWAPRGQFYHNCTGQTQSCPSAQCILLVRAREAVWISMSMDQPWEALPSVHILTEVLKAILNRSKRFIFTLITVIMGLIAVTATAAMAGVALHSSVQSVNFVNDWQKNSTRLWNSQSGIDQKLANQINDLRQTVIWMGDRLMNLDHRFQLQCDWNISDFCITPQVYNESEHHWDMVRCHLQGTEDNLTLDISKLKEQIFETSKAHLNLVPGTEAIAGVADGLTNLNPVTWVKTIGNQCNVPEWLPFARPTNLTDDFEFPIGTYLNYECRPDPVNGMAHVIKDIQFRSQIKYSCPKGRSMRQKVNKDIQELNSALHQADLIDIYRTLHPKSTEYTFFSAPHHTYSKIDHIVGSKALHSKCKRKEIITNCLSDHSAIKLELRIKKLTRNSSTTWKLNNPLLNDYWVHNEMKAEIKMFFETNKNKNTTYQNLWDTFKAVCKGKFIALNAHKRKQERSKIDTLTSQLKELEKQEQTHSKASRRQEITKIRAELKEIET

SEQ ID NO: 30462 - protein, 1929 aa, Homo sapiens
  DOMAIN (1118)..(1137): SELECTIN SUPERFAMILY COMPLEMENT-BINDING REPEAT SIGNATURE domain identified by eMATRIX, accession number PR00343C, p-value= 2.286e-11, raw score of 16.85
  DOMAIN (56)..(1855): Sushi domain (SCR repeat) domain identified by PFam, accession name sushi, E-value=0, PFam score of 1578.5
MAHVDSKTSSFGFPNLNILVPKGYRLIGFPRLPHGIISGNTVIWDNKTPVCDRIPCGLPPTITNGDFISTNRENFHYGSVVTYRCNPGSGGRKVFELVGEPSIYCTSNDDQVGIWSGPAPQCIIPNKCTPPNVENGILVSDNRSLFSLNEVVEFRCQPGFVMKGPRRVKCQALNKWEPELPSCSRVCQPPPDVLHAERTQRDKDNFSPGQEVFYSCEPGYDLRGAASMRCTPQGDWSPAAPTCEVKSCDDFMGQLLNGRVLFPVNLQLGAKVDFVCDEGFQLKGSSASYCVLAGMESLWNSSVPVCEQIFCPSPPVIPNGRHTGKPLEVFPFGKAVNYTCDPHPDRGTSFDLIGESTIRCTSDPQGNGVWSSPAPRCGILGHCQAPDHFLFAKLKTQTNASDFPIGTSLKYECRPEYYGRPFSITCLDNLVWSSPKDVCKRKSCKTPPDPVNGMVHVITDIQVGSRINYSCTTGHRLIGHSSAECILSGNAAHWSTKPPICQRIPCGLPPTIANGDFISTNRENFHYGSVVTYRCNPGSGGRKVFELVGEPSIYCTSNDDQVGIWSGPAPQCIIPNKCTPPNVENGILVSDNRSLFSLNEVVEFRCQPGFVMKGPRRVKCQALNKWEPELPSCSRVCQPPPDVLHAERTQRDKDNFSPGQEVFYSCEPGYDLRGAASMRCTPQGDWSPAAPTCEVKSCDDFMGQLLNGRVLFPVNLQLGAKVDFVCDEGFQLKGSSASYCVLAGMESLWNSSVPVCEQIFCPSPPVIPNGRHTGKPLEVFPFGKAVNYTCDPHPDRGTSFDLIGESTIRCTSDPQGNGVWSSPAPRCGILGHCQAPDHFLFAKLKTQTNASDFPIGTSLKYECRPEYYGRPFSITCLDNLVWSSPKDVCKRKSCKTPPDPVNGMVHVITDIQVGSRINYSCTTGHRLIGHSSAECILSGNTAHWSTKPPICQRIPCGLPPTIANGDFISTNRENFHYGSVVTYRCNLGSRGRKVFELVGEPSIYCTSNDDQVGIWSGPAPQCIIPNKCTPPNVENGILVSDNRSLFSLNEVVEFRCQPGFVMKGPRRVKCQALNKWEPELPSCSRVCQPPPEILHGEHTPSHQDNFSPGQEVFYSCEPGYDLRGAASLHCTPQGDWSPEAPRCAVKSCDDFLGQLPHGRVLFPLNLQLGAKVSFVCDEGFRLKGSSVSHCVLVGMRSLWNNSVPVCEHIFCPNPPAILNGRHTGTPSGDIPYGKEISYTCDPHPDRGMTFNLIGESTIRCTSDPHGNGVWSSPAPRCELSVRAGHCKTPEQFPFASPTIPINDFEFPVGTSLNYECRPGYFGKMFSISCLENLVWSSVEDNCRRKSCGPPPEPFNGMVHINTDTQFGSTVNYSCNEGFRLIGSPSTTCLVSGNNVTWDKKAPICEIISCEPPPTISNGDFYSNNRTSFHNGTVVTYQCHTGPDGEQLFELVGERSIYCTSKDDQVGVWSSPPPRCISTNKCTAPEVENAIRVPGNRSFFSLTEIIRFRCQPGFVMVGSHTVQCQTNGRWGPKLPHCSRVCQPPPEILHGEHTLSHQDNFSPGQEVFYSCEPSYDLRGAASLHCTPQGDWSPEAPRCTVKSCDDFLGQLPHGRVLLPLNLQLGAKVSFVCDEGFRLKGRSASHCVLAGMKALWNSSVPVCEQIFCPNPPAILNGRHTGTPFGDIPYGKEISYACDTHPDRGMTFNLIGESSIRCTSDPQGNGVWSSPAPRCELSVPAACPHPPKIQNGHYIGGHVSLYLPGMTISYTCDPGYLLVGKGFIFCTDQGIWSQLDHYCKEVNCSFPLFMNGISKELEMKKVYHYGDYVTLKCEDGYTLEGSPWSQCQADDRWDPPLAKCTSRAHDALIVGTLSGTIFFILLIIFLSWIILKHRKGNNAHENPKEVAIHLHSQGGSSVHPRTLQTNEENSRVLP

SEQ ID NO: 30463 - protein, 337 aa, Homo sapiens
  DOMAIN (160)..(331): Reverse transcriptase domain identified by PFam, accession name rvt, E-value=8.8e-05, PFam score of -1.7
MENTDSPWHELFRELSKINAFDTLDSLLMRGKEFSDSTHNTFDHMWRTKEHNKAGWLPLNSVEKVMKENYELKDSVSQLQKQILNLKSARIALTERLISCRKRTEIVDKQTQALIMLVADLQQKMHAQPRQGDLWPFTRVTVHWEKGNDQTLWGLLDTGSELTLIPGDPKCHCGPPVKVGAYRGQKTDGSWRMTVDYCKLNQVVTPIAAVVPDVISLLEQINTFPGTWYAATGLASAFFSISIHKAHKKQFDFNWQGQQYTFTVLPQGHINFPALHHNLIWKDLDCFLLSQDITLVHYIDDIMLIGSGSSDPPTSSSRVAETTGTKEMVKLKSIQNF

SEQ ID NO: 30464 - protein, 398 aa, Homo sapiens
MVAARCLDRKPLCLTSLANPGSLALKPYLESAHFSQPLGQATGSSHLGDHSVLQSPAPTFPTVVRSQPNKSDPVKEAVQRTVRVWHTRAPARGPSAVAPGDPTPAAPSAGELLPDPTWLLTPVPPGYEDYFRRKESDLPKVTWRVPTRAEPRPKCPAHLSRSEQSHSSQKFLSNCVVGASLEEITEEEEEEDENKSAMLEASSTKVKEGTFQIVGTLSKPDSPRPDFAVETYSHSEFRIPSDEFNKEIEIIFKNQAETPELKNAIAILKNESESFNNKIDQRRKNELENPLLKNTVRGKKQSTSSSPKDRSSLPATEQSWTENDFDELTEVGFRRSVITNFSELKEDVRTHRKEAKNLEKRLDEWLTRINSVEKTLNDLKELKTMARELHDACTSFSS

SEQ ID NO: 30465 - protein, 136 aa, Homo sapiens
MAEEEETAALTEKVIRTQRVFINLLDSYSSGNIGKFLSNCVVGASLEEITEEEEEEDYNKSAMLEASSTKVKEGTFQIVGTLSKPDSPLTDFAVETYSAISQEDLLMRLLECDVIIYNITESSQQMEEAIWAVSGQ

SEQ ID NO: 30466 - protein, 140 aa, Homo sapiens
MCQTQNVLLSDLAFQGRYPLNRFSPPVSKLLGTNVSGAQAEKRGKSGIPGEKGSQTSVNFLSVQAIRCPSRYQALKGELPQARRQEQKNRKKLQEFEPKGWTVGVAEGEAAGTPQSGTAKPAPEMDKKNKLSTKIRRNQS

SEQ ID NO: 30467 - protein, 216 aa, Homo sapiens
MGVEKIIAQKIDRGRRAYKKHMGPTEHVTLRACCKESEPHEMIRLTLLIPVNQPVISDCCSEETRGIDLAFQGRYPLNRFSPPVSKLLGTNVSGAQAEKRGKSGIPGEKGSQTSVNFLSVQAIRCPSRYQALKGELPQARRKEVVSMFPEKQALLTNLRRQEQKNRKKLQEFEPKGWTVGVAEGEAAGTPQSGTAKPAPEMDKKNKLSTKIRRNQS

SEQ ID NO: 30468 - protein, 89 aa, Homo sapiens
  misc_feature (1)...(89): Xaa = X or * as defined in Table 2
XLFEKEKEQALLGQPLPQPADSIITPGQARELLAMALLITGSHGDLILSLTFDYHFHVEAFQVFISTSDLFLKLQIHTASCLLTSSIEX

SEQ ID NO: 30469 - protein, 224 aa, Homo sapiens
  misc_feature (1)...(224): Xaa = X or * as defined in Table 2
EPDLLPWAWNAPNKGYHEEAPRYLFIWTHRADPRTPCGSRLIFRRPDFIVLSLSQIHILGLLGSLHLCPGGQFEAPADSSAKGTLPGCGGLLGASPLLGSGNRTMARTDKIPVCWEPKRETSTAGPGAFRNLAENCRSDEEHKGRVPREQEPLKEEGGADCRLPNLEGVHRGAAGGSKSARLSSLKSEKKGQGYWILECVRSLAQWMSGGLGVSYWHGHVHRTX

SEQ ID NO: 30470 - protein, 69 aa, Homo sapiens
MKPLLLSVSAKIRNTNTSRLHSNKASTAEGRKLSVETRCIAWSQPWQVRWSVDSLVSQPSQLSLQPLLT

SEQ ID NO: 30471 - protein, 72 aa, Homo sapiens
MMRRPVHCATDKEGILAPKHFQAAAGEARTSTDRSGAQAQRSVTPCQWHSVQDSSTYSSVVVVVVAAAAETL

SEQ ID NO: 30472 - protein, 1273 aa, Homo sapiens
  misc_feature (1)...(1273): Xaa = X or * as defined in Table 2
XAWVGGEAAGVRPPRQPPCNRQSEVQSVGPGPRVGPWGVGAAPGELQGSPLPGVEGAGGAEDILGDLGSVRIMESISMMGSPKSLSETFLPNGINGIKDARKVTVGVIGSGDFAKSLTIRLIRCGYHVVIGSRNPKFASEFFPHVVDVTHHEDALTKTNIIFVAIHREHYTSLWDLRHLLVGKILIDVSNNMRINQYPESNAEYLASLFPDSLIVKGFNVVSAWALQLGPKDASRQVYICSNNIQARQQVIELARQLNFIPIDLGSLSSAREIENLPLRLFTLWRGPVVVAISLATFFFLYSFVRDVIHPYARNQQSDFYKIPIEIVNKTLPIVAITLLSLVYLAGLLAAAYQLYYGTKYRRFPPWLETWLQCRKQLGLLSFFFAMVHVAYSLCLPMRRSERYLFLNMAYQQSTLGYVALLISTFHVLIYGWKRAFEEEYYRFYTPPNFVLALVLPSIVILDLSVEVLASPAAAWKCLGANILRGGLSEIVLPIEWQQDRKIPPLSTPPPPAMWTEEAGATAEAQESGIRNKSSSSSQIPVVGVVTEDDEAQDSIDPPESPDRALKAANSWRNPVLPHTNGVGPLWEFLLRLLKSQAASGTLSLAFTSWSLGEFLGSGTWMKLETIILSKLTQEQKSKHCMFSLISGSLPFLKKKVSDEITYAEDTANSIALLGDLMKIPSSELRIQICKCIVDFYHAEPPKKHIPEVNCTIMMKAQAASGICTHLNDPDPSGQLLFRSSEILWNLLEKSSKEEVIQQLSNLECLLALKEVFKNLFMRGFSHYDRQLRNDILVITTIIAQNPEAPMIECGFTKDLILFATFNEVKSQNLLVKGLKLSNSYEDFELKKLLFNVIVILCKDLPTVQLLIDGKVILALFTYVKKPEKQKIIDWSAAQHEELQLHAIATLSSVAPLLIEEYMSCQGNARVLAFLEWCESEDPFFSHGNSFHGTGGRGNKFAQMRYSLRLLRAVVYLEDETVNKDLCEKGTIQQMIGLHDLYLLRPPISSCDLECRDHLGMQHSTPLYDRTIQKDKVHQIGYRLRLGFQIISPINQNFTEETVIFTIHSTGLHRGEGKGKREGSIAFGSVGKIGEIWNEIYEEIKLEKLRPVTTDKKALEAITTASENIGKMVASLQSDIIESQACQDMQNEQKVYAKIQATHKQRELANKSWEDFLARTSNAKTLKKAKSLQEKAIEASRYHKRPQNAIFHQTHIKGLNTTVPSGGVVTVESTPARLVGGPLVDTDIALKKLPIRGGALQRVKAVKIVDAPKKSIPT

SEQ ID NO: 30473 - protein, 316 aa, Homo sapiens
MVNEDLLSDGTSENESGFWDSFKWPGMRASTGATPESLVTVTATKGERGPRVFKGKLEQLRRPTKPSTLLLLLQGRLQQAMRARVLAVMKAAIHISHLPAWHFLASDTGSEMSLMPERTHSYLGARIVAGGNPALSAASSGAAAAHCEQEGGSRHDQQALRLISVFWSLHDTHTGTGYTMETHLQGAKPLHAWASDGSVPAANQAQGSSRRSSSQLAQTLASVMTLCPGNHTPSLAMAEELMMEASLGFRGWSLNGCGAGAEGPPVGWGAENGRGTEPFVFPRWGLLHCAQRVLALRVTLGARVLVAVTHRVIGWG

SEQ ID NO: 30474 - protein, 92 aa, Homo sapiens
MGDTIAVLRCVPSLKSSAVSAAQDSDLSLYLGSKVAFLVAVDWSSGEPLLAEHALPDHRAGVGYTVVHRAEAFEAMKTANTSKFPSHRFVVD

SEQ ID NO: 30475 - protein, 40 aa, Homo sapiens
MRNVHVPGILAVVSKCLSKGAEVYTVSLTSSVSQAPGSSE

SEQ ID NO: 30476 - protein, 272 aa, Homo sapiens
  DOMAIN (66)..(77): RNase H domain identified by eMATRIX, accession number PF00075F, p-value=8.500e-11, raw score of 12.87
  DOMAIN (16)..(145): RNase H domain identified by PFam, accession name rnaseH, E- value=1.9e-38, PFam score of 141.2
MTSWVVPQLTKDQPIPEAITVFTDGSSNGNAGYIGPTDKLISTSYASAQKVELIAVITALQDFLKPLNIVSDSAYVVHATKNIETAAIKHIDNSELASLFSRLQQVVHQRRHPFYITHIGSHTTLPGPMSAGNHKVNCLVSFTTQEAQEFHNLTHVNAAGLKDKFALTWKQAKFIVHGCSQCQVFVLPNQEPCVNPRGLTPNALWKMDVTHVSSFGILSYVHVSADTFSVSSHTDLPATHNYSYWAYVPLPPLIRPLTRVDAPAQIYTNDSV

SEQ ID NO: 30477 - protein, 212 aa, Homo sapiens
  DOMAIN (59)..(121): gag gene protein p24 domain identified by PFam, accession name gag_p24, E-value=4.9e-08, PFam score of 34.7
  misc_feature (1)...(212): Xaa = X or * as defined in Table 2
MGHKESKHHAYLCYIKLPLKQGSVQSEEARLQAQLNRTNGILITQAQLTGSDSFSDTYAQLNFDALTTEQVTKVCMRAWDKLRAPGQAPVSFTTVKQGHAELYPDFLAKLQDAVEKFVSDESAQGLVGLVLGGASTSAKGITIHTGLINSDSTDEIKLIVSAKVPVSVPAISSHTDLPAPQNYSYWAYVPFPPLIRPLTWLDAPAEIYTNDX

SEQ ID NO: 30478 - protein, 127 aa, Homo sapiens
  misc_feature (1)...(127): Xaa = X or * as defined in Table 2
MDRKLTLTDKVQGSKSLQIKFQPSKAARLDLFLRLSALVGSLPSAVKLQTSAVSVTAYKASCTHQSEQQQDLLQRAKEHSFHSVEVSSHTDLPAPQNYSYWAYVPFPPLIRPLTWLDAPAEIYTNDX

SEQ ID NO: 30479 - protein, 712 aa, Homo sapiens
  DOMAIN (163)..(181): RNase H domain identified by eMATRIX, accession number PF00075J, p-value=2.688e-14, raw score of 15.78
  DOMAIN (69)..(226): Integrase core domain identified by PFam, accession name rve, E-value=2.8e-38, PFam score of 136.4
MSAGNHKVDCLVSFTTQEAQEFHNLTHVNAAGLKDKFSLIWKQAKFIVHSCPQCQVFVLPNQETGINPRGLTPNALWQMDVTHVSSFGRLSYVHVSVDTFSGFIWATCQTGEGTAHVKKHLYSCFAVMGLPYQIKTDNAPAYVSKAFDTFMQQWGISHITGIPCNPQGQAVVEWANRTLKTQLSKQSEQPKHDLTTPHFQLHLALFTLNFLNVPKDNILTAAECHYTGKKFFLNEGKPVLWKNSQTNTWEPGTIITWGRGYACVSPGDHQSPVWVPTRRLKLRVNTDNENHRGKTSVSETALRHVSSHTDLPATHDYSYWAYVPFPPLIRPLTWIDAPAEIYTNDSVWMPGATDDHCPTQPGEEGTAFNVTMEHPELWKLAIAMSGLQVWEGETILSVVPNTVALPQYQHKCRLSALLTSNLTVPIQSCVKPPYMLLVGNIKIWTSNQTVQCINSHLYTCINSHFDSGKSVMLVRAQEGIWIPVTLPRLWESSPSIHLINEVLQQILKRSKRFVFTLIAVIMGLITVTALATTAGMALHQSIQTAHFVNDWQANSTQMWNSQQGIDQKFANQINDLRQSVIWLGDWVVSLEHRMQMQCDWNTSDFCITPYSCNETDHSWEMVKGHLLGREDNLSLDITELKKQIFEASQAHLSIVPGAEALDQAAENLSGLNPTTWIKSIGGSTVVNFGIMFLCLTGLSLVCQTSQRILHQN

SEQ ID NO: 30480 - protein, 91 aa, Homo sapiens
MHVFLENENDYLEHLLTRLGKECVDTRLRGPFREDGHGPTIQQQPDACSLETPPSRCRHPVGTWSKAGRSGQREGTLTDLLVGDFEDSSRQ

SEQ ID NO: 30481 - protein, 109 aa, Homo sapiens
MALQTFSNTNNHNRSGIVGFLVEAGEEAAFSVGDSTGTESAEWMKSLTPGSHLITPAPLQYMSHKIAPGRASSIKSSQQLSITFPRDLERWRQRTAQQESVGVKSKQEA

SEQ ID NO: 30482 - protein, 188 aa, Homo sapiens
  misc_feature (1)...(188): Xaa = X or * as defined in Table 2
XPGSTSQASEHVNLRTEQKYPLHTAEAVEPILPALANCGGSGFTPPSVTLKDILMHNLQCVGNMNAPDSIPTSADGGGPCSALDLQAFFQQLSDPTGMERKASGDTYWREQGDKKGKLTSTPNPNNSEESIPGSPVPLHEVVSMLCVNMLRSLETITRLDKGMPGQATNGKYFAMQMSPPKPSIPLSC

SEQ ID NO: 30483 - protein, 141 aa, Homo sapiens
  DOMAIN (121)..(139): SUA5/yciO/yrdC family proteins domain identified by eMATRIX, accession number BL01147D, p-value=9.679e-09, raw score of 12.33
MVEGKGEAGTFFTGQQDDGNNRAFQESSEAPSLLWQMQQVQAGPPFPRSLPCPMRDAEVGHCPYCMDEKPKPQGPPRATQPAGTEEAPSAILGDSTPTDADNSSSSTPTLSSSSAGNLLLPQTSVFKETATPPISRPGQKT

SEQ ID NO: 30484 - protein, 53 aa, Homo sapiens
MPTGPSLGSPHWMPKDKTTSAAPMHRWCTGSCEWILRCPWMLGLLMPLEFLQI

SEQ ID NO: 30485 - protein, 64 aa, Homo sapiens
MTDPTMLTDMMKGNVTNVLPMILIGGWINMTFSGFVTTKVPFPLTLRFKPMLQQGIELLTLDAS

SEQ ID NO: 30486 - protein, 131 aa, Homo sapiens
MWARVNLFDLLQVEPTGISLGCLNIEGRFFMDYVIPFPIDLALLLGAKRIMKGSSPLGPFQHANHGATYCLAPPVTCSSSSMLRRKGSPPRARPHPLSRPVLKDTCSESPSPWKLSPVEGTRTRGPHASTG

SEQ ID NO: 30487 - protein, 126 aa, Homo sapiens
MLAAVPMEKGYLEARYVQHGGSTFPFLCHDMYIKEQGSTITQEYSTSDAPGIVETVPLLSALGTGGEEAHGVLADHESLAWIKPPGALVLWPSLLGSSSPGMEQLLLASDSCSDSARRAVKVMDVA

SEQ ID NO: 30488 - protein, 44 aa, Homo sapiens
MLAQECDLCNFSSSSGWLLSATNQTDGRLPLQFHEMNVKWPMGN

SEQ ID NO: 30489 - protein, 132 aa, Homo sapiens
MTHREWRRAAGQSSTWEWCRAKAGPPPLRNSQNNTDDFSMSAHGPFKELFSQWPPAFHEEQEATEFKYIHHHGYLGNVIAKTNETCHDDLVPEVRNGRLFALKAVPYILALTHLHCVPKNPSADSPKPLPLG

SEQ ID NO: 30490 - protein, 263 aa, Homo sapiens
MEVGTLGHAQEAEYVMGEEDVRHLKYCILIGSRLKKPHFLSLVSCHIFTEERACAKALRWEYETKEGKCLGYSEKGERRAQEEEGIRKSSQRKTESSGASPSFPGFYPAKSSPTGRAPELQTVQGAFHYNVQQSESTDGFKEEPPLTWSLKDQHKFISPGGIRERIQRVEHIKVNPGQGDRAILEGLPETLKQRFLEARERKEGSEEENGETNNCADCPKKDRIWKNACSWGSSRIKRRFAMLPRPPSHLDPQVMSRGHGSWL

SEQ ID NO: 30491 - protein, 297 aa, Homo sapiens
MVVKDSSRLWLTSSRPGPQNLLPVVGKQELPAADVVRMRRAAKTLTQVLVIVVAVMSSFRFRNTTLLTHPQMIGVADCKPEVVWVVYRLQRVETHSGLFELKGIHGKIMDTFRNKRLQGFRVTCKGGFSPPQGSCMPAASPKLLNQTFLVPKSLPKDMENGYKICVQIQKKAPPLSPLNHGDFVKFIAHKGQKSKTDAQVAQRAKLAANECALVLCLGASLEMLEYEERRVRPGEGEGTSNMGYGERKLDKDHREEDYDGAGVTERSTDPMLPSFAALCVLYVSCVRTLALAALATK

SEQ ID NO: 30492 - protein, 1165 aa, Homo sapiens
MAGGVWGRSRAREAPVGALTLTALTEGIRARQGQPQGPPSAGPQPKSWEVKPEAEPQTQALTAPSEAEPGRGATVPEAGSEPCSLNSALEPAPEGPHQVPQSSWEEGVLADLALYTAACLEEAGFAGTQATVLTLSSALEARGERLEDQVHALVRGLLAQPPPNPQGSSRALRSLSRNQRVNGQVLVQLLWALKGVFEAGAPGTGGRCSSHYQGATRALGEMLAVSGCVGATRGFYPHLLLALVTQLHKLARSPCSPDMPKIWVLSHRGPPHSHASCAVEALKALLTGDGGRMVVTCMEQAGGWRRLVGAHTHLEGVLLLARPSYTTSLSSTSYCTHQLSTEGIGTDATLLELRRYLLGAEDRKCGIEDLWVIILCQCVKVTSACWKLVAMRSGKASCTLETVWEDKHKYEEAERRFYEHEATQAAASAQQLPAEGPAMNGPGQDDPEDADEAEALTAAAGVIPGRARTAGSPCRKRGSAPQEGLGPADPASWLSAERVWLDKLLFDQAESSYRQKLADVAARAAWPPALAPWGLCTHGNQVACHHVTWGIWVNKSSFDQAERAFVEWSQALLLAPDGSRRQGLPTQASRWPSPTWPTSPAHRSMASPRWQPAGTGSGGVAGEARYDAAERGFYEALFDGHPPGKKDAEAPWLSKPAYDSAECRHHAAEALRVAWCLEAASLSHRPGPRSGLSVSSLRPNRKMATNFLAHEKIWFDKFKYDDAERRFYEQMNGPVQENGASVILRDIARARENIQKSLAGCWDHRPEPPRMAVTAFKRLSMEDDDGGLSMSGPRCHPLPPQAAGLGSELRAGAAGGSQRDRGNHWIHADSSDRGLWAGRQSIQKVVADGAGLPGEDWVFVSSKDADLTDTAQTRALFEKVQPTHVIHLAAMVGGLFRNIKYNLDFWRKNVHMNDNVLHSAFEVGARKVVSCLSTCIFPDKTTYPIDETMIHNGPPHNSNFGYSYAKRMIDVQNRAYFQQYGCTFTAVIPTNVFGPHDNFNIEDGHVLPGLIHKVHLAKSSGSALTVWGTGNPRRQFIYSLDLAQLFIWVLREYNEVEPIILSVGEEDEVSIKEAAEAVVEAMDFHGEVTVSSGSSAGGWAGLPLGGLSGHPVLQFDTTKSDGQFKKTASNSKLRTYLPDFRFTPFKQAVKETCAWFTDNYEQARK

SEQ ID NO: 30493 - protein, 479 aa, Homo sapiens
  DOMAIN (375)..(413): Elongation factor 1 beta/beta'/delta chain proteins domain identified by eMATRIX, accession number BL00824C, p-value=5.275e- 13, raw score of 14.58
MRSGKASCTLETVWEDKHKYEEAERRFYEHEATQAAASAQQLPAEGPAMNGPGQDDPEDADEAEALTAAAGVIPGRARTAGSPCRKRGSAPQEGLGPADPASWLSAERVWLDKLLFDQAESSYRQKLADVAARAAWPPALAPWGLCTHGNQVACHHVTWGIWVNKSSFDQAERAFVEWSQALLLAPDGSRRQGLPTQASRWPSPTWPTSPAHRSMASPRWQPAGTGSGGVAGEARYDAAERGFYEALFDGHPPGKKDAEAPWLSKPAYDSAECRHHAAEALRVAWCLEAASLSHRPGPRSGLSVSSLRPNRKMATNFLAHEKIWFDKFKYDDAERRFYEQMNGPVAVTMRKEGQERRATASGRSGLRSLRGRRRPKKACHLVAKSLHPCWMSKPWDDETDMAQLEAFVRSIQLERVVSGGLPNLVPRGLRVSGKLQIQCMMEDAKVGTDLLGEGITKFGEQRAECRYRSFQQDLKPECV

SEQ ID NO: 30494 - protein, 719 aa, Homo sapiens
  DOMAIN (149)..(194): kw TRANSCRIPTASE REVERSE II ORF2 domain identified by eMATRIX, accession number DM01354N, p-value=1.000e-40, raw score of 13.17
MKAEIKMFFETNENKDTTYQNLWDAFKAVCRGKFIALNAYKRKQERSKIDTLTSQLKELEKQEQSHSKAGRRQEITKIRAELKEIETQKTLQKINESRSWFFERINKIDRPLARLIKKKREKNQIDTIKNDKGDITTDPTEIQTTIREYYKHLYANKLENLEEMDTFLDTYTLPRLNQEEVGSLNTPITGSEIVAIINSLPTKKSPGPDGFTAEFYQRYKEELVPFLLKLFQSIEKEGILPNSFYEASIILIPKPGRDTTKKENFRPISLMNIDAKILNKILANRIQQHIKKLIHHDQVGFIPGMQGWFNIRKSINVIQHINRAKDKNHMIISIDAEKAFDKIQQPFMLKTLNKLGIDGTYFRIIRAIYDKPTANIILNGQKLEAFPLKTGTRQGCPLSPLLFNIVLEVLARAIRQEKEIKGIQLGKEEVKLSLFADDMIVYLENPIVSAQNLLKPISNFSKVSGYKINVQKSQAFLYTNNRQTESQIMSELPFTIASKRIKYLGIQLTRDVKDLFKENYKPLLKEIKEDTNKWKNIPCSWVGRINIVKMAILPKNGPANCDIPWIGDLELESILSTLLGKKRSYLAVRIIMGKPKEASDTTPSTLDNTLNQKQYCILEEMTEIRVHLEDQKDAGLEATPYPYLIDQSYIYKSHVASWYEFLGNRQFYQVAAPIVAAVQIVVSLLEQVNTVSNTCCETDKKYTYWFLPAVLGTELLKPS

SEQ ID NO: 30495 - protein, 591 aa, Homo sapiens
MPQGLQMPKKGPLLRHHHIMATSQQLKDVAAPHPEALESVTSVVHKARDIGKGERKYPPQHTAKEQLCTAAVFPGTLEAFGQLPRTLSQQLLAHCSLTRPPLLLPRKSAGLCFPSPPPSHSVPPQATGMPEWQMAAKRKVKKEGRTGGREPERKHSEEGVYVHYPNGCQVPVDKDFNCVWPFLLITYGTGPNEADLVANLASAIEPAYLRKLLLNSTLLLLPGGNTAHPVHCRRLEKVSRDLCLAKTLEDDGVALRLVIQHRTVLNLIELPRRGRLPNATEFHFGAAPFCLKALALIALENNGYGNTTQGLKCPVWARCLHTEKSGVPRSQPGECTRPSAWASEESRAVGSSPFTGSEKGAHLNIKQRTSENWQRPEKRPSEGASTPAPASGRYEDPRKEIMLRKGDHTSVQPAPAPWHALKTQGLNQGQRHSPPGCEDSKGSQLHEEGYPECQIWSNSARTLQNSVWYVEEGHPHLADVGRKRSPLVLAARGDGHCQLRLIMKSGFLESSAEHWLFMDKDRNRRKKDPEKARRSYGDRDRICRATNQGTPGATEAGRGKEGCSLRAFKGNAALLNTDFKLLASGTVQNTL

SEQ ID NO: 30496 - protein, 188 aa, Homo sapiens
MSDLEQFSENPSKFSVVCGSRCGQEEKSTCACCQRRWPLPIEADHEEWVPGVLSRALAIHGQGQNGPANCDIPWIGDLELESILSTLLGKKRSYLAVTMFTTVNGTCLINPDQRMKTLKNQVRKREENRIGKSRASRRAERRAREGRVEAPCGQVPDHRPALGVAASGSGTASALDGRVRRKRALVKA

SEQ ID NO: 30497 - protein, 177 aa, Homo sapiens
MIQVLIGKIQPVSCYVQDTFCSKALHKGKESKSLGLHSAADEKLSVHCKGNVAPKIFKHWNHTRDEDLFHVSITKVVSVGIKNRRERVEFQRFFLQEVYGFGLRFLTLTLLRINMLEISYNTLDSSSAKKTRIPGLGKHNINSGALITDMRKMIKKRSLKPRTILVIYQVCSCGGKK

SEQ ID NO: 30498 - protein, 204 aa, Homo sapiens
MLLDTVQITHELFYVIEEYGHKYNILTGDCNIKFSVLKGNSSNWVFEIEKQSCNVLKRWRHSLHTKGRVSLPAVNVLAAVETFNKIDFSNSERCAKTGLFIVKTKHLLKRWRLCGIARSWGLLLTALPNELFDGNSVRLQISASFRVCFLNELPVGEMAIYLFDFPKSLRESLTERVKTQGCDLGIVRIGVWAVTAIKALFLNV

SEQ ID NO: 30499 - protein, 139 aa, Homo sapiens
MAMVRRQGRRYDGGIQGLCLGLNFPNYVFQTLRKKGLNGCDSPDPDADDSVGHSPESEDKYRKINEDIDLMISRQRLCALNKKENKGCESPDPDSSYALTPRTEEKYKKINEEFDNMIKSHKIPNGQAQEKDDDENIHS

SEQ ID NO: 30500 - protein, 473 aa, Homo sapiens
  DOMAIN (1)..(55): MADS-box domain proteins domain identified by eMATRIX, accession number BL00350, p-value=1.000e-40, raw score of 20.79
MGRKKIQITRIMDERNRQVTFTKRKFGLMKKAYELSVLCDCEIALIIFNSTNKLFQYASTDMDKVLLKYTEYNEPHESRTNSDIVETLRKKGLNGCDSPDPDADDSVGHSPESEDKYRKINEDIDLMISRQRLCAVPPPNFEMPVSIPVSSHNSLVYSNPVSSLGNPNLLPLAHPSLQRNSMSPGVTHRPPSAGNTGGLMGGDLTSGAGTSAGNGYGNPRNSPGLLVSPGNLNKNMQAKSPPPMNLGMNNRKPDLRVLIPPGSKNTMPSVSEDVDLLLNQRINNSQSAQSLATPVVSVATPTLPGQGMGGYPSAISTTYGTEYSLSSADLSSLSGFNTASALHLGSVTGWQQQHLHNMPPSALSQLGACTSTHLSQSSNLSLPSTQSLNIKSEPVSPPRDRTTTPSRYPQHTRHEAGRSPVDSLSSCSSSYDGSDREDHRNEFHSPIGLTRPSPDERESPSVKRMRLSEGWAT

SEQ ID NO: 30501 - protein, 206 aa, Homo sapiens
MTPNWRANGLVPLPTWLSHEGTARDAPGTPSVLATRSERKRHISVLFSEASPLTRWHRYPRNYTREILTVTGQTDASALSTAPRSEQSPDMPHTSTLLRAKALSARFPHETTVVTAEIITRPKRNETQQHNKRKELITTPMSRAQQTDPNNRPERAEQRKSWTEQQRTSTSRGTNRTHPYNNKHPEKEFIWVGKPGPCGTQSSLLQ

SEQ ID NO: 30502 - protein, 154 aa, Homo sapiens
MGLRCDSETSWLQVRFSTIPAVVATGTDFFCPRKVEEKVKRTLSCTSGTSSATESIKWALGAPDSRTWLLDGISGPALGQRGAHCPQRHRQTSTSIKTIQENMTSSNKLNKAPGTNPGETEICDFSDREIKMAVLRKVKEIQDNTEKEFRILSD

SEQ ID NO: 30503 - protein, 130 aa, Homo sapiens
MIEAHGVEKQRIQQKLHKAVLVIFHTGGQRTKTSQPIWNVNLREGRQLGGKQKKQIHLDPKPGLLPSGHPILNLKHSELHHAPQSSSWKREGLDLEERVEFGQIKKNAGTLQKRRGCEPRHGDTNIGDIF

SEQ ID NO: 30504 - protein, 63 aa, Homo sapiens
MCAAALRLMKIPLVVYGCQNERFGGCGSVLNIASADLPNTGRPFQNHLEASVPDSAQSLPQTI

SEQ ID NO: 30505 - protein, 124 aa, Homo sapiens
MIQRCQQLSVYESCPGHFGSLGSFIRTCSRSADIPFSELSILVHLDFLVCRRSLTFPLLPQPDIQGYSGMRAVVLNHCCSGEPVGTLWKHSTVGPLPSDSDGLGQGLSRVRHRSLQVILTGSPG

SEQ ID NO: 30506 - protein, 44 aa, Homo sapiens
  misc_feature (1)...(44): Xaa = X or * as defined in Table 2
XASGGHNKDTLMKTLSGPQKKIEDKAPVAQIGVKKIIEVGGKPQ

SEQ ID NO: 30507 - protein, 83 aa, Homo sapiens
MGIAPTRFVHLHEVELSTDNEKQAPSNRRHRESKWRLLKPSICTVQVGPLDAVAHDRSSDVWWAPTQAPDCHLERHKQIFFPI

SEQ ID NO: 30508 - protein, 197 aa, Homo sapiens
  DOMAIN (136)..(179): 1 kw MIND INHIBITOR DIVISION CONTROL domain identified by eMATRIX, accession number DM01756B, p-value=4.822e-15, raw score of 22.91
MLNLQPGFPEQALMGSINMLKFGQGKSLGSPSGSEGLRVLLVEGNDPQGTASMYHGWVPDLHIHAEDTLLPFYLGEKDDVTYAIKPTCWPGLDIIPSCLALHRIETELMGKFDEGKLPTDPHLMLRLAIETVAHDYDVIVIDSAPNLGIGTINVVCAADVLIVPTPAELFDYTSALQFFDMLRDLLKNVDLKGFEPD

SEQ ID NO: 30509 - protein, 207 aa, Homo sapiens
MGPEQLTLALVFVGPRGLILGPSGGCLEASSESSGPDLWAAWVVWVIAITVVEQPTGTQAIPDRGPAGWWLQLYHLELGLRVGHSPVLNYQSDASCGPVTREISMGCLCMPLRQTAWAEAVRSVIHSIFSLTEAHSRAVGIVQGMAAAAMSTQIQPVGHNPTLNSQKWHLGPMTRDGWEYNMECTQAEEPVHVATTTTGPWRVLPGF

SEQ ID NO: 30510 - protein, 137 aa, Homo sapiens
MLTAELESDSHSVSTEHTKPDEIQFYKQKSRMGDGGDEKLLAGVIVFASQNPVGYDQDRIEESQGIQWAESLLWCVGRSSHVGTGLRSEMSWGLISASRRGAPEREETTVANEKAVSVDLDFSSNSNFLAEYFEWRV

SEQ ID NO: 30511 - protein, 215 aa, Homo sapiens
MQALEPQPGLHEYSQTVAKQFYSPYLGVDTYPHYALDQQEEVRAVFALFPSSIANILRPSPKAQDHLHQQRASAGQQKQDESCQEDTYPGRKTPTLAGRHVPLKIEKEAVWAFQGNHFSSNNKQPERADSKTQIRQLRHRRIWSRSLSLLSKGEEPEENTSLPSLCLGAVTLDSTTIIPSRHQRGESHKAEGAPVTHPLLFHVLYLLAQEAIKLS

SEQ ID NO: 30512 - protein, 34 aa, Homo sapiens
  misc_feature (1)...(34): Xaa = X or * as defined in Table 2
MXXXXXXKEKLLHAETNLCVMGENRPKCGQSLRS

SEQ ID NO: 30513 - protein, 47 aa, Homo sapiens
MFLYSGGPVHLNQRSVQALESKGARAVCSGILHFHPQELRKCNITPH

SEQ ID NO: 30514 - protein, 63 aa, Homo sapiens
MCQQRTWHHPEGILTSHCWGNLPRWLKSRLTLHSTLKRHLFSVTIRLLHLAINSMGCKKKNLH

SEQ ID NO: 30515 - protein, 137 aa, Homo sapiens
  DOMAIN (16)..(35): Eukaryotic  RNA-binding region RNP-1 proteins domain identified by eMATRIX, accession number BL00030A, p-value=1.000e- 12, raw score of 14.39
MSKSESPKEPEQLRKLFIGGLSFETTDESLRSHFEQWGTLTDCVVMRDPNTKRSRGFGFVTYATVEEVDAAMNARPHKVDGRVVEPKRAVSREDSQRPGAHLTVKKIFVGGIKEDTEEHHLRDYFEEIILNSLEKLK

SEQ ID NO: 30516 - protein, 57 aa, Homo sapiens
MRSKTRLKTCTKKLLKQSRKGRHRRDTTALSRTQGKTEPWLSESYQRKNGNSTFIFF

SEQ ID NO: 30517 - protein, 207 aa, Homo sapiens
MDGFIRSCQRGAWTASSEVDVTLNLPITFGWMRLGRMSRLENITLEKNGDEKEHGSKFQELSIFTSLGVGVAAWEGAGNRAGPASEEPRVLSTIWEFVLGKQKATEEFNERSGISWQACGEMVSRATGLAGRVAGGIRIVPVGSSEAFKQITGMKVATVSPMMIITQKITSLACEIHDEDDLIPSLIPSAAHPLHSIINKINRSCCC

SEQ ID NO: 30518 - protein, 34 aa, Homo sapiens
MLHFQGEDVWAHVYGRLKRISFHGKKKNPVLFIN

SEQ ID NO: 30519 - protein, 60 aa, Homo sapiens
  misc_feature (1)...(60): Xaa = X or * as defined in Table 2
MFWAHCYGQIWKRISFHGKKKKILFLFIKLTMSINLKYGXXXXXXGALFKEYLGGPTFQR

SEQ ID NO: 30520 - protein, 97 aa, Homo sapiens
MGRVTTLEGIGSTALPGCGCKVPALCGECVGPQLSPDFHVLGGGIRVCPGSPLRPRGLDVPRKAFARDPPPPGSKLKGLRFCGGGEGEGCRVGGGHR

SEQ ID NO: 30521 - protein, 93 aa, Homo sapiens
MWEQLWNWVTGRGWNSLEGSEEDRKMWESLELPRDLFNGFDQNADNYMDDEIQADVVSDGDEELIGNWSKDDSCYVLAPALEICGALNLRVMI

SEQ ID NO: 30522 - protein, 170 aa, Homo sapiens
  misc_feature (1)...(170): Xaa = X or * as defined in Table 2
MQNNVYFHGLLTEIHNVTRAPLTTVWLLLIKQCENKLYNKLVSVEWGTAEKIPENVEATLELGNRQRSNSLEGLEEDRKMDLLNGFDKNADSDKNNKVQVEVVSDGDEELAGDWSKAQRTEVEMGSGAPAEQGRTYLQPSIARFNPTLLAGMLVTSNPDRVIPRPQDFGX

SEQ ID NO: 30523 - protein, 100 aa, Homo sapiens
MWKRLWNWVTGRGWNSLEGSEEDRKMWESLEPPRDLLNGFAQNADNDIDNEIQAEVVSDGDEELVGNWSRGDSCCVLAKRLAAFAPALEISGTLNLREMI

SEQ ID NO: 30524 - protein, 96 aa, Homo sapiens
MTVVVDKSNNTYHIKGFIGQKILNANDLLKDHIRQTATDGAADQIGTSGLRVIMFLPVLPQRSGEIEVYTPERKFDPGWDQQTLAQAPSLLRFSPR

SEQ ID NO: 30525 - protein, 53 aa, Homo sapiens
MACTVARLCLHHPMAFSHEALRNSNASRACMTWQRRLRWRFLQSVGLQAPGER

SEQ ID NO: 30526 - protein, 102 aa, Homo sapiens
SFAVGGGCCGLVSLTSVERQQHGGIRLRRLLYVGGGRGLRAVGKRRQGGLSLEEEEEEDANSESEGSSSEEEDDAAEQEKGIGSEDARKKKEDELWASFLND

SEQ ID NO: 30527 - protein, 299 aa, Homo sapiens
MEEFDSEDFSTSEEDEDYVPSGGEYSEDDVNELVKEDEVDGEEQTQKTQGKKRKAQSIPARKRRQGGLSLEEEEEEDANSESEGSSSEEEDDAAEQEKGIGSEDARKKKEDKLWASLLNDVGTKIKSAPNTQVKKGEDTEETSASELLVKAEELEKPKETEKVKITKVFDFAGEEVRVTKEVDATSKEAKSFFKQNEKEKPQANVPSALPSLPAGSGLKRSSGMSSLLGKIGAKKQKMSTLEKSKLDWESFKEEEGIGEELAIHNRGKEGYIERKAFLDRVDHRQFEIERDLRLSKMKP

SEQ ID NO: 30528 - protein, 155 aa, Homo sapiens
MNPDVDAHGKGTVPKGESDLYIRITFVASIVKQVVRGLSASFQLLSPCQAVLLYQQFYILKSCLRHSRTLAEYIRNNYREEFSTLETDLVIKSRLKKYADKALMKPYGFTPYQEKSPKAEMHIKPISSDSFPLEKQLRIIQAKGHEIIALVTGTW

SEQ ID NO: 30529 - protein, 208 aa, Homo sapiens
  misc_feature (1)...(208): Xaa = X or * as defined in Table 2
MIPAHGIRIPPRLNTVVQLNSPSSVFHFGPFSNPVRDSGYNKQGDRFGDGKPYPGPSASSLGSIAETPSPFSQAPSPLQPPQNYRGKLTQERLHEKEPLKDQRTVLENAEVYRARGHLWLERVEGPGRSHPLVPLPCSRPVPRLPNHGAGNQPSPANYGAAELMSDSQAQPMFNLEPTSPYCPTHSWIKSLSHSYLDPREHTESSEAX

SEQ ID NO: 30530 - protein, 59 aa, Homo sapiens
  misc_feature (1)...(59): Xaa = X or * as defined in Table 2
XLVFLLESLTLWQEVEEEQTGFGNQVRTWQCASGDMEMLSSVKTHREARGGCVCVCTWS

SEQ ID NO: 30531 - protein, 115 aa, Homo sapiens
MQTRAEEGQDLHSSFAFYGLTFQGRRCCSYNGHWVMMLAKSEVALDLIKFTLHWERQPLAASDFVTAVAGIAEVHKVTANMESSGLPFVITCFVPSSALDTMAFDKREIILAITI

SEQ ID NO: 30532 - protein, 20 aa, Homo sapiens
  misc_feature (1)...(20): Xaa = X or * as defined in Table 2
XYCRVPTYFHMTPYEGTTST

SEQ ID NO: 30533 - protein, 147 aa, Homo sapiens
MTQGRIFRTQTVIEPKWSWGGMINWNRLFPPLRQRQNVNYQGGRQSEPAAPPLEVSEEQVLLSTFLPRKLSLCNTAQLFPQDFSDSSWQLVALLVAPKLCQFHHCNESVNQMRAKDVTPFYLNPKSIHGIVQPFYLNPKSIRGIVTM

SEQ ID NO: 30534 - protein, 16 aa, Homo sapiens
  misc_feature (1)...(16): Xaa = X or * as defined in Table 2
MELQDRRLTFSQTAQX

SEQ ID NO: 30535 - protein, 94 aa, Homo sapiens
  DOMAIN (10)..(94): Eukaryotic initiation factor 5A hypusine domain identified by PFam, accession name eIF-5a, E-value=2.4e-06, PFam score of 10.7
MADDLDFETRDAGASASFPMQCSALCNTGFVVLKGWPWNDFQLIGIQDGYLSLLQDSREVREDLLRLPEGDLGKEIEQKYDCGEEILIPGAVCQ

SEQ ID NO: 30536 - protein, 172 aa, Homo sapiens
MRRRFLLPVHGPQQRNVCFWGLDGGLLAELETFFRTNRNSRRSGWVFQESACADAWPQTAGQCQQAGPQAQTRPPTPISYKEELYRCLYYYCLRYFPACGVGRSKGLTLSEQALRTKRAVAWRARSGRSSSVATSPLAPATALAAHSRHLSLCRMPKDLFKVFSVTPTVTWF

SEQ ID NO: 30537 - protein, 24 aa, Homo sapiens
  misc_feature (1)...(24): Xaa = X or * as defined in Table 2
MVVKIGFNSEYSKSNKVSIAYEKX

SEQ ID NO: 30538 - protein, 46 aa, Homo sapiens
  misc_feature (1)...(46): Xaa = X or * as defined in Table 2
MQCLIENHWSFPVKLVVSTHAALATVAAFVTPNSXVFXWAPVAGLV

SEQ ID NO: 30539 - protein, 135 aa, Homo sapiens
  DOMAIN (76)..(135): RNA recognition motif. domain identified by PFam, accession name rrm, E-value=0.00056, PFam score of 26.7
MGLKVFVSSTPEKADQVARLLFELESEDEVKLALKKDRETMGHRYVEVFKSNNVEMDWVLKHTGPNSPDTANDGFVRLRGLPFGCSKEEIVQFFSGLEIVPNGITLPVDFQGRSTGEAFVQFASQETPEKALKKL

SEQ ID NO: 30540 - protein, 186 aa, Homo sapiens
  misc_feature (1)...(186): Xaa = X or * as defined in Table 2
XQARRGEAGANPRETQPRERGTTQREDRIRLQTGAPASGHLHREDQKLTDAACTKRGCARCGQWHQPHSGCGLPEASLLWGSSGYGWLGHAEQKDEMVPRLVKLFDFSARGVSQIYAGYTCFFAISEVGGLFFWGSPTPPMNLPCTRKQCRTSVAGEYAAWLVERAASLWPPMRAGIYRVAQKAAS

SEQ ID NO: 30541 - protein, 484 aa, Homo sapiens
MGSLMLALQVKVLLNTLVTGRITLGGGHGRENHLGCSCTLRKALFLRLHQAKSYPLFKVRVKSNFSYEVFTATSPPLRYFLIAMQERTNTQTQSLCMCPERIHPEDKFDSMTLLLEIGKLTVSYCYMIRNVILSYGQGGKNICDGKEKLASTARELSIQNGPPLHDKAQNFQQKFQTHSTLCTPHRQARETMKTHKMISHKNYKSLIGNPHPLKQLLSGRPPVRHLKGSPDAPSGGFAAGYCRKQSLFFKSVAQTISVFGSKEDTGERKLLGRKSNVVLILQLASSPHPLALEPIFLQEGFKANKEGSNGESRQKKLENLSKEGPSSPHKSFADGGSHKAKTVMERARKQHATLFIGSRQDTEGTAKVFKNTKAGSFLYLLKASHSDNKRKMTSFILIENSIFLGHPNLRIWVRGKWALKNPPELQSAGQPCQTSEGCCGVIVGRVGERDQEMTALGNAHLKQKVGKMEKENKEEPEAALKNDG

SEQ ID NO: 30542 - protein, 112 aa, Homo sapiens
MAFQANGCDHLEKTKSRAEARLVVRQKQGQRMQQKRQRERASEGGEKLKEGSVLEGSEEGISEEWPTGRCCEVQHHVKRLTVKSAKIKGNLERMSSDQEWAQKPECRGLRGE

SEQ ID NO: 30543 - protein, 485 aa, Homo sapiens
MESSDFSTGEQRKALEQRNGYNEMQSQLLQDDREQLAYERYACRIFVIGFGVYLNNPGLSPHCRIIDHILKDRFINKSVTESAMNWPSPSKSVLFKVVRTAGGDLKSELGGDLGVVVSTTKLVVRHLSVYKQEKSKSDGLQVKFWEPPDELGGVRQLPIEQFPPKQDFTFSANWDKKLSNRTGLGRGEKEAKSLLSPPHLAPPIQDHSHGSHYETHGKKVLLIQWDWKTADSEMCRETCTGRPAVMEKQLREKMAVWLPLACLLETICLVPMGWSGVDGVEKFPWPSEREPRLFKTRTYKVSPSHQYQKDYQRLWTRNLASHEVAIQGSIMTENEERDLDANRFFTFRINIVMGEVRSRTLGPTNLDLKPSSSWSSCLLKGHAVGVALFGRCALNPLWEGEHADGQVQEPRGALLGSGPTVASRGGCLQLPKPQWMYYSALLALPSTDGLSINQLSALLVSRSLSGIQEELGHTDKLKEGKCGGF

SEQ ID NO: 30544 - protein, 164 aa, Homo sapiens
  misc_feature (1)...(164): Xaa = X or * as defined in Table 2
XFTVRTLLYVQDAYVPHPAGRRGAGYQRRSGGVRASLGSFGYSLSATIQSTLASLLALNFGSDFLTHLSVSAPAGSRDTSPTSAQLFTRPTHFWVTHSNDTVANAIGKFQLRYHRGNFLFRNADTCLLEEESSSPQPQTWYWAAQLETSVMYVFLSEFFLDPFX

SEQ ID NO: 30545 - protein, 69 aa, Homo sapiens
MLASASEDHFIDIAEVETGDKLWEVQCESPTFTVAWHPKRPLLAFACDDKDGKYDQQPGSRNCEAVWAS

SEQ ID NO: 30546 - protein, 129 aa, Homo sapiens
  misc_feature (1)...(129): Xaa = X or * as defined in Table 2
TIAVGNKDDVVTFIDAKTHRSKAEEQFKFEVNEISWNNDNNMFFLTNGNGCINILSYPELKPVQSINAHPSNCICIKFDPMGKYFATGKLDWPVRTLSFSHDGKMLASASEDHFIDIAEVETGDKLWGX

SEQ ID NO: 30547 - protein, 173 aa, Homo sapiens
  DOMAIN (65)..(75): Single-strand binding protein family proteins domain identified by eMATRIX, accession number BL00735C, p-value=4.176e- 09, raw score of 11.19
MTYIRWASAALVRPYCLLAVVKTSPSEDRQEEHVNENEVSDGAAEWCCEEVKKECRGNNREVFCEGKQRYALEVGGDALHPAIEYWVPREILLPPADIIKFQLNFRFLILVDQQVTACSLKSISAATISKNRPATAQQGPRKVQMMWTGYVATISPAKSSWRKALSPTQPDVT

SEQ ID NO: 30548 - protein, 60 aa, Homo sapiens
  DOMAIN (1)..(41): Ribosomal protein S21e proteins domain identified by eMATRIX, accession number BL00996A, p-value=1.000e-40, raw score of 15.12
  DOMAIN (1)..(59): Ribosomal protein S21e domain identified by PFam, accession name Ribosomal_S21e, E-value=8.1e-35, PFam score of 129.1
MQNDAGEFVDLYVPRKCSASNRIIGAKDHASIQMNVAEVDKVTGRFNGQFKTYAICGAIP

SEQ ID NO: 30549 - protein, 51 aa, Homo sapiens
QAQPTPSEIAERRPAQFVGPVTCPRKNAPLANRIYRWPRTTASIQMNVRRG

SEQ ID NO: 30550 - protein, 60 aa, Homo sapiens
  DOMAIN (6)..(45): PROTEIN ZINC FINGER ZINC-FINGER METAL-BINDING NU domain identified by eMATRIX, accession number PD01066, p-value=6.333e-39, raw score of 19.43
  DOMAIN (4)..(60): KRAB box domain identified by PFam, accession name KRAB, E- value=6e-33, PFam score of 122.9
MGPLQFRDVAIEFSLEEWHCLDTAQRNLYRNVMLENYSNLVFLGIVVSKPDLIAHLEQGK

SEQ ID NO: 30551 - protein, 137 aa, Homo sapiens
MSMFLAREGYFVKHPAEARPYLQIPGRIHLALHPLVLQQVEYNQRRDPLIETTLAHSKWSQGHRGWACRSTGHRVVKRRPGAPAAPRDKGPAKPEAALFGPAACLIGRFQPSVPDWIILKVPPPQDLSDRRCDHMLG

SEQ ID NO: 30552 - protein, 125 aa, Homo sapiens
MPENKLELMETNWNPSLFSILSKPDAVDDLQKNLFPFPMELYIHLAHDSQKLTEQRQVNRFKQYLGSKTDSTSLDRQRHWVGVSMTELVLAETCKGAKRQLEGEKNCTPRILYPGTLEVKHNQEC

SEQ ID NO: 30553 - protein, 18 aa, Homo sapiens
MYCSEVGFLLRGRPNRNF

SEQ ID NO: 30554 - protein, 191 aa, Homo sapiens
MTAQSYSRVQIDNRVYDLDVGSGHPNGVTAIKGSFVRQLKSYMIGQSACPLEEKGPGFFISPSLDLSAHMHLREHCSNCKRFCFDCGNWNNQGTNCKVTGKGSSRHDSSLSNFKAADFKRENQADESEQICSSAHNSATIMPLFFMWFLIHHQSKPASSRPYIHDQLRKNIQLSSVQTASLQICRLKEELL

SEQ ID NO: 30555 - protein, 72 aa, Homo sapiens
MLSLGRGGPLILVMLEVMFFGKQGGVRFAEFLLLFLTFPYEHACVGLTCEGNNDLLVDCRYWAVNCQFSVLI

SEQ ID NO: 30556 - protein, 94 aa, Homo sapiens
  misc_feature (1)...(94): Xaa = X or * as defined in Table 2
MNRPAPVEISYENMRFLITHNPTNATLNKFTEELKKYGAATLVRVCDATYDKAPVEKEGIHVLDWPFDDGAPPPNQIVDDWLNLLKTKFREEPX

SEQ ID NO: 30557 - protein, 82 aa, Homo sapiens
MNRPAPVEISYENMRFLITHNPTNATLNKFTEELKKYGVTTLVRVCDATYDKAPVEKEGIHVLKKKGSVQFQTAALFGEIPT

SEQ ID NO: 30558 - protein, 44 aa, Homo sapiens
MAATPHRVFVFVTLSTNTARCIMCNIGCYNAKRISRSINVNYHY

SEQ ID NO: 30559 - protein, 83 aa, Homo sapiens
MPIGISEAYRNLRSVFLQIKQLFGIERSPSFLSYKLKLHLRYFIPTFQSKASANPAPVPLPQPCQHNALPTQQPWLLHENLVF

SEQ ID NO: 30560 - protein, 137 aa, Homo sapiens
  misc_feature (1)...(137): Xaa = X or * as defined in Table 2
XAPVSQLPEEQSGIDVLLTVPKRKGRGSPALSAALYRNRGSQTAAILGRPPEPRRAHARARARVLLAGLVFGACALSACRSADRRGWRKQEDDRDGLLAEREQEEAIAQFPYVEFTGRDSITCLTFQGTAYNPNKSK

SEQ ID NO: 30561 - protein, 96 aa, Homo sapiens
  DOMAIN (4)..(95): Eukaryotic protein kinase domain identified by PFam, accession name pkinase, E-value=1.7e-27, PFam score of 103.1
  misc_feature (1)...(96): Xaa = X or * as defined in Table 2
MQKYEKLEKIGEGTYGTVFKAKNRETHEIVALKRVRLDDDDEGVPSSALREICLLKELKHKNIVRLHDVLHSDKKLTLVFEFCDQDLKKYFDSCNX

SEQ ID NO: 30562 - protein, 191 aa, Homo sapiens
  misc_feature (1)...(191): Xaa = X or * as defined in Table 2
XQILFRGPFSLFRGGWELPHAYKRSDQRGALAARWGRTVLLLAALNLALSPLVLAWQVLHVFYSHVELLRREPGALGARGWSRLARLQLRHFNELPHELRARLARAYRPAAAFLRTAAPPAPLRTLLARQLVFFAGALFAALLVLTVYDEDVLAVEHVLTAMTALGVTATVASFSYFCIAAAAGTPAGPRF

SEQ ID NO: 30563 - protein, 47 aa, Homo sapiens
MAASSKTLWWNNKPGSVNHNLSTRCQRCTGIDDYFLLNTRFTELTPD

SEQ ID NO: 30564 - protein, 118 aa, Homo sapiens
MAASSKTLWGNNKPASVNHNLSTKRQMCTGIDDYFSSQVLGLQVSNVPSISRLPTPSPCHTPASVMLVLSYPSQITVAECSCSLVVSNPYGVIKPPVFGSWAILWKGSWQSAAAVDIG

SEQ ID NO: 30565 - protein, 230 aa, Homo sapiens
MDEVNRKRYGKRFIKQPAFDSKDPLPGASGCPPEDPCEDRQKWFVREPSELTGLSLLLPLPLCFAQLSQVTQFQEKYIQLVRQRALEGALGNTIIYKSQTAKGTPQETEGTSSGSKSNVRSGKRVPSGRMVNIRIFQQKSRKNRQESIGFGNPDVRVNLGSNQYLFSVIVDPKEMPCFCLRHDVDALLWQPHSSKQDDMWEHIATFNALGHQTPVIQPEPGTMVPSAGNT

SEQ ID NO: 30566 - protein, 56 aa, Homo sapiens
MVVSKMNKDAQMRAAINQKLIETGERERLKELLRAKLIECGWKDQLKAHCKDNDFK

SEQ ID NO: 30567 - protein, 74 aa, Homo sapiens
MPVVLRAGTRAQPRLLSMYCLSLASPTRARGPVGLSDRACYRSWPETRPRFVFWLLLSRLSRCFPPCSIFPKNV

SEQ ID NO: 30568 - protein, 81 aa, Homo sapiens
MENANVDHPATWNSLPTPHIAFATTGSSFCFLWSTFCCLGLVDNGVSLGLPPRALCLTNWIYFSLSKSQGNLRQTVTSNTG

SEQ ID NO: 30569 - protein, 90 aa, Homo sapiens
  misc_feature (1)...(90): Xaa = X or * as defined in Table 2
XRTQAEEMSTIGSFEGFQAVSLKQEGDDQPSETDHLSMEEEDPMPRQISRQSSVTESTLYPNPYHQPYISRKYFATRPGAIETAMEDLKX

SEQ ID NO: 30570 - protein, 24 aa, Homo sapiens
MIQIFAWCGGKIAPWYSVIYTYCF

SEQ ID NO: 30571 - protein, 135 aa, Homo sapiens
MTKGTHMEERQFITLGINKWNSGNQAMPLSNGQMGQPLRPQANYSQIHHPPQASVARHPSREQLIDYLMLKVAHQPPYTQPHCSPRQGHELAKQEIRVRVEKDPELGFSISGGVGGRGNPFRPDDDGYICNKGTT

SEQ ID NO: 30572 - protein, 250 aa, Homo sapiens
MTTGPRSSSRPTRHHNNNATITFTFHNTNEVDKDRLMRKEREVLMAHNLTPGQLQLFHSLMLAPRSLAMLESESLEGSHSRQKKTFFLGDGQKLKDWHDKEAIRRDAQRVAGAEVYVCLLFLQTEFWQQHVKNKIEGLFVCASCLCFHQKLHWGLRSQRTEARQFGPDSLDLQMGVSQLALSGPALCTSCQVSVNSGWLVGWPTFPTPWEPCWAAWQLSVEAPPEHRADGTTETQLLKCLGSAVSGANPS

SEQ ID NO: 30573 - protein, 64 aa, Homo sapiens
  misc_feature (1)...(64): Xaa = X or * as defined in Table 2
MQKEDEEPTQASDKQQPKLPSRKYVFIATQNKPRQSNPFGGGSGPSGTAAEGTPVAVEEAKPGX

SEQ ID NO: 30574 - protein, 82 aa, Homo sapiens
MCRSRGFPGLSCLLGKPSLSGSLEDPTQLQPQGSGAPGVGRGEDSVLQDPAQRGRGLAVSSTEEPQELAFLNFQIYDVSLSC

SEQ ID NO: 30575 - protein, 113 aa, Homo sapiens
  misc_feature (1)...(113): Xaa = X or * as defined in Table 2
XSTPSYGYWFKAVTETTKGAPVATNHQSREVEMSTRGRFQLTGDPAKGNCSLVIRDAQMQDESQYFFRVERGSYVRYNFMNDGFFLKVTALTQKPDVYIPETLEPGQPVTGIX

SEQ ID NO: 30576 - protein, 876 aa, Homo sapiens
  DOMAIN (741)..(758): Electron transfer flavoprotein beta-subunit proteins domain identified by eMATRIX, accession number BL01065B, p-value=8.200e- 16, raw score of 11.95
MDTPQALPLFLLLASLVGILTLRASSGLQQTNFSSAFSSDSKSSSQGLGVEVPSIKPPSWKVPDQFLDSKASAGISDSSWFPEALSSNMSGSFWSNVSAEGQDLSPVSPFSETPGSEDHGQRGLWGPRLRGAACSEGGAPPGGGVLNCSTARGGRNPGPGPELKGHKDAALTQKPDVYIPETLEPGQPVTVICVFNWAFEECPPPSFSWTGAALSSQGTKPTTSHFSVLSFTPRPQDHNTDLTCHVDFSRKGVSVQRTVRLRVACECGLGGWGVQTAPAIRDAEKAGRLPHPDMEIRGRVEQRVGYTIEQINHMRDVFGTRLRRAEDVFPPVIGVAAHKGGVYKTSVSVHLAQDLALKGLRVLLVEEAPREVLLHPLVAETRLGEAEVALEASGCPPPSRASWAREGRPLAPGGGSRLRLSQDGRKLHIGNFSLDWDLGNYSVLCSGALGAGGDQITLIERSNLGVRLYACCGLLLCPAYPQHFAHGYVDKIPGYPGRAGTLTGLHPMQVCRCRRQAPCMKSNNALIVILGTVTLDAVGIGLVMPVLPGLLRDIVHSDSIASHYGVLLALYALMQFLCAPVLGALSDRFGRRPVLLASLLGATIDYAIMATTPLQPQGSRAPGMGRGEDSVLQDPAQCGRGLAVSSTEEPQELAFLGFQPRPRPRPPSRPRPARRRTQEPHGGAGRSQSVGGATRIVAVMPGAHVGKEKHRAAPRCDSKRPPIRVKPDRTGVVTDGVKHSMNPFCEIAVEEAVRLKEKKLVKEVIAVSCGPAQCQGTPPTITWMGASVSSLDPTITRSSMLSLIPQPQDHGTSLTCQVTLPGAGVTMTRAVRLNISYPPKKLTMNWLPGDGPRKNGVLSLGAGEAEPSLKGKARTG

SEQ ID NO: 30577 - protein, 119 aa, Homo sapiens
  DOMAIN (57)..(67): w KINASE ALPHA ADHESION T-CELL domain identified by eMATRIX, accession number DM00179, p-value=1.947e-10, raw score of 13.97
MSHTWQAQKGQFLRLLCAADSQPPATLSWVLQNRVLSSSHPWGPRPLGLELPGVKAGDSGRYTCRAENRLGSQQRALDLSVQNPPENLRVMVSQANRTVLENLGNGTSLPVLEGQSLCL

SEQ ID NO: 30578 - protein, 81 aa, Homo sapiens
  misc_feature (1)...(81): Xaa = X or * as defined in Table 2
MSTRGRFQLTGDPAKGNCSLVIRDAQMQDESQYFFRVERGSYVRYNFMNDGFFLKVTALTQKPDVYIPETLEPGQPVTVIX

SEQ ID NO: 30579 - protein, 272 aa, Homo sapiens
  DOMAIN (217)..(227): w KINASE ALPHA ADHESION T-CELL domain identified by eMATRIX, accession number DM00179, p-value=1.947e-10, raw score of 13.97
  DOMAIN (74)..(226): Immunoglobulin domain identified by PFam, accession name ig, E-value=3e-11, PFam score of 41.3
MSTRGRFQLTGDPAKGNCSLVIRDVQMQDESQYFFRVERGSYVRYNFMNDRVLSKITALTQKPDVYIPETLEPGQPVTVICVFNWAFEECPPPSFSWTGAALSSQGTKPTTSHFSVLSFTPRPQDHNTDLTCHVDFSRKGVSAQRTVRLRVASLEPQPQGNVPYLEAQKGQFLRLLCAADSQPPATLSWVLQNRVLSSSHPWGPRPLGLELPGVKAGDSGRYTCRAENRLGSQQRALDLSVQLSRMVPFTQREAPGPSRAGPLSPFQILQRT

SEQ ID NO: 30580 - protein, 41 aa, Homo sapiens
MCQVRNLLNFILFGLLPSFGIEPEYFRIHISELLLYHFGSI

SEQ ID NO: 30581 - protein, 283 aa, Homo sapiens
  DOMAIN (48)..(88): Cyclophilin-type peptidyl-prolyl cis-trans isomerase signatur domain identified by eMATRIX, accession number BL00170B, p-value= 1.409e-35, raw score of 20.97
  DOMAIN (5)..(99): Cyclophilin type peptidyl-prolyl cis-tr domain identified by PFam, accession name pro_isomerase, E-value=6.7e-51, PFam score of 178.3
  misc_feature (1)...(283): Xaa = X or * as defined in Table 2
MVNPTRFLDIIVDGELLGRVSFELFADKIPKTAENFCALIIGEKGFGYKGSYFHRIVPGFMCQGGDFTQHNGTGGKSIYGKKFDDENFVLNYTGPGILSVENVLDPTQMVPSFSSALPCLSGWMACRWSLAREGRPTPSAGLTDDLPHDETETIIPEGVTSCSSQLLWPDCRICLFAIVTIGAPTSRQELKEEHGVLKATDFWHNMKNNSMICRKEEKYIIPSVPKLTCFLIFKNENAHVQGWYSSRCTGMAAKVSTALTSHLKLLSHPLSTFRLDWQFSSSX

SEQ ID NO: 30582 - protein, 91 aa, Homo sapiens
MSGSQNNDKRQFLLERLLDAVKQCQIRFGGRKEIASDSDSRVTCLCAQFEAVLQHGLKRSRGLALTAAAIKQAAGFASKTETALFMKTGLL

SEQ ID NO: 30583 - protein, 257 aa, Homo sapiens
MLQDGFKLGTQTAPCLVATENVTDMVSPVRELKIMNLMYILVGDASQEISYKRSFESSTRLKKVRTPALKLPLKGNPYLPLVQKQALWENIANRKTKAHSHLCIIQEAAPACRQLTVYHTQLFTGDNYNFYKPVLNGSLWTSPRVVMTGYDVTTAQIKPHMSHLVVRNDNLLRASVPSTHHTVILVGTRASSLNNWEPEPCLQNWEGQNRPHIQSLAGNKDIINLLSLQNSFSVTLAGIWDARRYQPNDDFSVAAIV

SEQ ID NO: 30584 - protein, 98 aa, Homo sapiens
  DOMAIN (49)..(88): WD domain, G-beta repeat domain identified by PFam, accession name WD40, E-value=2.2e-05, PFam score of 31.3
  misc_feature (1)...(98): Xaa = X or * as defined in Table 2
XFQVFGVWPEGSDGTDINALVRSHNRKVIAVADDFCKVHLFQYPCSKAKAPSHKYSAHSSHVTNVSFTHNDSHLISTGGKDMSIIQWKLVEKVIFASE

SEQ ID NO: 30585 - protein, 72 aa, Homo sapiens
MKNLASASVLEQWRSKTKALADSMSGEVLLPHTRCLLAMYHKFLQVKWQMYESLHKMGTGRHPVDAKPFSVQ

SEQ ID NO: 30586 - protein, 75 aa, Homo sapiens
  misc_feature (1)...(75): Xaa = X or * as defined in Table 2
XLEGALVRRQAKEPCVESLVSQYFQTVTDYGKDLMEKVKSPELQAEAKSYFEKSKEQLTPLDPRKAGNGNWFNFL

SEQ ID NO: 30587 - protein, 99 aa, Homo sapiens
MMFHAAIYCSKEVGKGTGNLLGTGPMGCSLKGPAWGLERPNGPGNNFNWVGQACCSQKFPRKNSSKKVKPSSRSQAFLESRGVKLLPLNFSKVKTLPQA

SEQ ID NO: 30588 - protein, 81 aa, Homo sapiens [sequence omitted]

SEQ ID NO: 30589 - protein, 75 aa, Homo sapiens
MPLDWDRLSTWPPPILLSLASGTGLVVLETGLPLVSFGSQPRSAISISSTIWRETSGGAFQGIPDTSFVIFCEIY

SEQ ID NO: 30590 - protein, 239 aa, Homo sapiens
MLSPLGIFTAQLGCSARLLLDVEGLRKAQTSLSPFSSYPPNQLNVLIPFILCGRENIPEKASECTQDNRQLFLEAANSNRSLAFNFRAINSNLLTNLKCNKLYSSGRDQVTASWTCPKRTHTEMQTHTVATRGALRRPAASDLAERKRRDKDKNEAQGVEMRIMMYGHQLCKTLRVTLSKGQTAGLPGFCSASPPSLHGSDATNTSQACSKSHSVGLAFTFQDEVPLYNPLQCGTFSKE

SEQ ID NO: 30591 - protein, 143 aa, Homo sapiens
MARSFPGAAITNYYKLSGLKQQKLILSQLWTLEVGNQGEGKATLPLKMLGMSPSWPLPASGVPWVAAASLQLLLPCSNSFLHGSPSSLLIGLSVIAFRAYLILTELHLQRLHFQIRSHSQEVNDECERVHTGFQTGLSWLQDP

SEQ ID NO: 30592 - protein, 79 aa, Homo sapiens
MLGMSPSWPLPAYGVPWVAAASLQLLLPCSNSFLHGSPSSLLIGLSVIAFRAYLILTELHLQRLHFQIRSHSQVGGVRT

SEQ ID NO: 30593 - protein, 135 aa, Homo sapiens
  misc_feature (1)...(135): Xaa = X or * as defined in Table 2
XDPLRPTHLHQETSVIDVDEAQPALPDPLIFVLPSVLRFAYTENAISTGTQHPAPSTEHAAPSTDHRAEHPARRTHREPDAVSAAGIALGPGAFTTKGRWRAGPKKCPVKGPGRKPPETARSSALGSGTALADPX

SEQ ID NO: 30594 - protein, 135 aa, Homo sapiens; identical to SEQ ID NO: 30593
  misc_feature (1)...(135): Xaa = X or * as defined in Table 2

SEQ ID NO: 30595 - protein, 72 aa, Homo sapiens
  misc_feature (1)...(72): Xaa = X or * as defined in Table 2
MRVLEVEYIYTYKIGWEPRVPVCVDLGLIQSALXXXXXXXXXXXXXXXXXXXXXXXXXXXXXXXXXXXXXXX

SEQ ID NO: 30596 - protein, 100 aa, Homo sapiens
  misc_feature (1)...(100): Xaa = X or * as defined in Table 2
XSTMLTSYILPVSSDTSASKGPALFVSDRGKMAVNALYLLVHRLEQPAGTEWILEEGVTTGPPRKPRADIYNLRSPDEVSDFRGLQETAAREFGIAYCPS

SEQ ID NO: 30597 - protein, 79 aa, Homo sapiens
MYIYIYSTSNTRIHPGSIKSLVLANNITRQEIRKVVDVCTWLPWEVQWVTSPLPKIPFCSPLAALTTHKTGTYGQDNSV

SEQ ID NO: 30598 - protein, 51 aa, Homo sapiens
  misc_feature (1)...(51): Xaa = X or * as defined in Table 2
XQPSGVQKWILEEGVTHWTSKEAHVQTSYNLRISLTSLLLAQNPGFDSNQG

SEQ ID NO: 30599 - protein, 217 aa, Homo sapiens
MLNKDILGFENTDLETKDLGSEDSIPEEDDFGDVLWDIHDEQEQMETFQQASNSAHELGFEKYYQRLNDLVAAPAPIPPLLVSGGPGSGKSLLLSKWIQLQQKNSPNTLILSHFVGRPMSTSSESSLIIKRLTLKYSTQNADFQSSLLLEDCEEAFLKNPEGKPRLIFHRLEDGKVSSDSVQQLIDQVSNLNKTSKAKVRDAGDSKQGGGRGNDEKW

SEQ ID NO: 30600 - protein, 217 aa, Homo sapiens
MGVSELYYKGKCNEITTRYHFISTRVVKIKKAIASDSKDMEKLEPLLVGLQNVVATSENSLAVPRKKNQNNKQIITPQIDHLRENTEIQQESDRKPLNKEGEMLLPDSSFGLLDPRLVTPVVMRKICNVPSQTGKEPRDKKNDLRKTDEVAKYPWKSNPTRKSNPSPSFQDLTGVEITGLSHCDWPRDQIYPTAVNGKRSLITALPEHSDSVKTRGY

SEQ ID NO: 30601 - protein, 38 aa, Homo sapiens
MEEPTPEPVYVDVDKGLTLACFVFLCLFLVEMIIRCAK

SEQ ID NO: 30602 - protein, 236 aa, Homo sapiens
MEEYDSVFYFANSLDSLNASPTKQQCGAYRLWICTLTTKSYSPKNVTDTDISPDLRAYFPNSEYPNFSIFCNPDMQRIVEEPADDCTWSWWAPDQELALTFWHLLSMFGFFIVSYGFLTAFGRTLFHLDLLQPNLTPSRFDKYTGLFIYEIEGDGGWKMVPVKPEAEEEQPAVAAARWRISTPEPVYVDVDKGLTLACFVFLCLFLVVMIIRCAKVIMDPYSAIPTSTWEEQHLDD

SEQ ID NO: 30603 - protein, 59 aa, Homo sapiens
MIVGAGTRDPTEHKASPQDSGAPHRFPVFPVFGWGRARHSRQFPFHPPWAILDRSFWKQ

SEQ ID NO: 30604 - protein, 95 aa, Homo sapiens
MPQDLPQEELVSATNQEPPAVIGLINAPCNRWHDQPDSADEEKRQGEAAQPLASARFTQVFVWLETPFVHGFHRSWVRPIQGACYVSKLAPSDLP

SEQ ID NO: 30605 - protein, 53 aa, Homo sapiens
MICASQDRKMAKGFGSEQDCMGSNSVSCVCWRLSELVSHCMKSQLPYRATRDR

SEQ ID NO: 30606 - protein, 192 aa, Homo sapiens
  misc_feature (1)...(192): Xaa = X or * as defined in Table 2
MAKGFGSEADCMGSNPVSCVCWRLSELKANDFKTPKSNNRYHLLSGMHIPEEVLGIKEICESEKDVETEIGPQILTGSGLDVSKDPVQGCMQNGRKAGFPHQSPPGEDAPSKVHATDSRQSMPASITLVWLPGYLAVKPKYQVSSPGSLTSQPWVSGSKRLSNNLISKQSELSANTENSKSVTLAAFTEKSX

SEQ ID NO: 30607 - protein, 418 aa, Homo sapiens
MAKGFGSEADCMGSNPVSCVCWRLSELKANDFKTPKSNNRYHLLSGMHIPEEVLGIKEICESEKDVGYAQRSLQQSKIDSSSSLLCFSTSLEGWAGARKELQCEGRCDVYGATTILQPEGKRLKFPGAMRNIRIEPTERAYEHKVHATDSRQSMPASITLVWLPGYLAVKPKYQVSSPGSLTSQPWVSGSKRLSNNLISKQSELSANTENSKSVTLAAFTEKSSLAILGPHLCKGLPSTIRNKTSWQLQRYHCTSATHGRHFLSVHLHHISHLSPSTSREITLPPLFDKKPWSHSSLPATAETLGDSHVGDRWNVQAAVGKDGLPHTFKLGCWGNVRKLDLRAPVGNAGVSDDGEKQPHVLVKERKKKIERKKKWGRKTRVHRQSPLVEEVVTGLLVTETPIRDSPRLQSHLDTQTDT

SEQ ID NO: 30608 - protein, 35 aa, Homo sapiens
  misc_feature (1)...(35): Xaa = X or * as defined in Table 2
XDRQCQSSSAKPRRSGKESDGLGPEFQGLWKWLPX

SEQ ID NO: 30609 - protein, 42 aa, Homo sapiens
MGKLPPSIPPSSPLACILKNLKPLQFSPDLKSKRLIFFCNTA

SEQ ID NO: 30610 - protein, 28 aa, Homo sapiens
IFSAYRLKTDTARSPRKPRRPSRTPSFS

SEQ ID NO: 30611 - protein, 556 aa, Homo sapiens
  DOMAIN (421)..(466): kw TRANSCRIPTASE REVERSE II ORF2 domain identified by eMATRIX, accession number DM01354N, p-value=1.000e-40, raw score of 13.17
MESEEKQGRVTAYPEATQDHSRQHQVGVPLGQSFQKKEQAAIFDILLPPLVTSSARLHPGEINSHVAHTKPVWWSLHTDTHEIWCCDSDRGTSFGRSIPCPPVLCSMRKIHLRPQVLRPTSPRNISPISNPAAPRQAELGPNSSSASAPPPYNPFITSPPHTWSGLQFHSVTSPPPPAQQFTLKRVAEAKGIVKTVTDAELRVTLTVEARFKKIKACYHLPATAWLFKAYKLSLQFPHFTCPKTRQALQVSSGSAPYQPNCFAYPPHGEPGVKQQRVCEQVDVGTSHSTQPGAPAQARAMWEAVAGPGVPQVASALGASIWMRGRLTPHTARYSSETKLPEERSGSNIGCSAILAVLQPLQLIPRQTGSGVDLRQTPTNLQLRVMTVRRKTNKQKGHPHQNPICTSPSSKTKEIQTTIREYYKHLYANKLENLGEMDKFLDTYTLPRLNQEEVESLNRPITGSEIEAIINSLPTKKSPGPDRFTAEFYQRYKEELVPFLLKLFQSIQKEGILSNSFYEASINLIPKPGRDTAKKENCRPISPMNINAKILNKILAN

SEQ ID NO: 30612 - protein, 64 aa, Homo sapiens
MTSPPPPAQQFTLKKVAGAKGIVKHALKGLKPVITRLLQHGLLKPTNSPYNSPILPVLKPDKPY

SEQ ID NO: 30613 - protein, 465 aa, Homo sapiens
  DOMAIN (395)..(412): Zinc finger, CCHC class domain identified by PFam, accession name zf-CCHC, E-value=0.00025, PFam score of 27.8
DTGTSQQLHPLDPWHELLRAQELQGATNHKGYSHAEHEHAGLGVQGGNGALAFSNSGHRHAVPTISSGTGRRRTPSSSAFGLLNLHQWFVSGFQAFSDRLKAALSASLLLRFGDSDWLPSSSACKCLMLGLHFVIVGNICATLKEKYSSMLHLDVTMKKNGEKRTRLQKRKKGMPPHPAYEDLNIAAITLPANVVLHQPSGFRTSGQLDPVWWSLDTDAHEIWCQDPGLGSGDFPWEITPLSSYSLLHEKDPPTTSGPQTDQPKKHLTNFKSKTKETGFIHGPKTPAPVTDWEGSLPLVFNHCRDTSLIIHPCFKGVRPRRDACLGPSPLAASPAFLEKGQDLINLAFKVYNNRKKLQFLASTVRQTAATSPAHKNFQMPEPQRPGVPPEPPPTGACYMCRKSGHWAKECPQPGIPPKPRPICVGPHRKSDCSTYLAATPRAPGNLAQGSLTDSFPDLLGLAAED

SEQ ID NO: 30614 - protein, 35 aa, Homo sapiens
FHSVTSPPPPAQQFTLKRVAEAKGIVKTVTDAELR

SEQ ID NO: 30615 - protein, 167 aa, Homo sapiens
  misc_feature (1)...(167): Xaa = X or * as defined in Table 2
QFTLKKVAGAKDIVKTITDTELRVTLTVEADNTLALGAASRITGPTWRKSKIKALADSVSGAQQSKASGHKEYGSNVIGVMKTLLLDLALWSLLFQPGWLSFSSQVSQNCHNGSYEISVLMMGNSAFAEPLKNLEDAVNEGLEIVRGRLQNAGLNVTVNATFMYSDX

SEQ ID NO: 30616 - protein, 326 aa, Homo sapiens
MPFSPKAATCSLERLHSILQVVLREKVTQELISIRHFSRHSHSGYLGLSPESTKTQAQNKTEGCRTGTLTVSRLPGGPGVLAVDLPIPAEYFWRHEQDSKTKLCHFLATRTGLETRGNPKSRDGNSPISLSIPTGLNEGDECRNEDKDKRFVLKEGRQRRHVLSMDPTPAPVMDWEGSLPLVFNHCRDTSLIIHSRFKGVRPHRDTCLGPSPLAASPDFLRKGQRGMCQGHKTIVGRGSADKHVNKGLCIIDKELATRAGNLATGPSECPLPRIPPKLRPICVGPHLKIRTCSTHLGQATPRAPGTPAQGSLTDSFPDLLGLAAED

SEQ ID NO: 30617 - protein, 893 aa, Homo sapiens
  DOMAIN (584)..(629): kw TRANSCRIPTASE REVERSE II ORF2 domain identified by eMATRIX, accession number DM01354N, p-value=1.000e-40, raw score of 13.17
  DOMAIN (715)..(775): Immunoglobulin domain identified by PFam, accession name ig, E-value=6.6e-12, PFam score of 43.4
MHFIRGPKTPVPVTDWEGSLLLVFNHCRDTSLIIHPHFKGVRPRRDTCLGPSPLAASPAFLRKGQAAPRQAELGPNSSSASAPPPYNLFITSPPHTWSGLQFRSVTSPPPPAQQFTLKKVAGAKGIVKRLKTDTARSPWKTPRPSRTPSFRKAERTKGLLKIHLTKLSHQLKKDWTILLPLSLLRIQACPRNATRLATGQLGYPFISQSYVLVNGFQTVEDLCEAADLRVSVADLRVSVTALKVARLELFVPPGGLVVSLASAVKLQTFAVLQLIKAKRWDWGTLEQGAALIGEARDAQEPTEGVGGSGMAGCRSRDLPRGKAAKARREIERSAGLTIKKERCIRNGYSKEKMKLIVVSHGLHVNDLQHKLTLFTKETYTYLARDSEKQKQGYLAGLEGAHANRVNQQISDNLVVKTGALPPPYRTKGEKLYFYMSRQNCLFSVSGQLLQGFFPNGGQAAPNPYALLSQIPEEAEWFTVLDLKDDFFCIPYILTLNSSLPLKILRTQRLNSPGLFYPKVSGHLFGQALAQDLSQFSYLDTLVLCGVLKSPIIIVWELNQIDTIKNDKGDITTDPTEIQTTIREYYKHLYTNKLENLEEMDKFLNTYTLPRLNQEEVESLNRPITGAEIEAIINSLPTKKSPGPDGFTAEFYQRVADVKLREEKDENMLLVPLSDLLYQVHAPIPQLPEVLAANSPTCHLDPPTITESKSNEATTGRQASLKCEASAVPAPDFEWYRDDTRINSANGLEIKSTEGQSSLTVTNVTEEHYGNYTCVAANKLGVTNASLVLFTGCSADQANPEKNRQLVSLCQPAAAAGRDPEPEPLKSWRLFIFIDKTKEKVLIVLTFTSKHWLLAMQAPPSPYPTYLEKALTSEEARYKLSLVNNFPYTVIAAS

SEQ ID NO: 30618 - protein, 382 aa, Homo sapiens
  DOMAIN (234)..(282): Cadherins extracellular repeat proteins domain proteins domain identified by eMATRIX, accession number BL00232B, p-value= 2.269e-13, raw score of 32.79
  DOMAIN (142)..(242): Cadherin domain identified by PFam, accession name cadherin, E-value=0.0094, PFam score of 22.3
MQKRLWNWVTGRDWNSLQGSVEDRKMRESLELSRDLPNGFDQNADNDINDENQAEVVSDRDEELVGNWSKGTPEDYPRFFHMHPRTAELSLLEPVNRDFHQKFDLVIKAEQDNGHPLPAFAGLHIEILDENNQSPYFTMPSYQGYILESAPVGATISDSLNLTSPLRIVALDKDIEDTKDPELHLFLNDYTSVFTVTQTGITRYLTLLQPVDREEQQTYTFSITAFDGVQESEPVIVNIQVMDANDNTPTFPEISYDVYVYTDMRPGDSVIQLLMATKDTGDYYGGREGEETIEKLTIVYYTQYLGDRINHTPNLNIMQYTQGASEADQAVSVFSLLSPKILGRSQVKRALGQRFHGALGVAAQVKLNSQIFSGVPHRWDVA

SEQ ID NO: 30619 - protein, 88 aa, Homo sapiens
MIKVLFNIIEHLKINNMIAFLLCNFEKCFQAHIKATSFTPNKYAMQASPLTCWGQHCSQQTAWGREVGCCYGRKACFYPNWLSFSRPK

SEQ ID NO: 30620 - protein, 61 aa, Homo sapiens
  misc_feature (1)...(61): Xaa = X or * as defined in Table 2
XKKKVIAYRKFDTYPPIYGGLQADREADGTEGVDEDIIVTQSQTNFTCPITKEEMKEASEK

SEQ ID NO: 30621 - protein, 106 aa, Homo sapiens
MADLKKMAEMEQIQGTFAPEAPTGGGLQASHQIVFTKMDYNDSFIWLPSNKTVHSLRQPGRLQGSCCQSQPSALKTALRLDFLQPWPVRHLSGGTQDCSSTNEVPG

SEQ ID NO: 30622 - protein, 46 aa, Homo sapiens
MRAGDALGRLQAGARPCTRRASAASTADRGRRVPATADADEKAFGG

SEQ ID NO: 30623 - protein, 62 aa, Homo sapiens
KLADQSGLDVIRIRKPFHTDNPSIQGQWHPFTNKPTTFRGLRPREVQDPAPAQCLLLGAVTL

SEQ ID NO: 30624 - protein, 90 aa, Homo sapiens
  misc_feature (1)...(90): Xaa = X or * as defined in Table 2
XVLHNGLGRYVQQLQRSELQRQPRRRLVSRRQGVRGAGGDRLPPTESREVVAEYLNGAVREEEHPLAKSVRGDFRRLVQKAGPTKSGFGR

SEQ ID NO: 30625 - protein, 103 aa, Homo sapiens
MLSLLLLCTLHPSLSLPSLRLTLTPIRLNKLPGLHCHKASQTAPITFSEAQISSSSVSHTPVHRSQLLIHALAPSLHWPGLHWFLQGHHSWISPGCYPQTGHF

SEQ ID NO: 30626 - protein, 86 aa, Homo sapiens
  misc_feature (1)...(86): Xaa = X or * as defined in Table 2
EAVQTSQIQEPCPFLIHVTAQGANCLAEFCAKSAKGDRNGGCGMPPQRGRQSCQILTKDSAGPVFSSPPTPTLDQYQGVLGHTEGX

SEQ ID NO: 30627 - protein, 78 aa, Homo sapiens
MAKSTGQFSVLYSVRSDIFCMFDHSFIFKIVFLLPSSETCSWVFLLSHLLFWSYFWFAVLPLTFLQILVYFFFFSRLH

SEQ ID NO: 30628 - protein, 75 aa, Homo sapiens
  misc_feature (1)...(75): Xaa = X or * as defined in Table 2
XLLTASLGPQARREASSSSPEAGEGQIRLTDSCVQRLLEITEGVRIPQAAKWREVDASGFQYNFSLDTVINPDDR

SEQ ID NO: 30629 - protein, 360 aa, Homo sapiens
  misc_feature (1)...(360): Xaa = X or * as defined in Table 2
MRRRGKLVNSVNSGVSNPRVMDPYPECLLTVGKQGAQQELTRYEEMLKHNSEKRGNKNHNEILLRPANIQFIIPGHVHPRGHLQKFPIHAEVSLSLSTTRCPLAVGECMAKCGVARKLTPGSNAQPRKLGVEIISAINVLCGLRKKHCAYLSLSYTIYKVKRSSLPNARIMDHESPVILCWFQGAAGVIDVTSPICDYRAVTLGTRMALPRGLENWWVLGLTDFKNEAADPRGVKLQTFTVSVTALKTARLELFVPPGGLVVSLGSGVKLQIFTTQEPSWLHLVDPAPGLQVELPASPVRPWVVDGTGRCGAGGGARQGGSAAQEPMEWVGGSGMAGCRSQALPRGKAAKARREIEHSAX

SEQ ID NO: 30630 - protein, 104 aa, Homo sapiens
MVFSNLKGHWLQPIRLDSGSRNTAIGCDNQYKPTGVKLQTFATQEPSWLHPVNPTPGLQVELPASPSAVRPHSSALGWSMGLGAVEQGAALIGEARAAQEPTEW

SEQ ID NO: 30631 - protein, 484 aa, Homo sapiens
MKGKGDSGEEIEFLESEATSCYVPLTSAFWLGLTMGTTGERLEEGEQGENIIFSHLSPTLGCRLTVTPHYLSRFLPHNASAGKTQEYPNCLFHHLLRMRQRVETQQLEERPCRCQKLAFQLPLQLRCRHVIWALPLEEREVEKQLSSGSHFAKAVTDTQLQETTAEQPDRREQRTKVRNTTTNDRNHPTTTNETSSKKTQPEPNQQENKRDTTTQPTTTHDTTQHNTKTHNNTTLHRISKKRKTTNKHESTNQRNKQQTQRQNKKKTTTQHTNDLCFFVGPEEQIGQWLLLTLEITIFCKETQKKSKREHEDMSTKNRHPSPKASEVNWVGTMEVLHSALKIEAASLLKPARPRAHGRNEQLQTRRLKSCNTPAKVCSFTPEPATPRTHRRKKLRMHPNVRRNKLGHANFKNCNTHHEGPRLILEVSETKNPPILDTSQSLGSSVVPLLSMPYTLLDSPVLFTALCWYWQCIMVIIIIIMGSIH

SEQ ID NO: 30632 - protein, 143 aa, Homo sapiens
MLPRQNTVLIFGQQEGALLREGKLPGTRVLCEIWTSAGKIHFARAGTGTADRRHCWKMPSGRFQITFHFNQLSEFIFRSPPLNIWIFSFSGRPRRPGHVGPAFLKAVVVDMDVGTDISKRTPLLHHSRDGPPTQVISSHLRAS

SEQ ID NO: 30633 - protein, 351 aa, Homo sapiens
MVEGKGKLACTDDMNTVLIFGQQEGALLREGKLPGTRVLCEILKPIHNTESECQVVQALFDGHGIEKRELGSQINFSIRVKLQTFAVSVTALKAARLELFVPPGGLVVSLGSEVKRQIFAGFCVSSGMREEPPVACGLWPDATVQDCRDRAASLSTLGSGPAGQLATLPRTRGLPLSQQDRHSAGVRPMRAAVGKTLCCSVRHVRLKLADTRGLLGTYAPLEGDSHHTHSEFPDRHNRIEDTVDNDRASCTANRCNTMYSKGSLGVTDQMEILSRLVSAHDVHESSRKVTCGYIGPTGVIQNNLQSQDPQFNHICKVLIPHKILREASRELYADSTNELIVMEKQPPMGFA

SEQ ID NO: 30634 - protein, 366 aa, Homo sapiens
  DOMAIN (213)..(256): 1 kw MIND INHIBITOR DIVISION CONTROL domain identified by eMATRIX, accession number DM01756B, p-value=2.952e-12, raw score of 22.91
  DOMAIN (184)..(292): ParA family ATPase domain identified by PFam, accession name ParA, E-value=1.8e-15, PFam score of 64.9
MKSNNALIVILGTVTLDAVGIGLVMPVLPGLLRDIVHSDSIASHYGVLLALYALMQFLCAPVLGALSDRFGRRPVLLASLLGATIDYAIMATTPVLWIYPLECPPFTSQQTRVTILERRPDKGSVPSNATTWPPQFHWSKCVQNWWVLGLTDFKNEAMDPRGVKLQTFTVSVTALKAVRLELFVPPGGLVVSLGSGVKLQTFRVSITAYKNSVDPKIIDSAPNLGIGTINVVCAADVLIVPTPAELFDYTSALQFFDMLRDLLKNVDLKGFEPDVRILLTKYSNSNGSQSPWMEEQIRDAWGSMVLKNVVRETDEVGKGQIRMRTVFEQAIDQRSSTGAWRNALSIWEPVCNEIFDRLIKPRWEIR

SEQ ID NO: 30635 - protein, 660 aa, Homo sapiens
MTEGHKNRKKKPPTSFTPTLHFPEVSHTYTHASMSSSEEWVNVSTDFRADLSPHELTSQPPASPGAHRSREQAVVMGHEFIGLWKAWHPRDEVVRLTTDSQTGAQRGKTPQCSSQAGLWLSVSALTIMMYPRPKLFEPPTNGQGVSAHGIPYGHLSLDLGPTQIIQDDLISRSLIISAKILFSNKVTFTGSRDFTWISCWGGVKLQTFAVSVTALKAACLELFVPPGGLVVSLGSGVKLQIFAINVTAHKGSMDPKNSGAQLASPSGSRTGAAGGAACQSRAMRSHSSALGWLMGLGTVEQGVVLVGEARTAQEPMEWAVAALPRRRAPDLQPAMPEPPTHSMGSCVARASPTSTTPYSMAPSSIDHPRRAAFKSCNTHCEGLQLHSRASETRDHEPHQKEETLKTSEYHEETNSSHVSFKNCNTHSEGEAAKARREIEHSAGGPALLGDLAHPLQLLARVLSTSLPMATLSVGPAKPMPIWSSSWPTSATRSPSSHLRLSRHTSWQAEGAGFSLNQPREGSPQCSGGLNGSPSMARADAEADEVPICDNLKTCHTSHGSVMAETAVINHKKRKNSPRIVQSNDLTEAAYSLSRDQKRMLYLFVDQIRKSDGTLQEHDGICEIHVAKYAEIFGLTSAEASKDIRQALKKFAGKEVVFYRP

SEQ ID NO: 30636 - protein, 39 aa, Homo sapiens
MDVISIDKTGENFRLIYDTKGRFAVHRITPEEAKYKLCK

SEQ ID NO: 30637 - protein, 204 aa, Homo sapiens
MWKRLWNWVTSRGWNSLEGSEEDRKMWESLELPRDLLNGFSQNADSNMNNKVQAEVDSDGDEELVGNWSKGTLAVAERGQNTARAVASEGGSPKPWQLPHCVEPAGAQKSRIEVWELLPKFQKMYGNAWMPRKKFAAGARPSWRTSARAVQKGDVGSEPPHRVPTGVLPSGAVKRGPPSSRPQNGRSTGSVHHAPGKATLNASP

SEQ ID NO: 30638 - protein, 180 aa, Homo sapiens
MWKRLWNWVTGRGWNSLEGSEKDMKMWESLELPRDLLNGFDQNADSDMDKEVQAEVASDGDEELLGTGAKNGKSTNSLHCAPKKAADIHRQPMKAARREAVPRKTTEVELPKTMGTHLLHQHDLDVRHGVNRDNLGALRFDCPTGFQTRMGPVAPSFWPISPVWNGCCLLNACIRIVSRK

SEQ ID NO: 30639 - protein, 533 aa, Homo sapiens
MWESLELPRDLLNGFDQNADSDMDNKVQAEVVSDGDEELFGNWSKGHSCCEKRLAAFFPCPRNLWNFELERDDLRYLGEEISKWQSVQDEAEHKSLDNLQHDGAIEKKTPFSMEKFKPAAEICISNPDVNPRYNGENVSRACQRPSHQPSPFHHRPGGLEGKNATSAPALAKRGQGTAQAIASEDANPKALWLTCGVGPAGALKSGIEVWEPLPIFQRVYGNAWMSRQRTQNSRSTDSLHHALAKAIDTQCQPMKAARRVNVPCKATGVELPKTMGIHLLHQHDLDQCKSIPVVSRVDSCRGGLWPSDFKNGATDLRGVTTLKNGTDPKLFHFCPIRVPFIQSSPRLATFRILLIGAFYRALIGAFYKALEGPSAAGLLEFAGASRVIRQSLGFTVESLYCAQTKKPTSPLPVIWTIISHFAHVNEATCIYRIVIGIVNHLQLSISFNSEKIKVKRTITKENPQAQIKRHLEPKYTLSSHLPVAAATESNTTLPRSRAIVQLLLPPPEHFTGDLVITPPLPTTANICTHQQGV

SEQ ID NO: 30640 - protein, 138 aa, Homo sapiens
MWESLELPRDLLNGFDQKPDSNMDNKVQAEVVSDGDEELVGNWSKGHSCYVLAKRLVAFCPCPSDSWNFELERDDLGYLEEEISKQQSIQKMTWVLLKAFSFKRETGHNSLENVQPDNVIERKFHFLRQNSSWLQKFT

SEQ ID NO: 30641 - protein, 39 aa, Homo sapiens; identical to SEQ ID NO: 30455

SEQ ID NO: 30642 - protein, 478 aa, Homo sapiens; identical to SEQ ID NO: 30458
  DOMAIN (298)..(317): SELECTIN SUPERFAMILY COMPLEMENT-BINDING REPEAT SIGNATURE domain identified by eMATRIX, accession number PR00343C, p-value= 2.286e-11, raw score of 16.85
  DOMAIN (161)..(323): Sushi domain (SCR repeat) domain identified by PFam, accession name sushi, E-value=2.9e-30, PFam score of 114.0

SEQ ID NO: 30643 - protein, 99 aa, Homo sapiens; identical to SEQ ID NO: 30459
  DOMAIN (1)..(42): Sushi domain (SCR repeat) domain identified by PFam, accession name sushi, E-value=0.0015, PFam score of 25.2

SEQ ID NO: 30644 - protein, 280 aa, Homo sapiens; identical to SEQ ID NO: 30460
  DOMAIN (188)..(198): Sushi domain proteins (SCR repeat proteins domain identified by eMATRIX, accession number PF00084C, p-value=1.000e-08, raw score of 11.25
  DOMAIN (131)..(197): Sushi domain (SCR repeat) domain identified by PFam, accession name sushi, E-value=3.4e-15, PFam score of 63.9

SEQ ID NO: 30645 - protein, 849 aa, Homo sapiens
  DOMAIN (749)..(790): kw TRANSCRIPTASE REVERSE II ORF2 domain identified by eMATRIX, accession number DM01354I, p-value=1.000e-38, raw score of 15.55
  DOMAIN (142)..(193): Integrase DNA binding domain identified by PFam, accession name integrase, E-value=3.8e-20, PFam score of 80.4
  misc_feature (1)...(849): Xaa = X or * as defined in Table 2
XEPPQKISTGVYGPLPEGTVGLILGRSSLSLKGVQIRTDVVDSDYNGEIQLVISSSIPWSASPGDRIAQLLLLPYIKVGNSEIKRTGGFGSTDPTGKAAYWASRVSENRPACKAIIQGKQFEGNQTTTSAEQHFTGKKNSPHEGKLIWWKDNKNKTWEIGKVVTWGRGFACVSPGENQLPVWIPTRHLKIYDEPIGDAKKSATAEMETPVTWMDNPIEVYVNDSVWVPGPTDDHCPAKPEEEGMMINISIGYHYPPICLGRAPGCLMPAVQNWLVEVPTVSPISRFTYHMVSGMSLRPRVNYLQDFSYQRSLKFRPKGKPCPKEIPKGSKNTEVLVWEECVANSAVILQNSEFGTIIDWAPRGQFYHNCTGQTQSCPSAQCILLVRAREAVWISMSMDQPWEALPSVHILTEVLKAILNRSKRFIFTLITVIMGLIAVTATAAMAGVALHSSVQSVNFVNDWQKNSTRLWNSQSGIDQKLANQINDLRQTVIWMGDRLMNLDHRFQLQCDWNISDFCITPQVYNESEHHWDMELRQSQELLMASQILTLSLGLRPSEINAMSRNGLPFARPTNLTDDFEFPIGTYLNYECRPGYSGRPFSIICLKNSVWTSAKDKCKRKSCRNPPDPVNGMAHVIKDIQFRSQIKYSCPKGRSMRQKVNKDIQELNSALHQADLIDIYRTLHPKSTEYTFFSAPHHTYSKIDHIVGSKALHSKCKRKEIITNCLSDHSAIKLELRIKKLTRNSSTTWKLNNPLLNDYWVHNEMKAEIKMFFETNKNKNTTYQNLWDTFKAVCKGKFIALNAHKRKQERSKIDTLTSQLKELEKQEQTHSKASRRQEITKIRAELKEIET

SEQ ID NO: 30646 - protein, 2039 aa, Homo sapiens
  DOMAIN (1228)..(1247): SELECTIN SUPERFAMILY COMPLEMENT-BINDING REPEAT SIGNATURE domain identified by eMATRIX, accession number PR00343C, p-value= 2.286e-11, raw score of 16.85
  DOMAIN (43)..(1965): Sushi domain (SCR repeat) domain identified by PFam, accession name sushi, E-value=0, PFam score of 1671.7
MGVSSPRSREPVGQPAPGLPFCCGGSLLAVVVLLALPVAWGQCNAPEWLPFARPTNLTDEFEFPIGTYLNYECRPGYSGRPFSIICLKNSVWTGAKDRCRRKSCRNPPDPVNGMVHVIKGIQFGSQIKYSCTKGYRLIGSSSATCIISGDTVIWDNETPICDRIPCGLPPTITNGDFISTNRENFHYGSVVTYRCNPGSGGRKVFELVGEPSIYCTSNDDQVGIWSGPAPQCIIPNKCTPPNVENGILVSDNRSLFSLNEVVEFRCQPGFVMKGPRRVKCQALNKWEPELPSCSRVCQPPPDVLHAERTQRDKDNFSPGQEVFYSCEPGYDLRGAASMRCTPQGDWSPAAPTCEVKSCDDFMGQLLNGRVLFPVNLQLGAKVDFVCDEGFQLKGSSASYCVLAGMESLWNSSVPVCEQIFCPSPPVIPNGRHTGKPLEVFPFGKAVNYTCDPHPDRGTSFDLIGESTIRCTSDPQGNGVWSSPAPRCGILGHCQAPDHFLFAKLKTQTNASDFPIGTSLKYECRPEYYGRPFSITCLDNLVWSSPKDVCKRKSCKTPPDPVNGMVHVITDIQVGSRINYSCTTGHRLIGHSSAECILSGNAAHWSTKPPICQRIPCGLPPTIANGDFISTNRENFHYGSVVTYRCNPGSGGRKVFELVGEPSIYCTSNDDQVGIWSGPAPQCIIPNKCTPPNVENGILVSDNRSLFSLNEVVEFRCQPGFVMKGPRRVKCQALNKWEPELPSCSRVCQPPPDVLHAERTQRDKDNFSPGQEVFYSCEPGYDLRGAASMRCTPQGDWSPAAPTCEVKSCDDFMGQLLNGRVLFPVNLQLGAKVDFVCDEGFQLKGSSASYCVLAGMESLWNSSVPVCEQIFCPSPPVIPNGRHTGKPLEVFPFGKAVNYTCDPHPDRGTSFDLIGESTIRCTSDPQGNGVWSSPAPRCGILGHCQAPDHFLFAKLKTQTNASDFPIGTSLKYECRPEYYGRPFSITCLDNLVWSSPKDVCKRKSCKTPPDPVNGMVHVITDIQVGSRINYSCTTGHRLIGHSSAECILSGNTAHWSTKPPICQRIPCGLPPTIANGDFISTNRENFHYGSVVTYRCNLGSRGRKVFELVGEPSIYCTSNDDQVGIWSGPAPQCIIPNKCTPPNVENGILVSDNRSLFSLNEVVEFRCQPGFVMKGPRRVKCQALNKWEPELPSCSRVCQPPPEILHGEHTPSHQDNFSPGQEVFYSCEPGYDLRGAASLHCTPQGDWSPEAPRCAVKSCDDFLGQLPHGRVLFPLNLQLGAKVSFVCDEGFRLKGSSVSHCVLVGMRSLWNNSVPVCEHIFCPNPPAILNGRHTGTPSGDIPYGKEISYTCDPHPDRGMTFNLIGESTIRCTSDPHGNGVWSSPAPRCELSVRAGHCKTPEQFPFASPTIPINDFEFPVGTSLNYECRPGYFGKMFSISCLENLVWSSVEDNCRRKSCGPPPEPFNGMVHINTDTQFGSTVNYSCNEGFRLIGSPSTTCLVSGNNVTWDKKAPICEIISCEPPPTISNGDFYSNNRTSFHNGTVVTYQCHTGPDGEQLFELVGERSIYCTSKDDQVGVWSSPPPRCISTNKCTAPEVENAIRVPGNRSFFSLTEIIRFRCQPGFVMVGSHTVQCQTNGRWGPKLPHCSRVCQPPPEILHGEHTLSHQDNFSPGQEVFYSCEPSYDLRGAASLHCTPQGDWSPEAPRCTVKSCDDFLGQLPHGRVLLPLNLQLGAKVSFVCDEGFRLKGRSASHCVLAGMKALWNSSVPVCEQIFCPNPPAILNGRHTGTPFGDIPYGKEISYACDTHPDRGMTFNLIGESSIRCTSDPQGNGVWSSPAPRCELSVPAACPHPPKIQNGHYIGGHVSLYLPGMTISYTCDPGYLLVGKGFIFCTDQGIWSQLDHYCKEVNCSFPLFMNGISKELEMKKVYHYGDYVTLKCEDGYTLEGSPWSQCQADDRWDPPLAKCTSRAHDALIVGTLSGTIFFILLIIFLSWIILKHRKGNNAHENPKEVAIHLHSQGGSSVHPRTLQTNEENSRVLP

SEQ ID NO: 30647 - protein, 35 aa, Homo sapiens
  misc_feature (1)...(35): Xaa = X or * as defined in Table 2
VLSTDKAQTSRSLHVLEHTHSGPDGIQLIYDTHPX

SEQ ID NO: 30648 - protein, 54 aa, Homo sapiens
MLLQQVFVEYLLCSSMCVQVQDGCRSLAGFHPGRNGCVPAHAETWMSGLCQLRG

SEQ ID NO: 30649 - protein, 76 aa, Homo sapiens
MPSHNWGVVLQQSAVKQVEPHAVPVPVSKCESGLLKIKGTAWSFWPQDGMISAMATASISQERPFYTAHLCFQMLL

SEQ ID NO: 30650 - protein, 35 aa, Homo sapiens
MFQKAKSSFLLDFLRYFSCGKLLTIIIVSYAFTSL

SEQ ID NO: 30651 - protein, 197 aa, Homo sapiens
MGLHGDSTRVSGEAFSSLSPVRFLAGRWEATEWLLGGGSSFGAGPSSGSWQPERQVPFNEVRLPPPPDIKKEISEGDEVEELRELKKGIHSPIYSRMQTLGVHELLTLCCPHPSLASFLSKATQGPGNRSGKWVCPRVAPYLGIQLTWEKAKSTGLGTLLPKGISISEISKSSLRKPEGDFTNRREGQCEDGKVGAE

SEQ ID NO: 30652 - protein, 38 aa, Homo sapiens
  misc_feature (1)...(38): Xaa = X or * as defined in Table 2
XLNARPSDCGNYLSLMFQKAKSSFLLDFLRYFSCNKQI

SEQ ID NO: 30653 - protein, 107 aa, Homo sapiens
MWKLLDVFEELKESRCRLNLVSKNEFQVMGSFWILGPTPVVCQWLSGLQPQTEACTVGFPAFEVLGLGLASLLLSLKMAYCGTSPCDPVPFSGKKASVEKEEANVKM

SEQ ID NO: 30654 - protein, 206 aa, Homo sapiens
MSTYSSEISSSKGFSTILPEVPKLTGTDRLDNGDSTGGQNCQVESTALKKQLTRTLAYSVPCTIGNSQIRKLSQKGEMTSPVGTTIVKRISPQGQDVRIRGTPTAKSGTLKCSFFETAGGAIHECHCSRPCLPNQMLDAAAPPLSLKGQLISTGSATYSDMTRAGENNIAQGYASLSWHPPLTPNNTYLFTEVSTLQHNHEKWSHS

SEQ ID NO: 30655 - protein, 143 aa, Homo sapiens
KKKKTNKGPAVGIYNGNINTEMPRQPKKFQKGRKDNDSHVYAVIEDTMVYGHLLQDSSGSFLQPEVDTYRPFQGTMGVCPPSPPTICSRAPTAKLATEEPPPRSPPESESEPYTFSHPNNGDVSSKDTDIPLLNTQEPMEPAE

SEQ ID NO: 30656 - protein, 61 aa, Homo sapiens
MCGEPWKFPGRTAGPTWRCAVPPSGTWECQSHPRPAQLLQTAVPVSESFKSPNGLSNTWGN

SEQ ID NO: 30657 - protein, 47 aa, Homo sapiens
MIMPTLSFRLYLMFLLSGTTFWKKTIIRTSNVLQGISCSCWSSVLES

SEQ ID NO: 30658 - protein, 368 aa, Homo sapiens
  DOMAIN (64)..(95): Ubiquitin carboxyl-terminal hydrolases famil domain identified by PFam, accession name UCH-1, E-value=4.8e-05, PFam score of 26.9
MFSSTSTPSSFTAFQTTMRSSIPHWRISRMCLKPTFTKQQIANLDKQAKLSRAYDGTTYLPGIVGLNNIKANDYANAVLQALSNVPPLRNYFLEEDNYKNIKRPPGDIMFLLVQRFGELMRKLWNPRNFKAHVSPHEMLQAVVLCTLGGTKKKKKTIVTDVFQGSMRIFTKKLPHPDLPAEEKEQLLHNDEYQETMVESTFMYLTLDLPTAPLYKDEKEQLIIPQVPLFNILAKFNGITEKEYKTYKENFLKRFQLTKYSLRTTSLLRRIQLVVNFPITNVDLREYLSEEVQAVHKNTTYDLIANIVHDGKPSEGSYRIHVLHHGTGKWYELQDLQVTDILPQMITLSEAYIQIWKRRDNDETNQQGA

SEQ ID NO: 30659 - protein, 554 aa, Homo sapiens
  DOMAIN (299)..(320): Myc-type 'helix-loop-helix' dimerization domain proteins. domain identified by eMATRIX, accession number BL00038B, p-value= 7.577e-13, raw score of 16.97
MEPNHDVEGLLTTGPVQDNEGLLMSTLLPPPAPHPPQGGNNSSPPAWGIVRVELAQAKLQAAAAASHLLPSCDAVRSSHLASLLFQMPAAQKAHGRTAEPEEASRLKGAPRLEGAPRLEEAPRLEEAPGLEYPDWRSPYRKVTAGIDGHQPTRQAKSHQSAGQQAFAEITVLLQETPRTEPGCGYFRTTGAPVAWRGPRHYWMYFSFLLTTQGQVHEHQCTHNSKMQGTQGRTLSPPSKQKGDSEHLNDGTDLSLTTRSQPVLHCNRLLSTLYVPDTVQQDINFVRSVNEGQVPCYSYGQKLSKLAILRIACNYILSLARLADLDYSADHSNLSFSECVQRCTRTLQAEGRAKKRKTPFQQAPLWVLRVSRRSPTDSRLMPGRVTTPSQGSPLRCHGNCTLHSWECFNVDQLDKILIKWCCISEALRFGWFGERRGPQWVVGARAAGSSGTHGADTTIKGQAAAPGPTLVPRQALSNVPPLRNYFLEEDNYKNIKRPPGDIMFLLVQRFGELMRKLWNPRNFKAHVSPHEMLQAVVLCSKKTFQITKQETVLLF

SEQ ID NO: 30660 - protein, 11 aa, Homo sapiens
MILDLSTAGVR

SEQ ID NO: 30661 - protein, 135 aa, Homo sapiens
MAPLGMLLGLLMAACFTFCLSHQNLKFIANNSKGLEVQEQDANRFNVRHVRRASFPFAFRHDGSDVQSGDTWANTAAPAVKMEGPRGTREADDKWTTSKSKDWKKIKTIKNKLGWTGSRYVAQAGVNAVVILLYQ

SEQ ID NO: 30662 - protein, 147 aa, Homo sapiens
MLQKIISKQDDLMTVKTNETGYQEAIVKEPEINTTLQMRFFGKRGQRKLHYKEFRSSGSNQPFPIKPLSESKNRLLDSESQWLENGAEEGIVKSGSCPRNVGCFPDSFLMLGGRLFAVAATSQKAEVHQNLLATSSNSPSNVRNVPK

SEQ ID NO: 30663 - protein, 133 aa, Homo sapiens
PYICQNHSAHPRFHTDLMEMVSLLDAVKIGDKSLVMKRNIGYFQYFQAWVMVAVFQLALWGWIQNKLLLQTRMSMPEDLNCRGRKQKTWQMTVVAQINLFLSNHLVNQKTACWTSESQWLENGAEEGIVKSGV

SEQ ID NO: 30664 - protein, 68 aa, Homo sapiens
MFEQMERKTSVKKLTKKDIEDTLSGIQTAGCGSTFFRDLGDKGLISYTEYLFLLTILTKPHSWISCCF

SEQ ID NO: 30665 - protein, 222 aa, Homo sapiens
MVVDENWKAEYGRASHCKRLCDDLPLNPFYSLGTGGPPDPLKTSRPTWRAAQGKATAQAHMEPHEPWVHEQPGASCCRPANKRGYTLAYPQHRGHIHGAEEKIAFRLHLCCTSPGVLVYFHTADKDISKTGQFTKERGLIGLTVPHGCGSLTIKAEDKEEEVMSYTDGSRQRERTCAGQLLFSKPSDLVRLVHYHENTMGKTCPYDSITSHQVPPTTHGNSR

SEQ ID NO: 30666 - protein, 134 aa, Homo sapiens
  DOMAIN (92)..(115): FORMIN SIGNATURE domain identified by eMATRIX, accession number PR00828J, p-value=3.681e-15, raw score of 12.53
MGPLSAFIQPLTKSFNMMFLGQDDRPKVGPLVLQSISLGSGVSSVLSLHGHQEDVTRKGSQSRPYKKVLGSHTRKDTGLKMAQESVSKLTSEKKVETKKINPTASLKAVPEEEARRMKSITSMANRELLPFCRD

SEQ ID NO: 30667 - protein, 172 aa, Homo sapiens
  DOMAIN (115)..(171): SH3 domain identified by PFam, accession name SH3, E-value= 6.1e-10, PFam score of 46.5
ELRITQSEFDRQAEITRLLLEGISSTHAHHLRCLNDFVEAQMTYYAQCYQYMLDLQKQLGSFPSNYLSNNNQTSVTPVPSVLPNAIGSSAMASTSGLVITSPSNLSDLKECSGSRKARVLYDYDAANSTELSLLADEVITVFSVVGMDSDWLMGERGNQKGKVPITYLELLN

SEQ ID NO: 30668 - protein, 145 aa, Homo sapiens
  misc_feature (1)...(145): Xaa = X or * as defined in Table 2
XLRLDCIDFRKTFLNLSNPYPIRIPVGWILAWKVVFSKDGCNNISYSTCSSYNVALMCLSSRGGIYAPSLKMWPSTLAHANALFDSPSLSVRSISQHLTVCASRIQLRQENLMKIFLALAAESREAEMKRWDSSQFITPLVGGAX

SEQ ID NO: 30669 - protein, 212 aa, Homo sapiens
  DOMAIN (5)..(187): Domain of unknown function DUF71 domain identified by PFam, accession name DUF71, E-value=8.3e-33, PFam score of 122.4
MPLTCMQKQWLSPLYRRTIRGRSLDTRQVYTKCEGDEVEDLYELLKLVKEKEEVEGISVGAILSDYQRIRVENVCKRLNLQPLAYLWQRNQEDLLREMISSNIQAMIIKVAALGLDPDKHLGKTLDQMEPYLIELSKKYGVHVCGEGGEYETFTLDCPLFKKKIIVDSSEVVIHSADAFAPVAYLRFLELHLEDKVSSVPDNYRTSNYIYNF

SEQ ID NO: 30670 - protein, 43 aa, Homo sapiens
MHLKKSLKRYSLEINVGNTMLYKNILIWSTWKHLKMAHQGTFF

SEQ ID NO: 30671 - protein, 130 aa, Homo sapiens
MPLHITPLGLLLLILDCLISSLSSLHTELIMKRRQLPLALQNVFLYTFGVLLNLDLHADSGPGPGIMEGLSAWAELVHSSSIPCLFVVSCSLVVNAVLSAVLLWLQLTSTFFLAMLLIISLAVCPCYGRR

SEQ ID NO: 30672 - protein, 420 aa, Homo sapiens
MGLFEGTFREEQKCTYQFLMQGFICKQTDQVVLILDSADAIWAIQKLYPVVSVTSGFVDVFSSVNANIPCSTSGSVSTFYSILPIRQITKVCFMDQTPQVLRFFLLGNKSTSKLLLAVFYHELQSPHVFLGESFIPPTLVQSASLLLNESIGANYFNIMDNLLYVVLQGEEPIEIRSGVSIHLALTVMVSVLEKGWEIVILERLTNFLQIGQNQIRFIHEMPGHEETLKAIADSRAKRKRNCPTVTCTSHYRRVGQRRPLMMEMNSHRASPPMTVETISKVIVIEIGDSPTVRSTGMISSLSSNKLQNLAHRVITAQQTGVLENVLNMTIGALLVTQSKGVIGYGNTSSFKTGNLIYIRPYALSILVQPSDGEVGNELPVQPQLVFLDEQNRRVESLGPPSEPWTISASLEGASDSVLKG

SEQ ID NO: 30673 - protein, 136 aa, Homo sapiens
MQRNGKLICTEKITLFEAHMARCTSIMCYVSKHLKMGLMLMQLDFHRFWHCYEKYLGNGLFDGETCKPTKEKGADVISQISHYFDAFAGFFLICKEKEQEPKGDYQSEQLIIKRSELVLFPANSTEEPGTEEEGSN

SEQ ID NO: 30674 - protein, 870 aa, Homo sapiens
  DOMAIN (111)..(134): Kazal serine protease inhibitors family proteins domain identified by eMATRIX, accession number BL00282, p-value=5.680e-17, raw score of 16.88
  DOMAIN (97)..(828): Kazal-type serine protease inhibitor domain identified by PFam, accession name kazal, E-value=6.1e-21, PFam score of 83.0
MKIATVSVLLPLALCLIQDAASKNEDQEMCHEFQAFMKNGKLFCPQDKKFFQSLDGIMFINKCATCKMILEKEAKSQKRARHLARAPKATAPTELNCDDFKKGERDGDFICPDYYEAVCGTDGKTYDNRCALCAENAKTGSQIGVKSEGECKSSNPEQDVCSAFRPFVRDGRLGCTRENDPVLGPDGKTHGNKCAMCAELFLKEAENAKREGETRIRRNAEKDFCKEYEKQVRNGRLFCTRESDPVRGPDGRMHGNKCALCAEIFKRRFSEENSKTDQNLGKAEEKTKVKREIVKLCSQYQNQAKNGILFCTRENDPIRGPDGKMHGNLCSMCQVYFQAENEEKKKAEARARNKRESGKATSYAELCNEYRKLVRNGKLACTRENDPIQGPDGKVHGNTCSMCEVFFQAEEEEKKKKEGESRNKRQSKSTASFEELCSEYRKSRKNGRLFCTRENDPIQGPDGKMHGNTCSMCEAFFQQEERARAKAKREAAKEICSEFRDQVRNGTLICTREHNPVRGPDGKMHGNKCAMCASVFKLEEEEKKNDKEEKGKVEAEKVKREAVQELCSEYRHYVRNGRLPCTRENDPIEGLDGKIHGNTCSMCEAFFQQEAKEKERAEPRAKVKREAEKETCDEFRRLLQNGKLFCTRENDPVRGPDGKTHGNKCAMCKAVFQKENEERKRKEEEDQRNAAGHGSSGGGGGNTQDECAEYQEQMKNGRLSCTRESDPVRDADGKSYNNQCTMCKAKLEREAERKNEYSRSRSNGTGSESGKDTCDEFRSQMKNGKLICTRESDPVRGPDGKTHGNKCTMCKEKLEREAAEKKKKEDEDRSNTGERSNTGERSNDKEDLCREFRSMQRNGKLICTRENNPG

SEQ ID NO: 30675 - protein, 52 aa, Homo sapiens
  misc_feature (1)...(52): Xaa = X or * as defined in Table 2
MSEQEEELEDDPTVVKNYKDLEKAVQSFRYDVVLKTGLDIGRNKVEDAFYKX

SEQ ID NO: 30676 - protein, 71 aa, Homo sapiens
  misc_feature (1)...(71): Xaa = X or * as defined in Table 2
XFKSNIKVYKIYLKSLWQKVDEEDSDEESHHDEMSEQEEELEDDPTVVKNYKDLEKAVQSFRYDVAPEDGA

SEQ ID NO: 30677 - protein, 144 aa, Homo sapiens
LLTLSLDGSNPFTYCTGHWLVNRLHRPSPEPPGIGVGDEEHSLGPPIKDSSRRLARAPTASSLLLALGTPSLAPRVAMDPNCSCAAAGVSCDLRQTPASAKSANAPSCKERAAAPAVACGLVPKCAPGLASGKGGIGRSAGCCA

SEQ ID NO: 30678 - protein, 290 aa, Homo sapiens
  DOMAIN (92)..(137): kw TRANSCRIPTASE REVERSE II ORF2 domain identified by eMATRIX, accession number DM01354N, p-value=1.000e-40, raw score of 13.17
MAGYPSERKPPEERSHSNVCCSALFAVLQPPLLIPRQTGSGMDLQQTPTDLQLTVLTVRRKTNKQKGQPHQNPICTSPSSRTKEIQTIIREYYKHLYTNKLENLEEMDKFLDTYTLPRLNQEEIESLNRPITGSEIEATVNSLPTKKSPGADGFTAEFYQRAWNPPGIRSIPHLISEEPERKELRSTAKMRSSDQSCSKPCLIRSLKGKIVSFGALTWISLFFTGQRDEENGFCLPVKGKLNVQMCPEFLPSGGFVVSLTSGVKPQTYTVRVTALKGGADPKSEQQQALL

SEQ ID NO: 30679 - protein, 578 aa, Homo sapiens
  DOMAIN (3)..(22): Nitrite and sulfite reductases iron-sulfur/siroheme-binding s domain identified by eMATRIX, accession number BL00365B, p-value= 6.902e-09, raw score of 13.74
MNTSCPRTCSIPWTLLIGIVALTDAAAETLVFLLDHKEDQGRSTGKAEAGSRQTNGPNSKESGVVREPFPSKPDTRVFSPVAVLVAFNWLTGDSPLVVTKMCPVLGLNDFKRKPWTFTVSVTALKDGVSGVCSFRCSDVSRVSSFWWVRGLADFRSEAADLHAQHLQGPRIFLKQARVNVWQTSEWSYLPVPRHVLALLSPFGWWMGLGALEQGAALVGEARAAQEPTEGVGGSGMAGCGSSAVPRGKAAKARREIERSAVLGGARHRSKNFFTSWMPFSQSNGAFSRPAQGPISMHSSILSTYKPWTQPHSFCHLQVFRHCRLPIVQTLTPEVEAYRGISRTSHGMSTEPWRLQDPEYWLLTKRSELLSIKRVEHALGLNRWAQQNSEYFATEVHKCEHLPSNKKVESQSYLLLLILESPTGERRELQLAGAETHKQKQHGEPTLRYLPKMCNCSTRLLLPATLKKSYTLRIAGVAAGKEFTGSDSSTVAEKLLMSDEDLDSFTVLYDIISIEFIIVEAKVDGKCSHIMEAIANQQLYSMEKEHKSWIEHYILITHLKLLKIVAENLSVPYYVGVTE

SEQ ID NO: 30680 - protein, 229 aa, Homo sapiens
MGSGPRVRPSAVLASGLNQSSPSGGSHRVLISPFPPSSRQFSTERLYLGENKGRQQESLPVDPENSSGSYTRPSRGYLYESAKATVLLALGFLVSLTSRMKPRTLTVSVTALKDGVSGVCSFRCSDVSRVSSFRWVCGLADFRSEAADLSQKGQVNRNTCPGLIPKQEFQRTKIEMVDGERRISSVIFPVSEEQVYTMTRFRQSSDNQKGKNIVQRCGRNLSYREKMKP

SEQ ID NO: 30681 - protein, 271 aa, Homo sapiens
  DOMAIN (86)..(105): Eukaryotic  RNA-binding region RNP-1 proteins domain identified by eMATRIX, accession number BL00030A, p-value=4.938e- 12, raw score of 14.39
  DOMAIN (1)..(158): RNA recognition motif. domain identified by PFam, accession name rrm, E-value=9.5e-45, PFam score of 162.1
MFIGGLSWDTSKKDLTEYLSRFGEVVDCTIKTDPVTGRSRGFGFVLFKDAASVDKVLELKEHKLDGKLIDPKRAKALKGKEPPKKVFVGGLSPDTSEEQIKEYFGAFGEIENIELPMDTKTNERRGFCFITYTDEEPVKKLLESRYHQIGSGKCEIKVAQPKEVYRQQQQQQKGGRGAAAGGRGGTRGRGRGQGQNWNQGFNNYYDQGYGNYNSAYGGDQNYSGYGGYDYTGYNYGNYGYGQGYADYSGQQSTYGKASRGGGNHQNNYQPY

SEQ ID NO: 30682 - protein, 230 aa, Homo sapiens
MVCLEFVPSDVQNVSGVSSVWWVCGLADFRSEAADLRGMKLQTFVVSVTALKGGASGVVCSFQWVSGLAGFRSEAADLCMDSCSKLEQHSTLSRAILLINKGFCRFRNHHQTGFSPAGANQRGPLAATLSGPGGEGQSAVARLTGEKKNHPGAQYANRLSPRVGRFINAAGTTGFPTGKRAVSATQLICLAVSRVSSFRGLMSEAADLRGVKLQTFAMSVTAQKAGTDTD

SEQ ID NO: 30683 - protein, 250 aa, Homo sapiens
  misc_feature (1)...(250): Xaa = X or * as defined in Table 2
MDLAANEKAVHADFFNAAQDCPGQASSPPWFPHCSEGSRSTGSVGRQQTACGVGRETSIPIPATFRKLLGDRRLSCRPDNEPQQGSTALRGMPACVLEQNGPRAREPSGVLEKTLLNTCLLTGQNDLSQVTRNSRGKPTRPRSSVTSFLVSPQRCELNGREVAALDRAFGSTGHGQGAEALMFTRCREHPLCGTNKATSEGKMGTGRLRNSLRKNQSKWLGSYLEVLRTTRSRREVSEDSTISVSTHWRX

SEQ ID NO: 30684 - protein, 37 aa, Homo sapiens
  misc_feature (1)...(37): Xaa = X or * as defined in Table 2
XREAAPGLLMDLAANEKAVHADFFNDVEDLFDDDDIQ

SEQ ID NO: 30685 - protein, 47 aa, Homo sapiens [sequence omitted]

SEQ ID NO: 30686 - protein, 68 aa, Homo sapiens
MNLRERRWEARGMPGAGGRSSGVTGSALRGTGTIRINSVLVRFLHLAVCALSTFPLCVYHSPGGRGKP

SEQ ID NO: 30687 - protein, 108 aa, Homo sapiens
MLWSAVSSIVASQTRCSGKSPHILREHPHLSPAPSAAQLFAFVYAFRRPDPPEHWAEHRRRGFGALFVLNSKSEWETQDWVGWIPASLPSLRPLPPFFHFMKVLPRDE

SEQ ID NO: 30688 - protein, 57 aa, Homo sapiens
  misc_feature (1)...(57): Xaa = X or * as defined in Table 2
XPACSGAGGGAAMKLKLKNVFLAYFLVSIAGLLYALASHVTAFLPCGQQPSSYGRRI

SEQ ID NO: 30689 - protein, 82 aa, Homo sapiens
  DOMAIN (34)..(64): SODIUM CHANNEL SIGNATURE domain identified by eMATRIX, accession number PR00170E, p-value=8.533e-09, raw score of 6.48
MKTKTGLAADIGLLCSLCFLFPPFPPPSPHPILFFFFFAFLFFFFSFYLLYLVCLFLVASQVRKLFRKVSPVHLHQDECLML

SEQ ID NO: 30690 - protein, 1355 aa, Homo sapiens
  DOMAIN (131)..(169): Armadillo/beta-catenin-like repeat proteins domain identified by eMATRIX, accession number PF00514A, p-value=3.298e-14, raw score of 31.30
  DOMAIN (3)..(94): Importin beta binding domain identified by PFam, accession name IBB, E-value=5e-41, PFam score of 149.7
MADNEKLDNQRLKNFKNKGRDLETMRRQRNEVVVELRKNKRDEHLLKRRNVPHEDICEDSDIDGDYRVQNTSLEAIVQNASSDNQGIQLSAVQAARKLLSSDRNPPIDDLIKSGILPILVHCLERDDNPSLQFEAAWALTNIASGTSEQTQAVVQSSDGPQCRDYVISLGVVKPLLSFISPSIPITFLRNVTWVMVNLCRHKDPPPPMETIQEMAVWAKKMTEIQTPENTPRLFDLVKVKDEKIRQAFYFALRDTLVADNLDQATRVAYQKDRRWRVVTLQGQIIEQSGTMTGGGSKVMKGRMGSSLVIEISEEEVNKMESQLQNDSKKAMQIQEQKVQLEERVVKLRHSEREMRNTLEKFTASIQRLIEQEEYLNVQVKELEANVLATAPDKKKQKLLEENVSAFKTEYDAVAEKAGKVEAEVKRLHNTIVEINNHKLKAQQDKLDKINKQLDECASAITKAQVAIKTADRNLQKAQDSVLRTEKEIKDTEKEVDDLTAELKSLEDKAAEVVKNTNAAEESLPEIQKEHRNLLQELKVIQENEHALQKDALSIKLKLEQIDGHIAEHNSKIKYWHKEISKISLHPIEDNPIEEISVLSPEDLEAIKNPDSITNQIALLEARCHEMKPNLGAIAEYKKKEELYLQRVAELDKITYERDSFRQAYEDLRKQRLNEFMAGFYIITNKLKENYQMLTLGGDAELELVDSLDPFSEGIMFSVRPPKKSWKKIFNLSGGEKTLSSLALVFALHHYKPTPLYFMDEIDAALDFKNVSIVAFYIYGDFGTQKEAAWAISNLTISGRKDQVAYLIQQNVIPPFCNLLTVKDAQVVQVVLDGLSNILKMAEDEAETIGNLIEECGGLEKIEQLQNHENEDIYKLAYEIIDQFFSSDDVFNNFVVFLILYINIDLDKVIYIGEVEQIAMMKPKGQTEHDEGMLEYLEDIIGCGRLNEPIKVLCRRVEILNEHRGEKLNRVKMVEKEKDALEGEKNIAIEFLTLENEIFRKKNHVCQYYIYELQKRIAEMETQKEKIHEDTKEINEKSNILSNEMKAKNKDVKDTEKKLNKITKFIEENKEKFTQLDLEDVQVREKLKHATSKAKKLEKQLQKDKEKVEEFKSIPAKSNNIINETTTRNNALEKEKEKEEKKLKEVMDSLKQETQGLQKEKESREKELMGFSKSVNEARSKMDVAQSELDIYLSRHNTAVSQLTKAKEALIAASETLKERKAAIRDIEGKLPQTEQELKEKEKELQKLTQEETNFKSLVHDLFQKVEEAKSSLAMNRSRGKVLDAIIQEKKSGRIPGIYGRLGDLGAIDEKYDVAISSCCHALDYIVVDSIDIAQECVNFLKRQNIGVATFIGLDK

SEQ ID NO: 30691 - protein, 691 aa, Homo sapiens
  DOMAIN (583)..(632): PHOSPHORYLASE KINASE ALPHA MUSCL domain identified by eMATRIX, accession number PD01841F, p-value=7.048e-09, raw score of 13.36
MLHRVFRKATNTNTVAGAAVEDSPPNTLGTPDCATGKEKGLRTTFSASVKVLRLTAGRKRTRQLHSTETQRHELQADAESRPESPPSSAPKGFRCPDRAGPRGASQRRRSLQATFNCKASANGNYCWARSKTRCSGKSPHILREHPHLSPAPSAAQLFAFVYAFRRPDPPEHWAEHRRRGFGALFVLNSKSEWETQDWVGRQRRGHEAEGEERVSRLLPGVDRRPPLRAGQPCDCLPPLRAAAEQLRQKDLRISQLQAELRRPPPAPAQPPEPEALPTIYVVTPTYARLVQKAELRNKALDWLRGRGSAVGGKKDPSPPGTQGVVYFADSGNTYSWELFEEMRWTRGVSVWPVGLVGGLRVKGPQVQDSRVVGFHTAWEPNGPFPVDMAGFAVALPLLLAKPNAQFDSTAPRSHLESSLLSHLVDPKDLEPRAANCTRVLVVSSQQREALERVAHPCQQVISAALSREGWSSLQLVVPSSPAINREGLDPNPTPRLEPALGRTESRQWEQTPPSQQEWRGGGPSQAPEDADYRDTQVLRLGGQLQLHPGSSCPTNSEGGGFLLIPDSCLLHGGGGPGLQLQMGPSSCRKTSSGLPMILHYGLEKIEQLQNHENEDIYKLAYEIIDQFFSSDDVFNNFVVFLILYINIDLDKVIYIGSSLMKQTPSPGVTVYESVVVVLYVNACKLDSPSGG

SEQ ID NO: 30692 - protein, 154 aa, Homo sapiens
MAKYSQVSSSVTSLSAQQCGSATFRGLFIIDPNGVIKHLSVNDLPVGRSVEETLRLVKAFQYVETHGEVCPANWTPDSPTVAHVCDAGYVAGFVDLEVSNRPDLYDVFVNLAESEITIAPLAKAVGHSWQIPGDRRQPISRSGAFGAEGARKRG

SEQ ID NO: 30693 - protein, 283 aa, Homo sapiens
MAAAEVVDTQLMLGVGLIEKDTNGEVLWVWCYPSTTATLRNLLLRKYCLTDENKLLHPFVFGQYRRTWFYITTIEVPDSSILKKVTHFSIVLTAKDFNPEKYAAFTRILCRMYLKHGSPVKMMESYIAVLTKGICQSEENGSFLSKDFDARKAYLAGSIKDIVSQFGMETVILHTALMLKKRIVVYHPKIEAVQEFTRTLPALVWHRQDWTILHSYVHLDADELEALQMCTGYVAGFVDLEVSNRPDLYDVFVNLAESEITIAPLAKEAMANGQTCTKEIGVS

SEQ ID NO: 30694 - protein, 162 aa, Homo sapiens
MDIQLMRHKGPICADCGLWYKTCQDECGAFMALTGVAECSSEKRMASEVTKPRELFTQKQKHIRKEEKIHGQCKPPTTPTAHVVPQAAMRPALTHRSPGKPRPRCFKIRSTAGSFALTGKNLKPQLQRYPRTLGAAILTESGPAPEAPTQVALSRAGVPQNP

SEQ ID NO: 30695 - protein, 154 aa, Homo sapiens
  misc_feature (1)...(154): Xaa = X or * as defined in Table 2
MHMFTWRVRPGTSPEAISTRPGDRGLLQQSVPPKELQAVWWSCWANPTLRTTTATSPGKVPSPELAGNLHNQQHSPFVGCSRERVEGSIFYKQYVGRFGTPVFSVYDNLSPVVTTWQNFDSLLIPADHPSRKKGGHYYLEFDSHAEKRTRLHTX

SEQ ID NO: 30696 - protein, 83 aa, Homo sapiens
MTVFRFGVSGFWGLDRWPHSEALQKYAMSLSVWDLPSCKAEPKPQYGPHHPLAQLCLPWPMPGRGLIFPGICFTALSCPKIYA

SEQ ID NO: 30697 - protein, 37 aa, Homo sapiens
MVLISYQLKQNSLTRGHYDPAFERDARGQTSISRILA

SEQ ID NO: 30698 - protein, 239 aa, Homo sapiens
  DOMAIN (31)..(48): HIV TAT DOMAIN SIGNATURE domain identified by eMATRIX, accession number PR00055C, p-value=9.390e-09, raw score of 8.19
MKKPLDEETKRRDQMIKGAIEVLTREYSRRRRRKRRRTFSADSPVAPLIPYPLITKEDINAIEMEEDKRDLISREISKFRDTHKKLEEEKGTKEKERQEIEKGTERKREGACKGNEQRRKGKENVNEKRRKNGSGNENGIGTVTGQKREPEIGIEREIVTGIEKGAQIVIRIAVDQEKKAEIVKGNESGKEREREDREPRTNNGSERESERGNGSEKEKKTKKRDREEDEEDAYERKET

SEQ ID NO: 30699 - protein, 39 aa, Homo sapiens
MDVKFRQGNTSIAKSPHHILKLTQWLKENPHQKTEFLAQ

SEQ ID NO: 30700 - protein, 712 aa, Homo sapiens
  DOMAIN (287)..(305): Ubiquitin carboxyl-terminal hydrolases family 2 proteins domain identified by eMATRIX, accession number BL00972A, p-value= 8.500e-20, raw score of 11.93
  DOMAIN (286)..(317): Ubiquitin carboxyl-terminal hydrolases famil domain identified by PFam, accession name UCH-1, E-value=9.8e-17, PFam score of 69.0
MAEGGAADLDTQRSDIATLLKTSLRKGDTWYLVDSRCGKKYVGFDSWDKYQMGDQNVYPGPIDNSGLLKDGDAQSLKEHLIDELDYILLPTEGWNKLVSWYTLMEGQEPIARKVVEQGMFVKHCKVEVYLTELKLCENGNMNNVVTRRFSKADTIDTIEKEIRKIFSIPDEKETRLWNKYMSNTFEPLNKPDSTIQDAGLYQGQVLVIEQKNEDGTWPRGPSTPKSPGASNFSTLPKISPSSLSNNYNNMNNRNVKNSNYCLPSYTAYKNYDYSEPGRNNEQPGLCGLSNLGNTCFMNSAIQCLSNTPPLTEYFLNDKYQEELNFDNPLGMRGEIAKSYAELIKQMWSGKFSYVTPRAFKTQVGRFAPQFSGYQQQDCQELLAFLLDGLHEDLNMFYENTIYTIIKMRMEGQIRFHRIFAMDENLSSIMERDDIYVFEININRTEDTEHVIIPVCLREKFRHSSYTHHTGSSLFGQPFLMAVPRNNTEDKLYNLLLLRMCRYVKISTETEETEGSLHCCKDQNINGNGPNGIHEEGSPSEMETDEPDDESSQDQELPSENENSQSEDSVGGDNDSENGLCTEDTCKGQLTGHKKRLFTFQLRLDERSFLALDWDPDLKKRYFDENAAEDFEKHESVEYKPPKKPFVKLKDCIELFTTKEKLGAEDPWYCPNCKEHQQATKKLDLWSLPPVLVVHLKRFSYSRYMRDKLGYLS

SEQ ID NO: 30701 - protein, 297 aa, Homo sapiens
MGRRDRNKEERWEPGERGRTRGSRESEELRSARAPQTIPGGPTHPRWRRVCGKFLVRDGSVLLRVPRTARDLQLEATPRPGTSALGSSGTCPGSSEPREAGERRTARTRCWLWNARLLGTAPERPVPGPRQLQLSSSPASPAGCVRGERNLRERERPGRLGLPFHVATHSRSRHGKESLASRFGQGAGTQILLCDVRSVGSSEALPLCFILCKVGKVNLSPSPVVRIGLEDQCTPVSFLPHPEDIMLGKLLCLCSPSVNDCGVGESALRCDGVLSRAVTASSPELPGQALATELKLE

SEQ ID NO: 30702 - protein, 1281 aa, Homo sapiens
  DOMAIN (125)..(170): kw TRANSCRIPTASE REVERSE II ORF2 domain identified by eMATRIX, accession number DM01354N, p-value=1.000e-40, raw score of 13.17
  DOMAIN (211)..(484): Reverse transcriptase domain identified by PFam, accession name rvt, E-value=4.7e-74, PFam score of 259.4
  misc_feature (1)...(1281): Xaa = X or * as defined in Table 2
MELETIILSEVTQEWKTKYRMFSLISGSEAMRTQRHKDDKMDLVTQGEDDYTLGTVYTVRLSSCTIKSVVENGWIHFFEKINKIDRPLARLIKKKREKNQIDAIKNDKGDITTDPTEIQTTIREYYKHLYANKLENLEEMDKFLDTYILPRLNQEEVESLNRPITGSEIEAIINSLPTKKSPGPDGFTAKFYQRYKEELVPFLLKLFQPIEKEGILPNSFYEASIILIPKPGRDTAKKENFRPISLMNIDAKILNKILAHRIQQHIKKLIHHDQVGFIPGMQGWFNIHKSINVTQHINRTKDKNHIIISIDAEKALDKIQQRFMLKTLNKLGIDGTYLKIITATYDKSTTNIILNGQKLEAFPLKMGTRQGCPLSPLLFNIVLEVLARAVRQEKEIKGIQLGKEEVKLSLFADGMIVYLENPIISAQNLLKLISNFSKVSGYKINVQKLQAFLYTNNRQTESQIMSELPFTIASKRIKYLGIQLTRDVKDLFKENYKPLLKEIKEDTNKWKNIPCLWVGRINIVKMAILPKVIDRFNAIPIKLPMTFFAELEKTTLKFIWNQKRAHITKSILSQKNKAGGIALPDFKLYYKATVTKTAWYWYQNRDIDQWNRTEPSEIMPHIYNYLIFDKPDKNKQWGKDSLFNKWCWENWLAICRKLKLDPFLTPYTKINSRWTKDLNIRPKTIKTLEENLGNTIQDIGMGKDFMFKTPKAMATKAKIDKWDLIKLKSFCTAKETTIRVHNTDLDLTLTMYSKTCVSNEIMYVKVPKGHWQDSEDSAGVTPVLQSPRSPVPLRPSICLLDARLLSGAEEAVVNKTKDQASILEEKNKRSSLSPDLMAMASLLQSDRVLYLVQGEKKVRAPLSQLYFCRYCSELRSLECVSHEVDSHYCPSCLENMPSAEAKLKKNRALAFAKFAGLMKLACDNDDLEVISADLIPESEETAWKRGDPQKPSDMSTATRRVCGNVEGEPETPWSLPSLAGSFLPERSPQGTLEEELSWSCRGPGTGRSGGGPQQPRIPEPAARPGRSCALPPPGARRSRGTFQELPRAEVPGLGVASSCQIPCSPGDPEKHRAIPDPGTFRRLAAIWAGTSCSQLSWDCESCCGGYKSCFMNSPTSDLSEPQNCGSMTLKIWGVPENSQRTTESRKIHILGNITAPLTPGPSSPPQSPAPEHMESELEFELIGPSKSTSGNPRGLRSERPVLFCLQHLLRVETFWKGSYKVDNAGKPSSPVPWEPSALFTFCKILEESCIFGRLSISDLELVIAVCSLATVAGGNKTAAAX

SEQ ID NO: 30703 - protein, 128 aa, Homo sapiens
MLNPEKLSRTQRTWICLMMALKVVREILGAEQTLPVPLRSNQAKSTLSPFPRGQAALWAKVFSLKVPFLQCFLSLEGDGVKAFQNLLQFPEISGPCVNLKERAVQSFGALPREVGVMGFFLHWESHIC

SEQ ID NO: 30704 - protein, 109 aa, Homo sapiens
MTKKGSFTLSKDPPTYRQWIQTKKKSLNWQKKIQQVIRVRKDLRPTIIQTPYFAHEQAKCQQQPWQHPGEPQGYRDPSPIQDGNEDMKAIQKERKFKAMGPKPQLRGTG

SEQ ID NO: 30705 - protein, 665 aa, Homo sapiens
  DOMAIN (228)..(247): TYROSINE KINASE CATALYTIC DOMAIN SIGNATURE domain identified by eMATRIX, accession number PR00109B, p-value=1.353e-12, raw score of 12.27
  DOMAIN (227)..(492): Eukaryotic protein kinase domain identified by PFam, accession name pkinase, E-value=4.4e-38, PFam score of 140.0
VHSSGCWWIYHSGSGGWWPLLTAPLGSAPQQQQQQQQQQQHHPQYITSGGRTPSGFLAALIPELESWVAILDPPYPRGEPTAMKGEHQDRYQKTSASISTLQENMILPNELNKAPGTNPGETEICNLSDREFKIDVLRKLKEIQDNTEKESYTIKHNIAAALHAGNFGKMLKVISRGVPYLDLSTLVAVRSRDWRRLMLEIGKLTAKLVIRVIKRESMLVAWLEARAYLHENGIVHRDLKPENLLYATPAPDAPLKIGFLCGFWTMGKRPSGKGRGSEAENANQSTQMRRNQKNNSGNMTKKGSFTLSKDPPSLPAMDPNQKEIPELAEKKFSRSVIKLIKETPEKEWYGVLIPKAFLKQPSALIKKLLLQVRCWHLPHLCSKSRKATLDNRPELYFSIDAPEILRGCAYGPEVDMWSVGIITYILLCGFEPFYDERGDQFMFRRILNCEYYFISPWWDEVSLNAKDLVRKLIVLDPKKRLTTFQALQHPWVTGKAANFVHMDTAQKKLQEFNARRKLKAAVKAVVASSRLGSASSSHGSIQESHKASRDPSPIQDGNEDMKAIPEGEKIQGDGAQAAVKGAQAELMKVQALEKVKGADINAEEAPKMVPKAVEDGIKVADLELEEGLAEEKLKTVEEAAAPREGQGSSAVGFEVPQQDVILPEY

SEQ ID NO: 30706 - protein, 449 aa, Homo sapiens
  DOMAIN (169)..(188): TYROSINE KINASE CATALYTIC DOMAIN SIGNATURE domain identified by eMATRIX, accession number PR00109B, p-value=1.353e-12, raw score of 12.27
  DOMAIN (61)..(315): Eukaryotic protein kinase domain identified by PFam, accession name pkinase, E-value=1.7e-99, PFam score of 344.0
  misc_feature (1)...(449): Xaa = X or * as defined in Table 2
XGGGGGGGFRSPAAKMLKVTVPSCSASSCSSVTASAAPGTASLVPDYWIDGSNRDALSDFFEVESELGRGATSIVYRCKQKGTQKPYALKVLKKTVDKKIVRTEIGVLLRLSHPNIIKLKEIFETPTEISLVLELVTGGELFDRIVEKGYYSERDAADAVKQILEAVAYLHENGIVHRDLKPENLLYATPAPDAPLKIADFGLSKIVEHQVLMKTVCGTPGYCAPEILRGCAYGPEVDMWSVGIITYILLCGFEPFYDERGDQFMFRRILNCEYYFISPWWDEVSLNAKDLVRKLIVLDPKKRLTTFQALQASVGHSASSSHGSIQESHKASRDPSPIQDGNEDMKAIPEGEKIQGDGAQAAVKGAQAELMKVQALEKVKGADINAEEAPKMVPKAVEDGIKVADLELEEGLAEEKLKTVEEVAAPREGQGSSAVGFEVPQQDVILPEY

SEQ ID NO: 30707 - protein, 147 aa, Homo sapiens
MKGKWPVAVKGTACLHLHSPLGITEGAANQPSCRLPLPALEQLPPSLASPYHQERICSPGPRVSDLLSANSVFLIQEMKSSFVWVTRVCSNGGKQAGGGEFEKVGGLGRRGELYPPFRSSAAPSRVLDPHGIVPFRNSKLSRRVSIS

SEQ ID NO: 30708 - protein, 75 aa, Homo sapiens
  misc_feature (1)...(75): Xaa = X or * as defined in Table 2
MAAVATCGSVAASTGSAVATASKSNVTSFQRRGPRASVTNDSGPRLVSIAGTRPSVRNGQLLVSTGLPALDQLLX

SEQ ID NO: 30709 - protein, 308 aa, Homo sapiens
MNASKQVPDDEKEVEEAVPENKLTLGNLAEVFQLFKTAVTSSDMDPYYNTDTKTKANSGRNGRTFQQYAFRLVGSGLTSQSYWLREPRLGRGGGSLALVLIGRSSYWVNTGGSKMAAVATCGSVAASTGSAVATASKSNVTSFQRRGPRASVTNDSGPRLVSIAGTRPSVRNGQLLVSTGLPALDQLLGRFRAEIWAQPRGNLGRGPVGEATLTPHLFLTPKPSEEERIACSLTPGYTKLLQFIQNIIYEEGFDGSNPQDDDDTSSESKKFYRIPKAKNLLTMERKKNEYNTEMLEDESLKEHKLVNE

SEQ ID NO: 30710 - protein, 34 aa, Homo sapiens
MLAVATCGTCCREYWVCSGDSQQEQRHQFPEEGS

SEQ ID NO: 30711 - protein, 148 aa, Homo sapiens
MTALQLKELSHSGLYRRRRDRPDSLRVNGLPEEELRALGSLKFDLRQVRAIYLQEGLMGQGLMPHSSFFTGIQLSDDSPPWMFHRAGLSRLRSCLDHLPITSLPGQGTEKCSRTSRRQNSSDTELKKEGAYSAGGIGKTPFLRAKLPE

SEQ ID NO: 30712 - protein, 38 aa, Homo sapiens
MHCGPLYWAVLPSFFWILNFYKCNHQENCFSGNHYIFH

SEQ ID NO: 30713 - protein, 110 aa, Homo sapiens
MEMQLEPIMTRTEKATLVEASTGLMHYSGCELRGLRNQGEGQRGWSLFSNRDGTQSPTTGVLVRERKGRLDIRRHRRDDKQEGHVRMEAEMGVWQPQAKEYQGLPADTQS

SEQ ID NO: 30714 - protein, 52 aa, Homo sapiens
MSFFPASAFSFLDLFLHHSLSSFLLISKGFPEARMVMVGCYRGWENRHTTEF

SEQ ID NO: 30715 - protein, 699 aa, Homo sapiens
  misc_feature (1)...(699): Xaa = X or * as defined in Table 2
XTGEKLPAGSLLQDKEAPKREEIHDPLIQAQAEELTHLQQKIQEGRGVCYLFTQHVKNTVKSFEGLLRNTDIAYYQRQRFCEQMVQGSQLTEILVRKLATEYCLTSANRWQLVQFRKLTCGKAISCVSHLWELHFPKPTSLAPVFTTVIDTGRGDSVAGGRGLSGCAIEKPLCGAAPRQMEHLTVQGYGFLLEHADPWRLQSDHCLCGVYLEITRRKRKRSSGVKGRALSNCPPDAQVKTDLEILKYAVLLEKCGATGTTSSFRQEPMRPSKPSTEASTPAGLQSLCTGRHPSLSARAQWAGPRASREEGTFWTEPVGQERRLIRSGSSQNESQEDQGADLISHEGLKADNQRESSTWANEWLSGKPKVQHTNQETDGSWVSRNPPREQMKVTGTNIKTAVTHQKHYVLATLLSGLLSPTTAWVPDSARLHPGEINSLVAQTKPVWWSLHMDRSFRGHLFNFLGAHEAQVSGDAVVPTAPPRSLVLSLSPAGSNVPAFAFPSPAPALPPHDPTTAQLSPRGSTAQKVHRRSWDPRATLTTIPALVEPRAEHRIRRWQRKLRSSPTATGQGRLACVEEVHINCKWLSLRPSYLLYLDPVGADLLEKNLAEMQNLRQRLEESISLNDRLRERLEHVLSNGDQGKDNQRVTSCQLESLVSLFLSFPLSPGYGIGEKKCTGQSTVAPHSYTQSHSSGCGEDIL

SEQ ID NO: 30716 - protein, 457 aa, Homo sapiens
MMFASSNPQIYGDFQSQTCESMIPALDLPPHGRTTAQLSPRGSTAQKVRQRPCQLPSLPGLFKGLKAKGDDEFIPQVLVVRPGEYQTLLPARGPTSDPHHHPCPGGAPVRNTGSEDGSGSSSAARKATGQESPNTQASNVTGATHRSNLSGFPRPCSVVLPGHRQQFSVCAYSTCCPCWVSEHRLRLPLNQQTGPPSRTSPAAYPPNKFAGIASGRLFPRPNERLRWQRSYSQLSPMGVSGVATGKKSLQATHRGLREGHRGHESEGLERVAATRPQLTTGLEMRLCEVAASDQSVVRRQRSFMGHFLRHPRGQVRGARGRRGFDCGSRPPATNLHPDDLNPTPSPSTGDGAFPRAGDLAVLRTAEQGGRGGAWVVEERKPACPVAFILLVWNSQSPAGLQSFCTGRHPSLSVRAQRAGTGASREEGTFGQNVWDKSDGSSIQVPQKMRVRKMRAQT

SEQ ID NO: 30717 - protein, 84 aa, Homo sapiens
  misc_feature (1)...(84): Xaa = X or * as defined in Table 2
XLQSLCTGRHPSLSARAQWAGPRASREEGTFWTEPVGQERRLIRSGSSQNESQEDQGADLISHEGLKADNQRESSTWANEWLSX

SEQ ID NO: 30718 - protein, 194 aa, Homo sapiens
MGYSFSSQMNSGKDSTLTNLGGLKTQVLKEACPVAFILLVWNSQTPAGLQSLCTGRHPSLSARAQRAGPRASREEGTFWTERVGQERWLIRSGSSQNESQEDQGAGLISQAGLKADNRRESSTWANELLSFQECHFLILSIVAQRSFSKGFLSEELASVQPRRPCSEHSPSTRTISLRLLCSSCSEKRQRCLPK

SEQ ID NO: 30719 - protein, 571 aa, Homo sapiens
MRDLGDDGHVLNLDSINVSVLFVKSYNSFEGSSSSPQTPQTSVFRPPASLSTLAAPINELIQSHDCSCLTNTDDAKVQSPAHITPSTPGSESQPATCLLYWNVYLQLQWIVSKTESLIFPPKYCSPPTPSHPISGNMIWGQHIRSAMDKPRPGKTTFVIMVSPLPGHRQQFSICAYSTCCPCWVSEHRLPLPLNQQTGPPSRTSPATYPPNKFAGIASGRLFPRPNERLRWQRSYSQLSPMGVSGVATGKKVGLLGAAPRGLASLPGCVHRTEMLSRSLKLLPRMTDTEINRNGDGNATLPFAPGKTSRVPSDSGDFSSHPRANWSSIRDFPSAKEALWVTSFGIPGGRCAVPLEEEGLTAVLDPGAQLPSRGQKEGERAPQGPFYKGISPIQTNGTKSRLFAECCGFFACSSSLQATGDVLSPEACPVAFILLVWNSQTPAGLQSLCTGRHPSLSARAQRAGPRASREEGTFWTERVGQERWLIRSGSSQNESQEDQGAGLISQAGLKADNRRESSTWANEVEDRRPQCTPALNLTPSHPHPPHSLTTFLRSVIGIQIPPGLVAAGGTVA

SEQ ID NO: 30720 - protein, 515 aa, Homo sapiens
MDKPRPGKTTFVIMVSPLPALLALTHSWDSQVRPAVLNPLPRHGKSFVAKQQGGERTADERGNTKREKGKRPTRAGRGAEPRERKKKTDPGKRTRARETRRKKRSPSRDTNQRDRPRRGGPPEPPEKREAQGNQQTPEVERKKREQATADKAQRKQNRTGAPRERRETRKRVGAQRGEGDVPAPRLSRELLEVVAPEVLQDSLDRCYSTPSSCLEQPDSCQPYGSSFSALEEKHVGFSLDVGEYEECKDLIKFMLRNERQFKEEKLAEQLKQAEELRLSRELLEVVEPEVLQDSLDRCYSTPSSCLEQPDSCQPYGSSFYALEENHVGFSLDVGVPGPTSSATNVSMVVSAGPLSSEKAEMNILEINEKLRPQLAEKKQQFRNLKEKCFLTQLSGFLANQQKKYSPACGNDVSRVSKGHLEQEYHPYLEDHVEAYHLHNNEKDEDEDVQVEEAEKVLESSAPREVQKAEESKVPEDSLEECAITCSNSHGPCDSNQPHKNIKITFEEDEVNWGSF

SEQ ID NO: 30721 - protein, 174 aa, Homo sapiens
MDKPRPGKTTFVIMVSPLPGHGNSFVAKQQVAKQQPLRCLIYIEVALSVMSPTVPCPVPVCLSATQPTNLLPEPSTTACPVAFILLVWNSQTPAGLQSLCTGRHPSLSARAQRAGPRASREEGTFWTERVGQERWLIRSGSSQNESQEDQGAGLISQAGLKADNRRESSTWANE

SEQ ID NO: 30722 - protein, 802 aa, Homo sapiens
  misc_feature (1)...(802): Xaa = X or * as defined in Table 2
XAHRSHLSEGNLEITARRQWKHIYDELGGNPGSTSAATCTRRHYERSVEKVRSYILATNSDIYGGRLILPYERFIKGEEDKPLPPIKPRKQENSSQENENKTKVSGTKRIKHEIPKSKKEKENAPKPQDAAEVSSEQEKEQETLISQKSIPEPLPAADMKKKIEGYQEFSAKPLASRVDPEKDNETDQGSNSEKVAEEAGEKGPTPPLPSAPLAPEKDSALVPGASKQPLTSPSALVDSKQESKLCCFTESPESEPQEASFPSFPTTQPPLANQNETEDDKLPAMADYIANCTVKVDQLGSDDIHNALKQTPKVLVVQSFDMFKDKDLTGPMNENHGLNYTPLLYSRGNPGIMSPLAKKKLLSQVSGASLSSSYPYGSPPPLISKKKLIARDDLCSSLSQTHHGQSTDHMAVSRPSVIQHVQSFRSKPSEERKTINDIFKHEKLSRSDPHRCSFSKHHLNPLADSYVLKQEIQEGKDKLLEKRALPHSHMPSFLADFYSSPHLHSLYRHTEHHLHNEQTSKYPSRDMYRESENSSFPSHRHQEKLHVNYLTSLHLQDKKSAAAEAPTDDQPTDLSLPKNPHKPTGKVLGLAHSTTGPQESKGISQFQVLGSQSRDCHPKACRVSPMTMSGPKKYPESLSRSGKPHHVRLENFRKMEGMVHPILHRKMSPQNIGAARPIKRSLEDLDLVIAGKKARAVSPLDPSKEVSGKEKASEQESEGSKAAHVLEKPDCAFSTHAAPGFPLACDAKRNFYITDKFSAAVQTLGCGYTSVIRAPQYKTVGSALPSSPKRHGPPSFTPYPGX

SEQ ID NO: 30723 - protein, 160 aa, Homo sapiens
MQPRGLELCLGSSFHQSEYQIYIVRFPGGVGALDSAIIVNKNLAARLLCMISIERGAWGLEMARGHLASGEMNRRKELPAPNLKGRPRKKKPCPQRRDSFSGVKDSNNNSDGKAVAKLGRLRWLISLLPSYEPCMSQGPNHAAAFSCMTPGPAGPQECVL

SEQ ID NO: 30724 - protein, 83 aa, Homo sapiens
MARGHLASGEMNRRKELPAPNLKGRPRKKKPCPQRRDSFSGVKDSNNNSDGKAVAKGKYTTSDEAQPQDAYQDIASDRASNTF

SEQ ID NO: 30725 - protein, 126 aa, Homo sapiens
MQPTAQYSGGSSTISLNSNQALANPVSTHTILTPNSSLLSTSHGTRMPSLSTAVQNMGMYGNLPCNQPNTYSVTSGMNQLTQQRNPKQLLANQNNPMMPRPPTLGPSNNNNVATFGAGSVGNSQQL

SEQ ID NO: 30726 - protein, 38 aa, Homo sapiens
MMKLEPGLPVRVSYLPQPCPPLKATWRLGGCPSSYLLC

SEQ ID NO: 30727 - protein, 71 aa, Homo sapiens
  misc_feature (1)...(71): Xaa = X or * as defined in Table 2
MMPCDETAQLRTNSPRFRRLLFIIEEGVILMKTCGWRVAVPGEGCSDSRYGNRVLSRTVVVADGEEMSLQX

SEQ ID NO: 30728 - protein, 117 aa, Homo sapiens
MESFLTSMGKFMKLIPDHRPKDLESIIRPKCQVIYFPIRFPDVSRDMDEAGNYRSQQTNTGTENQTLHVLTHKWKLNNENTWTQEGEHHILGPAGGTQKVREFRVKGNTDIGAVGLE

SEQ ID NO: 30729 - protein, 212 aa, Homo sapiens
MSILIIEAFYGGSHKQLVDLLQEELGDCVVYTLPAKKWHWRARTSALYFSQTIPISEHYRTLFASSVLNLTEQWHALRPDLGKLKKILYFHENQLIYPVKKCQERDFQYGYNQILSCLVADVVVFNSVFNMESFLTSMGKFMKLIPDHRPKDLESIIRPKCQVIYFPIRFPDVSRFMPKHKTTHLKKMLGLKGNGVAVLSMALPFQPEHRDS

SEQ ID NO: 30730 - protein, 214 aa, Homo sapiens
  misc_feature (1)...(214): Xaa = X or * as defined in Table 2
XFNQGGCRSSTCGASTREALSDSDGGCCASSRVAAPPAPLLPSRTGPEFELEIGRENHVVEAEAKKSRAEAAIKAHTSLVPLLSGSHKGIQQAQALDEGRLRLLRRMPFGVFLYVPLGAHLHTLLWYISRRGIVGKKSFVQRRNSGQWEAPSVLEKEALNCLPVHPNQEGMLEQGAATDGPKPVILKTGSSERQFKLLGTWKPVRNEHLQSQKC

SEQ ID NO: 30731 - protein, 185 aa, Homo sapiens
MPVRKPLWVTLGFVQEGQLEGHRAAGVAGFPWPWGNHREPQEKHPPELGNFQREVPTFVGGWRRGSEEPTQTSTGEGIGPERLSGTESKKETGDSDSSILSALSCLPVTPYETSNPQASETMGRPPESISARDSHSPVSRTPPFCCQLNRRSKETESLALPYFPSQARGHDHSLNIPQLEARTEY

SEQ ID NO: 30732 - protein, 109 aa, Homo sapiens
  DOMAIN (76)..(91): Ubiquitin carboxyl-terminal hydrolases family 2 proteins domain identified by eMATRIX, accession number BL00972C, p-value= 8.200e-11, raw score of 16.48
  misc_feature (1)...(109): Xaa = X or * as defined in Table 2
MPTEGDDSSKSVPLALQRVFYELQHSDKPVGTKKLTKSFGWETLDSFMQHDVQELCRVLLDNVENKMKGTCVEGTIPKLFRGKMVSYIQCKEVDYRSDRREDYYDIQLX

SEQ ID NO: 30733 - protein, 247 aa, Homo sapiens
MLREATGSAPGAAKEHGAGATGRGGQAPLSVYGKSRIVPVLPRSKHLLIFALDMLKLVIDVMSASVPASSVTQASTGKEISRGSRTDSTGQEWSALVTMMATEKKESIIIADCAVIFGVNIVPHVGGGSPGCLRRSEPSRSEMEQVKAPVLVNSGWCLGLKLILPEVCLTLEHYPFPVGPCCGTLSYGDIQTSLKGPEQTDSLLLYAGYRHHFASESSGYGALYTGPFTFFSTLSSNTPQSCEHRVA

SEQ ID NO: 30734 - protein, 265 aa, Homo sapiens
MALKYVYFKDIVLWPCWEEHIGGKKNECGADRYEAVTTTKEEMMVPWNRTSGVSVYLWGRDVNRAMKLEVKTGGIDSGARVTVSHLRVSTATSLAVISEAPLRPELASTPEPPGDFGVEAPAPWPPGWVRVYSGCRKSLGDAHEWLGAPHGLRSLPGMKESSHAESHAQTGPEDACGFPPNGHSTVNTKGKRNKHTNKNGQKDNPLGDGFSVRCFAFLVWVFLSRPDGTIVNSFRENAQVPQQVGYSFDFGKSKQEDIQPPFKLL

SEQ ID NO: 30735 - protein, 229 aa, Homo sapiens
  misc_feature (1)...(229): Xaa = X or * as defined in Table 2
MNADSKGSGTVLAEPYEVDAITSPFFTGKEGQRGNVTGLRWHSKHLVTFTVHTDTSTAHSNCVEDAPMETVYPALTARVGQELTSPEVIKATLALTQVQQSSSEGFLKTVLLQVSWFSLCAPRSSSSLPWNLAPPQTRCSGGGGGFPTRDSSESGEKNSTAATGFRGGLAGKTEDQEGLGFSQNQGSEFKYGGPFLSLRHIRDNGGVRSGWLGYVRASAFLTHPKQKAX

SEQ ID NO: 30736 - protein, 106 aa, Homo sapiens
MLEEFAYLRTQEGGKIHLELLPNQGMLIKPSSPPMGLLQQEFLPVLQPSIQTADRHHTVTRGITKGVKEDFRLAMERQVSRCGENLMVVLHRFCINEKILLLQTLT

SEQ ID NO: 30737 - protein, 60 aa, Homo sapiens
MESAVSGVAMGKLLNCQDPISLSERTGTFFSGMAMGKLLNCRDPISSSEKTSTFFYMWLT

SEQ ID NO: 30738 - protein, 335 aa, Homo sapiens
  DOMAIN (170)..(190): Early Protein (E6) domain identified by eMATRIX, accession number PF00518B, p-value=9.557e-09, raw score of 14.72
  misc_feature (1)...(335): Xaa = X or * as defined in Table 2
MRRLHSHGRHPPKRFPSTSLLNKRLLEKPVHKGEIIKRGRISEREGTPELTLCTITPTSPRSFRVNRSPGSDLEAVQLLWLLRRGGDRATCAVASPAVAAAAAAAVAAVAAESPEPDVPAASGWRLESARVMSAQGDCEFLVQRARELVPQDLWAAKAWLITARSLYPADFNIQVRSRLCMRPLCVEEGQRAMLDELGAFWAGYEMYTIERNAERTATAGRLLYDMFVNFPDQPVVWREISIITSALRNDSQDKQTQFLRSLFETLPGRVQCEMLLKVTEQCFNTLERSEMLLLLLRRFPETVVQHGVGLGEALLEAETIEEQESPVNCFRKLFX

SEQ ID NO: 30739 - protein, 129 aa, Homo sapiens
MSPSKRSSQKYIIEGLTEKSSQIVDPWERLFKILNVVGMRCEWQMDKGRRSYGDILHRMKDLCRYMNNFDSEAHAKYKNQVVYSTMLVFFKNAFQYVNSIQPSLFQGPNAPSQVPLGFFLKMYRMCMVM

SEQ ID NO: 30740 - protein, 169 aa, Homo sapiens
MNEELPLTDEQRKWLYKIETTPAEDAVNTVEMTTKDYKYYVNLIDTRTGFRGLTLALKEVLLWVKCDQTMVHTTEKSFMEGKLASQEMLKLISEKMKITEVRNLDQHKETGESDKKEMKENLGYTILDIGPGKDFKTKTPKAIATKAKIDKWDLIKLKISAQQKKLSKE

SEQ ID NO: 30741 - protein, 89 aa, Homo sapiens
FDVAIRQRPLRPNVASGRQPPGIGGIVDRDAERNPRPCGPGNIEIQDHRTPRKRKYSADVGLASKKYDESGPLHSSNRKLLLNDFSKMP

SEQ ID NO: 30742 - protein, 258 aa, Homo sapiens
  DOMAIN (7)..(42): Actins proteins domain identified by eMATRIX, accession number BL00406A, p-value=1.000e-40, raw score of 9.95
  DOMAIN (1)..(250): Actin domain identified by PFam, accession name actin, E- value=4.1e-110, PFam score of 362.6
MEEEIAALVIDNGSGMCKAGFAGDDAPRAVFPSIVGRPRHQGVMDSYVGDEAQSKRGILTLKYPIEHGIVTNWDDMEKDLAPHLLQRAARGPGGAPSAADRGPPEPQGQQREDDSELCLRPSTPPAMYKSYELPDGQVITIGNERFRCPEALFQPSFLGMESCGIHETTFNSIMKCDVDIRKDLYANTVLSGGTTMYPGIADRMQKEITALAPSTMKIKIIAPPGAQQDFGLSKQEYDESGPSIRPPQMLLKRTQQDA

SEQ ID NO: 30743 - protein, 88 aa, Homo sapiens
MAVILSTSYEPADLLVSVSRSLSSTTVLDSRAPSLCMRRQATTQIVSLYSPNRNSGERGLQALERMSMAGIIITAVVFVVTYLQVTLS

SEQ ID NO: 30744 - protein, 36 aa, Homo sapiens
MCFVKQMLEGSMLVKSHHHSLISSTQGQARHGGSRL

SEQ ID NO: 30745 - protein, 12 aa, Homo sapiens
MGGQAETPLTSH

SEQ ID NO: 30746 - protein, 1465 aa, Homo sapiens
  DOMAIN (622)..(674): ELEMENT TRANSPOSABLE INSERTION PROTEIN TRANSPOSITION DNA domain identified by eMATRIX, accession number PD02455C, p-value= 1.108e-13, raw score of 29.23
  DOMAIN (1)..(171): Reverse transcriptase domain identified by PFam, accession name rvt, E-value=4.6e-60, PFam score of 213.0
KKSGKWRMLTDLRAVNAVNAVIQPMGPLQPGLPSLAMIPKDWPLIIIDLKDCFFTIPLAEQDCEKFAFTIPAINNKEPATRFQWKVLPQGMLNSPTICQTFVGRALQPVREKFSDCYIIHYIDDILCAAETKDKLIDCYTFLQAEVANAGLAIASDKIQTSTPFHYLGMQIENRKIKPPKIEIRKDTLKTLNDFQKLLGDINWIRPTLGIPTYAMSNLFSILRGDSDLNSKRMLTPEATKEIKLVEEKIQSAQINRIDPLATLQLLIFATAHSPTGIIIQNTDLVEWSFLPHSTVKTFTLYLDQMATLIGQTRLRIIKLCGNDPDKIVVPLTKEQVRQAFINSGAWQIGLANFVGIIDNHYPKTKIFQFLKMTTWILPKITRREPLENALTVFTDGSSNGKAAYTGPKERVIKTQYQSAQRAELVAVITVLQDFDQPINIISDSAYVVQATRDVETALIKYSMDDQLNQLFNLLQQTVRKRNFPAGRGPLTKANEQADLLVSSALIKAQELHALTHVNVAGLKNKFDVTWKQAKDIVQHCTQCQVLHLPTQEAGVNPRGLCPNALWQMDVTHVSSFGRLSYIHVTVDTYSHFIWATCQTGESTSHVKKHLLSCFAVMGVPEKIKTDNGPGYCSKAFQKFLSQWKISHTTGIPYNSQGQAIVERTNRTLKTQLVKQKEGGDSKECTTPQMQLNLALYTLNFLNIYRNQTTTSAEQHLTGKKNSPHEGKLIWWKDNKNKTWEIGKVITWGRGFACVSPGENQLPVWIPTRHLKFYNEPIGDAKKSTSAETETPQSSTVDSQDEQNGDVRRTDEVAIHQESRAADLGTTKEADAVSYKISREHKGDTNPREYAACSLDDCINGGAAAANYTYWAYVPFPPLIRAVTWMDNPIEVYVNDSVWVPGPTDDHCPAKPEEEGMMINISIGYRYPPICLGRAPGCLMPAVQNWLVEVPTVSPISRFTYHMVSGMSLRPRVNYLQDFSYQRSFKFRPKGKPCPKEIPKESKNTEVLVWEECVANSAVILQNNEFGTIIDWAPRGQFYHNCSGQTQSCPSAQVSPAVDSDLTESLDKHKHKKLQSFYPWEWGEKGISTPRPKIISPVSGPEHPELWRLTVASHHIRIWSGNQTLETRDRKPFYTVDLNSSLTVPLQSCIKPPYMLVVGNIVIKPDSQTITCENCRLLTCIDSTFNWQHRILLVRAREGVWIPVSMDRPWEASPSIHTLTEVLKGVLNRSKRFIFTLIAVIMGLIAVTATAAVAGVALHSSVQSVNFVNDWQKNSTRLWNSQSSIDQKLANQINDLRQTVIWMGDRLMSLEHRFQLQCDWNTSDFSITPQIYNESEHHWDMVRRHLQGREDNLTLDISKLKEQIFEASKAHLNLVPGTEAIAGVADGLANLNPVTWVKTIGSTTIINLILILVCLFCLLLVCRCTQQLRRDSDHRERAMMTMAVLSKRKGGNVGKSKRDQIVTVSV

SEQ ID NO: 30747 - protein, 1141 aa, Homo sapiens
  DOMAIN (608)..(660): ELEMENT TRANSPOSABLE INSERTION PROTEIN TRANSPOSITION DNA domain identified by eMATRIX, accession number PD02455C, p-value= 1.108e-13, raw score of 29.23
  DOMAIN (363)..(492): RNase H domain identified by PFam, accession name rnaseH, E- value=4.4e-53, PFam score of 189.8
MGPLQPGLPSPAMIPKDWPLIIIDLKDCFFTIPLAEQDCEKFAFTIPAINNKEPATRFQWKVLPQGMLNSPTICQTFVGRALQPVREKFSDCYIIHYIDDILCAAETKDKLIDCYTFLQAEVANAGLAIASDKIQTSTPFHYLGMQIENRKIKPQKIEIRKDTLKTLNDFQKLLGDINWIRPTLGIPTYAMSNLFSILRGDSDLNSQRILTPEATKEIKLVEEKIQSAQINRIDPLAPLQLLIFATAHSPTGIIIQNTDLVEWSFLPHSTVKTFTLYLDQIATLIGQTRLRITKLCGNDPDKIVVPLTKEQVRQAFINSGAWQIGLANFVGLIDNHYPKTKIFQFLKLTTWILPKITRREPLENALTVFTDGSSNGKAAYTGPKERVIKTPYQSAQRDELVAVITVLQDFDQPINIISDSAYVVQATRDVETALIKYSMDDQLNQLFNLLQQTVRKRNFPFYITYIRAHTNLPGPLTKANEQADLLVSSALIKAQELHALTHVNAAGLKNKFDVTWKQAKDIVQHCTQCQVLHLPTQEAGVNPRGLCPNALWQMDVTHVPSFGRLSYVHVTVDTYSHFIWATCQTGESTSHVKKHLLSCFAVMGVPEKIKTDNGPGYCSKAFQKFLSQWKISHTTGIPYNSQGQAIVERTNRTLKTQLVKQKEGGDSKECTTPQMQLNLALYTLNFLNIYRNQTTTSAEQHLTGKKNSPHEGKLIWWKDNKNKTWEIGKVITWGRGFACVSPGENQLPVWLPTRHLKFYNEPIGDAKKRASTEMVTPVTWMDNPIEVYVNDSIWVPGPIDDRCPAKPEEEGMMINISIGYRYPPICLGRAPGCLMPAVQNWLVEVPTVSPISRFTYHMVSGMSLRPRVNYLQDFSYQRSLKFRPKGKPCPKEIPKESKNTEVLVWEECVANSAVILMGLIAVTATAAVAGVALHSSVQSVNFVNDWQKNSTRLWNSQSSIDQKLANQINDLRQTVIWMGDRLMSLEHRFQLQCDWNTSDFCITPQIYNESEHHWDMVRRHLQGREDNLTLDISKLKEQIFEASKAHLNLVPGTEAIAGVADGLANLNPVTWVKTIGSTSIINLILILVCLFCLLLVCRCTQQLRRDSDHRERAMMTMAVLSKRKGGNVGKSKRDQIVTVSV

SEQ ID NO: 30748 - protein, 25 aa, Homo sapiens
MQMTPHSHAFPYFPLLLPLAFTDLR

SEQ ID NO: 30749 - protein, 253 aa, Homo sapiens
MTLNEHAAFKHLFNKANLVPPLIRLTLSGHSTCFREHGVGPTDGVVRNGKSTAGHQRYLCSHCRKTWQLQFTYTASQPGTHQKIIDMAMNGVGCRATARIMGVGLNTILRHLKNSGRSRRAVTSSSARKWTNSGAMSGLNRASWLFYAYDSLRKTVVAHVFGERTMATLGRLMSLLSPFDVVIWMTDGWPLYESRLKGKLHVISKRYTQRIERHNLNLRQHLARLGRKSLSFSKSVELHDKVIGHYLNIKHYQ

SEQ ID NO: 30750 - protein, 527 aa, Homo sapiens
  DOMAIN (355)..(398): 1 kw MIND INHIBITOR DIVISION CONTROL domain identified by eMATRIX, accession number DM01756B, p-value=4.822e-15, raw score of 22.91
  DOMAIN (320)..(434): ParA family ATPase domain identified by PFam, accession name ParA, E-value=2.7e-28, PFam score of 107.5
MVDSLIARVGVMARGNAITLPVCGRDVKFTLEVLRGDSVEKTSRVWSGNERDQELLTEDALDDLIPSFLLTGQQTPAFGRRVSGVIEIADGSRRRKAAALTESDYRVLVGELDDEQMAALSRLGNDYRPTSAYERGQRYASRLQNEFAGNISALADAENISRKIITRCINTAKLPKSVVALFSHPGELSARSEDPRFSVKTEPSHLRGRKQQQHPCPQQCPAVGDGALCAPKSEVVPAWPPPAGTGMDQSHHVWESILNPEARESFQNVLYSEIPSFRSFHEVRDDHVLNVTFTTRDDVTYAIKPTCWPGLDIIPSCLALHRIETELMGKFDEGKLPTDPHLMLRLAIETVAHDYDVIVIDSAPNLGIGTINVVCAADVLIVPTPAELFDYTSALQFFDMLRDLLKNVDLKGFEPDVRILLTKYSNSNGSQSPWMEEQIPDAWGSMVLKNVVRETDEVGKGQIRMRTVFDRPMINALQLGPGNCLRSEVRSVSASLPIIWDVRSPSARPPSMGSEERLFPAVIPSRK

SEQ ID NO: 30751 - protein, 900 aa, Homo sapiens
  DOMAIN (769)..(788): Cell cycle proteins ftsW / rodA / spoVE proteins domain identified by eMATRIX, accession number BL00428A, p-value=5.125e- 12, raw score of 14.30
  DOMAIN (327)..(544): Mur ligase family domain identified by PFam, accession name Mur_ligase, E-value=5.6e-23, PFam score of 89.8
MTLNEHAAFKHLFNKAHLAPPLIHLTLSGHSTCFREHRVGDTPQTERRKTRTKRKSHRQTTKTQTRKKQTNKKQTQNKTTGQTQREPQEERTKTTPHNSKEHRNRKAKGHEALTDSTKDGEAEKTERGRTSRHTGTACVTSRTGNAGQADTGDRERERADDERPNEQKTAEPKEGAKAPQAYPNQAVRAETEAVCLGEREKEVCRQLCLGSYYQHPPPLPATHNKSQYWVQLQTVKHKEKFLPYEGREKTGDSKERNFRFACNRFRQQRFTGTRRTDHQDAFRDLTAEFLEAARLAQILNQFSNFFFCFVAARNVSKGRFDLIFRQHARFALTKRHGTFATAALHLTHEEDPDTNQQQHREPGDEDRSQQAWFFRRFTDNLDVLGQQVTNEICGSSDILNVTEDHMDRYPFGLQQYRAAKLRIYENAKVCVVNADDALTMPIRGADERCVSFGVNMGDYHLNHQQGETWLRVKGEKVLNVKEMKLSGQHNYTNALAALALADAAGLPRASSLKALTTFTGLPHRFEVVLEHNGVRWINDSKATNVGSTEAALNGLHLGGDGKSADFSPLARYLNGDNVRLYCFGRDGAQLAALRPEVAEQTETMEQAMRLLAPRVQPGDMVLLSPACASLDQFKNFEQRGNEFARLAKELGFSILVWISTALKGWVMGSREKDTDSLIMYDRTLLWLTFGLAAIGFIMVTSASMPIGQRLTNDPFFFAKRDGVYLILAFILAIITLRLPMEFWQRYSATMLLGSIILLMIVLVVGSSVKGASRWIDLGLLRIQPARLQAVRYQIYVGTDEPVSTKNTKISQTCRQHKSRRLPFPTLGVPLLFAVFGHVSPSTKLRDFLGNLGFAWTGEYPGTHVSDFTHRVLCFSDGAVEFLFNDIASVLQDKKSYRDGW

SEQ ID NO: 30752 - protein, 162 aa, Homo sapiens
MTLNEHAAFKHLFNKAHLAPPLIHLTLSGHNTCFGEYRVGGKLRLDEAQEAECQVLKMQLQQELELLNAYQSKIKMQAEAQHDRELRELEQRVSLRRALLEQKKLSASEPGGYCGLPYCYLEVPLALALKGDPMAGVHLALDGPKLVVGHPWDDPSEVLDPQ

SEQ ID NO: 30753 - protein, 84 aa, Homo sapiens
  misc_feature (1)...(84): Xaa = X or * as defined in Table 2
XLVSITIFKEEAFSIHWTLTIVPDSRVNQVWSQAECYGTLHVSPPCIHILLCAGTPGNFHTATESIPGSPNPVLSETCAVSTQG

SEQ ID NO: 30754 - protein, 1349 aa, Homo sapiens
  DOMAIN (280)..(311): Protein kinases ATP-binding region proteins domain identified by eMATRIX, accession number BL00107A, p-value=2.227e-15, raw score of 18.39
  DOMAIN (286)..(1081): Eukaryotic protein kinase domain identified by PFam, accession name pkinase, E-value=2.3e-17, PFam score of 66.6
MSQRVRRNGSPTPAGSLGGGAVATAGGPGSRLQPMRATVPFQLKQQQQQQHGSPTRTRTAAAATTTVAAVVAPQAPQAAAAAVAAHLLAQTSPTRGGGNATRAPAPRWANAERARPRRPREAPAPRAAPRLELAGAPTAAAAAAAAGHRVVAQLVAHPPVDRRGERGPTPSPRPASEEVSGAEPKLAGEEEPQRPGLQSRQRKLWQRGSDAEKLSGELFIETAGVLHTGCEWKWYWIVTAEKQFIDCSTLDLNGFPGSEPSIMNSLLGNLLYTGSKKFSDHYKPAISHRDLNSRNVLVKNDGTCVISDFGLSMRLTGNRLVRPGEEDNAAISEVGTIRYMAPEVLEGAVNLRDCESALKQVDMYALGLIYWEIFMRCTDLFPGEGSVHRAKAPLGTKETRVQGLLCLRAPCLRTEGDCAPCSRGRCGAGGVCFNPSGQAALVLKKGHREGDFSPTIIAVYIARLFLWGVGTGVPMDGQCRAIRGGCTPTGSVPTTPGPACMKSRAPLPLYMEQQFSCSRDQRSHKVVCVQLREEVPTGSRFSGGLWDRHFCGPQLYCSLETNDIAYFRVTKPRDRGVIGRQMAFLLGQDIELVQPSLPVMETSALFTTSPRPASSGFVLPLSLGYPKVSLAVQLHPASSSFPGRTQGTQHSTDQSTHRSAHRLRQQTAPPSKQRLSTHTPWASGSYPYSPPAGLETELHNPIQNLLTEVHSAMNQHLFNKAHLAPPLIHLTLSGHSTCFREHRVGAAGVPMRHRPPGNGNGRDPPRARPNHPALQRSRHAQAHGEDQSPQPARGPHDPEDPEAQLGRGKHARAPLERSEGGDTRTGARQEGVAGWTEKLKGKLEEVEKRRQLPATWRVEVKVKPEPEGGERCREPCTQRWTAERTQEAESGEKRKGKGRGGRRGVEERERQPTEWEKIFANYTSDKGMKPQILALSVTALTDGVRSLFPQMFRCVRSFLPLWVCGLADCRHEAVSITAHKGSADPKSEQQHNLLPRAKQETLHRVEGHWRESVPEYQMAFQTEVGNHPTFEDMQVLVSREKQRPKFPEAWKENSLAVRSLKETIEDCWDQDAEARLTAQCAEERMAELMMIWERNKSVSPTVNPMSTAMQNERKMYVWKKMKNNSDFKIRGVKFGETVCHKYPSEESLSKSADPANPESTCLVSLKPTPAFKPPVSPPGGVVFRLTRKRPVELQRNISVSIDARLTAPVNETLSALTLSSDGNACVNEQLSSCFSRLRHKFDCGKLSTRSSSRNAVCRCPDRVSHVRVIQLQTPVFRGLNNGSGLDVSAWVCTVIAQSGASPAANVACFTGTLVDISNNRDLTRLRAALFRQQSVGYQTLALVMSEIGD

SEQ ID NO: 30755 - protein, 699 aa, Homo sapiens
MNPSEMQRKAPPRRRRHRNRAPLTHKMNKMVTSEEQMKLPSTKKAEPPTWAQLKKLTQLATKYLENTKVTQTPESMLLAALMIVSMVVSLPMPAGAAAANYTNWAYVPFPPLIRAVTWMDNPIEVYVNDSVWVPGPIDDRCPAKPEEEGMMINISIGYRYPPICLGRAPGCLMPAVQNWLVEVPTVSPISRFTYHMVSGMSLRPRVNYLQDFSYQRSFKFRPKGKPCPKEIPKESKNTEVLVWEECVANSAVILQNNEFGTIIDWAPRGQFYHNCSGQTQSCPSAQVSPAVDSDLTESLDKHKHKKLQSFYPWEWGEKGISTPRPKIISPVSGPEHPELWRLTVASHHIRIWSGNQTLETRDRKPFYTVDLNSSLTVPLQSCIKPPYMLVVGNIVIKPDSQTITCENCRLLTCIDSTFNWQHRILLVRAREGVWIPVSMDRPWEASPSIHTLTEVLKGVLNRSKRFIFTLIAVIMGLIAVTATAAVAGVALHSSVQSVNFVNDWQKNSTRLWNSQSSIDQKLANQINDLRQTVIWMGDRLMSLEHRFQLQCDWNTSDFSITPQIYNESEHHWDMVRRHLQGREDNLTLDISKLKEQIFEASKAHLNLVPGTEAIAGVADGLANLNPVTWVKTIGSTTIINLILILVCLFCLLLVCRCTQQLRRDSDHRERAMMTMAVLSKRKGGNVGKSKRDQIVTVSV

SEQ ID NO: 30756 - protein, 707 aa, Homo sapiens
MAAGQRRSSLSRLGSQAEGLLTSQTMGGQAETLLTSQTGNQTPTVWPGTPSVRTCMLCFSGGGYLNIKASTFPMHRQKLQGFVVGYNGSKIFCLHVFSISAVEVPQQVQVLAIHHMLSCDMPECPPHSRGSQRGKELCGLGKEHRLSVLTLPFKHLLSKGPIEGTVLGSVGDAKMRKMSIMKTPNRPNIIQLYQVIDQPETTYMMIHDNNNSMRLSVNNCSRPPGIFKASLHSHRGTQALTTQKKSPAKSPTAATTETRVMRKISHGTRDPPGFASLTAVDALWEVVCIPVRAAVPEPAEVTLDPELVAVLAPLEVVLDSELVAVLAPLDTVLDSELVAVLAPLEVVLDSEVVAVLAPLDTVLDSELVAVLVPLEVVLDPELVAVLAPLEVVLDSELVAVLAPLEVVLDSELVAVLAPLEVVLESELVAVLAPLEVVLDSELVAVLAPLEELVAVPAPLEVVLDSELVAVPAPLEGVLDSELVAVLAPLEVVLDSELVAVPAPLEVVLDSELVAVLAPLEVVLDSELVAVLALLDTVLDSELVAVLAPLEVVLDSELVAVLASLEVVLESELVAVLAPLEVVLESELVAVLAPLEGVLDSELVAVLAPLEVVLDSELVAMLIPLDAVLNSELVAVLIPLEVVWNSELVTMLTPLEVTLDPEMVAVLTPLEVTLDPELVAVLAPLEITLDPVLAEVLVSLEFVAEEII

SEQ ID NO: 30757 - protein, 213 aa, Homo sapiens
MTLKEHAAFKHLFNKAHLAPPLIHSTLSGYSTCFREHRVGAHNNDNMDSYNMDHNKMTHTDLYLLWHYLCIEKALSKETAPQLSELSYPKEDLLEPQEQLPPPPLPPPVSQVDAAIGLLMPPLQTPVNLSVFCDHNYTVEDTMHQRKRIHQLEQQVEKLRKKLKTAQQRCRRQERQLEKLKEVVHFQKEKDDVSERGYVILPNDYFEIVEVPA

SEQ ID NO: 30758 - protein, 1212 aa, Homo sapiens
  DOMAIN (1052)..(1065): PROTEIN ZINC-FINGER METAL-BINDI domain identified by eMATRIX, accession number PD00066, p-value=4.000e-14, raw score of 13.92
  DOMAIN (138)..(1175): Zinc finger, C2H2 type domain identified by PFam, accession name zf-C2H2, E-value=2.7e-285, PFam score of 961.1
MTLNEHAAFKHLFNKAHLAPPLIHLTLSGHSTCFREHRVGGICPHFPQDFWPEQSMEDSFQKVLLRKYEKCGHENLQLRKGCKSVDECKVHKEGYNKLNQCLTTAQSKVFQCGKYLKVFYKFLNSNRHTIRHTGKKCFKCKKCVKSFCIRLHKTQHKCVYITEKSCKCKECEKTFHWSSTLTNHKEIHTEDKPYKCEECGKAFKQLSTLTTHKIICAKEKIYKCEECGKAFLWSSTLTRHKRIHTGEKPYKCEECGKAFSHSSTLAKHKRIHTGEKPYKCEECGKAFSRSSTLAKHKRIHTGEKPYKCKECGKAFSNSSTLANHKITHTEEKPYKCKECDKAFKRLSTLTKHKIIHAGEKLYKCEECGKAFNRSSNLTIHKFIHTGEKPYKCEECGKAFNWSSSLTKHKRFHTREKPFKCKECGKAFIWSSTLTRHKRIHTGEKPYKCEECGKAFRQSSTLTKHKIIHTGEKPYKFEECGKAFRQSLTLNKHKIIHSREKPYKCKECGKAFKQFSTLTTHKIIHAGKKLYKCEECGKAFNHSSSLSTHKIIHTGEKSYKCEECGKAFLWSSTLRRHKRIHTGEKPYKCEECGKAFSHSSALAKHKRIHTGEKPYKCKECGKAFSNSSTLANHKITHTEEKPYKCKECDKTFKRLSTLTKHKIIHAGEKLYKCEECGKAFNRSSNLTIHKFIHTGEKPYKCEECGKAFNWSSSLTKHKRIHTREKPFKCKECGKAFIWSSTLTRHKRIHTGEKPYKCEECGKAFSRSSTLTKHKTIHTGEKPYKCKECGKAFKHSSALAKHKIIHAGEKLYKCEECGKAFNQSSNLTTHKIIHTKEKPSKSEECDKAFIWSSTLTEHKRIHTREKTYKCEECGKAFSQPSHLTTHKRMHTGEKPYKCEECGKAFSQSSTLTTHKIIHTGEKPYKCEECGKAFRKSSTLTEHKIIHTGEKPYKCEECGKAFSQSSTLTRHTRMHTGEKPYKCEECGKAFNRSSKLTTHKIIHTGEKPYKCEECGKAFISSSTLNGHKRIHTREKPYKCEECGKAFSQSSTLTRHKRLHTGEKPYKCGECGKAFKESSALTKHKIIHTGEKPYKCEKCGKAFNQSSILTNHKKIHTITPKIHTREKPYKYKECGKSFNRSSTFTKHKVIHTGVKLYKCEECGKSFFWSSALTRHKKIHTGQQPYKQEKFGKAFNQFSHLTTDKITHIGEKSYKCE

SEQ ID NO: 30759 - protein, 107 aa, Homo sapiens
  misc_feature (1)...(107): Xaa = X or * as defined in Table 2
XRGHGPAGDLLEPLTVSLEKSEVAPGGGMGIELEGETGAEAVKSFTYLEIQINTDANKRAPKSLGTGLVGITTETWGAVVRGELAQMSEMHKLAYAQSTSNTPAAGI

SEQ ID NO: 30760 - protein, 1074 aa, Homo sapiens
  DOMAIN (916)..(936): Orn/DAP/Arg decarboxylases family 2 pyridoxal-P attachment si domain identified by eMATRIX, accession number BL00878C, p-value= 8.435e-15, raw score of 17.74
  DOMAIN (777)..(1025): Pyridoxal-dependent decarboxylase domain identified by PFam, accession name Orn_DAP_Arg_deC, E-value=9.6e-84, PFam score of 282.8
MLRSLRLQQEWLEWEDRRRAAAQQCRSRRCPSSPRARLTRPHRSCRDPAVHQALFSGNLQQVQALFQDEEAANMIVETVSNQLAWSAEQGFWVLTPKTKQTAPLAIATARGYTDCARHLIRQGAELDARVGGRAALHEACARAQFDCVRLLLTFGAKANVLTEEGTTPLHLCTIPESLQCAKLLLEAGATVNLAAGESQETPLHVAAARGLEQHVALYLEHGADVGLRTSQGETALNTACAGAEGPGSCRRHQAAARRLLEAGADARAAGRKRHTPLHNACANGCGGLAELLLRYGARAEVPNGAGHTPMDCALQAVQDSPNWEPEVLFAALLDYGAQPVRPEMLKHCANFPRALEVLLNAYPCVPSCETWVEAVLPELWKEHEAFYSSALCMVNQPRQLQHLARLAVRARLGSRCRQGATRLPLPPLLRDYLLLHMKRSRCRDRPQPPPPDRREDGVQRAAELSQSLPPRRRAPPGRQRLEERTGPAGPEGKEQPPALASQSAEIAASARLPPRLGRLLGFQKACRCWSLNPHILMALLRSLVPPDKKHPQVWRGRPPLHLAPNVGLFSRVKVRSSVVIEDKSMRDSRRGLSQRRRRRKKKKRGSSSKKKKRRKKRKKKKRKKRKRRKNRKKKKKRKNKRKKKRKKEEKKEEEEERRKKEEEDEEGRGRGRRKRKRKKRKKRRSRKKKETAAAAAAGERLGKWWPGECPVECVAYFLRRRLQQRLHPARQLLLQGMAGYLSESDFVMVEEGFSTRDLLKELTLGASQATTDEVAAFFVADLGAIVRKHFCFLKCLPRVRPFYAVKCNSSPGVLKVLAQLGLGFSCANKAEMELVQHIGIPASKIICANPCKQIAQIKYAAKHGIQLLSFDNEMELAKVVKSHPSANFHIGSGCPDPQAYAQSIADARLVFEMGTELGHKMHVLDLGGGFPGTEGAKVRFEEIASVINSALDLYFPEGCGVDIFAELGRYYVTSAFTVAVSIIAKKEVLLDQPGREEENGSTSKTIVYHLDEGVYGIFNSVLFDNICPTPILQKYSSSCCMLALTHSTPFIGSSEEEMMVPAHCHAPHRDLCFG

SEQ ID NO: 30761 - protein, 2383 aa, Homo sapiens
  DOMAIN (1101)..(1112): PROTEASE POLYPROTEIN HYDROLASE ASP domain identified by eMATRIX, accession number PD00302A, p-value=4.484e-11, raw score of 6.33
  DOMAIN (668)..(882): gag gene protein p24 domain identified by PFam, accession name gag_p24, E-value=7.9e-104, PFam score of 358.3
MTLNEHAAFKHLFNKAHLVSPLIHLTLSGHSTCFRDHRVGGQDFILLRLWSQGHQESKTASASLSFQFSEAILCPLLGTKAPKGAEPRARNEPAAYSLPQVKQQRHLRQLQQQQEVHHTTSVDEIPQKAKTILFSHPRAKFLNLAVCSRVHPYLHFLETESLSMLPETNPSGSCYPTPRHIQITIYEDVLCSRDFDLIVHGFGLGFKMSRNFAGDSSLQTTFSKHCGRGSHTPTETWSHINRKRYCFLSVGMAESSSCCISQHANKGTQGHILELRKTGKQQMALILFHPRASADGLERQGDTLGSRMEMEGLGRKPSIKNIAPHSSSAKGQTASSSGSLTPVPPDWETTPSRGQQKPHTEELRLASGKDLTVPQPNTRKGVKVRSSVVIEDKSTRDPEYVYSQPYEQGTLDLKDWKRIGKELKQAGRKGNIIPLTVWNDWAIIKAALEPFQTEEDSVSVSDAPGSCLIDCNEKTRKKSQKETESLHCEYVAEPVMAQSTQNVDYNQLQEVIYPETLKLEGKGPELVGPSESKPRGTSPLPAGQVPVTLQPQKQVKENKTQPPVAYQYWPPAELQYRPPPESQYGYPGMPPAPQGRAPYPQPPTRRLNPTAPPSRQGSELHEIIDKSRKEGDTEAWQFPVTLEPMPPGEGAQEGEPPTVEARYKSFSIKMLKDMKEGVKQYGPNSPYMRTLLDSIAYGHRLIPYDWEILAKSSLSPSQFLQFKTWWIDGVQEQVRRNRAANPPVNIDADQLLGIGQNWSTISQQALMQNEAIEQVRAICLRAWEKIQDPGSACPSFNTVRQGSKEPYPDFVARLQDVAQKSIADEKARKVIVELMAYENANPECQSAIKPLKGKVPAGSDVISEYVKACDGIGGAMHKAMLMAQAITGVVLGGQVRTFGGKCYNCGQIGHLKKNCPVLNKQNITIQATTTGFSGTTTPTVPSVSGNKPVTTIQQLSLTTSGSAAVDLCTIQAVSLLPGEPPQKIPTGVYGPLPEGTVGLILGRSSLNLKGVQIHTSVVDSDYKGEIQLVISSSIPWSASPRDRIAQLLLLPYIKGGNSEIKRIGGLVSTDPTGKAAYWASQVSENRPVCKAIIQGKQFEGLVDTGADVSIIALNQWPKNWLKQKAVTGLVGIGTASEVYQSMEILHCLGPDNQESTVQPMITSIPLNLWGRDLLQQWEKPVWVNQWPLPKQKLEALHLLANEQLEKGHIEPSFSPWNSPVFVIQKKSGKWHTLTDLRAVNAVIQPMGPLQPGLPSPAMIPKDWPLIIIDLKDCFFTIPLAEQDCEKFAFTIPAINNKEPATRFQWKVLPQGMLNSPTICQTFVGRALQPVREKFSDCYIIHYIDDILCAAETKDKLIDCYTFLQAEVANAGLAIASDKIQTSTPFHYLGMQIENRKIKPQKIEIRKDTLKTLNDFQKLLGDINWIRPTLGIPTYAMSNLFSILRGDSDLNSQRILTPEATKEIKLVEEKIQSAQINRIDPLAPLQLLIFATAHSPTGIIIQNTDLVEWSFLPHSTVKTFTLYLDQIATLIGQTRLRITKLCGNDPDKIVVPLTKEQVRQAFINSGAWQIGLANFVGLIDNHYPKTKIFQFLKLTTWILPKITRREPLENALTVFTDGSSNGKAAYTGPKERVIKTPYQSAQRAELVAVITVLQDFDQPINIISDSAYVVQATRDVETALIKYSMDDQLNQLFNLLQQTVRKRNFPFYITYIRAHTNLPGPLTKANEQADLLVSSALIKAQELHALTHVNAAGLKNKFDVTWKQAKDIVQHCTQCQVLHLPTQEAGVNPRGLCPNALWQMDVTHVPSFGRLSYVHVTVDTYSHFIWATCQTGESTSHVKKHLLSCFAVMGVPEKIKTDNGPGYCSKAFQKFLSQWKISHTTGIPYNSQGQAIVERTNRTLKTQLVKQKEGGDSKECTTPQMQLNLALYTLNFLNIYRNQTTTSAEQHLTGKKNSPHEGKLIWWKDNKNKTWEIGKVITWGRGFACVSPGENQLPVWLPTRHLKFYNEPIGDAKKRASTEMVTPVTWMDNPIEVYVNDSIWVPGPIDDRCPAKPEEEGMMINISIGYRYPPICLGRAPGCLMPAVQNWLVEVPTVSPISRFTYHMVSGMSLRPRVNYLQDFSYQRSLKFRPKGKPCPKEIPKESKNTEVLVWEECVANMIMGLIAVTATAAVAGVALHSSVQSVNFVNDWQKNSTRLWNSQSSIDQKLANQINDLRQTVIWMGDRLMSLEHRFQLQCDWNTSDFCITPQIYNESEHHWDMVRRHLQGREDNLTLDISKLKEQIFEASKAHLNLVPGTEAIAGVADGLANLNPVTWVKTIGSTTIINLILILVCLFCLLLVCRCTQQLRRDSDHRERAMMTMAVLSKRKGGNVGKSKRDQIVTVSV

SEQ ID NO: 30762 - protein, 191 aa, Homo sapiens
MSYFFPTQDTSNNLISLSFPPHCPPFLFDRTTIVIMALSSWSLSLWSCLVHLQKGCHFTLGRLHSGQAEALLTSQTGGGQAETLLTSQTGSRPGRGAPHIPDGAAGQRRSPHLRRWAAGQRRSSLPRRDGGREEALLTSQTGQLGRGAPHIPDDGRPGRDAPHFPEGVAAGQRLQSRHFGRPRQAAGRWRL

SEQ ID NO: 30763 - protein, 66 aa, Homo sapiens
MKWAAPPPRPFFFTTLFPRCARTEKKDGKWGGALRKRDKAEIALDCGNCSSDHCGALSAPEGLWEM

SEQ ID NO: 30764 - protein, 80 aa, Homo sapiens
MERNAPTGTSMPAGHRPGELSYTEFSWGTEWPDSSGKPSHSIPFWLPPSAESYLRSIKPCTHSPSPGVIRFFQCTKISAV

SEQ ID NO: 30765 - protein, 69 aa, Homo sapiens
  misc_feature (1)...(69): Xaa = X or * as defined in Table 2
XDTPRRARYVPVKHSFVTNFSQLFGNITSAHQLNRFREVLAENDVLPWEIVYIFKQVLKDFLSSSDRGX

SEQ ID NO: 30766 - protein, 122 aa, Homo sapiens
MTDRYTIHSQLEHLQSKYIGTGHADTTKWEWLVNQHRDSYCSYMGHFDLLNYFAIAENESKARVRFNLMEKMLQPPQCGAPLPAFLRFANPLKYSCLQRTGSPWLLRLVLSAYRSACPGSPA

SEQ ID NO: 30767 - protein, 127 aa, Homo sapiens
MTDRYTIHSQLEHLQSKVHRHGPRRSPPSGSWLVKPTPATSYLLLHGATFDLSQTTFAIWEEMRSKAQTSAFNFDGKKMLSALVDPPKPKKAPRRTWRPPALNPTRIAGQPSPQAFFSGVLAQSLLK

SEQ ID NO: 30768 - protein, 198 aa, Homo sapiens
MHVQGKAAILGRHFSISSLLPGALLLLTVIKGHTHPEEKSPGAHEKAVTGEPKCLGALPYCDSGGKKATKKKDAGEMRSRIKDGVLVLKCISLQVGLASWIVSWLRTEATGYTFALLPPGTHHTEQTPSKHEQNGAELFCNCVSCFEDPCPCQVPGTQPGNRLSEEHQASSQADVTNSSAPKQPHPPPAPCKGVCSHC

SEQ ID NO: 30769 - protein, 534 aa, Homo sapiens
  DOMAIN (476)..(491): WILM'S TUMOUR PROTEIN SIGNATURE domain identified by eMATRIX, accession number PR00049D, p-value=1.071e-10, raw score of 0.00
MGARYVGPTERAEDEDFGLITNVTDHKFWDLNATEIDLRPKQFSQQDFIGVYAWNIDTLERIAGWNRRTWWRRTAPSTHQLRQRQLPARIPAKLDEGLPEGGPPPGHGYLLQVQPFASLISKAPLSTPRLLITRRKLARDVAWLGECDQGCLALLSSLDGRVSWSQDVTPARPGVEVRTFTRRSQYLPVQKIPRGVSLESPTSACQTCPISWPFYQQQLLEEEEEDLEGKEEGRGTTLKRKALRTCSPFTSVSGQGPEQLRGQAVPKLRVRIASDSGGPHGSGARPRSCFRMCGTSLLTSGSPGKGLLHQGCLWKQGPGLPKKDEDPGNGRTEGSPHGFKPRLETAVCQAVLAPLKPACGHDSAHSEHRSCGGCAATDSPAGGGGASGGTGPGPEGQSPAPALRSRITSALRTSTLPAPRAASPLGADAFLPALTEELIGARTLGTRSWTWVYLTTWFGALHHIAHYQPKQTALPGGSAPRPAPPAPVAPQADAAQKGSSQAQVTAHLAASRREGQPALKEPWAEETVTGTSDN

SEQ ID NO: 30770 - protein, 116 aa, Homo sapiens
  DOMAIN (58)..(112): Sir2 family domain identified by PFam, accession name SIR2, E -value=0.04, PFam score of 12.1
MGHLAPTLTLPGASGPLAALLQKHPEPFFALAKELILGSSSACGCSLQSSAVLSLFPAPTICHYFMRLLKDKGLSCAATRRYPGANSRAGTGGLGEAHGTFYTSHCVSASCGTNTR

SEQ ID NO: 30771 - protein, 178 aa, Homo sapiens
  DOMAIN (47)..(155): Sir2 family domain identified by PFam, accession name SIR2, E -value=5.8e-61, PFam score of 215.9
MDFLRNLFSQTLSLGSQKERLLDELTLEGVARYMQSERCRRVICLVGAGISTSAGIPDFRSPSTGLYDNLEKYHLPYPEAIFEISYFKKHPEPFFALAKELYPGQFKPTICHYFMRLLKDKGLLLRCYTQNIDTLERIAGLEQEDLVEAHGTLLHITLRQRQLPARIPAKLDEREDLL

SEQ ID NO: 30772 - protein, 289 aa, Homo sapiens
  DOMAIN (158)..(186): Heat shock hsp70 proteins family proteins domain identified by eMATRIX, accession number BL00297F, p-value=4.214e-10, raw score of 11.84
MRNRLGGALLEESKNHLHPSKIEPDLGQALWYNASTLGGQEEWPFQQIIKSSVNVVMELWISSLEAQRINDKLKKPEKAFTEKKDERFLGTVSEVHSPPQVLHVCPGGQQHRVEAKPVGISYVDMSLVHLFDKDLAMMYFIQHIILKERSADCTGSFWQAPSKAVNPDEAVAIGAAFREIEVTFDIDANGIVQFLLKIKAQDVSSRCNKLKEEISKIGSSWLEKTAKQEKILDGSILSSAGITEAVRNGNKKMDLSEKALEVLALGNKRKSKGGKTVIIAEILKPEDNI

SEQ ID NO: 30773 - protein, 560 aa, Homo sapiens
  DOMAIN (189)..(210): 70 KD HEAT SHOCK PROTEIN SIGNATURE domain identified by eMATRIX, accession number PR00301D, p-value=5.500e-27, raw score of 15.51
  DOMAIN (55)..(559): Hsp70 protein domain identified by PFam, accession name HSP70, E-value=0, PFam score of 1042.7
MISASRAAAARLVGAAASRGPTAARHQDSWNGLSHEAFRLVSRRDYASEAIKGAVVGIDLGTTNSCVAVMEGKQAKVLENAEGARTTPSVVAFTADGERLVGMPAKRQAVTNPNNTFYATKRLIGRRYDDPEVQKDIKNVPFKIVRASNGDAWVEAHGKLYSPSQIGAFVLMKMKETAENYLGHTAKNAVITVPAYFNDSQRQATKDAGQISGLNVLRVINEPTAAALAYGLDKSEDKVIAVYDLGGGTFDISILEIQKGVFEVKSTNGDTFLGGEDFDQALLRHIVKEFKRETGVDLTKDNMALQRVREAAEKAKCELSSSVQTDINLPYLTMDSSGPKHLNMKLTRAQFEGIVTDLIRRTIAPCQKAMQDAEVSKSDIGEVILVGGMTRMPKVQQTVQDLFGRAPSKAVNPDEAVAIGSCHSGRNTTIPTKKSQVFSTAADGQTQVEIKVCQGEREMAGDNKLLGQFTLIGIPPAPRGVPQIEVTFDIDANGIVHVSAKDKGTRQKYAEEDRRKKERVEAVNMAEGIIHDTETKMEEFKDPITLPDECNKLKGRRFPK

SEQ ID NO: 30774 - protein, 126 aa, Homo sapiens
MHWRTSGAPGSEAPSKGGQILNRTASCVQLVLPFRDCFKALINKTVQRKEDKSAREGTPARGGVALDSRLAEAVTANLSTRPAATVLKQPGKNSLPTGPFSLGLLDTSQCFLLSRPPGPPRLYEEG

SEQ ID NO: 30775 - protein, 103 aa, Homo sapiens
TVQRKEDKSAREGTPARGGVALDSRLAEATLRKPDHIRSQEFPVSVRPKAVTANLSTRPAATVLKQPGKNSLPTGPFSLGLLDTSQCFLLSGPPGPPRLYEEG

SEQ ID NO: 30776 - protein, 81 aa, Homo sapiens
  misc_feature (1)...(81): Xaa = X or * as defined in Table 2
MGPGPVGEALTERGAQIHGYACSFSPKLYVCKDGGDKVMHMEAKRALKTFTLNKGGKTEKVEERQTCSLCKGEIKLLSLQX

SEQ ID NO: 30777 - protein, 592 aa, Homo sapiens
  DOMAIN (38)..(80): IMP PHOSPHORIBOSYLAMINOIMIDAZOLE domain identified by eMATRIX, accession number PD02408B, p-value=1.000e-40, raw score of 13.46
  DOMAIN (135)..(462): AICARFT/IMPCHase bienzyme domain identified by PFam, accession name AICARFT_IMPCHas, E-value=4.2e-217, PFam score of 734.7
MAPGQLALFSVSDKTGLVEFARNLTALGLNLVASGGTAKALRDAGLAVRDVSELTGFPEMLGGRVKTLHPAVHAGILARNIPEDNADMARLDFNLIRVVACNLYPFVKTVASPGVTVEEAVEQIDIGGVTLLRAAAKNHARVTVVCEPEDYVVVSTEMQSSESKDTSLETRRQLALKAFTHTAQYDEAISDYFRKQYSKGVSQMPLRYGMNPHQTPAQLYTLQPKLPITVLNGAPGFINLCDALNAWQLVKELKEALGIPAAASFKHVSPAGAAVGIPLSEDEAKVCMVYDLYKTLTPISAAYARARGADRMSSFGDFVALSDVCDVPTAKIISREVSDGIIAPGYEEEALTILSKKKNGNYCVLQMDQSYKPDENEVRTLFGLHLSQKRNNGVVDKSLFSNVVTKNKDLPESALRDLIVATIAVKYTQSNSVCYAKNGQVIGIGAGQQSRIHCTRLAGDKANYWWLRHHPQVLSMKFKTGVKRAEISNAIDQYVTGTIGEDEDLIKWKALFEEVPELLTEAEKKEWVEKLTEVSISSDAFFPFRDNVDRAKRSGVAYIAAPSGSAADKVVIEACDELGIILAHTNLRLFHH

SEQ ID NO: 30778 - protein, 100 aa, Homo sapiens
  misc_feature (1)...(100): Xaa = X or * as defined in Table 2
MGRTPKVVPEVFTILKYSQLFGEEDADQEVSPAELTLKLPGCRVSPVPSRMLVVSGVLAVWACWLMLTSDERRLAASVALVPRHDVDMVKSVRALLMCPX

SEQ ID NO: 30779 - protein, 575 aa, Homo sapiens
  DOMAIN (300)..(339): Ubiquitin-activating enzyme proteins domain identified by eMATRIX, accession number BL00536F, p-value=4.797e-23, raw score of 13.65
  DOMAIN (280)..(426): Repeat in ubiquitin-activating (UBA) pro domain identified by PFam, accession name UBACT_repeat, E-value=2.3e-66, PFam score of 233.9
MALSRGLPRELAEAVAGGRVLVVGAGGIGCELLKNLVLTGFSHIDLIDLDTIDVSNLNRQFLFQKKHVGRSKAQVAKESVLQFYPKANIVAYHDSIMNPDYNVEFFRQFILVMNALDNRAARNHVNRMCLAADVPLIESGTAGYLGQVTTIKKGVTECYECHPKPTQRTFPGLYNSNGLNQLDMIQLNFLPSFFKGDIRYLLTMDKLWRKRKPSVPLDWADVQSQGEETNASDQQNEPQLGRKDQQVLDVKSYARLFSKSIETLRVHLAEKGDGAELIWDKDDPSAMDFVTSAANLRMHIFSMNMKSRFDIKSMAGNIIPAIATTNAVIAGLIVLEGLKILSGKIDQCRTIFLNKQPNPRKKLLVPCALDPPNPNCYVCASKPEVTVRLNVHKVTVLTLQDKIVKEKFAMVAPDVQIEDGKGTILISSEEGETEANNHKKLSEFGIRNGSRLQADDFLQDYTLLINILHSEDLGKDVEFEVVGDAPEKVGPKQAEDAAKSITNGSDDGAQPSTSTAQEQDDVLIVDSDEEDSSNNADVSEEERSRKRKLDEKENLSAKRSRIEQKEELDDVIALD

SEQ ID NO: 30780 - protein, 169 aa, Homo sapiens
MVVSNLAARHRRHVCSTCQPTHWPAWTSQVTRVTRHYHISQRRNNSSNGNICGAAFELSAIHLSKSWEHFSPGPDQLGTGAIFPDFRESSSDLNNVDSVSRKRVGNVCWMGKRGIYGAIWKRTNSSIEISAEGPDKPSVVSGLNSGPGHVWGPLLGLLLLPPLVLAGIF

SEQ ID NO: 30781 - protein, 355 aa, Homo sapiens
  DOMAIN (10)..(26): Extracellular proteins SCP/Tpx-1/Ag5/PR-1/Sc7 proteins domain identified by eMATRIX, accession number BL01009E, p-value=1.439e- 11, raw score of 13.50
  DOMAIN (12)..(24): SCP-like extracellular protein domain identified by PFam, accession name SCP, E-value=0.0015, PFam score of 16.7
LQGVEETNIELLVCNYEPPGNVKGKRPYQEGTPGSQCPSGYHCKNSLCEPIGSPEDAQDLPYLVTEAPSFRATEASDSMKMGTPSSLATGIPAFLVTEVSGSLATKALPAVETQAPTSLATKDPPSMATEAPPCVTTEVPSILAAHSLPSLDEEPVTFPKSTHVPIPKSADKVTDKTKVPSRSPENSLDPKMSLTGARELLPHAQEEAEAEAELPPSSEVLASVFPAQDKPGELQATLDHTGHTFSKSLPNFPNTSATANATGGRALALQSSLPGAEGPDKPSVVSGLNSGPGHAASWAPPLLPSVQILDSLLEVPECAGHSWAQESLWVGLGHVGNWQQYQPWVLVFCTEATSP

SEQ ID NO: 30782 - protein, 41 aa, Homo sapiens
NCGSGDILLKIVKVEHEEMPEAKNVIAVLEEFMKEALDQSF

SEQ ID NO: 30783 - protein, 16 aa, Homo sapiens
MSLFVFSSDSLTSTGV

SEQ ID NO: 30784 - protein, 67 aa, Homo sapiens
MQAFLNGAKGGNPFLFRQVLENFKLKNCGSGDILLKIVKVEHEEMPEAKNVIAVLEEFMKEALDQSF

SEQ ID NO: 30785 - protein, 45 aa, Homo sapiens
MFLKNCGSGDILLKIVKVEHEEMPEAKNVIAVLEEFMKEALDQSF

SEQ ID NO: 30786 - protein, 129 aa, Homo sapiens
MSFSTILMTVVTQPLQEVLLLKTKIKYISRDYCRSEMPLSCVVRNQNPLLNVVEMRDKETDNVTEWEIEASPCLRTRGNQRNAGVRGPGAGRALIPTAAREQGSGLAETQGRSEAAGNAPLFAGVDGWR

SEQ ID NO: 30787 - protein, 56 aa, Homo sapiens
MGFGGLNVVCETVLRVRIFCNLRLSLLHLLWLHGGPCKSQSPDTSPLPSRSFLRAL

SEQ ID NO: 30788 - protein, 73 aa, Homo sapiens
  misc_feature (1)...(73): Xaa = X or * as defined in Table 2
XICYWLHGGPCKSQSAYTSLGAGAPRAVEQQSGTVHDWAPTWGLETLRQSQVPRISQKVGERELITREQAVRS

SEQ ID NO: 30789 - protein, 67 aa, Homo sapiens
MLAEKSQTTKEEQSGVAEKERRQKQLNVKEAAERKGVQLSQTPGEDYLPTPSPFQLSIPLRATSITQ

SEQ ID NO: 30790 - protein, 116 aa, Homo sapiens
MPNFHGDFMATMGRMALSLFESYSRASWAQCITELPILPTQPAASLLLNPDMKPRTWAGDKSKESYLCPSWDLPGQPSMPNSFLSSYSLQETPHRSCTSCLVGPCAQFSRPAQRHV

SEQ ID NO: 30791 - protein, 102 aa, Homo sapiens
MHPAGLAAAAAGTPRCIDRFIPITKLKFTLLWTPSMLSSPTFWWLVLRWGPRKDDWRGPHGPLFGKIGYYLVLGWCCVASLCSWPGVTGKSPFTRSKTLPGI

SEQ ID NO: 30792 - protein, 102 aa, Homo sapiens
  misc_feature (1)...(102): Xaa = X or * as defined in Table 2
XMIGGVLMGLLFGKIGYYLVLGWCCVAIFVFMFPLLPGAHFGRPRRSDHEIRTLRLKDLGQTQQLRGSRCVGPGTSCACNLTMAVAAAQPMLMYWLTFHLVR

SEQ ID NO: 30793 - protein, 50 aa, Homo sapiens
MDLVYLMVQVFSSGFWEPPLYPSPFCFGDPAPKSQDFMNYIGLTIDLRSI

SEQ ID NO: 30794 - protein, 261 aa, Homo sapiens
  DOMAIN (104)..(128): SODIUM CHANNEL SIGNATURE domain identified by eMATRIX, accession number PR00170D, p-value=9.384e-10, raw score of 14.89
MAPHDPGSLTTLVPWAAALLLALGVERALALPEICTQCPGSVQNLSKVAFYCKTTRELMLHARCCLNQKGTILGILPQHVNCPGGINAWNTITSYIDNQICQGQKNLCNNTGDPEMCPENGSCVPDGPGLLQCVCADGFHGYKCMRQGCLSAAAPQALAGKWPPKNCHLPSFVDGQPQGQKEPCNNYPSIYTFVPVCGQICGIKMLKTELLHLKYWDIGPGNRNSYKFAAGNVKFAVTLENSLLIPQKAKRNYHMTQQFRS

SEQ ID NO: 30795 - protein, 91 aa, Homo sapiens
MAPHGPGSLTTLVPWAASPAPRSGRGKGSRRYPRYAPNVQGSVQNLSKVAFYLKTTRELMLHAQCCLNQKGTILGLDLQNCSLEDPGPNFY

SEQ ID NO: 30796 - protein, 28 aa, Homo sapiens
LVVHVGMDTAAKAIILEQSGKNQGYRDA

SEQ ID NO: 30797 - protein, 162 aa, Homo sapiens
MIKSVPELGLEASWCDSRSPPWYTCIGHLASVELAGLEVALGVSKKMAYQKVHADQRAPGHSQYLDNDDLQATALDLEWDMEKELEESGFDQFQLDGAENQNLGHSETIDLNLDSIQPATSPKGRRKEEYSLGIKNSFQALYITEIACQLLTFGLESLSVRL

SEQ ID NO: 30798 - protein, 66 aa, Homo sapiens
MDWEGSLPLVFNYCRDASLIIHPRFKGVRPRRDACLGPSPLAASPAFLGKGQTITDAELRVTLTVE

SEQ ID NO: 30799 - protein, 43 aa, Homo sapiens
MGVRGLLRRSGSVSLQPLSREDLGRSQSESLGPEFQGLWEWLP

SEQ ID NO: 30800 - protein, 42 aa, Homo sapiens
MGEILSQKEFHKAVSSVKAGTGHSHFFCDSSVTSGHLDVYPI

SEQ ID NO: 30801 - protein, 48 aa, Homo sapiens
MSSVKAGQRIFTSFAILRLLQATRAYTFKSQGMRWLGLGSEALHLRVT

SEQ ID NO: 30802 - protein, 631 aa, Homo sapiens
MNNDPYIPASAFGARPVKTTEAPPLSTLRPLPLPTKEQPPLTVIFHYLPKSYKTAPPLSPFADSLFGLSPPAPNEINSHVAHTKPVWWSLHTDAYEIWCRDSDRGTSLGRSIPCPPVLCSVRKIHLRPQVLRPTSPRNISPILNQTKETCFIRGPKTPVPVTDWEGSLPLVFNNCRDTSLIIHPRFKGVRPRRDACLGPSPLAASPAFLGKGQAAPRQAELGPNSSSASAPPPYNLFITSPPHTWSGLQFRSVTSPPPPAQQFTLKKVAGAKGIVKTITDAELRVTLTVEGRDSLTKLSASLTIPGLQPHLIAVLLPNPKPPSRLPLISPYLNPQVWDISTPSLATDHMPITIPLKPNHPYPTQRQYPIPQHALKGLKPVITRLLQHGLLKPINSPYHSPILPVLKPDKAYKLVQNLRLINQIVLPIHSMNAPYFLSESWTLCLLMCQDVAQLPTSLKLSTSRTSYQVTTLTSLEEKAEGALAHTQLTKVCRFISHSSTQTPRASAVLGEPVPISALGLPSPAAFWECLSFPICHHTNDNSRPPPGCPRIPKATSPTPLLDRAKSDAGRGSRKQKKKGTQNSGMQELRGHAGVWFCVWPRHITPALGIVSSNLLVEGREKFTEYFSDFLLR

SEQ ID NO: 30803 - protein, 110 aa, Homo sapiens
MLLTQSLFGGLFTRTHMKFGAVTQIRGPPLGDKSPVLLLFALERQRRHVLSMDPKLRCWSRTGKAAFPWCLIIAEMPDYSPTFQRCQTTQGRLPWSFTLSSKSRFSGEGA

SEQ ID NO: 30804 - protein, 91 aa, Homo sapiens
MTSGPQTNQPKEHLTNFKSGVRPRRDACLGPSPLAASPAFLGKGQVPQPLISLCPDPLFPHPNLISLRPNPLCPHPDLVSLCPDPFPAFLE

SEQ ID NO: 30805 - protein, 36 aa, Homo sapiens
MDPKLRRRSRTGKTAFPWCLIIAGTPLYSPTFQSML

SEQ ID NO: 30806 - protein, 63 aa, Homo sapiens
MLLTQSLFGGLFTQTRMKFGGSGDLPWEINPLSSCSLLHEKAPPTTSGPQTDQPKKHLTNFKS

SEQ ID NO: 30807 - protein, 26 aa, Homo sapiens
MKFGAVTRIEDLPLGDQSPVLLLFAP

SEQ ID NO: 30808 - protein, 8 aa, Homo sapiens
MRMKFGLD

SEQ ID NO: 30809 - protein, 123 aa, Homo sapiens
MAWRNSVNRQCKQEQGLPRRSGSVSLQLLSREDLGRSQSESLGPEFQGLWKWLPDESSVWPAPGCLLLYCTHVDKEKGRRSLHVEHALLPVKGRDDPSKFRTNSRLFTLPGDRGTTLGSSYSW

SEQ ID NO: 30810 - protein, 46 aa, Homo sapiens
  DOMAIN (17)..(34): Zinc finger, CCHC class domain identified by PFam, accession name zf-CCHC, E-value=0.078, PFam score of 15.4
MPEPQRPGVTPEPSPPGACYKCQKSDYQAKECLQPRIPPKPRPICA

SEQ ID NO: 30811 - protein, 118 aa, Homo sapiens
  DOMAIN (48)..(65): Zinc finger, CCHC class domain identified by PFam, accession name zf-CCHC, E-value=7e-05, PFam score of 29.7
MESAQKEAVEIFGQPHAASSSGDVKPLLFIDFYKCSGEKVVCMEHALRACYMCRKSGHWAKECPQPGIPPKLCPICAGPHWKSDCSTHLAATPRAPGTLAQGSLTDSFPDLLGLAAED

SEQ ID NO: 30812 - protein, 242 aa, Homo sapiens
  DOMAIN (192)..(237): Involucrin proteins domain identified by eMATRIX, accession number BL00795C, p-value=6.300e-09, raw score of 17.06
MEARETGPWKEGNVERVASVLIKKGTGLPSTVRVTGSSASVMVYGASEAIGQHQSSAAKPRRSVKESVREPWARVPGALGVAASMKSHGHNRYPMSPQVGLPLPEQEPEPEPESEPEQEREKQEPQQGQEPAAAAIALARAAARAKTKLKRRSKTMTMSGNPRAGVLAGIKESGEESGGGEARECEQGQEPGEEPPPESEPEQEQSGQQEPEQEPQQEQGQEEEQEEKQRGEPQSQSQPQQE

SEQ ID NO: 30813 - protein, 409 aa, Homo sapiens
  DOMAIN (263)..(281): RNase H domain identified by eMATRIX, accession number PF00075J, p-value=1.225e-16, raw score of 15.78
  DOMAIN (238)..(322): Integrase core domain identified by PFam, accession name rve, E-value=1.9e-18, PFam score of 67.8
MTLGNQEVNQRNFSTGTTGPMEGMWLLSSNSHHSLKYAGALAILSAFQYQERGSQAGHRDSWPETKETHFICGPKTPALVTDWEGSLPLVFNHCRDASLIIHPRFSGVRPRRDACLGPSPLAATPQTITDTELWVTLTVEVWDISTPSLATDHMPVTIPLKPNHPYPAQRQYPIPQHALKGLKPVITRLLQHGLLKPINSPYNSPILPVQKLDKSYRLVQNLRLINKIVSPIHPVVPNPPAFTSQITQAVSQALGIQWNLHIPYHPQSSGKVERTNGLLKVHLTKLSLQLKKDWTVLLPLALLRIRACPRDATGYSRFELLYGRTFLLGPNLIPDTSPLGDYLPVLQQARQAANLLLPTPDPQPHEDTLAGRSVLVKNLTPQTLQPRWTGPHFIIYSTPTAVCLQDPPH

SEQ ID NO: 30814 - protein, 136 aa, Homo sapiens
MSKTKAPADLVSGEGLFLKEGTFYLSSHGGRSWDQLGTRRYSPCEKRGASEAIGQRQSSAAKPRRSGKESVREPWAGVPGALEVAARTNTYKLLPAPRGRAEEGASVCNFSVRIGHLFLVCIKSLVRVGALLAIWT

SEQ ID NO: 30815 - protein, 136 aa, Homo sapiens
MVWRDNGRCFSGLLRAGLGAVWEPRVGDIKLKEDFMGTSEAIGQHQSSAAKPRRSGKESESLGPEFQGLWEWLPGAQGPVYKGPSLSVTLPTPVVKQPNAHIPTHGHKDQSGWGLLWQLSPLSLVVGMPHDQSRGP

SEQ ID NO: 30816 - protein, 139 aa, Homo sapiens
MLTLKDSEIPLLGMQHQEIVEDVQGDLYKDFLCNKGASEAIGQCRSSAAKPRRSGKESESLGPEFQGLWEWLPGSPAPLSSQKFANYLIRALSEILQKQSASGGKSDPNWRNKHPTYLHAHMVLRPCLEGDIKHLGELV

SEQ ID NO: 30817 - protein, 184 aa, Homo sapiens
  DOMAIN (7)..(54): kw TRANSCRIPTASE REVERSE II ORF2 domain identified by eMATRIX, accession number DM01354V, p-value=1.000e-40, raw score of 12.97
MSELPFTIASKRIKYLGIQLTRDVKDLFKENYKPLLNEIKEDTNKWKNIPCSWVGRINIVKMAILPKLCWSTDTAVFLVNKQQQLPAISGDLPWEINTLSSCSLLHEKDPPTTSGPQTDQPKKHLTISNPVAEAKGIVKVNAPFSLSDLSQISECLGSFIKYEKPSPVHGSFVSNPEMLYSSRP

SEQ ID NO: 30818 - protein, 219 aa, Homo sapiens
MPRPLSVAQPLISVPQPLISTPQPLSRFPGRYFNLSLCVNFDDPDSEGEHDTEISECRLLIRCSDKSSYARSFGQQRKPMKGVHSRPQNVEFKAVVLYYITGHPGKQYLALNNRSNAWKGYGQAAPCGMEAGTDILGAYKASVNKKPGSTIILNHNRKPGALLDDYKQKTVNLDKEKEKTNCLSIGRAQADLNDSELTVIATGHEDGHVETRGLQSTHG

SEQ ID NO: 30819 - protein, 43 aa, Homo sapiens
  misc_feature (1)...(43): Xaa = X or * as defined in Table 2
XEKAIWLSVQEMQGDRVNERETHYVKSLAAIKDKPHKKPAGTR

SEQ ID NO: 30820 - protein, 465 aa, Homo sapiens; identical to SEQ ID NO: 30613

SEQ ID NO: 30821 - protein, 595 aa, Homo sapiens
  DOMAIN (483)..(528): kw TRANSCRIPTASE REVERSE II ORF2 domain identified by eMATRIX, accession number DM01354N, p-value=1.000e-40, raw score of 13.17
  misc_feature (1)...(595): Xaa = X or * as defined in Table 2
FRSVTSPPPPAQQFTLKKVAGAKGIVKRLKTDTARSPWKTPRPSRTPSFRKAERTKGLLKIHLTKLSHQLKKDWTILLPLSLLRIQACPRNATRLATGQLGYPFISQSYVLVNGFQTVEDLCEAADLRVSVADLRVSVTALKVARLELFVPPGGLVVSLASAVKLQTFAVLQLIKAKRWDWGTLEQGAALIGEARDAQEPTEGVGGSGMAGCRSRDLPRGKAAKARREIERSAGLTIKKERCIRNGYSKEKMKLIVVSHGLHVNDLQHKLTLFTKETYTYLARDSEKQKQGYLAGLEGAHANRVNQQISDNLVVKTGALPPPYRTKGEKLYFYMSRQNCLFSVSGQLLQGFFPNGGQAAPNPYALLSQIPEEAEWFTVLDLKDDFFCIPYILTLNSSLPLKILRTQRLNSPGLFYPKVSGHLFGQALAQDLSQFSYLDTLVLCGVLKSPIIIVWELNQIDTIKNDKGDITTDPTEIQTTIREYYKHLYTNKLENLEEMDKFLNTYTLPRLNQEEVESLNRPITGAEIEAIINSLPTKKSPGPDGFTAEFYQRYKEELASEAIGQSQSSAAKPRRSGKKSENLGPEFQGLWEWLPX

SEQ ID NO: 30822 - protein, 216 aa, Homo sapiens
MPGHQKAPLRPAVSKKVVNVGERQNQVIIETGGDFADFGTTIKQDFRLLGQTSVDRLLQLSQGQAVKGNQLLPVSLVKRKTTLAPNTQTASPRALADSLMQLARQVSRLESGQGLPRRSGSVSLQPLSREDLRRSQSESFGPEFQGLWEWLPAEDTEADPFSIPKLRQPASYLHTVAGEINFHTLPRLATGNDSVGKLLHLLALCFPENFTKSAIR

SEQ ID NO: 30823 - protein, 378 aa, Homo sapiens
  DOMAIN (234)..(282): Cadherins extracellular repeat proteins domain proteins domain identified by eMATRIX, accession number BL00232B, p-value= 2.269e-13, raw score of 32.79
MQKRLWNWVTGRDWNSLQGSVEDRKMRESLELSRDLPNGFDQNADNDINDENQAEVVSDRDEELVGNWSKGTPEDYPRFFHMHPRTAELSLLEPVNRDFHQKFDLVIKAEQDNGHPLPAFAGLHIEILDENNQSPYFTMPSYQGYILESAPVGATISDSLNLTSPLRIVALDKDIEDTKDPELHLFLNDYTSVFTVTQTGITRYLTLLQPVDREEQQTYTFSITAFDGVQESEPVIVNIQVMDANDNTPTFPEISYDVYVYTDMRPGDSVIQLLMATKDTGDYYGGREGEETIEKLTIVYYTQYLGDRINHTPNLNIMQYTQGASEAIKQCQSSAAKPRRSGKESVSLGPEFQGLWEWLPGELNSPISSGVRHRWDVA

SEQ ID NO: 30824 - protein, 558 aa, Homo sapiens
  DOMAIN (47)..(65): C-type lectin domain proteins domain identified by eMATRIX, accession number BL00615A, p-value=6.400e-15, raw score of 16.68
MAQTSSYFMLISCLMFLSQSQGQEAQTELPQARISCPEGTNAYRSYCYYFNEDRETWVDADLYCQNMNSGNLVSVLTQAEGAFVASLIKESGTDDFNVWIGLHDPKKDHNSSSARKQNWIDNEFDELTEVGFRRWVITNPSELKEHVLTQCKKAKNLDKRLQELFHVTQKERDSVCLGESKEKEQELLPGNTENSSRSCPRTSRQYLYEYARTTVLLGLETKETRFIRGPKTPAPVTDWEGSLPLVFNHCRDTSLIIHPGFRGACYTCRKSGHWAKECPQPGIPPKARPHLCGTPLKIGLFNFTWAATPRAPWNLWPKALLTMSGHLWGIAPGSLEVYREKLAIGKALGNLVPKLSGGERLTCILVGQIKVATREEMSVSVAMEHRNQTKNKPQAIRQYQSSAAKPRSGKESVREPWARVPGALEVAARWTRDLNVKPKTIKVLEDNLGNTIQDTGTGKDFMMKMAKAMATKAKIETHDLIKLKSFCTAKETTIRVNRQPTEWEKIFAIYPSGKGLISRIYKELKQIYKKKIKQPHQKVGKRHEQTLYKRRYRCSQQS

SEQ ID NO: 30825 - protein, 308 aa, Homo sapiens
  misc_feature (1)...(308): Xaa = X or * as defined in Table 2
MTDELREEGFRRSNYSELREDIQTKGKEVENFEKNLEECITRITNTEKCLKELMELKTKARELPRKLLVCPASFPGVFSMRAQQCPSRAPTVVITASLVFSFHKAILTNPFRSFLNHSCCDSLNNARFVDISRDVQLRAVHRIQDSFGVFLEATTKDKATSYIWSSLQTGKVESKGKRARTALEFFGVRRGSDIKDCGTLPRYASALSSLVLKGSCAYQDCETKRRNLASVIIRMRVSIAHPPMTSGPQTDQPKKHLTNFKSETKETRFICGPKTPAPQLKTDAALSPRKPRRPFTDAELRVTLTAEX

SEQ ID NO: 30826 - protein, 197 aa, Homo sapiens
MAQPPPSGEAIPLIVCLFVVQLSADFTYFGRYENINYRLTFPAVITPRVAVLSPELKTICPNYQLMRLEENIISSPFHFGIVGRKFWATLLVLGLADTILGEQNRQKLVGKDNSYKGSSPKSLPVEPGQEGKWRFSGAPRAQMFNRKRSGFDNLSEENHPSILRTQGLKAADGIDFEKLPLNGTAAPNNRLGRGPPH

SEQ ID NO: 30827 - protein, 41 aa, Homo sapiens
MRELFCLSTLRNYLMFSDSFRCIVSIRLSISEPPTHTVSLM

SEQ ID NO: 30828 - protein, 128 aa, Homo sapiens
MCFWLELQKASTYDEREKEIDVCRSHGETNTLPAVVSKLLLEESRGKYKGDLVLHLRYQLPQGCGAPSGLLGSLIPGLDSWMACLDLPKARGEPIAEGFYIKETVCVGGSDMDSRMLTIHRKESENIK

SEQ ID NO: 30829 - protein, 560 aa, Homo sapiens
  misc_feature (1)...(560): Xaa = X or * as defined in Table 2
MNEKKTRTDAHYCEISESQDKEKVQKKIAHIRTIRNQNIIGPGSSRSRSSQRARARFCKSLAEMVQYKSTGNEWARRTRTVSCVRSWLEVPKARLSDKFPPRQPDTSMGVTAQSWDLLAYVESPKTQVRNLQTLPCQSYRTVSGNSYRDPRVEVRIYLASPTDVAVCKAPNIGMANVKRVPSYISFYNQKGEASCPSALINVLSMHPEGSPAHIVWSQDSIHSWIIHYVKEDPPKGSLQGQRFQGILYFLGSTEPPDGAAHRRSIYFRCAVQADRAEEGTGNADLNLSNRGEVLGVLTEANSAAAAQRMQAQILREEDEAYKGHVFSPFPLSTFWNAELMAGNKAATLDHEMQAKYEDGRATESPKNKGRIFQPSSSIQWIGRILLGRDIIRKFPSPQKVLLKKMHVPPIIQMDMEVLGQEQSSEQLDLEEISRKISFLDKWREIFSYHRLGTNNSTPQNHEGNHTSADENEDGTGLSQPKGQGHLPSSGLCSIPNPSIISSKLGGFPISLAMATAKAGGSALANVQRTSCHGQKDAIGNLGSRGKGQAKMPEATGRWAX

SEQ ID NO: 30830 - protein, 178 aa, Homo sapiens
MNEKKTRNDAHYCEISESQDKEKVQKKIAHIRTIRNQNIIGPGSSRRHCRVSVAGPCDAVTDWELRLVPLPSIESFLSLITSLGKDQNSKLKVRFLPNAYNFQTIMMLKNRTIVGWDPSYKTSYTAGSVRLLCCRKMGHSGQLQVLTTGGLHASEQTPPTSFLRHQCRQQREDSTGSS

SEQ ID NO: 30831 - protein, 21 aa, Homo sapiens
  misc_feature (1)...(21): Xaa = X or * as defined in Table 2
XAPSKGETIVVSYQDMGQKLT

SEQ ID NO: 30832 - protein, 365 aa, Homo sapiens
MHVKPTLSTGPERAAPTSTLTCDQDHRSKSSHSNWVWPSAPYHRPRSVLVSSTYVYHRAGCGVQKRTQQMGPCAEDSVKSHIGCRAWSQQTGHVHSRLGLKGNNRERESGHEGESRLPHKEDAKDGRLFNEQNFFQGPPSLCKVPDRELGKEGDNKWKKLYSTPLLAIPTSWVSVFTRTNTGDFGRLWLRLPLLPKWKHVAYVEGSRSPHEGDLSSLAWTCTRDAGPPAAAPPEPGLLHAEVALRVSAWTNCLPNTEDIMKQKQSLLISRGPSWDPAALDQALRDPAEVPKVVMALTYEEKPPYAIYPGQQLGVLPNTLAPPAASSNLRSRGRGFILFIDGASAGFPSSVPLCLTVPSSPRAKGI

SEQ ID NO: 30833 - protein, 201 aa, Homo sapiens
  DOMAIN (143)..(174): Protein kinases ATP-binding region proteins domain identified by eMATRIX, accession number BL00107A, p-value=9.690e-11, raw score of 18.39
  misc_feature (1)...(201): Xaa = X or * as defined in Table 2
XTVLTDKSGRQWKLKSFQTRDNQGILYEAAPTSTLTCDSGPQKQKFSLKLDAKDGRLFNEQNFFQRAAKPLQVNKWKKLYSTPLLAIPTCMGFGVHQGQIQVLGVTQPGEGTFSRPWMSSPKHVLSERSVLQVACRLLDALELLHENEYVHGNVTAENIFVDPEDQSQVTLAGYGFAFRYCPSGKHVAYVEGSRSPSRGGP

SEQ ID NO: 30834 - protein, 66 aa, Homo sapiens
MASHVRVLGGAPGASICLRIFWNRIACFCRFRVLGEENQWQKPCVEAEWMFKEPQAKSWSAQPSSL

SEQ ID NO: 30835 - protein, 416 aa, Homo sapiens
MNNSVKERHCSRSERAQVGARPQAERAQVLDPDLVGKDHFPGSLADRGVAVVSCGQNLLAILPRESRESCSWGASSQEELHNKPYKGTVGEEAECADYHTLQELNAGDAAHATGVGSALLQIHCVGGEGDTWMALSSKEHLRGGSLSYLLTGGNSKWLRFAKGLSAPYYGRKKYSIQWGGRVGQIGGGTRSGTTGREASPSVILSAIIGRNWVLEERANGRSHVWKQDGCLKSLRLNHGAPSPLLFDSKGNRSVSASLELLCKPRNLTPRIITACKHAELSKLVMKYVTSEGTSGPRGAGHLTLCSGHWPRDFVPCVLGAPAMAKRGQDTVPAMVSESASPKPWQLPCGIEPVGTQKSRIEVWESAPRCQRMYGNSRMSRQKFAAGKEPSWRTFARAVQRKCRVEAPTLKHCLVEL

SEQ ID NO: 30836 - protein, 143 aa, Homo sapiens
  misc_feature (1)...(143): Xaa = X or * as defined in Table 2
MKGKSPGARQENELKVRAGNLTENSGSTGLLAGHLTFECRNFLRVDPKRDIVLDVSSTSSEDSDEENEELNKLQALQEKRQYSINYMRYSMLYYKIGFVLDDFAQLEANVALMSTKVNAYVVEASNINQCHGTAPKIANTSLX

SEQ ID NO: 30837 - protein, 164 aa, Homo sapiens
MTKLGYGRVESVRALMAAMQRAVDTASLEFKHGMCRRGMGTGIWVYVGKGLQVEGEVRSGVQYTAKTQAQDILLAFLLLSNGHLLDYPSCHSFSVAIYSDTQYIGLQRTRQKPGHSAQYKMTCSDKPVHTSMGSSQYREQQDRFHAEPKRRVPDREGKEIPPIL

SEQ ID NO: 30838 - protein, 47 aa, Homo sapiens
MWAKSTVLLGGKSPLKKNQPSLPPILSWNIFGVGTQKKKKKINLFSK

SEQ ID NO: 30839 - protein, 62 aa, Homo sapiens
  DOMAIN (3)..(35): Calponin family repeat proteins domain identified by eMATRIX, accession number BL01052A, p-value=2.875e-35, raw score of 16.12
MANKGPSYGMSREVQSKIEKKYDEELEERLVEWIIVQCGPDVGRPDRGPLGFPVWLKNGRDS

SEQ ID NO: 30840 - protein, 270 aa, Homo sapiens
  misc_feature (1)...(270): Xaa = X or * as defined in Table 2
MQRPWRGVWEEVCGTLKLEGDDFGYLAEEISKQQSIQXAWELGALCSSHSSHGKRGQGRAWATAAESASSKPGQFPHSVEPVGAQKSRIEVWEPPPTFQRMYGNAWMSRPKFAAGAGPLQRTSTRTLRKGNVELNPPNRVPTGKLPSGAVRREPPSFRARNGRSTNSLHCVTGKDTDTQRQPVKVARREAIPCKATGAELPKTMGTHFLHQCDLDVRHGVKGDHFGALGFDCPAGFQTWCGSCSPFVLAYFSYLEWVYLSNACTLIVSRK

SEQ ID NO: 30841 - protein, 357 aa, Homo sapiens
MEYYAAIKKDEFVSFAGTGMKLEIIILSKLTQEQKTKHRMFSLITPHPSCGEPSPSPNKIPTFTIFQVRVLPDSSWMPDKNLGTKRALSWLTLKLSVDGRLRQHCSMPRSAGWTRQLVPCVRNAATDCDRTLENEGEETVQSCDRHIKPYHGVAKTQAGIKNKGNDAAGPAAPDDVASSDDTGPRHYLGEAEEDNSGGRVNPSLDTDTITPDNLFLAMLSIVPCNSHRKSRTEVSEPPPRFQRMNRNAWISRQKFAGEARISRRTSARTVQKEKLRSQPQHRVPTEALPSRAVRRPPYARPQNGRSTDSLHCVPTKATDTQHWPMKTAKKEAVPCKATGEELPKTLGTYLLHQHDLD

SEQ ID NO: 30842 - protein, 64 aa, Homo sapiens
MLIPKTRGKMSPGNVIGLHGSTSYHRPRSLLHQHDLDVRHGVKGDHFGGLEFDCPSCHALQPGR

SEQ ID NO: 30843 - protein, 270 aa, Homo sapiens
  DOMAIN (31)..(54): TRANSFORMING PROTEIN P21 RAS SIGNATURE domain identified by eMATRIX, accession number PR00449C, p-value=5.500e-24, raw score of 17.27
  DOMAIN (15)..(126): Ras family domain identified by PFam, accession name ras, E- value=3e-15, PFam score of 36.7
MVCIAFGSRMEEGQPASQGATIGVDFMIKTVEINGEKVKLQIWDTAGQERFRSITQSYYRSANALILTYDITCEESFRCLPEWLREIEQYASNKVITVLVDKGREKDILSRNQKAQNNNNKFKCNQVASFDYFQVVVPPRHQIINNFPELVGCDRVEGNVESEPPHRVSTGAMPSGAMRRGPPSSRSQNGRPTDSLYREPGKATDTQCQPVKATEREAVPCKATGVELPKTMGTHLLHQCDLDVRPGVKGDHSGALKFDCPLDFGLAWGL

SEQ ID NO: 30844 - protein, 456 aa, Homo sapiens
  DOMAIN (249)..(280): Protein kinases ATP-binding region proteins domain identified by eMATRIX, accession number BL00107A, p-value=4.600e-23, raw score of 18.39
  DOMAIN (125)..(284): Eukaryotic protein kinase domain identified by PFam, accession name pkinase, E-value=3.8e-32, PFam score of 119.8
MYSFLENLAPALQGIGIHLVLYLSLPEAIPSSHLLQDGGEHANLTGHAEKVGIENFELLKVLGTGVRCSGNHVYQIEISTPGGIASVVDDQVTISQDSSNLERLILGVINMILQLVEILSYDTVAYGKVFLVRKISGHDTGKLYAMKVLKKATIVQKAKTTEHTRTERQVLEHIRQSPFLVTLHYAFQTETKLHLILVYELQNNGEISEFNVKSNQMCKDEQPETVQQERFTEHEVQIYVGEIVLALEHLHKLGIIYRDIKLENILLDSNGHVVLTDFGLSKEFVADESRDLVPCFPAATAMTKRSQGILFSTQLANLTDLDSCKPPCKSRGLNDTSANGNMKGETATLIDLDPVRTTGEFLSPAPVAVARCTPKETVDILNGEIEEERKIQKHKTLPKMSGGWERQLNGTEAKLVGKAAGERSLSLSTLTTASHRHLMARRNPRKGSKLENRSLN

SEQ ID NO: 30845 - protein, 186 aa, Homo sapiens
MVDPLTACTVCLENQYQPVKAAGREAVPCKATGVELPKTMGTHFLHHHDLDARHGVKGDHFGALRFDCPAGFWTCLWPVASLSWPISPVWNGCIYPMPVSLLREVTDHEWRDWLELPQRNINCEDLILIWTFSLLWNLIKDLEAGVVRGAWGVVWRVEFFVVPQSPPGPPCEAENTHLHFTDKERH

SEQ ID NO: 30846 - protein, 21 aa, Homo sapiens
  misc_feature (1)...(21): Xaa = X or * as defined in Table 2
XAVIGAQEIGFDFIQATLMQQ

SEQ ID NO: 30847 - protein, 258 aa, Homo sapiens
  DOMAIN (69)..(99): kw TRANSCRIPTASE REVERSE II ORF2 domain identified by eMATRIX, accession number DM01354R, p-value=3.739e-20, raw score of 8.50
MHGDSILHVCVHSSSSGSVNQSEEDGATGVHVHVHSGSHVGADAGHWQSSRLPASMHMFTPAAAVAAWDAENTFNKIQHYFIIKTLNKLGIERTYLKIVRAIYDKHTANIIPNRYVFISSMKTDEYSKLVPVEWGAAENIPKNMEATLELGNRQRLEQLGGSQGNRKMWEGLELPRDLLNGFAQNADSDMDNKVQAEVVSNGDEELVGNWSKDLDVEKQEQKQQILVPHPQFSAKHIVQWEIVKVNEIMPEKYRKLFV

SEQ ID NO: 30848 - protein, 214 aa, Homo sapiens
MISFDSMSHIQVMLMQEVGSHGLGQLHPCGFAGYLFSSTPLYWYQFTVSVCFHDADKDIPETGKFAKERDLMDLQFHMAGEASQSWWKSGMGSQSKRLGLPRDINAAEEISCRKPCHRAHRQFAEKDATHTMSEAGSGEGKGPAEATRTHRFTSPGLSMGLLKPAELRFAFQCVTTGLQLELRAELTRKEAVCVSQSTVELIIPRGLRDYTGLY

SEQ ID NO: 30849 - protein, 582 aa, Homo sapiens
  DOMAIN (173)..(212): kw TRANSCRIPTASE REVERSE II ORF2 domain identified by eMATRIX, accession number DM01354X, p-value=1.000e-40, raw score of 13.86
MAERGQCRARAVTSEGESPKPWQLPHGVEPAGITSAKAVQKGNVGSEPLHRVPTRAPTSGAVRRRPPPSRPQNGSSTNSLHSEPGKATDTQCQPMKAPRRGAISCKATGAELPKTMGTYLLHQRDLDATRCFCLMALRIISFNKWKNIPCLWIGRINVVKMAILPKVIYRFNAIPIKLPMTFFTELEKTTLKFIWNQKRAHIAKTILSQKNKAGGITLPDFKLYYKATVTKTAWYWYQKRDTDQQNRTEPSEIIPHIYNHLIFDKPEKNKQWGKDSLFNKWCWENWLAICRKLKLDPFLTPYTKINSRWIKDLNVRPKTIKTLEENLGNTIQDIGTGKDFMSKTPKAMATKAKIDKWDLIKLKSFCTAKETTIRVNRQHTEWEKIFATYSSDKGLISRIYKELKHIYMKKTNNPIKKIKAGECSFLAAEDSELCCRLARHYKKPLLSQLNSEMKFLKVGLALLTWTQNKVEKSQLPIEENSQLYGAYVVRSQNGTSIDSLHCAPGEATDTQCQPVKAARKEAVPCKATGVELPKTMGTRLLHQHDPDVRPGVKGDHFGALRFDCPDGFRTCVWLVHAKDADF

SEQ ID NO: 30850 - protein, 273 aa, Homo sapiens
METDEYSKLVPVEWGAAEKILENMEATLELGNKQRDLWNSELERDDLRYLEEEIFKQQSIQEMIWVLLKAFSFVRGAEHKSLENLQPDSAVEKKIPFSEEKFKPAAEICVSSEEPNVKPQENRENVFRACQKSSQQPVPSQAQQPRRKKWFCGLGLESLCCVLSRDLVPCILAASAPAMVKRGQDTFQAMASEGASHKPWHLPCGVEPMGIQKSQTEVWEPLPRFQRMYKNAWMSRQKFAAGAEPSWRTSARAVLKGNVGSEPPTQSPYWCTT

SEQ ID NO: 30851 - protein, 50 aa, Homo sapiens
MLWHISKCSLPSNLLGSMRRFFSNIHCETLVELLDIKSVKVWGLTYNWVP

SEQ ID NO: 30852 - protein, 35 aa, Homo sapiens
MALAGSVLELSARSKDATPDPPRGMGKFPPHEIVD

SEQ ID NO: 30853 - protein, 92 aa, Homo sapiens
MESRSVTQAGVRWREPRRQRNHLCRSSRRTWTILDGAEYSDHVVLLGAGVGGGGWGPSRSPWRKVRNQERFLRTCSPGGFEGTMQGLRLGQN

SEQ ID NO: 30854 - protein, 69 aa, Homo sapiens
MAQPKQDRVARATHQPSETARHQPSRNRQTPTLGNRQTPTLGIHATPLLHGDHLSSDSAAGVRKKKRIR

SEQ ID NO: 30855 - protein, 30 aa, Homo sapiens
METIQSCMSLLAAFAALKISLAGGSDCFRL

SEQ ID NO: 30856 - protein, 177 aa, Homo sapiens
  misc_feature (1)...(177): Xaa = X or * as defined in Table 2
XPIGAHHPGSITQNPSSGFSDLHLTFEYPSILQFPNEYSHPNTEPDALLVVPLSSNLISVLSYLANDMEEDDEDPKQNIFYFLYGKTRSRIPLVRNRRFQLCRCMNPRARKNRSQIALFQKLRFQFFCSMSGRAWVSREELEENTGPTGDVDFQQELNSNANGSQQERGEEPFVQII

SEQ ID NO: 30857 - protein, 367 aa, Homo sapiens
MDRTETRFRKRGQIKGKITTSRQPHPQNEQSPQRSTSGYSLQEVVDDEVLGSSAPGVDPSPPCRSLGWKRKKEWSDESEEEPEKELAPEPEETWVVEMLCGLKMKLKQQRVSPILPEHHKDFNSQLAPGVDPSPPHRSFCWKRKREWWDESEESLEEEPRKVLAPEPEEIWVAEMLCGLKMKLKRRRVSLVLPEHHEAFNRLLEDPVIKRFLAWDKDLRVSDKYLLAMVIAYFSRAGLPSWQYQRIHFFLALYLANDMEEDDEDPKQNIFYFLYGKTRSRIPLVRNRRFQLCRCLNPRARKNRSQIALFQKLRFQFFCSMSGRAWVSREELEENTGPRGDVDFQQELYSNANGRQQERGEEPFVQII

SEQ ID NO: 30858 - protein, 297 aa, Homo sapiens
  DOMAIN (87)..(138): DNA mismatch repair proteins mutL / hexB / PMS1 proteins domain identified by eMATRIX, accession number BL00058A, p-value= 5.125e-33, raw score of 20.73
  DOMAIN (77)..(297): DNA mismatch repair protein domain identified by PFam, accession name DNA_mis_repair, E-value=3.4e-32, PFam score of 120.4
MGESSRKPPTPTPEGPTVSVKQLFSTLPVRHKEFQRNIKKKRACFPFAFCRDCQFLEGSPAMLPVQPAKLTEPAKAIKPIDRKSVHQICSGPVVLSLSTAVKKIVGNSLDAGATNIDLKLKDYGMDLIEVSGNGCGVEEENFEGLSLSALKHHTSKIREFADLTRVETFGFQGKALSSLCALSDVTISTCHVSAKVGTRLVFDHDGKIIKKTPYPHPRGTTVSVKQLFSTLPVRHKEFQRNIKKKRACFPFAFCRDCQFLEGSPAMLPVQPAKLTVTGELRACRSWKTREGITEAVG

SEQ ID NO: 30859 - protein, 54 aa, Homo sapiens
  DOMAIN (1)..(46): RNA polymerases L / 13 to 16 kDa subunit domain identified by PFam, accession name RNA_pol_L, E-value=7.8e-05, PFam score of 15.6
  misc_feature (1)...(54): Xaa = X or * as defined in Table 2
XPHPLEHKIIIRVQTTPDYSPQEAFTNAITDLISELSLLEERFRTCLLPLRLLP

SEQ ID NO: 30860 - protein, 723 aa, Homo sapiens
MLLCLLEEEPFESSSEEEFGGEDHQSLNSIVDVEDLGKIMDHVKKEKVSSESYYGPIQRRAAAGDWYYLLTGWCVTAKAPPDISAISALTAVKHGNCSSLTPLLNPPGSDVIVCAEMDEQWGYVGAKSRQRWLFYAYDSLRKTVVAHVFGERTMATLGRLMSLLSPFDVVIWMTDGWPLYESRLKGKLHVISKRYTQRIERHNLNLRQHLARLGRKSLSFSKSVELHDKEELAALFSELKQEQKKVDELIAKLVKNRTRIVNESDVFSWVIRREFQELRHPVDEEKARCLEGIGGHTRGLVASLDMQLEQAQGTRERLAQAECVLEQFGNEDHHEFIWKFHSMASSVQKKAMDRTETRFRKRGQITGKITTSRQPHPQNEQSPQRSTSGYPLQEVVDDEVLGPSDEGTGGRRGGIGLTKTKEGGRELAPEPEETWVVETLCGLKMKLKQQRVSPILPEHHKDFNSQLAPGVDPSPPHRSFCWKRKMEWWDKSEESLEEEPRKVLAPEPEEIWVAEMLCGLKMKLKRRRVSLVLPEHHEAFNRLLEDPVIKRFLAWDKGLRVSDKIPSEPTILGASPKTLPLASRICIRPSNTPPSRNFQMSTVTPTLSYLANDMEEDDEDPKQNIFYFLYGKTRSRIPLLRKRRFQLCRCMNPRARKNRSQIVLFQKLRFQFFCSMSCRAWVSPEELEENTGPRGDVDFQQELYSNANGRHQEEGEEPFVQII

SEQ ID NO: 30861 - protein, 445 aa, Homo sapiens
MNDDIRDSDLPDWRDRTPCVQKKAMDRTKTRFRKRGQITGKITTSRQPHPQNEQSLQRSTSGYPLQEVVDDEVLGPSAPGVDPSPPCRSLGWKRKKEWSDESEEEPEKELAPEPEETWVVEMLCGLKMKLKQQRVSPILPEHHKDFNSQLAPGVDPSPPHRSFCWKRKREWWDESEESLEEEPRKVLAPEPEEIWVAEMLCGLKMKLKRRRVSLVLPEHHEAFNRLLEDPVIKRFLAWDKDLRVSDKIPSEPTILGASPKTLPLASQICIRPSNTPPSRNFQMSTVTPTLRVGASPELGTVPYLPLWEADLSRRPLLVVPLSTNLISVLSYLANDMEEDDEDPKQNIFYFLYGKTRSRIPLVRNRRFQLCRCLNPRARKNRSQIALFQKLRFQFFCSMSGRAWVSREELEENTGPRGDVDFQQELYSNANGRQQERGEEPFVQII

SEQ ID NO: 30862 - protein, 264 aa, Homo sapiens
  DOMAIN (196)..(247): DNA mismatch repair proteins mutL / hexB / PMS1 proteins domain identified by eMATRIX, accession number BL00058A, p-value= 1.000e-40, raw score of 20.73
  DOMAIN (104)..(171): KRAB box domain identified by PFam, accession name KRAB, E- value=1.7e-41, PFam score of 151.3
MCPWRPRLGRRCMVSPREADLGPQKDTRLDLPRSPARAPREQNSLGEVDRRGPREQTRAPATAAPPRPLGSRGAEAAEPQEGLSATVSACFQEQQEMNTLQGPVSFKDVAVDFTQEEWRQLDPDEKIAYGDVMLENYSHLVSVGYDYHQAKHHHGVEVKEVEQGEEPWIMEGEFPCQHSPEPAKAIKPIDRKSVHQICSGPVVLSLSTAVKELVENSLDAGATNIDLKLKDYGVDLIEVSDNGCGVEEENFEGLISFSSETSHM

SEQ ID NO: 30863 - protein, 76 aa, Homo sapiens
MFCHRHCFQWSFCCFLLHTAIEAVLKSFSCLLVWYIGVARARHQRSETARHQRSESTPGHDGGRIPPLKPCCWRSR

SEQ ID NO: 30864 - protein, 417 aa, Homo sapiens
MDRTETRFRKRGQITGKITTSRQPHPQNEQSPQRSTSGYPLQEVVDDEMLGPSAPGVDPSPPCRSLGWKRKREWSDESEEEPEKELAPEPEETWVVEMLCGLKMKLKQQRVSSILPEHHKDFNSQLAPGVNPSPPHRSFCWKRKMEWWDQSEESLEEEPRKVLAPEPEEIWVAEMLCGLKMKLKRRRVSLVLPEHHEAFNRLLEDPVIKRFLAWDKDLRVSDKYLLAMVIAYFSRAGFPSWQYQRIHFFLALYLANDMEEDDEDSKQNIFHFLYRKNRSRIPLLRKRWFQLGHSMNPRARKNRSRIPLLRKRRFQLYRSTNPRARKNRSRIPLLCKRRFQLYRSMNSRARKNRSQIVLFQKRRFHFFCSMSCRAWVSPEELEENTGPRGDVDFQQELYSNANGRHQAGGEEPFVQII

SEQ ID NO: 30865 - protein, 261 aa, Homo sapiens
  DOMAIN (135)..(186): DNA mismatch repair proteins mutL / hexB / PMS1 proteins domain identified by eMATRIX, accession number BL00058A, p-value= 5.125e-33, raw score of 20.73
  DOMAIN (125)..(260): DNA mismatch repair protein domain identified by PFam, accession name DNA_mis_repair, E-value=5.6e-07, PFam score of - 103.4
  misc_feature (1)...(261): Xaa = X or * as defined in Table 2
XASAKCWAAAPAVHVGEPVHAGGLHTERGADPVIGLYLVHRHGATKAREGGACQTPTVGNRQTPTVGNRQDTNARKPPDTNARKPPDTKARNTRQTTTEGDHLPSDPAAGVRKKNAVRTEPAKAIKPIDRKSVHQICSGPVVLSLSTAVKKIVGNSLDAGATNIDLKLKDYGMDLIEVSGNGCGVEEENFEGLSWDSTGVFDHDGKIIQKTPYPHPRGTTVSVKQLFSTLPVRHKEFQRNIKKPVGEKYMRSVDTQACSCI

SEQ ID NO: 30866 - protein, 98 aa, Homo sapiens
MKKRGLIDSQFCRLYRKRGWGGLRKLTITAEGEGEAGTSGHVGAGETERVKREVLHTFQQADPTRAHSLSREQQGGKSAPMSQSPPTRVPATTLGITI

SEQ ID NO: 30867 - protein, 264 aa, Homo sapiens
MGLPWGQPHLGLQMLLLALNCLRPSLSLELVPYTPQITAWDLEGKVTATTFSLEQPRCVFDGLASASDTVWLVVAFSNASRGFQNPETLADIPASPQLLTDGHYMTLPLSPDQLPCGDPMAGSGGAPVLRVGHDHGCHQQPFCNAPLPGPGPYREDPRIHRHLARAAKWQHDRHYLHPLFSGRPPTLGLLGSLYHALLQPVVAGEAPEQLRIGSFMGKRYMTHHIPPREAATLPKRACFPFAFCRDCQFLEGSPAMLPVQPAKL

SEQ ID NO: 30868 - protein, 1012 aa, Homo sapiens
  DOMAIN (152)..(203): DNA mismatch repair proteins mutL / hexB / PMS1 proteins domain identified by eMATRIX, accession number BL00058A, p-value= 5.615e-39, raw score of 20.73
  DOMAIN (142)..(412): DNA mismatch repair protein domain identified by PFam, accession name DNA_mis_repair, E-value=1.5e-43, PFam score of 158.1
MDVGWDLGEDCWQEHLHTAFSFDCWPCSQNGDRVPSVNPVGGGAPRSYLQVASAECWAAAPAVHVGEPVHAGGLHTERGADPVIGLYLVHRGGACQTPTVGNRQTPTLGIHARPRRRATTSLLTLLLAFGKNAVRTEPAKAIKPIDRKSVHQICSGPVVPSLSTAVKELVENSLDAGATNIDLKLKDYGVDLIEVSGNGCGVEEENFEGLTLKHHTSKIQEFADLPQVETFGFRGEALSSLCALSDVTISTCHVSAKVGTRLVFDHYGKIIQKTPYPHPRGMTVSVKQLFSTLPVHHKEFQRNIKKKRACFPFAFCRDCQFPEASPAMLPVQPAELAPLLPGRLCWSPRPLEKNKAMGRPLLLPLLPLLLPPAFLQPSGSTGSGPSYLYGVTQPKHLSASMGGSVEIPFSFYYPWELATAPDVRISWRRGHFHRQSFYSTRPPSIHKDYVNRLFLNWTEGQKSGFLRISNLQKQDQSVYFCRVELDTRSSGRQQWQSIEGTKLSITQGSSAAQASTRSAAPCSTAPGPIDRPRAEECGSKAQNWQAALPAAWSLGCKRKRECLDESDDEPEKELAPEPEETWVAETLCGLKMKAKRRRVSLVLPEYYEAFNRLLAPGVDPSPPRRSLGCKRKRECLDESDDEPEKELAPEPEETWVAETLCGLKMKAKRRRVSLVLPEYYEAFNRLLAPGVDPSPPRRSLGCKRKRECLDESDDEPEKELAPEPEETWVAETLCGLKMKAKRRRVSLVLPEYYEAFNRLLAPGVDPSPPRRSLGCKRKRECLDESDDEPEKELAPEPEETWVAETLCGLKMKAKRRRVSLVLPEYYEAFNRLLEDPVIKRFLAWDKDLRVSDKIPSEPTILGASPKTLPPASRICIRPSNTPPPRNFHMSTVTPMLSYLANDMEEDDEAPKQKIFYFLYGKTHSHIPLRPKHWFQLCRPMNPRARKNCSQIALFQKRRFQFFCSMRCRAWVSPEELEENTGPRGDVDFQQELYSSANGRHQEGGEEPFVQII

SEQ ID NO: 30869 - protein, 62 aa, Homo sapiens
MICTNGFLSSCLVSAISIGNKVPAENPHLPLGSGVLGSERDNVTLQGGSSLDRKVIHVPCQV

SEQ ID NO: 30870 - protein, 900 aa, Homo sapiens
  DOMAIN (384)..(423): DNA mismatch repair proteins mutL / hexB / PMS1 proteins domain identified by eMATRIX, accession number BL00058B, p-value= 1.257e-33, raw score of 16.83
  DOMAIN (313)..(600): DNA mismatch repair protein domain identified by PFam, accession name DNA_mis_repair, E-value=3.5e-42, PFam score of 153.6
MSEPPANDLFNAAKAAKSDMQHREVRVKCVKALKGLYGNRDLTARLELFTGRFKDWMVSMIVDREYSVAVEAVRLLILILKNMEGVLMDVDCESVYPIVLFYPECEIRTMGGREQRQSPGAQRTFFQLLLSFFVESKLHDHAAYLVDNLWDCAGTQLKDWEGLTSLLLEKDQSTCHMEPGPGTFHLLGESPGISAIVQGAIEKSGERSSPPPKRIGSMKEGPMVLPLALDTQCWFPVEVPLDMAQPKQERTPTVGNRQTPTLGNRQDTNARKPPDTKARNTRQTTTEGDHLPSDPAAGVRKKNAVRTEPAKAIKPIDRKSVHQICSGPVVLSLSTAVKKIVGNSLDAGATNIDLKLKDYGMDLIEVSGNGCGVEEENFEGLTLKHHTSKIQEFADLTRVETFGFRGKALSSLCALSDVTISTCHVSAKVGTRLVFDHDGKIIQKTPYPHPRGTTVSVKQLFSTLPVAPMLMTECLTWARNGSSKHPLSLAQKPEFLFHQLQSRDNAICPIAEQKAEGKFSSRYRNHDSAENRRDGSMTRPRTDWTLKRACTEKRRPQHASSFEWRGHSLCWDREQRDAETLKMLLDSGLSVQKKIKDRTETRFGEMGQILGKIMMSHQPQPQEEQSPQRSTSGYPLQEVVDDEVSGPSAPGVDPSPPRRSLGWKRKRECLDESDDEPEKELAPEPEETWVAETLCGLKMKAKRRRVSLVLPEYYEAFNRLLEDPVIKRLLAWDKDLRVSDKIPSEPTILGASPKTLPPASRICIRPSNTPPPRNFHMSTVTPMLSYLANDMEEDDEAPKQNIFYFLYEETRSHIPLLRELWFQLCRYMNPRARKNCSQIALFRKYRFHFFCSMRCRAWVSLEELEENTGPRGDVDFQQELYSNANGRHQEGGEEPFVQII

SEQ ID NO: 30871 - protein, 212 aa, Homo sapiens
  misc_feature (1)...(212): Xaa = X or * as defined in Table 2
XGQCRVLGRRSSRCMWGSQYMQVGSTRRGARSPEIGLFMVPRAGACQTPTSRKPPDTNARNPRQATTEGDYLPSDPAAGVRKKRSPVCSDWSRLFDVTDSTFDRATRRKGETGSIFSAPPGKGGAQRRKQPLGAQEAGRLWEPWRELSQSPRRDPVVASWKRAESSSPEPVKPIKLMDGSPVLQICSGPGVPSLRPNAVKELVENSLDAGAH

SEQ ID NO: 30872 - protein, 167 aa, Homo sapiens
MRPCSISSAEQLLLAISGVGKEWEAVPVRIKAYILRECFLSPERVCRYAAAGSRKSLGTPRRLPQGTGISYSWDKVETFVFLAAVWKLPARYFGFHPICWNLVPWPYPDAEKPWKYAHLKIPLCERRRERGDIRGQRATSVTEPWERNSEIFTIISQGKIAFHTTYV

SEQ ID NO: 30873 - protein, 38 aa, Homo sapiens
MGVKLEIFRMIIYLTFPVAMFWVSNQAEWFEDDVIQRK

SEQ ID NO: 30874 - protein, 291 aa, Homo sapiens
MVVLKAARCMKPPECVSGISGSVSGIGGFFVSLTSRMKLRTLPMCSEFLPSGWFVVSLASGVKLQTFTMLQLIKAVQTQDKQQQDLLERSKEQSFLCGRMPLTPEPPSGRVEGPPAWEAAPWPSLPCGPCIPIMLVLATLAALFILTTAVLAERLFRRALRPDPSHRAPTLVWRPGGELWIEPMGTARERSEDWYGSAVPLLTDRAPEPPTQQLGPPDRTGGPSPEHLLGAPALGGEAPRHRPVFTEATNTKENGSCGAEQPRCGDDSWQEMTGIQFPRATNPVLLGHSPT

SEQ ID NO: 30875 - protein, 246 aa, Homo sapiens
MRPVDPDGTEHSLFCPLTALRGMVNSRIQKSPGKPSVCDVPLPISPGQSSQLHGKVFGQLNAGKAAEFLKSPPDHQAQAASTSGPQKTTLSKRGLRLQPCQLHSAPHSFQLLPLTQKSTWDLRGSAPLHAAQTSLSEFSCHRPDVEDTLGTKGPDKTQCQSENSTRPQYSPETSQNQPVGKGTDLKVTKLGVPSLMAQDGVNYSVKTEAHSTGTTAEPLSSQDRAVRGHNTDSHVQTPDLGEDTAL

SEQ ID NO: 30876 - protein, 203 aa, Homo sapiens
MGKRECEEMWICLKSLLWASGDFCGCEDFSKYPQDRLVQIQYVRRPPKSMDTRRRQSQGAISEADYHNQGLKRVSSAKRRMSVEWKGEDGVDVVPCEMSCLRQYAGHSRDASSAQVTCVPCPCKPRITHREIEFSAAAIWTVLISFPEVLFGRLPSHLGTDGVCLACDGDRGAAALPRTSSGIEEAALKSPTGIGQENLDVDT

SEQ ID NO: 30877 - protein, 151 aa, Homo sapiens
MPKEPGKALRWEDRSKGNSQEGKARRLKAVGKIVREKGNEWPIGRGCINVRTKFKGLTSVLKLVLRCYRKITGCSVLASCYKFVRLLKQKELAHMQALAEEWKKRDRERESLVKKKGTSASQARKGTKHGAENNCEQVETKKASEDRNTLN

SEQ ID NO: 30878 - protein, 113 aa, Homo sapiens
  DOMAIN (44)..(84): ADP-ribosylation factors family proteins domain identified by eMATRIX, accession number BL01019A, p-value=3.348e-15, raw score of 13.20
  DOMAIN (1)..(113): ADP-ribosylation factor family domain identified by PFam, accession name arf, E-value=0.00049, PFam score of -65.6
  misc_feature (1)...(113): Xaa = X or * as defined in Table 2
XALCCKGPPPARPEYDLVCIGLTGSGKTSLLSKLCSESPDNVVSTTGFSIKAVPFQNAILNVKELGGADNIRKYWSRYYQGSQGVIFVLDSASSEDDLEAARNELHSALSHSQ

SEQ ID NO: 30879 - protein, 277 aa, Homo sapiens
MHRLSQYSLKCNPRRHWQISARPICSRKRVHVSNKMTGGSMFLTVTSTLHGNSGSAQHAQPGLNSRVPIRAQWNRGRTQDRNGGAIPVPTQSVRASLRGSLDPSALWERGKLCSPGKKVLCGERRGKPEADRGQGTRRRGRPISQQPQRDPRPAAVLAQAALYLSAPPPTRPGGCPSGPGKGLPAGCGRKNPRGSYPKERKQKGCSSRQGPSGTPRSERRHATPALPYQIIHVQKRLSYSEISIRQPKASGTAPNPEKKAASLAASEQLLKKPATGK

SEQ ID NO: 30880 - protein, 64 aa, Homo sapiens
  misc_feature (1)...(64): Xaa = X or * as defined in Table 2
XKPGQMQAQNAQQLHERIQSSSMDAKLEALKDLASLSRDVTFAQEFINLDGISLLTQMVESGTE

SEQ ID NO: 30881 - protein, 123 aa, Homo sapiens
MAHHAKTRKPEMKLLQHAFDEDHSNDTRELMSEAKRGPVTPEGIHKYHWVTTAYGIQYSNTLYRFTAEEQQALQCGPELQLPRLAEATPTQLCTRHLAIHQVEQEPSGQPRTDTCASGPQRMR

SEQ ID NO: 30882 - protein, 75 aa, Homo sapiens
MISSSVCQPGNKQSHPQSSNSYLSFSLVTSRSCFSFILVSFCYNILHLHMQFGVHQLQFLRTDALDTSIMGFEKP

SEQ ID NO: 30883 - protein, 52 aa, Homo sapiens
MILKPLQFFTNKVETQGLFILQFFLFFLFVGLSRNLSCFSTIWMDDYFFPSC

SEQ ID NO: 30884 - protein, 152 aa, Homo sapiens
MDFRTWKQTHLKSSMPTYQDPSKWVLGLADFKNEAADPCVVSLTSGVKLQTFAVNVTALKVGMSGVVCSSQWVRGLADFRNEAADPCSECCSSEWDFDLKKLPNIKMRKICANDAIPKTCKRKTIITVDQDLGELELNDESSDSDEEMTAVA

SEQ ID NO: 30885 - protein, 77 aa, Homo sapiens
MGLEIPDILNASNLKTFREWDFDLKKLPNIKMRKICANDAIPKTCKRKTTITVDQDLGELELNDESSDSDEEMTAVA

SEQ ID NO: 30886 - protein, 76 aa, Homo sapiens
  misc_feature (1)...(76): Xaa = X or * as defined in Table 2
XGGKQAPFRKPEARVTPLTTVMAVPAGHLTFECRNFLRVDPKRDIVLDVSSTSSEDSDEENEELNKLPALQEKKNN

SEQ ID NO: 30887 - protein, 67 aa, Homo sapiens
  misc_feature (1)...(67): Xaa = X or * as defined in Table 2
XTLKGDIVLDVSSTSSEDSDEENEELNKLQALQEKRINEEEEKKKEKSKEKIKLKKKKEKVLLIQFH

SEQ ID NO: 30888 - protein, 138 aa, Homo sapiens
VSAQDPESWPTDKPDGTCGVLLVWGDAGRRKKHICPPRPLALSIRPRALTLPLSLGRSGGRALAEEQKAEGSSCGSAERLCAFAAKTRPYLSLLWIVWVDTDRADTVLTIPAQKDEKEEEEFLLPPGILWEAHKISCY

SEQ ID NO: 30889 - protein, 249 aa, Homo sapiens
  DOMAIN (139)..(191): L-lactate dehydrogenase proteins domain identified by eMATRIX, accession number BL00064E, p-value=1.000e-40, raw score of 27.20
  DOMAIN (27)..(247): lactate/malate dehydrogenase domain identified by PFam, accession name ldh, E-value=3.2e-77, PFam score of 270.0
MATIKQKLIAPVAEERGEQFQTIRSPVVGVGQVGMACAISIPGKVSWPDELALVDVLEDKLKGEMMDLQHGSLFLQTPKNCGQDKDYFCGPPNSKDFKLPWMEFWGEHGDSSVAWCWNGVNVAGVSLQELNPEMGTDNDSENWKEVHKMVVESAYEVIKLKGYTNWAIGLSVADLIESMLKNLSRIHPVSTMVKGMYGIENEVFLSLPCILNARGLTSVINQKLKDDEVAQLKKSADTLWDIQKDLKDL

SEQ ID NO: 30890 - protein, 146 aa, Homo sapiens
MSGQVRAQQEQEGCLQAKNEKVQEDIDSDRHYCSCLTFYEAEINLQVQKPLLAKVQSKACLGLIYTVYVDSLNVSLESLIANLCACLVPAAGGSQKKWKMKADWGNNGGEQQMTLFDGPFCLGHSLKGEVNQRMTEENNVHMDEAC

SEQ ID NO: 30891 - protein, 108 aa, Homo sapiens
MHMSETESILKIWLNYERAPTHAKLVSTPQTSKLCQLLLVLPKRQHRNKSLRQLPQQPEFGMQAPLFPPPCTPKPERVEEGADTGHSLKGEVNQRMTEENNVHMDEAC

SEQ ID NO: 30892 - protein, 302 aa, Homo sapiens
  DOMAIN (227)..(300): PCI domain identified by PFam, accession name PCI, E-value= 1.4e-13, PFam score of 58.6
MAGYDLTTRITHLLDRHLVFPLLEFLSVKEIYKEKELLQGKLDLLSDANMVDFAMDAYKNLYSDDIPHALKENRTTVVAQLKQLQAETELIVKMFEDPETTRQMRSTRDGRMLFDYLADKHGFRQEYLDTFYTYAKFQYECGNYSGAAEYLYFFRVLVPATDRNAVSSLWGKLASEILKQNWDADMEDLTWLKETIDNNSINFDLDGAKKKLRECESVLVNDFLVACLKDFIDNAHLFIFETFCHIHQCISINMLADKLNMTPDETERWIVNVIRNARLDAKIDSKLGHVVMVTMYSHPISK

SEQ ID NO: 30893 - protein, 66 aa, Homo sapiens
EIYNEKELLQGKLDLLSDTNMVDFAMDVYKNLYSDDIPHALREKRTTVVAQPETASGRNRTNCEDV

SEQ ID NO: 30894 - protein, 177 aa, Homo sapiens
MVCRCLTWLSSHKQQAKGHPEGRTLWLSVAASGETAAATPAGLQGRGTFTHVGAPPPLQLFILERCQGPPNVRAAELCPGLYPKPECFRDQAQPGEALQGLSPSHPHQAPQVLRRSKASETVQPEQFCHPNGDSRREAEECVSGNQNCEEIHFCCLKPSVIGDGSPREQIHQVFAWL

SEQ ID NO: 30895 - protein, 47 aa, Homo sapiens
MWSSELQHQHHLRACYKYQFLGLTSNLQREDSRISVSPSSPSNCYAC

SEQ ID NO: 30896 - protein, 72 aa, Homo sapiens
MTGSRAPRLIQLISYQPLPLPCNVVSMGILLQKSQVLGCSEVHTWHFLSSSRGAKRLGTGPGKNYVAELLGN

SEQ ID NO: 30897 - protein, 61 aa, Homo sapiens
MRRKSLPNCYWILLLQTILVVTVEAQLIRMGQYQAIAWEDSCCGRVTQILHLTLFEQPLSS

SEQ ID NO: 30898 - protein, 51 aa, Homo sapiens
MVRKSLTRVALKSFLVLSKPVSPELDSISFNIYSPNSLSRSSSSSNLFTNP

SEQ ID NO: 30899 - protein, 262 aa, Homo sapiens
MVRKSLTRVALKSFLVLSKPVGEALHLTRGAERQLAAVRGHYVTIECTTSTASPWGLYICLPGIPVEQMDFRLASTVTLAYGNSNDSNSNASDLVKSIEADDDDDNKDDDEAKALPTDQTLNNVVTPSLVTNPHSQPLAGTTKGCMFYDIVHGHQTATSTPWKSAKNSKPPPFPNIFLRGQGIFPEEMCTSVHQETCENVQGSIVYNNFKLETTHVSIKNYTQQHEESTNMKMSERSQMQKRAHSVIPFMRGLKTSKTNCSA

SEQ ID NO: 30900 - protein, 98 aa, Homo sapiens
  misc_feature (1)...(98): Xaa = X or * as defined in Table 2
XKSERENPEESDTETQDHSRKTESGSDQSETPGAPVRRGTTYVEQVQEELGELGEASQVETVSEENKSLMWTLLKQLRPGMDLSRVVLPTFVLEPRSS

SEQ ID NO: 30901 - protein, 299 aa, Homo sapiens
MGLTTCGDDAASPFLERPGERSQRKARPAAPADAPAEKAGDLGTILRNQDICALPNTQSRQDPCNPDQCFPVKRTLLPNSTCRNLWVAVRVGGWFRVFWFVTVEGRCWLDALELALRCSSLLRLGTCKPGRDGEPGTSPDASPSSLCGLPASATVHPDQDLFPLNGSSLENDAFSDKSERENPEESDTETQDHSRKTESGSDQSETPGAPAEGRHPRRSEGATWEHALLQSTNGSWCPHWHLLFRPAESSSCPGPRMCKTAGWRFVGKWGVLGSIRPVHRPRTSHGDTPRAEARLTEHQ

SEQ ID NO: 30902 - protein, 237 aa, Homo sapiens
  DOMAIN (179)..(199): INHIBIN ALPHA CHAIN SIGNATURE domain identified by eMATRIX, accession number PR00669D, p-value=4.659e-09, raw score of 7.36
MLNQKLLYTEANSRHWSEGSRLLADIAKVLLQAFKALGPQRLGNPDATTPQFPDMILSASRGHHHEAICGPYQGCAECAFSSDNRQIVSGSRDKTSSYGIPWVLKEKTVSLMGLSPGPCEREAQCPPDLLLLPPLAPTPTEPALLSPSMHLPTLQGSYHLASRPPSYRSGRPLTAPAPPTAQAALLLLQPPSYRPAALLLLQPPSYRSGRLLLLQLPPTAQAAMLLLSPLLRLRPPS

SEQ ID NO: 30903 - protein, 37 aa, Homo sapiens
  misc_feature (1)...(37): Xaa = X or * as defined in Table 2
MTEQMTLRGTLKGHNGWVTQIATTPQFPDMILSASRX

SEQ ID NO: 30904 - protein, 112 aa, Homo sapiens
  misc_feature (1)...(112): Xaa = X or * as defined in Table 2
XGCGRAEDKDGGEKADSEAGKEAPGPSKVKTGKPEEASLDSREKKTNLAPKSTAMNESSSGKAGKPPCGATKRSIADSEESEAYKSLFTTHSSAKRSKEESAHWVTHTSYCF

SEQ ID NO: 30905 - protein, 194 aa, Homo sapiens
MAGTLPKSKFPDTIQAPALQVIALLTCYADTLLCAGTFQTKALTRKPCGAAFQEDDVIMLNGTKEDVDVLKTRMEERRLRAKLEKKTKKPKAAESVSKPDVSEEAPGPSKVKTGKPEEASLDSREKKTNLAPKSTAMNESSSGKAGKPPCGATKRSIADSEESEAYKSLFTTHSSAKRSKEESAHWVTHTSYCF

SEQ ID NO: 30906 - protein, 68 aa, Homo sapiens
HVHILLGAIEHDDIILLEGSPTRVANFRFYLFQGSLRKHTAAAPKEADPVSAVHLQAHNGADETRPLQ

SEQ ID NO: 30907 - protein, 325 aa, Homo sapiens
MDISSAMLYWVETGHSRFEYQEWDPAAKTLLQHEHVHILLGAIEHDDIILLEGSPTLERANKRGQIPSPVNGEATLQSPTLSPKQWPPGSEKSVSLFSALDSSVHWMLNAGTKFCLTYHWLYALLTAETRPEGLLKNALGNNCFSRTLFGFPLAGWNPLCAAFAGSPLPAGFGTHCPSSQIHSCQGHQEYPVHSTTGTSMSSRDGSSQLHLTQLTQERTNDPHALLFGKGNEGFRTVGTGHPQGLFKQPKLLLQNLGTYTRGKRSRGIPCWKYPSPEGCWQNHHLIQNKKSAPGAPESVKKNKPTQCEDDEDEDLYDDPLPLWEQ

SEQ ID NO: 30908 - protein, 67 aa, Homo sapiens
MERLTLPLGGAAAVDEYLEYRRYKQHKTDLEAIPQQCPIDLPRQVTGCQCRAYLYVPLNGSQPIRCS

SEQ ID NO: 30909 - protein, 72 aa, Homo sapiens
MGGLTGFSSLAEGYMRLDDSGIVGTSSQVSSLRRPEEDDMAFFERRYQERMKMEKAAKWKGKAPLPSATKPS

SEQ ID NO: 30910 - protein, 233 aa, Homo sapiens
MERVTLPLGGAAAVDKYLEYRRIVGEDDGGKLFTPEEYEEYKRKVLPLRLQNRLFPAYAHDTVVETKQERLAQEKPVGQDIPYAAMGGLTGFSSLAEGYMRLDDSGIGVPSVEFLESPITAVDSPFLKAFQASSSSSPETLTDVGTSSQVSSLRRPEEDDMAFFERRYQERECCESQSPSVALSGNSSADAGQTVLPMRPKSNSKGGRAAEETECTALLVPSKVSADTKTVEP

SEQ ID NO: 30911 - protein, 394 aa, Homo sapiens
  DOMAIN (49)..(88): PROTEIN ZINC FINGER ZINC-FINGER METAL-BINDING NU domain identified by eMATRIX, accession number PD01066, p-value=7.894e-29, raw score of 19.43
  DOMAIN (95)..(389): Zinc finger, C2H2 type domain identified by PFam, accession name zf-C2H2, E-value=9e-42, PFam score of 152.2
MHIITPSASENGSHLFVPWEPICPFEEKTKVERMVEDYLASGYQDSVTFDDVAVDFTPEEWALLDTTEKYLYRDVMLENYMNLASTRGYSGWKLCDCKNCGEVFREQFCLKTHMRVQNGGNTSEGNCYGKDTLSVHKEASTGQELSKFNPCGKVFTLTPGLAVHLEVLNARQPYKCKECGKGFKYFASLDNHMGIHTDEKLCEFQEYGRAVTASSHLKQCVAVHTGKKSKKTKKSFTRSTQLTEHVRTHTGIKPYECKECGQAFAQYSGLSIHIRSHSGKKPYQCKECGKAFTTSTSLIQHTRIHTGEKPYECVECGKTFITSSRRSKHLKTHSGEKPFVCKICGKAFLYSSRLNVHLRTHTGEKPFVCKECGKAFAVSSRLSRHERIHSGEKP

SEQ ID NO: 30912 - protein, 422 aa, Homo sapiens
  DOMAIN (343)..(393): Ribosomal protein S4e proteins domain identified by eMATRIX, accession number BL00528C, p-value=3.489e-25, raw score of 22.01
  DOMAIN (61)..(301): Zinc finger, C2H2 type domain identified by PFam, accession name zf-C2H2, E-value=2.1e-40, PFam score of 147.7
MRAQNGGNTFEGNCYGKDSISVHKEASIGQELSKFNPCGKVFTLTPGLAVHLEILNGRQPYKCKECGKGFKYFASLDNHMGIHIGEKLCEFQECERAITTSSHLKQKSKKTKKHGKSFTNFSQLSAHVKIHKGEKSFECKECGRSFRNSSSFNVHIQIHTGIKPHKYTECGKAFTRSTHLTQHVRTHTGIKPYECKECGQAFTQYTGLAIHIRNHTGEKPYQCKECGKAFNRSSTLTQHRRIHTGEKPYECVECGKTFITSSHRSKHLKTHSGEREKPFVCKEFGKAFALSSCLSMHERIHTGEKYYESVKIDGKVRTDITYPAGLMDVINTDKMGENSQLTCDTKGHFAVQRITPEEAKYMLCKLRKIFVGTKGIPHLVTLDTHAICYPDPLIKVNDTIQIDLETGKITDFIKIDTGTCVW

SEQ ID NO: 30913 - protein, 664 aa, Homo sapiens
  DOMAIN (619)..(633): C2H2-TYPE ZINC FINGER SIGNATURE domain identified by eMATRIX, accession number PR00048A, p-value=6.250e-14, raw score of 10.52
  DOMAIN (182)..(383): Reverse transcriptase domain identified by PFam, accession name rvt, E-value=2e-23, PFam score of 91.2
MTGSSSTSRKGTVKEGSCSTHQGKSAPKVLSDPTPEESWQELVPAVPPPYREEGVPTPEPTAPIPLPDSHTPRPPRVDKRGSEAVGETPPLAARLQPKTGIQTPLREQRYTGVDEDGDVVERHAFVCQPFTSVDLLNWKNNTPSYTKKPQALIDLLQTIMQTHNPTWADCHQLLMYLFNTDEQRRKLSLGPNQLDKSSIRFPEKLLKESRFISSRDQGLPASTGLALGQPSYSDSAPTVPNPYTLLELLPAEDSWFTCLDLKDTFFSIRLAPESQKLFAFQWEDLGSGVTTQYTWTWLPQGFKNSPTIFREALARDLQKLPAEDLGCVLLLYMDDVLLGHSTAVGCTKGTDALLWHLEDCGYKVSKKKAKTCRQHVRYLGFTIRKGEHTLGQKESRSSATYQNLKPEGNLCTAPFEDLQVDFTEMPKCGGNNYLLVLVCTYSGWVEAYPTSTEKVYETRSYSGWKLCKNCEEVFRELFFLKTHMRAQNGGNTFEGNCYGKDTLSVHKEASIGQELSKFNPCGKVFTLTPGLAEHLEVLNARQPYKCKECGKGFKCFASLDNHMGIHADCGKAFTRSIQLTEHVRTHTGVKPYECKECGKAFTQYTGLAIHLRSHSGEKPYQCNKCGKAFTRSSGLTQHTIIQMGEKPYECVECGKTFITSSHRT

SEQ ID NO: 30914 - protein, 92 aa, Homo sapiens
MEHLRRPISREQNDVILLIMDLKPGPGGLLSEAPNEKLFFVDTGSKEKDTFLYQMRKLPLFLASYLLLMNAENDSDKRSCIYRKHLSISPVT

SEQ ID NO: 30915 - protein, 114 aa, Homo sapiens
  misc_feature (1)...(114): Xaa = X or * as defined in Table 2
XLRRRRRRGPRNKKRGWPGAWLQEPLGLEVDQFLEDVRLQDAHERFPKRQEAQAVRSSYGRSWPSRAMLPREVRRAQARLLNPSATDAKPGPQDTVERPFYDLWASDNPLDRPL

SEQ ID NO: 30916 - protein, 121 aa, Homo sapiens
MVQTFSRCILCSKDEVDLDELLAARLVTFLMDNYQEILKVPLALQTSIEERVAHLRRVQIKYPGADMDITLSAPSFCRQISPEEFEYQRSYGLSGNLWAALLGGKSLTGWPNSPTKRKRRN

SEQ ID NO: 30917 - protein, 90 aa, Homo sapiens
MKSAYAYLRSIRDTVSDEDRTLRRASHHPMLRGDIIMVAATVVTAHKALSQLLTVITQLILTTTRRGKLTDTREDGGDHVWSAEGAYRRK

SEQ ID NO: 30918 - protein, 125 aa, Homo sapiens
MWESLELPRYLLNGFDQNANDMDNEIQAWVVSDGDEELVGNWNKGDSCYVLAKRLAAFWVYSEGASPKPWQLRDVEPAGAQKSISKVGEPLPRFQRMYENAWMSRQKFAVGAGSLRRTSAMAMQK

SEQ ID NO: 30919 - protein, 392 aa, Homo sapiens
MTNLRSVPTSVHHTECGFKNICDTTQKDRKHTESKALLLGYGLEAFVCVGTKAKGVPHAWVMTCGTDGAITFWESLTGHRYIHKPTNPDEPPVAEQPKPLYPYRTIGCVFNHQMFLGNCQPSDAVETCVFDLNDESKWKPMSEEAIKSVCAPGATTSLPPFPPLCASTIDASVTNINRSFGEKKENRDEQQKITPGIPALWDAQRGGPPQVRTKRPAQTTKTKPGPTKKTKSTRPTRKIERIPETQETETRETLEPARHREQGTETTPRQPSQDNRDLGLTTVWEDQLSYLLSPALASYEFERTTSISAGNEEFQDAIRRAVPDGHTFKGFPIHFVYRNARRAFATCLRSPFCEEIICCRGDQVRLAVRVRVFTYPESACAVWIMFACECAS

SEQ ID NO: 30920 - protein, 180 aa, Homo sapiens
MDVHGRIREILAETIREELAPDQQHLSTEDLIKALRRRGIIDDVMKELNFVTVLGGKAFLEHLQEPEPLPGQVCSTFTLCLHYRNQRFRSKPVPCACEPDFHDGFLLEVHRESLGDGTRMADSTTMLSISDPIHMVLIKTDIFGETTLVASYFLEWPIGFGLRKWSDQSDCGTYGCRLWW

SEQ ID NO: 30921 - protein, 47 aa, Homo sapiens
MAGAGVSQTSLLVAPVLQRGDQLSGQTFGQLFTIARVWNQLSCQQRS

SEQ ID NO: 30922 - protein, 51 aa, Homo sapiens
  misc_feature (1)...(51): Xaa = X or * as defined in Table 2
MDAEPPLRPEVPEIQECPIAQESLESQEQRARAALRERYLRSLLAMGGSSX

SEQ ID NO: 30923 - protein, 530 aa, Homo sapiens
  DOMAIN (361)..(404): kw TRANSCRIPTASE REVERSE II ORF2 domain identified by eMATRIX, accession number DM01354T, p-value=1.000e-40, raw score of 9.48
  DOMAIN (240)..(483): Reverse transcriptase domain identified by PFam, accession name rvt, E-value=6.6e-31, PFam score of 116.1
MMFQAEEIASAQKMWNQHHITPSKVDHIVGSKALFSKCKRTEIITNYLSDHSAIKLKLRIKKLTQNRSTTWKLNNLLLNDYWVHNEMKAEIKIFFETNENKDTTCQNLWDTFKAMCRGKFITLNAHKRKQQRCKIDTLTSQLKELEKQEQTHSKASRRQEITKIRAELKEIEAQKTLQKINESRSWIFEKINKTDRLLARIIKKKREMNQIDAIKNDKGDITTNPTEIQTTIREYCKHLYANKLENLEEMDKFLNTYTLPRLNQEEIESLNRPITGSEIEAIINSLPTKKSPGPDGFTAEFYQRYKEEMIEKKAFDKSQQPFMLKTLNKLGIDGTFLKIRRAIYDKPTANIILNGQKLEAFPLKTGTRQGCPLSPLLFNIVLEVLAREIRQGKEIKHIQLGKEEVKFSLFADDVIAYLENPIVSAQNLLKLISNFSKVSGYKINVQKLQAFLYTNNRQTESQIMSEFPFTIASKRIKYLGIQLTRDVKDLFKENYKPLLNKIKEDTNKWKNIPCSWIGRINIMKMAILHK

SEQ ID NO: 30924 - protein, 484 aa, Homo sapiens
MLKYYSTHLPPSPRDLVEASVTVPGEGHLECLHGACSPSPGPTPTREAALRGEPRIQTLPVASALSSHRTGPPPISPSKRKFSMEPGDEDLDCDNDHVSKMSRIFNPHLPLLPVQRARALPHDTHCSGVPGTRLRFYYKDSHGQGGWSGSLEEGGAVQAKPYQMSNIVSHQGNANQYHKEIPLTPVRMAMIKRQYKSVSKDVEKLEHVYAAVPLHDTCLSYTVTHMLLLFIHPLSLCAPLVASVMRQEGLDALRGCRVNKTANGDCRRDPRERSRSPIERAVAPTMSLHGSHLYTSLPSLGLEQPLALTKNSLDASRPAGLSPTLTPGERQQAEPGSLAIATAVGESLKDTGTSVSPGVHISPSQLDNRGHLESHTGTYALFPPPFPGLFYIQGQISARYHFGSVALGIKETALDLGQDAPNFGSGLYQPPALCGLARFSGLSFPAGKYISPFYHQPYRGYQGYIKQLESTDPEPGTEQGLRKC

SEQ ID NO: 30925 - protein, 531 aa, Homo sapiens
  DOMAIN (17)..(56): PROTEIN ZINC FINGER ZINC-FINGER METAL-BINDING NU domain identified by eMATRIX, accession number PD01066, p-value=5.500e-35, raw score of 19.43
  DOMAIN (15)..(84): KRAB box domain identified by PFam, accession name KRAB, E- value=1.1e-21, PFam score of 85.5
MLKSMVLWLGEQESLTLEDVAVEFTWEEWQLLGPAQKDLYRDVMLENYSNLVSVGGSSRVDRSACNSVPFSSEDSPGKNPLEGQEVGKALHPQSQYSNDHQRTQPEKRPGFCRFRNHHQTGFSPAGANQRGPLAATLSGPGGEGQSAVARLTGEKKNHPGAQYANRLSPRVGRFINAAGTTGFPTGKRAVSATQLMRWDKPCGCPQGACDHGMGDWRNPGWPTMGPVPLCTSYESAEPECKDGEKANQSHKGFCRFRNHHQTGFSPAGANQRGPLAATLSGPGGEGQSAVARLTGEKKNHPGAQYANRLSPRVGRFINAAGTTGFPDWKAGSERNAINVLRPLYVNPRIHWGSRTAQASLGRERQEREEEESKGYEIKNSVEFTGNGDSFLHANHERLHTAIKFPASQKLISTKSQFISPKHQKTRKLEKHHVCSECGKAFIKGVSSRVSLGISLKCVIKELPPIQNSNTGEKFQAVMLEGHESYDTENFYFREIRKNLQEVDFQWKDGEINYKEGPMTHKNNLTGQRGST

SEQ ID NO: 30926 - protein, 269 aa, Homo sapiens
MIIIYKKEEEEGGREEEKEEKRGEKKRKEEGEERKEILRMNYDVSLARQTKGIGPPRKATFMPDGDYPGSEASQRLRRCKMAAPSSPWLMGAAIFEYLTYTRQRAVLALVTGGTFDIQGCSHRILSEEWKSLDPVQKALYWDGCWRTTGTWSSWVSTDYTIKVHFSHPPKNPWTPSFTTNKPGFYFQYEKFVRKKETGLRSSRSPVNPWVTYKGRRTYRKGKSLALEVAFWMSGCIHNHPRVAERGPDPDPETAIANYNENYYSERDPT

SEQ ID NO: 30927 - protein, 296 aa, Homo sapiens
  DOMAIN (251)..(268): Zinc finger C2H2 type, domain proteins. domain identified by eMATRIX, accession number BL00028, p-value=8.313e-15, raw score of 16.07
  DOMAIN (165)..(294): Zinc finger, C2H2 type domain identified by PFam, accession name zf-C2H2, E-value=4.4e-34, PFam score of 126.7
MTKELPPIGNSNTGEKCQTVTLERHECYDVENFYLREIQKNLQDLEFQWKDGEINYKEVPMTYKNNLNGKRGQHSQEDVENKCIENQLTLSFQSRLTELQKFQTEGKIYECNQSEKTVNNSSLVSPLQRILPSVQTNISKKYENEFLQLSLPTQLEKTHIREKPYICKGCGKAFRVSSSLINHQMVHTTEKPYKCNECGKAFHRGSLLTIHQIVHTRGKPYQCGVCGKIFRQNSDLVNHRRSHTGEKPYKCNECGKSFSQSYNLAIHQRIHTGEKPYKCNECGKTFKQAHASLHIR

SEQ ID NO: 30928 - protein, 129 aa, Homo sapiens
MELLEDLNDLRMEGVTTLVPSGSKFNQGRPTYPAEPQAKVTLNICSRCARLQGDNLEERTEESLPILHSPDEKIPDSFDSLPGTEEALMEEGDEFEKASKLTGPGEASSGVGHSLKNYMEEDESLKQLQ

SEQ ID NO: 30929 - protein, 188 aa, Homo sapiens
MQSPSLTASHVVLGLLLRKRREFSFGSLHLDFRECMEMSECPSRNLLQVRALKENLCYSSAEDLNDLRMEGVTTLVPSGSKFNQGRPTYPAEPQAKVTLNICSRCARIFGRSRISVICGREIQEKPKATQRISILQLGNENSILAAMKKNKILFVLCSSMDELEAIILSEIAKKQKIKYHMFLLISGS

SEQ ID NO: 30930 - protein, 188 aa, Homo sapiens
MVPCVPATPAPAVAKRAPVKKDVFASSSAMTIKRKSARSSKETYSIKDPNSTCENQETKESQIHTPVTFYKGMFGSSDLRLTQPDSDQAAFANPVLEGRGVWEKQLLGCIGDTIVSPAFGDRVSLFSTVSDCPECDDSAQVSFKARLAQTYTHLQACQGLRVHMDVLNDKPVPVLALTNTERFGKSNA

SEQ ID NO: 30931 - protein, 262 aa, Homo sapiens
MTPDAFGDPRDRTTAWPIRSRDEAIPYGVDLHSATPVVGGGATICGKLRPRGAIRSNRYVLSSQKRTPNKKTGSLCFENDIQDSSAEDISITGPVEQLMNLPRTVQRNPIFRPDGVLPRPPGIKRKSARSSKETYSIKDPNSTCENQETKESQIHTPVTFYKGMFGSSDLRLTQPDSDQAAFANPVLEGRGVWEKQLLGCIGDTIVSPAFGDRVSLFSTIPKQQQNEKYQVPQFDQSTIKNIESAKDLMCGTAGRCKTLTEQ

SEQ ID NO: 30932 - protein, 1004 aa, Homo sapiens
  DOMAIN (49)..(102): Band 41 family domain proteins. domain identified by eMATRIX, accession number BL00660A, p-value=2.235e-23, raw score of 31.50
  DOMAIN (42)..(230): FERM domain (Band 4.1 family) domain identified by PFam, accession name Band_41, E-value=4.1e-74, PFam score of 232.8
MGEIEQRPTPGSRLGAPENSGISTLERGQKPPPTPSGKLVSIKIQMLDDTQEAFEVPQRAPGKVLLDAVCNHLNLVEGDYFGLEFPDHKKITVWLDLLKPIVKQIRRPKHVVVKFVVKFFPPDHTQLQEELTRYLFALQVKQDLAQGRLTCNDTSAALLISHIVQSEIGDFDEALDREHLAKNKYIPQQDALEDKIVEFHHNHIGQTPAESDFQLLEIARRLEMYGIRLHPAKDREGTKINLAVANTGILVFQGFTKINAFNWAKVRKLSFKRKRFLIKLRPDANSAYQDTLEFLMASRDFCKSFWKICVEHHAFFRLFEEPKPKPKPVLFSRGSSFRFSGRTQKQVLDYVKEGGHKKVQFERKHSKIHSIRSLASQPTELNSEVLEQSQQSTSLTFGERCRISRGPELPARKGTEGFRRGAGVAPEPCAEEKPRGPHLSELSVNSQGGVAPANVTLSPNLSPDTKQASPLISPLLNDQACPRTDDEDEGRRKRFPTDKAYFIAKEVSTTERTYLKDLEVITSWFQSTVSKEDAMPEALKSLIFPNFEPLHKFHTNFLKEIEQRLALWEGRSNAQIRDYQRIGDVMLKNIQGMKHLAAHLWKHSEALEALENGIKSSRRLENFCRDFELQKVCYLPLNTFLLRPLHRLMHYKQVLERLCKHHPPSHADFRDCRAALAEITEMVAQLHGTMIKMENFQKLHELKKDLIGIDNLVVPGREFIRLGSLSKLSGKGLQQRMFFLFNDVLLYTSRGLTASNQFKVHGQLPLYGMTIEESEDEWGVPHCLTLRGQRQSIIVAASSRSEMEKWVEDIQMAIDLAEKSSSPAPEFLASSPPDNKSPDEATAADQESEDDLSASRTSLERQAPHRGNTMVHVCWHRNTSVSMVDFSIAVENQLSGNLLRKFKNSNGWQKLWVVFTNFCLFFYKSHQDNHPLASLPLLGYSLTIPSESENIQKDYVFKLHFKSHVYYFRAESEYTFERWMEVIRSATSSASRPHVLSHKESLVY

SEQ ID NO: 30933 - protein, 607 aa, Homo sapiens
  DOMAIN (39)..(197): Sodium Bile acid symporter family domain identified by PFam, accession name SBF, E-value=0.00099, PFam score of -7.7
MNDPNSCVDNATVCSGASCVVPESNFNNILSVVLSTVLTILLALVMFSMGCNVEIKKFLGHIKRPWGICVGFLCQFGIMPLTGFILSVAFDILPLQAVVKLIYDADVMLLIHPLRMPTEAALTASAVHGINLTQELVRNAGPWASSQTYWGKKLQFNKIPSLIDRNRLKLTLRWVLEGATALAILPEKRQSESISGRILCLDFTANHISPDLRRDSAESKGPRGESDIINPFIGDVIGFLCLPGPVSSLIRWLVVIAFLDTAVWLPALWLVWSLPAFKSCRPLSPVAPQRCCGTAASIRKEDFLLELLKPSEPFSESLLIPFLSPFSLGNWGNALEDSFRQQLKTPPCISSTLPNTYSVCYSAGCNKSRKKSASPPEKQHLEPLKKDQNRGIVLVVGQIDTAGQITLIIVICLGPGPGSGPGSGRLFSKKVVFAIYVTAVNERNGSTAASGSPGCWTCAWLRGLRFTLLGPILNDLLLFLRGRRGGSVRLLVTRGASPRRRARVRPRLPGGNLRFLSSPAALAPWRFGTFSKCKAGALLRLGGVGKKVRRDREEGDCYSKAENRKGEPGKNTRGLCGGRTAPELSGLAAITEAHLGMIQKVPSGRGG

SEQ ID NO: 30934 - protein, 454 aa, Homo sapiens
  DOMAIN (284)..(434): Sodium Bile acid symporter family domain identified by PFam, accession name SBF, E-value=7.1e-10, PFam score of 46.2
MPTEAAPTASAVHGINLTQELVRNAGPWASSQTYWGKKLQFNKIPSLIDRNRLKLTLRWVLEGATALAILPEKRQSESISGRILCLDFTANHISPDLRRDSAESKGPRGESGIINPFIGDVIGFLAQSSLQIKRKSARSSKETYSIKDPNSTCENQETKESQIHTPVTFYKGMFGSSDLRLTQPDSDQAAFANPVLEGRGVWEKQLLGCIGDTIVSPAFGDRVSLFSTVSDCPECDDSAQAADPAMNDPNSCVDNATVCSGASCVVPESNFNNILSVVLSTVLTILLALVMFSMGCNVEIKKFLGHIKRPWGICVGFLCQFGIMPLTGFILSVAFDILPLQAVVVLIIGCCPGGTASNILAYWVDGDMDLRFQNGNNNFLETPPHPVKVKIGQGQPLSELSVSQDEVSFKARLAQTYTHLQACQGLRVHMDVLNDKPVPVLALTNTERFGKSNA

SEQ ID NO: 30935 - protein, 523 aa, Homo sapiens
MKETKHHNNPVSLIEVNGLRHLHDPKGAQTSKPVSLMSDVQLMSESSKGGFVGVSNPVTNVCRDQEADWREMCMASSDPNRCHKNMLEEIRLVLGSASHLLGLQLIIKMFTADRILLQHRTILELADTEIAHIYTMSIKVKFQALILRKLTSESSILLVFSVSMEKLIYDADVMLLIHPLRMPTEAAPTASAVHGINLTQELVRNAGPWASSQTYWGKKLQFNKIPSLIDRNRLKLTLRWVLEGATALAILPEKRQSESISGRILCLDFTANHISPDLRRDSAESKGPRGESGIINPFIGDVIGFLTNNQGPQDMTLRVLLDVVLIRFTQIIHHEVLLVELPGFSFITTTDSLIDIGPAVLADPQPSRQGHSSEKEDSNGGGKQWCMAGVVGPQELWSRRVMRRFPRKSAYPHVGGPTEGRFLPEGVREGVWCSWDDLRITTDPMRQKYESSCMQIGEEKFAAGDYPGGAKTNKQWRDKARGHGETESFLLRMMVSSFIYVPVKDVNSFGALDVARVFEKPSA

SEQ ID NO: 30936 - protein, 32 aa, Homo sapiens
  misc_feature (1)...(32): Xaa = X or * as defined in Table 2
MNLLSSSSFKSQQYFREREREXKNTVQLKNFL

SEQ ID NO: 30937 - protein, 55 aa, Homo sapiens
MPQGMFVKKDDWMGSKLKKKKERKREISQSPHKSWRRGLINIVSMTFENKCFTPC

SEQ ID NO: 30938 - protein, 74 aa, Homo sapiens
MPVSLDGDTNTSTQEVVQYNWETGDDRFSFRSFRSGMWLSCEETVEEPALLHPQSWKQFKSPRSSGTAAAKGES

SEQ ID NO: 30939 - protein, 214 aa, Homo sapiens
MAPGGQSRARARRASRRAARGGRRRPDLQLAQALLAEGVQARQQLGRARVRVEVVVADFALVVLKRREAGDRLRCVPGSCVSAVRGSLRGDPSSLPAPGAAAWALLAAAAVARRRCHGMIRPSSGASFSAEDSKMPQGMFVKKDDWMGSKLKKKKERKREISKSPHKRWRRGLINIVSMTFENKCFTSILIVNLTQCEDNKDVDLYNDPLPLND

SEQ ID NO: 30940 - protein, 55 aa, Homo sapiens [sequence omitted]

SEQ ID NO: 30941 - protein, 98 aa, Homo sapiens
MAPPSRHCLLLISTLGVFALNCFTKGQKNSTLIFTRENTIRNCSCSADIRDCDYSLANLMCNCKTVLPLAVERTSYNGHLTIWFTDTSALGHLLNFTL

SEQ ID NO: 30942 - protein, 70 aa, Homo sapiens
MAPPSRHCLLLISTLGVFALNCFTKGQKNSTLILQRKNTIRNCSCSADIRDCDYSLANLMCNCKTVLPLA

SEQ ID NO: 30943 - protein, 357 aa, Homo sapiens
MLGLHVDAQPLQTTNSQVFSGESVGAAQGKLQVLDQREVQQVAQRRCVREPDGQMAIVAGSLYCKGQDGFTVAHQVGQTVVTIPDVRRTAAVPNGVFPCEDERAVLLTFGEAVKCKDTQSADQKKTVPGSTLLDFISELLVVKWYHVIEFWPMEYGGRFHEGTDGPRRWQNCRQKAESLNDCSLDKFVSISGILKGMERTKNVGLRREIARIKQKVWEECGVETHAGLQKQVVTCSQVQCPLVQGCATPLPVENSHTMLDPAKPKWIHLATSYELRGNHLQVVNCIHGIVEGERRRYGRAQGREEQRDGTVAFVSFQPKRMPEAESGLSSVSKSAGKIHILLQRLSLYGLDMAEKPE

SEQ ID NO: 30944 - protein, 91 aa, Homo sapiens
  DOMAIN (36)..(66): 14-3-3 PROTEIN ZETA SIGNATURE domain identified by eMATRIX, accession number PR00305A, p-value=3.571e-37, raw score of 9.33
  DOMAIN (4)..(84): 14-3-3 proteins domain identified by PFam, accession name 14- 3-3, E-value=4e-42, PFam score of 153.4
MDDREDLVYQAKLAEQAERYDEMVESMKKVAGMDVELTVEERNLLSVAYKNVIGARRASWRIISSIEQKEENKGGEDKLKMIRSTSFVQYV

SEQ ID NO: 30945 - protein, 255 aa, Homo sapiens
  DOMAIN (36)..(69): 14-3-3 proteins domain identified by eMATRIX, accession number BL00796B, p-value=1.000e-40, raw score of 10.67
  DOMAIN (4)..(239): 14-3-3 proteins domain identified by PFam, accession name 14- 3-3, E-value=4.9e-154, PFam score of 525.1
MDDREDLVYQAKLAEQAERYDEMVESMKKVAGMDVELTVEERNLLSVAYKNVIGARRASWRIISSIEQKEENKGGEDKLKMIREYRQMVETELKLICCDILDVLDKHLIPAANTGESKVFYYKMKGDYHRYLAEFATGNDRKEAAENSLVAYKAASDIAMTELPPTHPIRLGLALNFSVFYYEILNSPDRACRLAKAAFDDAIAELDTLSEESYKDSTLIMQLLRDNLTLWTSDMQGDGEEQNKEALQDVEDENQ

SEQ ID NO: 30946 - protein, 87 aa, Homo sapiens
  DOMAIN (44)..(74): 14-3-3 PROTEIN ZETA SIGNATURE domain identified by eMATRIX, accession number PR00305A, p-value=3.789e-17, raw score of 9.33
  DOMAIN (12)..(66): 14-3-3 proteins domain identified by PFam, accession name 14- 3-3, E-value=1e-26, PFam score of 98.6
  misc_feature (1)...(87): Xaa = X or * as defined in Table 2
XPAGAAAAMDDREDLVYQAKLAEQAERYDEMVESMKKVAGMDVELTVEERNLLSVAYKNVIGATKSLLENNQHALNRKKKTREEKTS

SEQ ID NO: 30947 - protein, 98 aa, Homo sapiens
  misc_feature (1)...(98): Xaa = X or * as defined in Table 2
MYTNINIPMYKVYMGLTDHPSSLSSSTPNLVPSSSCFRMKACEGLALXGRDLEEGEVLLPSPHRHLRRVLSLFNGTLGQRAKSLIPASPSLCLFPQCP

SEQ ID NO: 30948 - protein, 28 aa, Homo sapiens
  misc_feature (1)...(28): Xaa = X or * as defined in Table 2
XASPSHAFILKQEEDGTKLGVLDERDEG

SEQ ID NO: 30949 - protein, 129 aa, Homo sapiens
MKQCMYEEVPTGVCLRDEAKQQRSKQERLQQAGDMQSLHGGGVYLIIAEAGISFVCSQPHLAIPVKPSQLSTPIVMPLVVFFQLRAPHPPTVLRPQLGLHPNPECDREKMSVRDHDPEVLTRNSGSLQA

SEQ ID NO: 30950 - protein, 63 aa, Homo sapiens
MHFLPSEPIKTLDSARLGQMSILPTVGRSYPLQDSLTPQDDLPTERSYPLWVFSLLRAGYSSG

SEQ ID NO: 30951 - protein, 166 aa, Homo sapiens
  misc_feature (1)...(166): Xaa = X or * as defined in Table 2
METEKDGDSGVCLYIFRGPPQRIAVSLCYGPRELDIAGTGQCGQSSWWSHHSVGPEFLSCGQEDEVCRQLEGEQKGEELYGQQKRSEETHGHLFDANTHKVKKFVLHTITLGIIISTFIIAVVQDPTSHKERKRRWSDRTCTTYSKWDNIQELLGPLWRSLLSCTX

SEQ ID NO: 30952 - protein, 129 aa, Homo sapiens
  misc_feature (1)...(129): Xaa = X or * as defined in Table 2
XCGPGLLADAKMRVFERSVYFGDSCQDVLSMLGSPHKVFYKSEDKMKIHSPSPHKQVPSKCNDYFFNYFTLGVDILFDANTHKVKKFVLHTNYPGHYNFNIYHRCEFKIPLTLKERKRRWSDINMHDLQ

SEQ ID NO: 30953 - protein, 109 aa, Homo sapiens
  DOMAIN (30)..(45): IRON-SULFUR ELECTRON TRANSPORT AROMATIC HYDROCARB domain identified by eMATRIX, accession number PD02042B, p-value=5.154e- 09, raw score of 16.75
MIEKWSFSTTRENIMLWIFAVTDFDGRPCIVCPWHKYKITLATGEGLYQSINPKDPSAKPKWCSKGIKQRIHTVTVDNGNIYVTLSNEPFKCDSDFYATGDFKVIKSSS

SEQ ID NO: 30954 - protein, 118 aa, Homo sapiens
MNLDGSAQDPEKREYSSVCVGREDDIKKSERMTAVVHDREVVIFYHKGEYHAMDIRCYREIILALHQLDLLQKTIVIYSSDHGELAMEHRQFYKMSMYEASAHVPLLMMGPGIKAGLQ

SEQ ID NO: 30955 - protein, 236 aa, Homo sapiens
  DOMAIN (157)..(172): IRON-SULFUR ELECTRON TRANSPORT AROMATIC HYDROCARB domain identified by eMATRIX, accession number PD02042B, p-value=5.154e- 09, raw score of 16.75
MLRAVLWKDPCGKEPMSLANSNEDLGPVNSHIDSTERWSNSKLTRVPFGCFRRSTPKFTPMVAGNPQFLTMWPLHRLLQYVLSWLPSLRATSQPGGLSHDDSESKGTLGDLIPNCSHTHTPFTTRLCILLPEKFFNTCPHIHPTGLIGMDFDGRPCIVCPWHKYKITLATGEGLYQSINPKDPSAKPKWCSKGIKQRIHTVTVDNGNIYVTLSNEPFKCDSDFYATGDFKVIKSSS

SEQ ID NO: 30956 - protein, 97 aa, Homo sapiens
  DOMAIN (39)..(97): Rieske [2Fe-2S] domain identified by PFam, accession name Rieske, E-value=0.053, PFam score of 5.8
MESLDGSATKILKRGNIPSGVLWAREDDIKKSERMTAVVHDREEVIFYHTGEYHAMDIRCYHSGGPLHLGDIEDFDGRPCKVCPWHKYKITLGNRRS

SEQ ID NO: 30957 - protein, 368 aa, Homo sapiens
MSCGRQREQKPERKNLEACSLPAPPHPVDKGILLGDTVAHTPEKEAECQRQLPQRVWKQAGTWNPCSFPQERWYMLNTFISLLLWAQRGIIIQPLGFNYQFHANDPNICISNPNFSPKLQIHISNHLLTSPRESSYRHLKSNTSKQNTFDIVRKTTDPEVLPSQSVDSMRVYIPCISQKPERLPTQNNTIKFNFLQKVSQLSGLNAIPTVGANNMRTNISDWHKKLPGPQSPTNIKHDLTLKQSYRASKHLHTHQLVVQEPTRCRKQPINREDALQHLLMTDWLTGPGTRGPFALPGPGAAVGCDKGSENKTTPLRASPAGLPDAPLSRPRPPRRCRYLVLGWRNRLMGHPLPQLCHPGKIGPVVATS

SEQ ID NO: 30958 - protein, 267 aa, Homo sapiens
MPGGPQLLPFCRPGRAPGCLEEGFQLLPIQYDVSLGFVIYGLYYVEVSQLSGLNAIPTVGANNMRTNISDWHRKLPGPQSPTNIKHDLTLKQSYRASKHLHTHQLVVQEPTRCRKQPINREDALQHLLMTDWLTGPGTRGPFALPGPGAAVGCDKGSENKTTPLRASPAGLPDAPLSRPRPPRRCRYLVLGWRNRLMGHPLPQLCHPGKIGPTSPRASSEAAGAGSSARARADSHGRPRPAREARGSERLTVPLAAQQPALELGPTH

SEQ ID NO: 30959 - protein, 108 aa, Homo sapiens
  misc_feature (1)...(108): Xaa = X or * as defined in Table 2
MVLGSGDAAHSDTHSVTALMGFXXXXXXXXXXXXXXXXXXXXXXXXXXXXXXXXXXXXXXXXXXXXXXXXXXXXXXXXXXXXXXXXXXXXXXXXXXXXXXXXXXAISL

SEQ ID NO: 30960 - protein, 1057 aa, Homo sapiens
  DOMAIN (470)..(497): POTASSIUM CHANNEL SIGNATURE domain identified by eMATRIX, accession number PR00169H, p-value=5.696e-30, raw score of 8.09
  DOMAIN (258)..(492): Ion transport protein domain identified by PFam, accession name ion_trans, E-value=2e-79, PFam score of 277.3
MCISKRNKWIQQTFKEAASGVQAGGDSGFAKGLGGANGEIFAGQTKETFGMDWRWEMLERERPSLANSYSSLKAHSTVTSENPSWALPDGIHMKTQLVINSWQKVSEARRLISEPSNIRNNSGYRTWTLQSMSSSRQLPGMMNAMWPSCHDDPLASLGGTPETDIMGTSGEEEPGVTGYRDEEKETEGSGAILGDGVTRSLTTDAQGLTGGKDRTSSSRQMLIISPDCADEGTGIERLSDFPQGLKLVVAFASLFFILVSITTFCLETHEAFNIDRNVTEILRVGNITSVHFRREVETEPILTYIEGVCVLWFTLEFLVRIVCCPDTLDFVKNLLNIIDFVAILPFYLEVGLSGLSSKAARDVLGFLRVVRFVRILRIFKLTRHFVGLRVLGHTLRASTNEFLLLIIFLALGVLIFATMIYYAERIGARPSDPRGNDHTDFKNIPIGFWWAVVTMTTLGYGDMYPKTWSGMLVGALCALAGVLTIAMPVPVIVNNFGMYYSLAMAKQKLPKKRKKHVPRPAQLESPMYCKSEETSPRDSTCSDTSPPAREEGMIERKRADSKQNGDANAVLSDEEGAGLTQPWPPPRPPRSAGPCDAPPLETETRRQLPASCSALGTMPAPMVVSGKGVWRAAAAPSRSPAALLMISSVCVSSYRGRKSGNKPPSKTCLKEEMAKGEASEKIIINVGGTRHETYRSTLRTLPGTRLAWLADPDGGGRPETDGGGVGSSGSSGGGGCEFFFDRHPGVFAYVLNYYRTGKLHCPADVCGPLFEEELTFWGIDETDVEPCCWMTYRQHRDAEEALDIFESPDGGGSGAGPSDEAGDDERELALQRLGPHEGGAAHGARVLGGCPRPASPRNVGRFFRRNPLTSLPPGPGLKGVEFGQGSPGVLPQFFGFLQRGSRGWAGCVRGPVTLDCGAFPANGYRNRALLCKDTSGIPKTLRVLHSNAYSTGGFTDLIVPYLWLPLTPMAERDSYLGYIPRKRGWAPPSKFGDRRRFRIPFANFHGRSRVIHGLSPLCNHIRFKGFAHHGHNLGDPKRGHSHRPSFPFAFHPWTRAN

SEQ ID NO: 30961 - protein, 147 aa, Homo sapiens
MATSSQGAWGRDVEGSREVRKLESNLMEISQIDFTGDFDHASTLALWPAPWHQHHHCHRFLVHGQIANSGSTGFATYGIHMKTQLVINSWQKVSEARRLISGCKNPIRAVTECVSLCAASPEPNTMTAWNKHPDIGMKDATGGPVQF

SEQ ID NO: 30962 - protein, 556 aa, Homo sapiens; identical to SEQ ID NO: 30611
  DOMAIN (421)..(466): kw TRANSCRIPTASE REVERSE II ORF2 domain identified by eMATRIX, accession number DM01354N, p-value=1.000e-40, raw score of 13.17

SEQ ID NO: 30963 - protein, 200 aa, Homo sapiens
MATAGPEIGPSGLQGFSGLKHIEGPQAPRILLSSDPKSQIVLGLPDMELGLYFWLWASMLLPVMLPDSYVSDHTGTLTHCRDASLIIHPRFKGVRPRRDACLGPSPLAASPAFLGKGQPHLRHTRTSKHLNRSGQAFLQNLLPQELATRAGNLATGPRNARRPGFLLSRIPSVWDPTENRTVQLTWQPLPEPLELWPKAL

SEQ ID NO: 30964 - protein, 35 aa, Homo sapiens; identical to SEQ ID NO: 30614

SEQ ID NO: 30965 - protein, 47 aa, Homo sapiens
MCRKSGHWAKECPQPGIPPKPRPICVGPHLKIRTCSTHLGQATPRAP

SEQ ID NO: 30966 - protein, 256 aa, Homo sapiens
MAKSFSGSGKSVCKSPKGKNNTWETRMIGDGGLQEGSLTMKFEDGKYLFGFNIIEGDFCEDSNFQTGESVSDVYFENVSALQRESTGSGIAQERNDEGLESGRAVLCIEECLSASLASTSQSSIEQPLPTSSHNQNKTKHDSRHCRISPVGNMDIAENNYNSFKAELGPNSSSASTPPPYNLFIASPPHTCSGLQFHSTITDAELRVTLTVEGNRMSVVRSSFLGLNQLKLAKSMMAAYSIFEEPLASLYSNFHTK

SEQ ID NO: 30967 - protein, 588 aa, Homo sapiens
  DOMAIN (307)..(328): kw TRANSCRIPTASE REVERSE II ORF2 domain identified by eMATRIX, accession number DM01354S, p-value=5.500e-21, raw score of 11.61
MTCDAGRPPARLGQPIGGAPPWAAPPPDRDLPVPPHRGGGRRNPPPCRTLPALRDHGPPRRQLVVEFPENRTPLLLPMPSVATLHQVPALETDQRESTICEPESGPSSDPESASALITDLPTSRTELEERSGVNKASEDGEDLDRDVSVASNIEPWTGWCRETPPSRGQQTLHTGELRLHLVGAPLGRSFQRTEQATIFAVLQPLLVIARQTGSGMDLQQTPADRQQRGLTVKRKSNKQKGIASTSTKRTFTRKLHLKVTNIKDQRTNDKNHMIISIDSEKAFNKIQHRFILKTLNKLDIDGMYLKIRAIYDKLTANIILNGQKLEAFPLKTGSRPHRQGCSGYSGQVSACDPPPGPGGVPVTLSQSGCHHWQGGHECEGRGDRRLKQGRQGGLFSRKQSGAFIDSIVARKGNADENFSNIRIAGDGGSAAMSFDYAFKIDDVVPNSGMEHWLLVNTNNGWRIVSVAWSAAPLQADLGPNSSSASAPPPYNPFITSPPHTWSGLQFRSVTSPPPPAQQFTLKKVAGAKGIVKELATLAGNLATGPRNARSPGFLLSHVPSVWDPTENRTVQLTWQPIPEPLELWPKAL

SEQ ID NO: 30968 - protein, 266 aa, Homo sapiens
  DOMAIN (232)..(243): RNase H domain identified by eMATRIX, accession number PF00075B, p-value=1.346e-09, raw score of 12.56
MCHFLEKAFPGDSTEYCHYVLLLVYGKHKNRQSLSQSLTKNTTDWIICKEESFISYSSGSWGVEGHMVLVSGEGLWAASSRCGKVEGQVVPRQAELGPNSSSASAPPPYNLFIASPPHTWSGLQFRSVTSPPPPAQQFTLKKVAGAKGIVKHALKRLKPVITRLLQHGLLKPINSPYNSPILPVLKPGKPYKLVQDLRLINQIVLPIHPVVPNPYTLLSSIPASTTHYSVLDLKHAFFTIPLHPSSQPFFAFTWTDPDTHQAQQIT

SEQ ID NO: 30969 - protein, 353 aa, Homo sapiens
MEARETGPWKEGNVERVASVLIKKGTGLPSTVRVTGSSASVMVYGASEAIGQHQSSAAKPRRSQSESLGPEFQGLWEWLPGPRAVKRLRVIFDEKEPKRYLIWDKEKGALTLTMPLAPATFLRVNCWAAVEVYDGNGVDFLGEGAPGCFSGQVHVDAASQQLVWQALQEGAAVRLDVGLSVSMHTRYHDIESSIAYYKGNWIPGFLKVLMQEQGTDGGGAGGLCSCQCSDYSGTVVGEEVVGCTHASRSGTAWYISTLAPVGKASTHAHMLQQSNVGGAVGQVFADRVPGEGCSGGRAQAGLCGSTGPSLLEHSASHVQSTNAGAIYGPPGSIGDYTSRRPNLIGNPGEPIRP

SEQ ID NO: 30970 - protein, 893 aa, Homo sapiens; identical to SEQ ID NO: 30617
  DOMAIN (584)..(629): kw TRANSCRIPTASE REVERSE II ORF2 domain identified by eMATRIX, accession number DM01354N, p-value=1.000e-40, raw score of 13.17
  DOMAIN (715)..(775): Immunoglobulin domain identified by PFam, accession name ig, E-value=6.6e-12, PFam score of 43.4

SEQ ID NO: 30971 - protein, 85 aa, Homo sapiens
  misc_feature (1)...(85): Xaa = X or * as defined in Table 2
MGTRLRRNPGLRAFPCPVPRFPARVASSCGRRFWRNRLAAAGPAVWKFLCAGRCGWGXSSQWRQGGIATQKYVATWLPLLYYCTP

SEQ ID NO: 30972 - protein, 51 aa, Homo sapiens [sequence omitted]

SEQ ID NO: 30973 - protein, 128 aa, Homo sapiens
MKYIEHKSSKYDLVVNIPLIKQECCYENGLCHSAGTRESLGFRVVSVENGDWTTWERGLRQEGIQHQPVGSGPDPDQSRKPTGNQRGQQLAALSATTDEDMGTNAEKPQGVDKALAIITDLSPFLFKF

SEQ ID NO: 30974 - protein, 153 aa, Homo sapiens
MKYIEHKSSKYDLVVNIPLIKQECCYENGLCNSAGTRESLGFRVVSVENGDWTTWERGLRQEGEQTPEFKRCLHTAPSLFPLTVWLWPVLRNQVFRNSCWACRVPPDLRVAGHSAFQQAAFLNDAFDLLLLLGEAGVPPQIKWEVLSAATSLT

SEQ ID NO: 30975 - protein, 58 aa, Homo sapiens
MAIMRDVSCGKDRTPGEDIWKLERVWFLEARTQQSHQHPGWSCSSWRALPEGEKRPAY

SEQ ID NO: 30976 - protein, 98 aa, Homo sapiens
  DOMAIN (1)..(7): Lectin (probable mannose binding) domain identified by PFam, accession name Agglutinin, E-value=0.044, PFam score of 7.4
  misc_feature (1)...(98): Xaa = X or * as defined in Table 2
MQGDCNLCFEPDALLLIAGGNFEDQLREEVVQRVSXLLLYYIIHQEEICSSKLNMSNKEYXFYLHSLLSLRQDEDSSFLSQNVDRXLSWXSPGSTLTL

SEQ ID NO: 30977 - protein, 208 aa, Homo sapiens
MRTHTCTQRDDHMRTYGEDGIYKPMREALGGTSPAHTLILDFHAPRWSLTWALLLVEIELKHPPKHSTGNLCFSIKENKKSHPSLSLASGVKLQTFAVSVTALKGSMSGVAGSFWWVPGLPGFRSEAADLHVWGLPSQRLHRTQAGTRVLPTVTVPAGASPSTPPGKQREPAPPLSAQRGAPTVQRLTVFDRGLIGNVDTEGSNCFSE

SEQ ID NO: 30978 - protein, 347 aa, Homo sapiens
MLLLNQTLTDNEKQAALQVAERFGDELCFTYSVREGGKHYPAGREAVPMNDPKWDPNDEVEVSDRPGLPCPHPVPLKTRDPSRAETEAAGRRKEHISGGTHRWLDVERKAPAPACQQATDRQNHMEFGWGSWRKAWLPATWMEDSQSELTQKQTTKCHMFSLISGCEALSTYGHKEGNNRHQGLLGGGGLEGEDRKTTYQRIKECLNIDQGHDDVSGVGSFQCVLGLADFKNEAANPRDVQMCPEFLPSGGFVVLLTSGVKLQTFAVSVTVLKVCADPKSEQQQDLRRRAKEQSFHSVEGDPSRLPLLAQDTPTAVGNYPMTTLATSCWTGAKKGPCSDSVLQRGTL

SEQ ID NO: 30979 - protein, 74 aa, Homo sapiens
  misc_feature (1)...(74): Xaa = X or * as defined in Table 2
MDPCDVQICPEFLPSGGFVVSLTSGVKLQTFANETEDILAFTRQYFDTSQSQCMETKTLQKKSGIVSSEGANEX

SEQ ID NO: 30980 - protein, 62 aa, Homo sapiens
MPLMYEAMMDAQLEKNSKRVPQATPWARMDATHSMGCREAVELKAKGSAYFEKAANTVASSK

SEQ ID NO: 30981 - protein, 24 aa, Homo sapiens
  misc_feature (1)...(24): Xaa = X or * as defined in Table 2
XTREHAYTVALERTPKSTFKDPRG

SEQ ID NO: 30982 - protein, 59 aa, Homo sapiens
  misc_feature (1)...(59): Xaa = X or * as defined in Table 2
XKKKEQKEAKRVMVDLMRLGIGWEYKVKTLKWLWVLKPERLTKKFDVQLIEIGNIGVEQ

SEQ ID NO: 30983 - protein, 69 aa, Homo sapiens
MNVSVANIIGFQKTDTKGISNQNTSTVAFIQYRAMISLSRDPESLRTCNNDFYAVTLVPKPHQLLNALG

SEQ ID NO: 30984 - protein, 326 aa, Homo sapiens
MGPDHIGPSKEGEREKEKWGEERYDVAVETQSPNPQRTLCSSPSCCIHLRCISLAEEPSEIGVASLLIQISREGIYPWTFSWLKLKGGNYGISARLFPAKQSDSTVGSQDIHTSRVVAHVLPCGHLLHRGYRCPLCMHSALDMTRYWRQLDDEVAQTPMPSEYQNMTVDGRSYPVGRKVFSQRLCGQLPEGFQGHNCSSALQFYPMSGPFAAGLLEFAGGPLQSLFALVSPAEAAEQQRLLPVPSSGSFIAERHPLQKLARALLYKVFVNPCWEALNGLDDASPRSTSVRVIVFTQPIDSNTNLFWKHSQTHPEVMFGQPSEHPLA

SEQ ID NO: 30985 - protein, 647 aa, Homo sapiens
  DOMAIN (1)..(202): TBC domain identified by PFam, accession name TBC, E-value= 7.9e-13, PFam score of 56.1
MRFTFNERSNPDDDSMGIQIVKDLHRTGCSSYCGQEAEQDRVVLKRVLLAYARWNKTVGYCQGFNILAALILEVMEGNEGDALKIMIYLIDKVLPESYFVNNLRALSVDMAVFRDLLRMKLPELSQHLDTLQRTANKESGGGYEPPLTNVFTMQWFLTLFATCLPNQTVLKIWDSVFFEGSEIILRVSLAIWAKLGEQIECCETADEFYSTMGRLTQEMLENDLLQSHELMQTVYSMAPFPFPQLAELREKYTYNITPFPATVKPTSVSGRHSKARDSDEENDPDDEDAVVNAVGCLGPFSGFLAPELQKYQKQIKEPNEEQSLRSNNIAELSPGAINSCRSEYHAAFNSMMMERMTTDINALKRQYSRIKKKQQQQVHQVYIRADKGPVTSILPSQVNSSPVINHLLLGKKMKMTNRAAKNAVIHIPGHTGGKISPVPYEDLKTKLNSPWRTHIRVHKKNMPRTKSHPGCGDTVGLIDEQNEASKTNGLGAAEAFPSGCTATAGREGSSPEGSTRRTIEGQSPEPVFGDADVDVSAVQAKLGALELNQRDAAAETELRVHPPCQRHCPEPPSAPEENKATSKAPQGSNSKTPIFSPFPSVKPLRKSATARNLGLYGPTERTPTVHFPQMSRSFSKPGGGNSGTKKR

SEQ ID NO: 30986 - protein, 195 aa, Homo sapiens
  misc_feature (1)...(195): Xaa = X or * as defined in Table 2
MERMPRSVSIAFCQTNPTNMLLGLPDFMELGDTALHVLLTVTLPSTGLLRECRWNRNGPSLSPEVHGQRWRRAGSPSKIKAMLPKHSKFWAAKTAIVHNKPYEIEIILIVQMWKLKQPELSQTFSIGRWPAGNGMKADPIPTVPVPIQARLRMEPIKSSVPLRIKALLERRTQTSGKAQWREQAVRSNCVKHMPX

SEQ ID NO: 30987 - protein, 72 aa, Homo sapiens
MIPQIGISGLIPGRMVVMEACGIMPCWLQCWEWLLFVGFGLGSPRKKYNKREKSTIGELLVFNRIWQPSTTP

SEQ ID NO: 30988 - protein, 152 aa, Homo sapiens
MGSRWELWPCWVPMLGIGLLFVGFGLGESQKEVEKEREAYRRENCCFSTGSGCPWNSKRNKTELLVTEEALISQGRKLVEEKKLLEQERAQEMGSRFSPTYFSMIHTVGDVWEHPTNAPDGRLIVALSSNTGNSFVRTEGSFKRVEEAHTRK

SEQ ID NO: 30989 - protein, 353 aa, Homo sapiens
  DOMAIN (330)..(351): GAMMA-AMINOBUTYRIC ACID (GABA) RECEPTOR SIGNATURE domain identified by eMATRIX, accession number PR00253D, p-value=9.100e- 21, raw score of 16.68
  DOMAIN (267)..(347): Neurotransmitter-gated ion-channel domain identified by PFam, accession name neur_chan, E-value=3.4e-11, PFam score of 40.9
MGTRGTGTPEEVYFVHRLWEGPDVPLTPPKTAVKVAKLSVAGQPLLAPSSAFVVWLTSRIEPRTFAMCVTVLKGGTDPNTEQQQDLLQTAKNKASTTWKTTLADWRCWLRWPAFIPLFVPAQILLIGPFYRVLIGPFYRVLIGPFYKPLASHRALIEGQLPSPLTTTKVVELGFGCHDSWLRVFKDTDEEMQRVTYGARCLDFLCPPQVLPSRRYDDEKIKRSLNKHSQKAYKSSGSKENGRSVITELVFYGVEGIDDKQNYSLLDMRPPPTAMITLNNSVYWQEFEDTCVYECLDGKDCQSFFCCYEECKSGSWRKGRIHIDILELDSYSRVFFPTSFLLFNLVYWVGYLYL

SEQ ID NO: 30990 - protein, 302 aa, Homo sapiens
MGKELKGHPNQATGNLDSNHGSASKCHYDVGQIADPVVQFSSSGEKIIKARWDAYSKRGHLNKQALNLENAYESVLGYVPKTDSEVTCPARVLIGPFYRALIGPFYKPLASHRPLIGAFYNPSYRVLIGAFYKPLASHRVLIGAFNRALIVAFYKPLASHRALIGAFYSPSYRVLIGAFYNPLCPKLLNVGLRDAHTGRADGKWIGMGDLVTVGCTVPENGVWNYVKKWNLAALPRIREKGGETEGGKPDKNADKDNESRKSHKAKMKVLIQMGFYLEATGKNPFPDSFRVLEESISLQLWD

SEQ ID NO: 30991 - protein, 45 aa, Homo sapiens
MILCHLMQAPYHLKVSWEPTDPPTLWKCWTNVSTNPPLSALRGHR

SEQ ID NO: 30992 - protein, 114 aa, Homo sapiens
MVRILANGEIVQDRRPPSEDHYPATKRGSVAPASKQARCQGWVLLSSPFNDLKPAAGETWAFRSWHLRQPLLVGAGEDPSCLLFLLMMLGVRGLLLVGLVYLVSHLESAVTSEG

SEQ ID NO: 30993 - protein, 52 aa, Homo sapiens
MPFPILSNPFMPRRFQVEAQQVPMPVEDMPTSPLPREQGLGLRAGGKNSRLF

SEQ ID NO: 30994 - protein, 302 aa, Homo sapiens
MPEPPRHSVGSCAARASPMSAASCSTAPSPIDHPRAEECRHTARDWQAAPPAAPVGDPLGEASWAPGSVCSFTPEARETTNPSGGTNNSRRAALSAVTLTAKVCSFTPEPAKPQTHQKEETPNTSEHQKEQTANTPPLRTVTLTARVHGFILEAENIMFLELDVSPPAVFEMEFSHDQEQDPRALHMERLMRLDSFLERPSTSKVRKSRSWSKKKRKEGTDRKKRDREGEKEEKGKEEREKGKTNRRGNKKAKNRDETGREKEEKNTGAEKQRAPKRPRKSCEREEKRVGHGKPEKKPGGPQ

SEQ ID NO: 30995 - protein, 217 aa, Homo sapiens
MWPRLDSRQSEEVSVSKRHMDATDKIKFPWLKEKRTIEFGEAAGYVCHRRYKDMEPHEKMGEAAKKVHWVQMRSRARDLQPAMPEPPTHSKGSCAARASPTSTTPCSTTPSPIDHPRAEECKHTAQDWQAAPPAAPVWGPLGEASWAPESGPRNKNQSSSNKHLWQSIISLQLKSDLLKEMLGSQTGNGNVQDVLRYLVKSETQKAIKVSLDCVRKR

SEQ ID NO: 30996 - protein, 175 aa, Homo sapiens
MNMDIVVLRLTDLKKPWTLTVSVTAHKGAARGFARCDIRMLMTVSSFCWVHALTDFRKEAVNLRTRHKCSPNPHQTQEPSWLHPVDPPLGPQVELPASPAPAPSLLSPWVVDGTGRRGAGGSARRGGSGMVFGFIASFMFLLDFITMLYEKRQESQLRKPENTTRAEALTEPLNA

SEQ ID NO: 30997 - protein, 231 aa, Homo sapiens
MTVFEDKAFGRIGARSAGASQAFIDILTTHVMGFSAGSLTIQPASASQPPCSKKQPVGAQMRQESSSRRPDSTSGSDSRRAICRFLRVPESNLGRYEVKTLRNNSKTFAFVTVLIFVLMPLAASKAGAVELAAECAAKKKRRTGSERARDLQSAMPEPPTHSMGSCVARASPTSSTPCSTAPSPIDHPRAEECERMAQDWQAAPPAAPVRDPLGEASWAPESGGDLENLYV

SEQ ID NO: 30998 - protein, 72 aa, Homo sapiens
MGRLPLLRRVLKGLQLLLSLLAFICEEVVSQCTLCGGLYFFEFVSCSAFLLSLLILIVYCTPIFMRELIPQK

SEQ ID NO: 30999 - protein, 114 aa, Homo sapiens
MGCCQDKDFEMSDEQSKEEESEDGREDETTDTQRGPRECERGLPEGRGAEDIDLNSPDHPNHKSNESLLITVLWRRLSTFGRRGSSRPSKRQPDQIRKQESPIREGNQEEPEKG

SEQ ID NO: 31000 - protein, 70 aa, Homo sapiens
MAYSRVRDTARAGRACSVASPRPTVHTVLWRRLSTFGRRGSSRPSKRQPDQIRKQESPIREGNQEEPEKK

SEQ ID NO: 31001 - protein, 114 aa, Homo sapiens; identical to SEQ ID NO: 30999

SEQ ID NO: 31002 - protein, 167 aa, Homo sapiens
MIPPSNGHHVGVAYLSHFGQLEQQTFISHSSGGWKFIKAPADLVLDNGPLHDFQTMLLAVSSHGRDRRREKMPSCSFSMHWTLYWLDSSGFSEGPMQKYLGNGQIYRREEMSFSYSNSKTEIYSKSYTKQDGDWEKGGLQESPQAMHKPRTSGPAPASTLASSTLAS

SEQ ID NO: 31003 - protein, 278 aa, Homo sapiens
  DOMAIN (4)..(23): Eukaryotic  RNA-binding region RNP-1 proteins domain identified by eMATRIX, accession number BL00030A, p-value=5.500e- 10, raw score of 14.39
  DOMAIN (4)..(67): RNA recognition motif. domain identified by PFam, accession name rrm, E-value=5.5e-19, PFam score of 76.5
MPRVYIGRLSYNVREKDIQRFFSGYGRLLEVDLKNGYGFVEFEDSRDADDAVYELNGKELCGERVIVEHARGPRRDRDGYSYGSRSGGGGYSSRRTSGRDKYGPPVRTEYRLIVENLSSRVQLARFKGFYATKQKTVMKYFVAGAAAVDLEGSQKVAPVPGRGAKVDHVLDQKAGNLDQRANLSPKSDRGSHSHSRSRSKDEYEKSRSRSRSRSPKENGKGDIKSKSRSRSQSRSNSPLPVPPSKARSVSPPPKRATSRSRSRSRSKSRSRSRSSSRD

SEQ ID NO: 31004 - protein, 191 aa, Homo sapiens
MKGFSPKIGNTGHKNQGEPHEEDQSKCDDTPNSMFPSLLFCSGDWGVSAEEGRQFIRHLLGITCGDKLDNVTIRKAATALPWSSQSSRGGKQWPVVDPRSTDTGPLRTRAHVVPSQGPYSTFYGALFPNMHIQLASQPPRLHLSSKEALAAGSGRHGTVHCVSALASRAAGWPCHSSSEGYSLMALLATLI

SEQ ID NO: 31005 - protein, 29 aa, Homo sapiens
SQQHERRTAHIRRRVLSENSRSGRPRPEP

SEQ ID NO: 31006 - protein, 98 aa, Homo sapiens
  DOMAIN (36)..(53): Zinc finger, CCHC class domain identified by PFam, accession name zf-CCHC, E-value=4.6e-05, PFam score of 30.3
MPDYSPTFQRCQTTQGRLPWSFTLSSKSRFSGEGARACYKCQKSDHQAKECPQPGIPPKPCPICAGPHWKSDCSTHLAATPRAPGTLAQGSLTDSFLA

SEQ ID NO: 31007 - protein, 17 aa, Homo sapiens
  misc_feature (1)...(17): Xaa = X or * as defined in Table 2
MVYGASEAIGQHQSSAX

SEQ ID NO: 31008 - protein, 40 aa, Homo sapiens
MVYRASEAIQQRQSSAAKPRRSQRALGQSSRGCGSGCQVS

SEQ ID NO: 31009 - protein, 171 aa, Homo sapiens
MTSGPQTDQPKKHLTNFKSETKETRFICGPKTPAPVTDWEGSLLLVFNHCRDTSLIIHPRFKGVRPRRDACLSPSPLAASPAFLGKGQVPQPLLSLSLPLPCFSGDRELATSARNLSDHQAKECLQPRIPPKPCPIFAGPHWKSDCSTHLADTPRAPGTLAQGFLTDSFSA

SEQ ID NO: 31010 - protein, 204 aa, Homo sapiens
MVYGTSEAIGQRQSSAAKLRRSQSESLRPEFQGLWEWLPVRDRHRSFGSTDKTCLLCLYQKMKGTEIKRRERLKCGAKIERRKRLRVREVGEESKKRPLTGFEIEERGEAPLYCHKEDEVQAPLVACTRELFTVRRSALFLNTRQRSEEMEGKSNEKQKICSTEHLKPFEIGDTSTVEGAKEDKIMEMKTERLFDGFSKDLLDL

SEQ ID NO: 31011 - protein, 164 aa, Homo sapiens
MTSSLKKPFASLRESQWADLPLIYNVSVNSVYTVELYGAQQTAHVPFGAKGLPRRSGSVNLQLLSREGLSQRALGQSSRGSGSGCQKMKGIEIKRRERLKCDAKIERRKWLRDSEGGWRRVKRGRLPDLKLKGFVANVYERRTFYLLFVAEIQKAKCAETLSLE

SEQ ID NO: 31012 - protein, 220 aa, Homo sapiens
  DOMAIN (158)..(175): Zinc finger, CCHC class domain identified by PFam, accession name zf-CCHC, E-value=0.0026, PFam score of 24.4
MRAPPKSGQLQHCRPSRGALRSGDLPWEINPLSSCSLLHEKDPPMTSGPQTNQPKEHLTNFKSGVRPRRDACLGPSPLAASPAFLGKGQVPQPLISLCPDPLFPHPNLISLRPNPLCPHPDLVSLCPDPFPAFLEAHKNFQTPEPQQPGIPPEPPPPGACYKCQKSDHQAKECLQPRIPPKPCPICAGPHWKSDCSTHLAATPRAPGTLAEGSLTDSFSA

SEQ ID NO: 31013 - protein, 603 aa, Homo sapiens
  DOMAIN (212)..(259): kw TRANSCRIPTASE REVERSE II ORF2 domain identified by eMATRIX, accession number DM01354V, p-value=1.000e-40, raw score of 12.97
  DOMAIN (18)..(225): Reverse transcriptase domain identified by PFam, accession name rvt, E-value=3.4e-05, PFam score of 4.1
MSTQDERQINTEYAVSLLEQLKLFYEQQLFTDIVLIVEGTEFPCHKMVLATCSSYFRKHQFDHGELFGWLFCKVHPGAVVFAILAAMSIPGSANLQTQWNTVGEFSNLPQEFIEWIKYSTKPVLEVLARAIRQEKEIKGIQLGKEEVKLSLFADDMIVYLENPIVSAQNLLKLISNFSKVSGYKINVQKSQAFLYTNNRQTESQIMSELPFTIASKRIKYLGIQLTRDVKDLFKENYKPLLKEIKEDTNKWKNIPCSWVGRINTVKMAILPKVIYRFNAIPIKLPMTFFTELEKTTLKFIWNQKRARIAKSILSQKNKAGGITLSDFKLYYKATVTKTAWYCYQNRDIDQWNRTEPSEITPHIYNYLIFDKPEKNKQWGKDSLFNKCARTKIVYSMYSQKAAEEVKRELIVKSELLHSRKVMVCKKIQLKTDTARSPQKPIGPSQMLWVTLTVEGLLRRSGSMSLQPLSREGVSQRALGQSSRGSGSGCQLGHLLSEILNFCEPQFPHRNVWNQYYLACSVVVRGSDKKPNAMLNTHINGILYIDTIIVNTFVESLPLRRLNGEGTAFFLIDVHFDVGLMLGGDVRTLDTLHSEAANRQQKDS

SEQ ID NO: 31014 - protein, 466 aa, Homo sapiens
MAYGASEAIGQHQSSAAKPRRSQSESLGPEFQGLGEWLPGLQLPQVRETFALFTDISQALELRLAPAGWMLAGNRPRSSGVPACLRGLQLGLRRAPSADPNRVPGGVGGPLASEAEAKQPAQASRAYPTLENLPRNQEPQPAQASRVGPFQPLQQIPGSVVGRRGSLWERVIIIDPPSLQEFHVFTYNLYVKKTKTCFSSALTTITNTEAFCDQMCGVFPHTPSSGHQLGILQLNSHRGLPAVNQLISMQKHHFGDSKDFWSCMAGNRVKDQRCIDFMAIQQVFDGLTASPAYLYAGCPAQACNRRSLECLAALDTGAEDQGKIADDLNDSSDHQQPTELPNQEIVRWKQRLQAKKAEAGQGRNETVINVGVKRLTSPVHTPAQRPASAGGWWRPCGGWGLGSGGEHGSRIWQSPSVPATSPLKSVDDDGDLGASFECPEGETGEADTQLWEEIKGIKNSQHKSKV

SEQ ID NO: 31015 - protein, 349 aa, Homo sapiens
  DOMAIN (147)..(167): SYNAPTOBREVIN SIGNATURE domain identified by eMATRIX, accession number PR00219C, p-value=6.250e-12, raw score of 9.04
  DOMAIN (287)..(304): Zinc finger, CCHC class domain identified by PFam, accession name zf-CCHC, E-value=0.017, PFam score of 19.4
MEEHFMLMGSKNQYRENGHTAQEKLLYAFHNISLKQSSSLSLSQNFPNNENNDGSKDDDDGGDDDDDCQASEAKPNSACLHPGEINSHVAHTKPVWWSLHTDTHENDNGDVGDDNVDDDVDDDGGDDGKDDGDDDDGDTVMVVMMIMMMVLMVVMIVVVVVVVVVVASRKAFLFLINGEESELESHLTGFANIPNHHLTVQHIYTPTLPSGETKETRFICGPKTPALVTDWEGSLPLVFNPCRDASLIIQPRFKAASPAILGEGQVPLNPFSFTLSGKSRFSGEGARAYYKCRKSDHQAKECPQPRIPPKLCPICAGPHWKSDCSTHLAAAPRTPGTLAQGSLTDSFLA

SEQ ID NO: 31016 - protein, 129 aa, Homo sapiens
  misc_feature (1)...(129): Xaa = X or * as defined in Table 2
MEARETGPWKEGNVERVASVLIKKGTGLPSTVRVTGSSASVMVYGASEAIGQHQSSAAKPRRSQSESLGPEFQGLWEWLPGPRAVKRLRVIFDEKEPKRYLIWDKEKGALTLTMPLAPATFLRVNCWAX

SEQ ID NO: 31017 - protein, 251 aa, Homo sapiens
  DOMAIN (189)..(206): Zinc finger, CCHC class domain identified by PFam, accession name zf-CCHC, E-value=0.0026, PFam score of 24.4
MKPRTLAVSVTVLKDGVSGVCSFRCPDVSRASSFRWVHGLADFRSEAADLHKSRFSGLGSQVSRPSVHLQLLSVSVLCTAKVIEVVETKETCFIREPKTPAPVMDWEGSLPLVFNHCRDASLMIHSRFKGVRPRRDACLGPSPLAASPAFLGQGQVPLNPFSFTLSAHKNFQTPEPQQPGVPPEPPPPGACYKCQKSDHQAKECLQPRIPPKPCPICAGPHWKLDCSTHLAATPRSPGTLARGSLTDSFSA

SEQ ID NO: 31018 - protein, 406 aa, Homo sapiens
  DOMAIN (78)..(103): mutT domain proteins domain identified by eMATRIX, accession number BL00893, p-value=7.500e-16, raw score of 18.99
  DOMAIN (59)..(102): Bacterial  mutT  protein domain identified by PFam, accession name mutT, E-value=2.6e-14, PFam score of 55.0
MSKSLQKPTILNVETVARSRLFTVESVDLEFSNGVRRVYERMRPTNREAVMIVPIVDDHLILIREYAVGTESYELGFSKGLIDPGESVYEAANRELKEEIRVRGHDDSFLKNHLVFLVIYGTNGTFNQTLVTDNNGLAPFTLETSGWNGTDVSLEGKFQMEDLVYNPEQVPRYYQNAYLHLRPFYSTTRSFLGIHRLNGPLKCGQPQEVLVDYYIDPADASPDQEISFSYYLIGKGSLVMEGQKHLNSKKKGLKASFSLSLTFTSRLAPDPSLVIYAIFPSGGVVADKIQFSVEMCFDNQGTDLTSTVRVTRSSASVMVYGASEAIGQRQSSAAKPRRSQSDSLGPEFQGLWERLPGKRDLPLRVKEKGLRGTCPCPRKEGLAAKGEGPSQASLRGLTPLKQNERN

SEQ ID NO: 31019 - protein, 385 aa, Homo sapiens
  DOMAIN (328)..(345): Zinc finger, CCHC class domain identified by PFam, accession name zf-CCHC, E-value=0.011, PFam score of 20.5
  misc_feature (1)...(385): Xaa = X or * as defined in Table 2
XQGAGYSRYNSGESRRRLGRQQDLVARSDEQRDPAPATRREDKMIEELQPFGEHRPRRSPSQGCDTLFQALWFLASPSFQRGGQLQVLALCKAAAGPGAPQAASTAGTREHGYAWKLGDTRNHRALKRKSQTWLRRFPAGCPDVCSALADLRAFMGLRGEEVCADWSMGGHGSGECRRGTGGQRAVVPKSPVQEKGKEPLSLLQYFMVDEKERFLRITSEHEDNDNSNNSSNHSSINETKETCFIHEPKTPAPVTDWEGSLPLVFNHCRDASLIIHSCFKGVRPHRDACLGPSPLVASPAFLGQGQVPLNPFSFTLSGKSHFPGTGARTCYKCPKSDHQAEECLQPRIPPKPCPICAGPHWKSDCSTHLAATPKAPWNSGPRLSD

SEQ ID NO: 31020 - protein, 77 aa, Homo sapiens
  misc_feature (1)...(77): Xaa = X or * as defined in Table 2
XPSMHIRGAHYHMAGSSAVGQQHWKEASWNLQPLFQGMLTVEFQQAGAGFAGCSCQAKIPSKTLGSPEVAQAVSKDK

SEQ ID NO: 31021 - protein, 22 aa, Homo sapiens
MASPAPGSSCVGSFSSASLASA

SEQ ID NO: 31022 - protein, 237 aa, Homo sapiens
  DOMAIN (124)..(145): DOPAMINE-BETA-MONOOXYGENASE SIGNATURE domain identified by eMATRIX, accession number PR00767D, p-value=1.563e-09, raw score of 14.37
MSVHCVIEVNKKTSPLSRENIWLLEKAEACEIAWLHGTIQTHQEKPRVQNLVILEESIALLGLQDKDIRCQVTTAELGLEKKVTRADKKAEGKSHHPSQTKRVPSQGEKEEKQKAISVHVKAEYWNGCTELPNNFYRHARFSPEVLISGFGTVKAVVPPPRPAGGKRVPPGQTDISVTWPEAGQSGLNLIFFLLPPLLERVVRSDRSKMATVEPNPSSGARVRGARTSSLDRWTGEL

SEQ ID NO: 31023 - protein, 63 aa, Homo sapiens
MPESFRQSTLPRPLAQLMLVVIRCHFCERGRTEPPAVPACHRLDEGEGRQLLLSQILRLRPQG

SEQ ID NO: 31024 - protein, 91 aa, Homo sapiens
MFKTYRLVTCFRLFCVGFYLKNRNNQIRKTLLCFSHPTGPAQIREGRWMGNPWTREVQTNGLEGSGQLIGFRTTIWKGHRKRLAKSIYPLP

SEQ ID NO: 31025 - protein, 619 aa, Homo sapiens
  DOMAIN (72)..(105): Bacterial extracellular solute-binding proteins family 3 sig. domain identified by eMATRIX, accession number BL01039B, p-value= 1.000e-24, raw score of 20.00
  DOMAIN (1)..(235): Bacterial extracellular solute-binding prot domain identified by PFam, accession name SBP_bac_3, E-value=7.5e-56, PFam score of 199.0
MKKVLIAALIAGFSLSATAAETIRFATEASYPPFESIDANNQIVGFDVDLAQALCKEIDATCTFSNQAFDSLIPSLKFRRVEAVMAGMDITPEREKQVLFTTPYYDNFALFVGQQGKYTSVDQLEGKKVGVQNGPTHQKFIMDKHPEITYVSDESYQNAKLGFAKRLCGTCGPRFTALRRLDYTSLYGEAKRRAIDRRFRVFRGALPRRGSDGVPPLLSQWGHGQRSDCLRAQYGIAGQSVAHGYRLRRSPSEKCEKAGIISAVRARILRHRSVAPLSCQSSWMYIRMMGAEGLKKASQVAILNANYIASRLQDAFPVLYTGRDGRVAHECILDIRPLKEETRISELDIAKRLIDYGFHAPTIVVPGGGMFSMVLADTVQVIVQSGRHPTVLQKLCQLPFQYFSDPRLIKVLFPSLIAACYNNHQNKIILEQEMSCVLLATFIQTRAQQRKYKRRNNRGIPRESTAREQARHNANKAQQPRKHARNGASPAQQRKNRAAARDKDEKPAQQKDKARQSAPEKKNRAIRGTNSREQAAKAERNRRQRGGQKGAQGGQHREEAGEPTYVDEKAQAATSPPPQTPHPAPDHDDAEDHRTRDTNRNAHQPKVYTHKDTPTNESR

SEQ ID NO: 31026 - protein, 307 aa, Homo sapiens
  misc_feature (1)...(307): Xaa = X or * as defined in Table 2
XPAEALKDGEERQKNKKKAKKIKARMNFRAKEYESLMETKNSGSDSPYKAKLQRLAKDLLKQVQVQDSGSWANNKVSALDRTLGEITRILEKENVADQIAFQAAGGLTALEHILQAVVPATNVNTVLRNSSMPQDSYMQCVTLCFAVTGRSYSIFDNNRQDPTGLTAALQATDLAGVLHMLYCVLFHGTILDPSTASPKENYTQNTIQVAIQSLRFFNSFAALHLPAFQSIVGAEGLSLAFRHMASSLLGHCSQVSCESLLHEVIVCVGYFTVNHPDNQGDRAVRPPPHSAAKSSASCPSSISVTHG

SEQ ID NO: 31027 - protein, 112 aa, Homo sapiens
MNEHHKRAYTYAPSYEDFIKLMNSNSDVEFLKQLGYQIVGEIIQATTISSFPQLKRDPGIETGAMKADLLRARNMKRFINQLTVAKKQCEEENPESPGRPCPMTQQEDGAPG

SEQ ID NO: 31028 - protein, 158 aa, Homo sapiens
MPAHLMCTALGCEKKPEKTHADMERKDILMSLTVGNLAEQEFVTIARHYRVPEGTCSDMDFLIALAHEKFKKNMFENFDTFIYSCVYEDRENCVLGIVIIVLDILSHLLFENSLTIPLNDEVTFAIEEKKAPLQQNTAATEPFTSIKGGNRAVQDYSP

SEQ ID NO: 31029 - protein, 138 aa, Homo sapiens
MDSGVCVQKLGSRMNVTISSMCEKGIKSLISMTVWSGHPVPPHLFLCLVSCMAAALVFSPSNVKTTNSDCTEADCGHLAEIESQFILEVLEERAVDESSRKYLCPFACLQKCSVSCGRGVQQRHVGCQIGTHQNSQRA

SEQ ID NO: 31030 - protein, 329 aa, Homo sapiens
  DOMAIN (242)..(273): Intermediate filaments proteins domain identified by eMATRIX, accession number BL00226C, p-value=8.683e-14, raw score of 13.23
  DOMAIN (112)..(305): Intermediate filament proteins domain identified by PFam, accession name filament, E-value=2.3e-62, PFam score of 220.6
MRKTYGICEKVSKDKIFESIGVREAEEKNKGTKSVFKEMIAKKLSKPGESSVLATTYGARLVSSTARVYAGAGGSGSRISVSRSTSFQGGLESGGLAAGMAGGLAGIGGIQHEKETMQSLKDCLASYLDRTIQNLRIQIFANTVDNACIVLQIDNARLAADDFRVKYETELAMRQSVENDIHGLRNVIDDTVTRLQLETEIEAVKEELLFMKKNLKEEAKSLQAQIASSGLMVEVDAPKSQDLAKVMADIRAQYDELAQKNGEELDKHWPQQIEESTTVVTTQSAEVGAAETTLTEMRRTVQFLEMTWTPGVIEVLSVFKYRVITEVAL

SEQ ID NO: 31031 - protein, 321 aa, Homo sapiens
  DOMAIN (174)..(222): Intermediate filaments proteins domain identified by eMATRIX, accession number BL00226B, p-value=5.500e-18, raw score of 23.86
  DOMAIN (79)..(321): Intermediate filament proteins domain identified by PFam, accession name filament, E-value=1.3e-55, PFam score of 198.1
MSFTTRSTFSTNYRTLGSVQAPSYGARPVSSAASVYAGAGGSGSRISVSRSTSFRGGMGSGGLATGIAGGLAGMGGIQNEKETMQSLNDRLASYLDRVRSLETENRRLESKNPEHLEKKGPQIIEDLEGSDLSQILVGQCPHRSCRFDSARLCCLIDFRSSSIEDRAGHAPVMWRTTSMGSATSFDDTNITRLQLETEIEALKEELLFMKKNHEEEVKGLQAQIASSWVDRGAGSGRTERKLDKYWSQQIEESTTVVTTQSAEVGAAETTLTELRRTVQSLEIDLDSMRNLKASLENSLREVEARYALQMEQLNGILLHLD

SEQ ID NO: 31032 - protein, 25 aa, Homo sapiens
MCHTSFIFVLFGSLFCEQHHHHTPP

SEQ ID NO: 31033 - protein, 86 aa, Homo sapiens
MGTPPSGVRPSCPREVFIPADSLSRPRELLSLPGCLCLLTRVFFPCADYVYSAPFAVLVDEALLCHSTLTAARALCLVSIPENGSY

SEQ ID NO: 31034 - protein, 131 aa, Homo sapiens
MEELQPLLVQEAVDSILNNLERENIRNMQVLKNKMKRSRAKLDQKYYRRVLELIFPVASVYPGSKDLSCNKPELSKVPDSSYYTGNNGLAAERTKTTNYYRYCCNAKGSCLSQAKELVWRLPAASDRDTDQ

SEQ ID NO: 31035 - protein, 167 aa, Homo sapiens
MERFVVTAPPARNRSKTALYVTPLDRVTEFGGELHEDGGKLFCTSCNVVLNHVRKSAISDHLKSKTHTKRKAEFEEQNVRKKQRPLTASLQCNSTAQTEKVSVIQDFVKMCLEANIPLEKADHPAVRAFLSRHVKNGGSIPKSDQLRRAYLPDGYENENQLLNSQDC

SEQ ID NO: 31036 - protein, 168 aa, Homo sapiens
MGRFVVTAPPARNRSKTALYVTPLDRVTEFGGELHEDGGKLFCTSCNVVLNHVRKSAISDHLKSKTHTKRKAEFEEQNVRKKQRPLTASLQCNSTAQTEKVSVIQDFVKMCLEANIPLEKADHPAVRAFLSRHVKNGGSIPKSDQLRRHIFLMDMRMRINSSTHEIVD

SEQ ID NO: 31037 - protein, 222 aa, Homo sapiens
MEGEGEASSFFTKWQEGKERAKGWWPIATDCSQPLPVLAREPSSSKLCLISGGSPHLVIGRCGIIKNYQLTQYSGQPFKQRENSSMGHRPAASAASASSGSCEQRVRNADSWASPKSCSIRICVFTRPLAMERGLEPPAQTWTLTTIHPQVCRVQRGNKGTEDSKKTSLRPPVIPSLTPPISTPHFPRPYPPNIFTNSDPGMLGETDLSNNKTLVSCTAGSV

SEQ ID NO: 31038 - protein, 25 aa, Homo sapiens
MGRGFLLFVCFFFWLQVFNETLLKP

SEQ ID NO: 31039 - protein, 152 aa, Homo sapiens
MFVVIYYSSKKKLLLIEDSLVRILKREADQEEEPCGPTDQRHVERKRPILPRGDSITDTLASPGSLLENAGPLPELQIQNLHFDKSPRDPKLATLRIDLNCKRPVNQQDCRFISSRGYKLIGHQLGHLVFDSSCVNCHTSHQKKMTLAMKRK

SEQ ID NO: 31040 - protein, 118 aa, Homo sapiens
  DOMAIN (12)..(31): Eukaryotic  RNA-binding region RNP-1 proteins domain identified by eMATRIX, accession number BL00030A, p-value=5.500e- 10, raw score of 14.39
  DOMAIN (12)..(83): RNA recognition motif. domain identified by PFam, accession name rrm, E-value=2e-22, PFam score of 88.0
  misc_feature (1)...(118): Xaa = X or * as defined in Table 2
MSRYLRPPNTSLFVRNVADDTRSEDLRREFGRYGPIVDVYVPLDFYTRRPRGFAYVQFEDVRDAEDALHNLDRKWICGRQIEIQFAQGDRKTPNQMEDHGVAEAIPTMIDQTAAGIPX

SEQ ID NO: 31041 - protein, 198 aa, Homo sapiens
  DOMAIN (12)..(31): Eukaryotic  RNA-binding region RNP-1 proteins domain identified by eMATRIX, accession number BL00030A, p-value=5.500e- 10, raw score of 14.39
  DOMAIN (12)..(83): RNA recognition motif. domain identified by PFam, accession name rrm, E-value=2e-22, PFam score of 88.0
MSRYLRPPNTFLFVRNVADDTRSEDLRREFGRYGPIVDVYVPLDFYTRRPRGFAYVQFEDVRDAEDALHNLDRKWICGRQIEIQFAQGDRKTPNQMKAKEGRNVYSSSRYDDYDRYRRSRSRSYERRRSRSRSFDYNYRRSYSPRNSRPTGRPRRSRSHSDNDRFKHRNRSFSRSKSNSRSRSKSQPKKEMKAKSRSS

SEQ ID NO: 31042 - protein, 64 aa, Homo sapiens
MTGYSKTIQTSPNLISQNFIEYLLCTKYMLSTKDTCTWTQLGTQPGRQWVVHNCPPIAVKHIKT

SEQ ID NO: 31043 - protein, 129 aa, Homo sapiens
MSFLPASPQPAEPPEKPLNPLHERQIRSCPERASSPEGERISKGVSGNPCQNGESTFQVPPHHPLGPQVIPKPNSTVGEECELETNDRGESQDQWFSWKVTIKLVTNFQKHQVCDRTQRRHNHQYHDIG

SEQ ID NO: 31044 - protein, 166 aa, Homo sapiens
MSKDAGISDFRRTVTHAGGLSPGESGDPVILRIIPRGKPSFSKAEFLNGGTTDILDQEWIPVWGQRKPGMGQRETGAGGDYHHPLWEMSAKLQVTSRKSTRDADTASMFVPPSYMLEFDPQCWKWDLMGGQQMSSLFLVTVLGVEDTEREKTSLPSWSSQAGLPIP

SEQ ID NO: 31045 - protein, 34 aa, Homo sapiens
  misc_feature (1)...(34): Xaa = X or * as defined in Table 2
MPLLFPVSRLLWLAAEAAFRPLGFREFPRTVANX

SEQ ID NO: 31046 - protein, 161 aa, Homo sapiens
MTSEISFPPLDSDDSELTVVLRAPQDLATLSLPHGEPALIPSGPRRRSLGVVKLMGIGYGLFPGAVGGAGTGALHPNDKVPAFPELTLSAEDRPGTSQQTVPCVRVWCLQRVFAGVEHDRKWLFWIRRSGKVPVCGSDTGSGVKRLEENCTSLEEDSARHS

SEQ ID NO: 31047 - protein, 216 aa, Homo sapiens
MHQNYLEGLLKHRLLGPFRRVSDSVGLGWGPRDADATRLGTFKNHYLRVIKEGNQKQEKSEKQSQPGGAYGDMMTQCNVGTRMGAWNRKKIREVQFSSNRFTPDPVSLPQTGTFPDRLIQNSHFLSCSTPANTLCKHQTLTHGTVCWLVPGLSSALNGSSGKAGTLSFGCKAPVPAPPTAPALNKLLTSVVLRWGSWISSSSSSSSTWELVHVNIL

SEQ ID NO: 31048 - protein, 73 aa, Homo sapiens
  misc_feature (1)...(73): Xaa = X or * as defined in Table 2
XGGGGGYSSYGNSDNTHGGDHHSTYGNPEGNMVAKIVSPIVSVVVVTLLGAAASYFKLNNRRNCFRTHEPENV

SEQ ID NO: 31049 - protein, 96 aa, Homo sapiens
  misc_feature (1)...(96): Xaa = X or * as defined in Table 2
XPGHGPPAGGGGGGYSSYGNSDNTHGRGGYRPNSRYGNTYGGDHHSTYGNPEGNMVAKIVSPIVSVVVVTLLGAAASYFKLNNRRNCFRTHEPENV

SEQ ID NO: 31050 - protein, 57 aa, Homo sapiens
  misc_feature (1)...(57): Xaa = X or * as defined in Table 2
MGSEEQIMHQGGLLSSGVCSPVENKPRESNGVMCNPTLETETPELALSTWDISQPRX

SEQ ID NO: 31051 - protein, 512 aa, Homo sapiens
MGSEEQIMHQGGLLSSGVCSPGQRDLADALVDPGHLWPLFVLPVTLQCILHLFSLFVHRTHQEAKLSNSATTWAWGKARKAGGTIVHKKKKEHEMLTSDIIAGHLGDGAADMNEMVFPRKISLFSEIILLFPNRYLPKAEAMPSTPAILATVERRWDERPEIGEKLVTGRLQASAGDEGEGSMAVSVGDTFTRLVAIPNELDRPTPAGNPTLGHLNIPQLYLLCLTGGGGGGYSSYNKFGNTHGAPTSRHAALVSGVPFFVSMLSIKKNDETSVKDLFAKVKEECGLRAWPQIGDVGKAGLMGGKPGDERETGRGLLSKGVLVMQMKVPRPPDPQGCTSNAPSATSVNSKQGPDGTCAPSLALGEPLESLQPLRASCFRFADLLVSEEGAIDPTLVMEILTEKELCLTEYVEITIQPMAIQKSAVGVASALTMFPGSSYVFGALGGMVHLSFMWTLTSLQEARPGFITHHRPGNMVAKIVSSIISMVVVTLMGAAASYSKLNNRRNLFQDPW

SEQ ID NO: 31052 - protein, 141 aa, Homo sapiens
MARAVNFKGCPDNPCPQQESAVCSGIWSLDSNDLTWVANKVFCLVPAVKKSKVTEMEPSPSHLLMAVSCDPLNPGHHAFQFHLREHFQVRLKPSGSSRGLNPFGMLSGRQNQGPMIHDLVLVPMSVCQRPSEQIVFSLAGA

SEQ ID NO: 31053 - protein, 524 aa, Homo sapiens
MRSPCVNKIQGLEPNAKPVLSPATLQLLALMYPVPFKEMWSRKGNAYTADSGAENYQSLIAGSCDTRGLGYVGGVAFGMMTTGNNEWPRAQISVGTQDRDGSGNIGLQMHFRFMASGQISYAGPQGAGSFQQVPASDRNIKHSIKDDESSIAYNNIKSMRFRNFIFNDDEQERLGARRHNQHHLVAMVDTESPLCPLSPLEAGDLESPLSEEFLQEMGNIQEISQSIGEDSSGSFGFTEYQYLGSCPGSDGSVITGSIQQTAAVEKEEYGAAATEGHVALLGPSSTIHNKITNRTHDWGALALDGGPVPRCSGCRVQVVGWLCIPPRKAKCLTQREHYPFYKVINTGCQVPHLKKNLDHLLGMGSSRAWLPSTQIHRWRGAAGGPRTSRFLRATPERLQPLAAPGKASRPMWPRPRAPPETSGAHRGLGKILRDLTAQGRTHSSHKQLEMDGLAEKGNPSTNPAPGPTLQQVCPCQSPRGAQPDPDRWPGGTQGFGQPLSWAQVSWRSQGRQGLPPLATYPGDA

SEQ ID NO: 31054 - protein, 168 aa, Homo sapiens
MRSPCVNKIQGLEPNAKPVLSPATLQLLALMYPVPFKEMWSRKHPLSSSPLPAGHEEATSSERPYQMRMETDAPKQALMKPRLPKEVCLNTSHFYGIGIAKHGEVSALLMLKVAQLFLTQSKLTCLAALEFLTNQIFASSKGGCVHLPNGSDDGCCHSSPSSDVTVWK

SEQ ID NO: 31055 - protein, 165 aa, Homo sapiens
MRSPCVNKIQGLEPNAKPVLSPATLQLLALMYPVPFKEMWSRKHPLSSSPLPAGHEEATSSERPYQMRMETDAPKQALMKPRLPKRNPFVRGEELWELLPMGYYQRTLAIGNVLMEILCTCRFSGILQVAQPKAESRNHRPQWIKDNLAPEYDILSSEVTYNGNF

SEQ ID NO: 31056 - protein, 79 aa, Homo sapiens
MHQEVLPSYWKQGMGRLTGSVVSAFCFGLGHLEDARDPARAKNFHQDISNCQRSLVITHRYQFPKEQTAIYYTRIVKGL

SEQ ID NO: 31057 - protein, 195 aa, Homo sapiens
  DOMAIN (145)..(156): PROTEASE POLYPROTEIN HYDROLASE ASP domain identified by eMATRIX, accession number PD00302A, p-value=8.071e-10, raw score of 6.33
MGELHLDGDWLSPRPSALPGSATEPETGLQDDTSTSGTTASVAKPDLERRIRLIDQVHPLQQAVRGKARSWVSSVQNSRNRTQSGGPESKKDKRTPTRTQMMQSSFNPYKIAEKHFCQRLKDGKRKRPRGAYSLYGSRGALMDFLVDTGADFSVVTHQFSLPTKKLCYYRRGYWRQERGLFAYPGDVLLGDKSAA

SEQ ID NO: 31058 - protein, 73 aa, Homo sapiens
  misc_feature (1)...(73): Xaa = X or * as defined in Table 2
RSFGIPVLKALFFLFVHWIHAGYRRNKLNCSERFMNLPPDSLICEHAFNHFDYMSLGEAVSDLRQAADIQGTX

SEQ ID NO: 31059 - protein, 291 aa, Homo sapiens
MLGSLAGPSSVQPPAYLQQFFSKERRVYSFGAPLCQGRRNSCPHKGYTHGHRVLAELLYTPMCTVSHSRLTKQHSYKESIDRVLAMSQHRSCVNAHSEFLRMLTATLSLRQPAGLRFYDVYTAPSKMPTHCTKIDHSSGPPSDPFSNQGRQSGRYQESEPLFLLSTYFPHPNSGFVPLVEQGRDLGGLHEESVTAKGHNPPPAMATSQRRHSQGGHNPWNTHLLITGHGNREHGWEKKLKDTLQTEKDKLHLFPEEESFKNWYAKTPLGKKRALAITGGSTEKAKDKGKRK

SEQ ID NO: 31060 - protein, 50 aa, Homo sapiens
  misc_feature (1)...(50): Xaa = X or * as defined in Table 2
MVEHLSRDIDVIRGNIVKHPLTQELKECEGIVPVPLAEKLYSTKKRKKMX

SEQ ID NO: 31061 - protein, 113 aa, Homo sapiens
MGTGTIPFNILLVPGSRGCLTIFPLITSISRRQVLPPCFQQLRWVHKNPPRNTRLLLCLLTCGQRSYKEALVHPGFPKSLTIASLSLRALYRTFQSSSSPLAAAWLFRIKASS

SEQ ID NO: 31062 - protein, 63 aa, Homo sapiens
  misc_feature (1)...(63): Xaa = X or * as defined in Table 2
MKMLQARKQHMSTELTIESEAPSDSSGINLSGFGSEQLDTNDESDVSSALSYILPYLSLRNLX

SEQ ID NO: 31063 - protein, 118 aa, Homo sapiens
EGICRESRRSVHEDVTRPGSRHMSTQLTIESEAPSDSSGINLSGFGGDQLEIQLTEQLRSLIPNEDVRKFMSHVIRTLKMECSETHVQGSCAQASMLPKQALPDESFPSRASRKPKGH

SEQ ID NO: 31064 - protein, 47 aa, Homo sapiens
MTSLKERQQSQSGAYRQNPCLLGTEHLGKGVAVGTASADLNIPACQL

SEQ ID NO: 31065 - protein, 357 aa, Homo sapiens
MWRIPYREGNSMVQIGLDFSFTLKAAFKQLNYIRAPGKDFTLPKSTGLTLDTPECPLSTGEEAREKLGGLEWRNWINHICKSCSNMADTANEMSKKEGSWLLRTWWHFDNGSPALVYQALGLTLNLRVAQRIVPLDEEGKLPRMQKEMKMIKDEDVHFDLAVKKTPSFPHCLQPVASRGKAPQRHPFPEALRGPFSQFRYEPPPGDLDGFPGVFEGAGSRKRKSMPTKMPYNHPAEEVTLALHSEENKNHGLPNLPLLFPQPPRPKYDSQMIDLCNVGFQFYRSLEHFGGKPVKQEPIKPSAVWPQPTPTPFLPTPYPYYPKVHPGLMLALLNYGNEYWRMISLIINPQLTVHSKGC

SEQ ID NO: 31066 - protein, 363 aa, Homo sapiens
  DOMAIN (332)..(349): Zinc finger C2H2 type, domain proteins. domain identified by eMATRIX, accession number BL00028, p-value=7.000e-10, raw score of 16.07
  DOMAIN (302)..(352): Zinc finger, C2H2 type domain identified by PFam, accession name zf-C2H2, E-value=8.4e-12, PFam score of 52.6
  misc_feature (1)...(363): Xaa = X or * as defined in Table 2
MGCGVTPDSKELLKYLSYCNSYPLTGSPQEAPVSDVPLPVSKCSHCSVQLIMCLRPEHIPNSPGIKGQGIKQHEEKHPTLLHLDASHLMTCFVVEMTLYVLIAGFKSLCSIHSYPPRTLRHLCEKVWDSLLENERRHEKRGPANFLHRLPAEHQWGIVQSSNIMAGLSARLQLFLEHRPFPVFELTANGCPTKGLQGEIQAQESEFSPVCNHSPGVIQAELKQGPSGVPEILPQLNSCPTKGTCRYYPEGSRLPSAGTINKGPRLGFSRKGDHSLTSGAPLYVGKESKVHFRAYEDPGVKEHKCGICGREFTLLANMKRHVLIHTNIRAYQCHLCYKSFVQKQTLKAHMIVHSDVKPFKCKLX

SEQ ID NO: 31067 - protein, 1265 aa, Homo sapiens
  DOMAIN (668)..(685): Zinc finger C2H2 type, domain proteins. domain identified by eMATRIX, accession number BL00028, p-value=4.706e-14, raw score of 16.07
  DOMAIN (610)..(997): Zinc finger, C2H2 type domain identified by PFam, accession name zf-C2H2, E-value=8e-56, PFam score of 198.9
  misc_feature (1)...(1265): Xaa = X or * as defined in Table 2
MAASANHEEQEFAWQENQSPSPSSYAYGWTEPEGTASANALKQECAGVFKEQKEDQGAGITHGRLPGKHCHTFACRLNFSKSEPLQRVTVGSVKERLKIRCCAVVIVNGVISTGKQLNVSELQFLYLRNGIIVLYGVSQGSNEIKCFAQDLANAEPETDQVPSRILSHAKGKRLSEGAKLASRPSQWCNITSQRSAWYHSVNLGISGEDQVSAHCLLKCDTWLLRKVVQIGLDFSFTLKAAFKQLNYIRAPGKDFTLPKSTGLTLDTPECPLSTGEEAREKLGGLEWRNWINHICMKQDILSFISKEHATHWPRSLSQDEAGAIHSEEHYPSPCYAMAKAPSSWEMFLAVNLRENLAAIWRIQPMKCQRKKAVGCSGKLPRMQKEMKMIKDEDVHFDLAVKKTPSFPHCLQPVASRGKAPQRHPFPEALRGPFSQFRYEPPPGDLDGFPGVFEGAGSRKRKSMPTKMPYNHPAEEPPRPKYDSQMIDLCNVGFQFYRSLEHFGGKPVKQEPIKPSAVWPQPTPTPFLPTPYPYYPKVHPGLMFPFFVPSSSPFPFSRHTFLPKQPPEPLLPRKAEPQESEETKQKVERVDVNVQIDDSYYVDVGGSQKRWQCPTCEKSYTSKYNLVTHILGHSGIKPHACTHCGKLFKQLSHLHTHMLTHQGTRPHKCQVCHKAFTQTSHLKRHMMQHSEVKPHNCRVCGRGFAYPSELKAHEAKHASGRENICVECGLDFPTLAQLKRHLTTHRGPIQYNCSECDKTFQYPSQLQNHMMKHKDIRPYICSECGMEFVQPHHLKQHSLTHKVLRGLWWGGRGLGKRSGALSRALGSRTPVPLCTLPRGGLQGEIQAQESEFSPVCNHSPGVIQAELKQGPSGVPEILPQLNSCPTKGTCRYYPEGSRLPSAGTINKGPRLGFSRKGDHSLTSGAPLYVGKESKVHFRAYEDPGVKEHKCGICGREFTLLANMKRHVLIHTNIRAYQCHLCYKSFVQKQTLKAHMIVHSDVKPFKCKHLRGFFSDSTSFNILMDMLFIKGKYKSALQVLIEMKNQDVKFTKDTYVLAFAICYKLNSPESFKICTTLREEALLKGEILSRRASCFAVALALNQNEMAKAVSIFSQIMNPESIACINLNNTRLDVKNHDPTSACKPPLDLDFSSPSIVAYLSQLQESGNGLATGCLTQGEREHVGGALDLPIFPLVRLSTSREGKGRWELYLKAPDWGCCPLFRGALPGEEESRVAVGLQWLCGAAPVETGEAMRAGPLGAIHLKQPX

SEQ ID NO: 31068 - protein, 70 aa, Homo sapiens
MGNGGLRPRYYTFPTVFATHRPGDFLGCLHHQGPGFQAQNWTAVWADTELAAGVFFSHPSGAWNASETEP

SEQ ID NO: 31069 - protein, 167 aa, Homo sapiens
  misc_feature (1)...(167): Xaa = X or * as defined in Table 2
MACARLRGACLAAGTAWACPLTDPLDSGSWPLRLSSQPQLTFLALSRWLPGTKGPASPPSGLPVSVIASILMREGFKRRDRTAEETAERWKIFESVLSPPNLRRAFKEKQEEDQEILSGAYTTRALGFKHKTGQPFGQALSQLLFSNASPRPEETSISPWQKQKTEX

SEQ ID NO: 31070 - protein, 39 aa, Homo sapiens
  misc_feature (1)...(39): Xaa = X or * as defined in Table 2
XFLNTPGRMRGDEESSGLDPRTVVIISSDASCVATRVAE

SEQ ID NO: 31071 - protein, 261 aa, Homo sapiens
  DOMAIN (11)..(29): Adrenodoxin family iron-sulfur binding region proteins. domain identified by eMATRIX, accession number BL00814A, p-value= 3.750e-16, raw score of 15.33
MESEPDQTTGACEGTLACSTCHLIFEDHIYEKLDAITDEENDMLDLAYGLTDSCFHTTAAMLKSCDNDHMAYKAWNICCLALRSLSLLTPVQTSSKHSVLQMTIWGHTDLSPIPASAVQPQVCMGGPCHPAATGAYAQTSLPCHHWTSGHMWSPPPHCHQYPSVHANSAVPLHCHPHIHAGFGPLSALSEEELGKYNPEREKRSQMGEQHGNLEKSRGNRHIETGQWWGPGEVVLVLMQLTDEDVEQVKARQEDCQRTTAP

SEQ ID NO: 31072 - protein, 258 aa, Homo sapiens
  DOMAIN (93)..(111): Adrenodoxin family iron-sulfur binding region proteins. domain identified by eMATRIX, accession number BL00814A, p-value= 4.857e-12, raw score of 15.33
MAAAGGARLLRAASAVLGGPAGRWLHHAGSRAGSSGLLRNRGPGGSAEASRSLSVSARARSRPFASCSSVESPCVEVICRDLKLGFGTDCLTCLTCSEDKITVHFINRDGETLTTKGKVGDSLLDVVVENNLDIDGFVQKGNVGLEPPHRVPIGAPPSGAVRRGPLPSKPQNGRSTDSLHDMPGKATDTQCQPMKAARREAVSCKATGVELPKTMGTQLLHQCDLDVRHVVKGDHFGALRFDCPAGFWTCMGSVAPLF

SEQ ID NO: 31073 - protein, 184 aa, Homo sapiens
  DOMAIN (132)..(170): Adrenodoxin family iron-sulfur binding region proteins. domain identified by eMATRIX, accession number BL00814B, p-value= 8.875e-40, raw score of 23.55
  DOMAIN (73)..(158): 2Fe-2S iron-sulfur cluster binding domains domain identified by PFam, accession name fer2, E-value=1e-06, PFam score of 35.8
MAAAGGARLLRAASAVLGGPAGRWLHHAGSRAGSSGLLRNRGPGGSAEASRSLSVSARARSSSEDKITVHFINRDGETLTTKGKVGDSLLDVVVENNLDIDGFGACEGTLACSTCHLIFEDHIYEKLDAITDEENDMLDLAYGLTDRSRLGCQICLTKSMDNMTVRVPETVADARQSIDVGKTS

SEQ ID NO: 31074 - protein, 66 aa, Homo sapiens
MDRFVCQYLMATFVEGDIASFIRGPSPSKLIQQILTLRPDQQIHIFNTLRSHLIDKGMLTSTTEDE

SEQ ID NO: 31075 - protein, 320 aa, Homo sapiens
  DOMAIN (221)..(253): Phosphatidate cytidylyltransferase proteins domain identified by eMATRIX, accession number BL01315A, p-value=8.650e-28, raw score of 22.47
  DOMAIN (59)..(320): Phosphatidate cytidylyltransferase domain identified by PFam, accession name Cytidylyltrans, E-value=1.7e-95, PFam score of 330.7
MTELRQRVAHEPVAPPEDKESESEAKVDGETASDSESRAESAPLPVSADDTPEVLNRALSNLSSRWKNWWVRGILTLAMIAFFFIIIYLGPMVLMIIVMCVQIKCFHEIITIGYNVYHSYDLPWFRTLSWYFLLCVNYFFYGETVTDYFFTLVQREEPLRILSKYHRFISFTLYLIGFCMFVLSLVKKHYRLQFYMFGWTHVTLLIVVTQSHLVIHNLFEGMIWFIVPISCVICNDIMAYMFGFFFGRTPLIKLSPKKTWEGFIGGFFATVVFGLLLSYVMSGYRCFVCPVEYNNDTNSFTVDCEPSDLFAPAGVQKSLG

SEQ ID NO: 31076 - protein, 76 aa, Homo sapiens
  misc_feature (1)...(76): Xaa = X or * as defined in Table 2
XVVGSTSVPLSSPLKVDLVLEKEVAGLWIKIPCTDYIGSCTFEHFCDVLDMLIPTGEPCPEPLRTYGLPCHCPFKE

SEQ ID NO: 31077 - protein, 274 aa, Homo sapiens
  DOMAIN (92)..(117): RHODOPSIN-LIKE GPCR SUPERFAMILY SIGNATURE domain identified by eMATRIX, accession number PR00237A, p-value=7.387e-09, raw score of 11.48
MLVIIAVVAASGPCKLRAVLMSCCKLPRAAAPQPEICLNCRAVCTCTLTILCGTGHVVYTICRSSTTSPLRTTSVRKSDGGKFYRCTDGDYRQPVSVAVVSLVAMLGNVTLMVAILSSSICWQSPFIDVNRYPGDRYLQLVPGKDLDKDEEFQKFISVRKTVVPVSQADVPIGIFFTYALQFHVPAESSSRLPSPKCQRAGHCCRPVCPLSLVNDGRLVLVNTECQLDRIKVLILGVSVRMLAKEIPLSQGLRNGTPYNPIVTQNRTNAQSRKD

SEQ ID NO: 31078 - protein, 131 aa, Homo sapiens
MRDKGSQERLQLDPGQKLVVSMDKAGGFSLEKEVAGLWIKIPCTDTLAAVPLNTSVMCLTCYSYWGALPRAPAYLWASCHCPFKEICPINTRVRQTKAERTDRSTNSAQLSDTWEMANGMMISAGTWNWRA

SEQ ID NO: 31079 - protein, 193 aa, Homo sapiens [sequence omitted]

SEQ ID NO: 31080 - protein, 93 aa, Homo sapiens
  misc_feature (1)...(93): Xaa = X or * as defined in Table 2
XESDSDRGTSGAGTQHLQKLSQELDEAIMAEESDDMTVSLIHHGGSALQFCSAGNKTCLTTEASYPRMSVLPMSFLEEPPRSHQYPWAMLTRT

SEQ ID NO: 31081 - protein, 161 aa, Homo sapiens
  DOMAIN (40)..(55): G-PROTEIN BETA WD-40 REPEAT SIGNATURE domain identified by eMATRIX, accession number PR00320C, p-value=9.400e-09, raw score of 13.01
  DOMAIN (15)..(53): WD domain, G-beta repeat domain identified by PFam, accession name WD40, E-value=6.3e-07, PFam score of 36.4
  misc_feature (1)...(161): Xaa = X or * as defined in Table 2
XSSDSTLKILDLMEGRLLYTLHGHQGPATTVAFSRTGEYFASGGSDEQVMVWKSNFDIVDHGEVTKVPRPPATLASSMGNLPEVDFPVPPGRGRSVESVQSQPQEPVSVPQTLTSTLEHIVGQLDVLTQTVSILEQRLTLTEDKLKQCLENQQLIMQRATP

SEQ ID NO: 31082 - protein, 120 aa, Homo sapiens
  DOMAIN (5)..(20): G-PROTEIN BETA WD-40 REPEAT SIGNATURE domain identified by eMATRIX, accession number PR00320B, p-value=3.769e-12, raw score of 12.19
  DOMAIN (22)..(60): WD domain, G-beta repeat domain identified by PFam, accession name WD40, E-value=0.00029, PFam score of 27.6
  misc_feature (1)...(120): Xaa = X or * as defined in Table 2
XGTCIAAAGMDNTVKVWDVRTHRLLQHYQLHSAAVNGLSFHPTGEYFASGGSDEQVMVWKSNFDIVDHGEVTKVPRPPATLASSMGNLTVSILEQRLTLTEDKLKQCLENQQLIMQRATP

SEQ ID NO: 31083 - protein, 836 aa, Homo sapiens
  DOMAIN (746)..(757): Tyrosine specific protein phosphatases proteins domain identified by eMATRIX, accession number BL00383E, p-value=9.780e- 12, raw score of 10.35
  DOMAIN (661)..(801): Dual specificity phosphatase, catalytic doma domain identified by PFam, accession name DSPc, E-value=8.4e-70, PFam score of 245.3
MAKHEEKRRQIPYEWDTVDTVHHCHSALKVKITSSPLGITNGPNPRLKTPANNCYKTILVASVGSPVERKVPSQIPGIPHAVPSPSTSHVNRRRPTELEQQGLQGDYMNEYKGVRGLLLAFLHFNPRDKDLAGAQAIHQQVTSGLKVPPLCGIGGRNEFPPGARDGPPDSLHSGAAVDTDRRQAEAVSGEPAANHAESNTMIRGAGIRSSVDLQGLLSTPSSPCTVDGKKLRAQGALAAAGTCRTFPTWPCRCVDEPGRPAGPCWQAAEETTRAKAAVAGQEVLVPWGMAPLPVSIAVLEQGLFPLPATSRRLVRHLSPSSWARVVSDPTGAAGPVCEKQIPGPLEQAQGFPSEKWEGKSREENMVRRTATRQQSSTSSLEDTVKARFHGLLAEVMQNKLVLLSPGFGKCQDEQRMTSVSADGVPSAGAHVDFGGGGGWGHPGGVRARCGVGVRRRHRGGRGDGGRGHALQERRVAAGGAGGARRRVLAAARLPGRHELFESSHIETAINLAIPGLMLRRLRKGNLPIRSIIPNHADKERFATRCKAATVLLYDEATAEWQPEPGAPASVLGLLLQKLRDDGCQAYYLQGGFNKFQTEYSEHCETNVDSSSSPSSSPPTSVLGLGGLRISSDCSDGESDRELPSSATESDGSPVPSSQPAFPVQILPYLYLGCAKDSTNLDVLGKYGIKYILNVTPNLPNAFEHGGEFTYKQIPISDHWSQNLSQFFPEAISFIDEARSKKCGVLVHCLAGISRSVTVTVAYLMQKMNLSLNDAYDFVKRKKSNISPNFNFMGQLLDFERTLGLSSPCDNHASSEQLYFSTPTNHNLFPLNTLEST

SEQ ID NO: 31084 - protein, 102 aa, Homo sapiens
  misc_feature (1)...(102): Xaa = X or * as defined in Table 2
MDKRKPTAQLQASYVSENSLDILMHVALNLTETXXXXXXXXXXXXXXXXXXXXXXXXXXXXXXXXXXXXXXXXPXXXXXFPXXXXXRXXXXXGGKKNAPGGG

SEQ ID NO: 31085 - protein, 150 aa, Homo sapiens
  misc_feature (1)...(150): Xaa = X or * as defined in Table 2
MVTRFPGPHAXPGAWSKNWGPDGPTQWGAVGGSRGXGVGPPDWPADPWTGYPYINGKVLRRIIKLHKPFHRLLWCLGGASSSQPQHPAASWSNPKPQGMDKKETHKLSFKASYVFWKTAWDIFNCTFAFKPSLETCSVPRMLIMLVAWLL

SEQ ID NO: 31086 - protein, 85 aa, Homo sapiens
  DOMAIN (35)..(50): WILM'S TUMOUR PROTEIN SIGNATURE domain identified by eMATRIX, accession number PR00049D, p-value=9.697e-11, raw score of 0.00
MLAQLSVFRCGSTSAPNDLWYNFIELPYLGWPRIAGPPPVPAGGPPPPPRAPRAREGACPAARRDRGPVRSALRPGKRGAAGKAA

SEQ ID NO: 31087 - protein, 468 aa, Homo sapiens
  DOMAIN (87)..(129): Serpins proteins domain identified by eMATRIX, accession number BL00284C, p-value=5.821e-27, raw score of 28.56
  DOMAIN (24)..(428): Serpins (serine protease inhibitors) domain identified by PFam, accession name serpin, E-value=4.5e-94, PFam score of 320.6
MNWHLPLFLLASVTLPSICSHFNPLSLEELGSNTGIQVFNQIVKSRPHDNIVISPHGIASVLGMLQLGGGRQDQEAARHDLIDGVLTRLVLVNAVYFKGLWKSRFQPENTKKRTFVAADGKSYQVPMLAQLSVFRCDCPSFSACFLTLTCRSGPARAAVSKLTGPRAFTDKETKTWSQGTCQSLRASVLQVQDLNTGLITPDLVALARVLYKRMQYLSDQVERQKRCYFISQLLKAPNKGSTSAPNDLWYNFIELPYHGESISMLIALPTESSTPLSAIIPHISTKTIDSWMSIMVPKRVQVILPKFTAVAQTDLKEPLKVLGITDMFDSSKANFAKITRSENLHVSHILQKAKIEVSEDGTKASAATSLLNGNKPGRRGMAKTHEAKEVCFPSQMPTPAAILIARSSPPWFIVDRPFLFFIRHNPTGHEMGTSDSALVTVEEERRYRPKYSESSDLAGLSLCPKKER

SEQ ID NO: 31088 - protein, 141 aa, Homo sapiens
ELGSNTGIQVFNPDCEVRGLMTNIVISPHGICVGSWGMLQLGGRTAGPRRQLANGDEDTGVNGSWCTFKGPVGNPRSHPKNTKKRTSRGSPTGKSYQGANAGPSSPWFRCGSTSAPNDLWYNFIELPLPRGKHQHADCTAD

SEQ ID NO: 31089 - protein, 92 aa, Homo sapiens
  DOMAIN (17)..(41): PROTEIN NUCLEAR RIBONUCLEOPROTEIN SMALL MRNA RNA domain identified by eMATRIX, accession number PD01861A, p-value=6.318e- 10, raw score of 14.06
  DOMAIN (1)..(81): Sm protein domain identified by PFam, accession name Sm, E- value=6.8e-06, PFam score of 33.0
QLEALLNKTMRIRMTDGRTLVGCFLCTDRDCNVILGSAQEFLKPSGQCPGNAHPPDSFSAGEPRVLGLAMVPGHHIVSIEVQRESLTGPPYL

SEQ ID NO: 31090 - protein, 89 aa, Homo sapiens
  misc_feature (1)...(89): Xaa = X or * as defined in Table 2
MSSWGSXPGVPQSRRVSARGMHTRLIPSLPGTPRVLGPGHGDPAHHHCSPLKVQRKKFDPGLRYFLTTMAAYLYRLSLKLMTENKKKKK

SEQ ID NO: 31091 - protein, 761 aa, Homo sapiens
  DOMAIN (652)..(699): PROTEIN DNA-BINDING BINDING DNA domain identified by eMATRIX, accession number PD02699C, p-value=1.000e-40, raw score of 24.84
  DOMAIN (220)..(302): RFX DNA-binding domain identified by PFam, accession name RFX_DNA_binding, E-value=4.1e-43, PFam score of 156.7
  misc_feature (1)...(761): Xaa = X or * as defined in Table 2
XDCSRGDCYLPTGTNTQQPLPPPREPLPELPARTPDLSMQNSEGGADSPASVALRPSAAAPPVPASPQRVLVQAASSNPKGSQMQPISLPRVQQVPQQVQPVQHVYPAQVQYVEGGDAVYTNGAIRTAYTYNPEPQMYAPSSTASYFEAPGGAQVTVAASSPPAVPSHSMVGITMDVGGSPIVSSAGAYLIHGGMDSTRHSLAHTSRSSPATLEMAIENLQKSEGITSHKSGLLNSHLQWLLDNYETAEGVSLPRSSLYNHYLRHCQEHKLDPVNAASFGKLIRSVFMGLRTRRLGTRGNSKYHYYGIRLKPDSPLNRLQEDTQYMAMRQQPMHQKPRYRPAQKTDSLGDSGSHSGLHSTPEQTMAVQSQHHQQYIDVSHVFPEFPAPDLGSFLLQDGVTLHDVKALQLVYRRHCEATVDVVMNLQFHYIEKLWLSFWNSKASSSDGPTSLPASDEDPEGAVLPKDKLISLCQCDPILRWMRSCDHILYQALVEILIPDVLRPVPSTLTQAIRNFAKSLEGWLTNAMSDFPQQVIQTKVGVVSAFAQTLRRYTSLNHLAQAARAVLQNTSQINQMLSDLNRVDFANVQEQASWVCQCEESVVQRLEQDFKLTLQQQSSLDQWASWLDSVVTQVLKQHAGSPSFPKAARQFLLKWSFYSSMVIRDLTLRSAASFGSFHLIRLLYDEYMFYLVEHRVAEATGETPIAVMGEFNDLASLSLTLLDKDDMGDEQRGSEAGPDARSLGEPLVKRERSDPNHSLQGI

SEQ ID NO: 31092 - protein, 246 aa, Homo sapiens
  DOMAIN (18)..(65): PROTEIN DNA-BINDING BINDING DNA domain identified by eMATRIX, accession number PD02699C, p-value=2.385e-35, raw score of 24.84
MKSGLGPGFHAPLRVPSLCPLVPSSMVIRDLTLRSAASFGSFHLIRLLYDEYMFYLVEHRVAEATGETPIAVMGEFNDLASLSLTLLDKDDMGDEQRGSEAGPDARSLARKRTSHRNGLARARTQQCLSKNQNQKFYQQQEGCGTLSKFTVTIKPLAVEGVCPTGSVSQPQLQKAAIPRVVQTAVPASRSTESSRTPPSELIPEHPTPSESHLDLFKVKTLLSGQTNIRDFRSPELETPSLSPWKH

SEQ ID NO: 31093 - protein, 351 aa, Homo sapiens
  misc_feature (1)...(351): Xaa = X or * as defined in Table 2
MALDSCSLLGYLDTGIRNFAKSLEGWLTNAMMTSHNRSSRPRWASSVPSPRRCGVHVPQPPGAGGPGGAADTSQINQMLSDLNRVDFPTCRSRPRGCASARRVWSAAGAGFQADPAAAELPDQWASWLDSVVTQVVSELSAQAGPTCPSRGPRVRQPVSPRLHGDPGPDPARAASFGSFHLIRLLYDDTCSTWWSTASRRPPERADRCDGRVQRSASLSLTLLDKDDMGDERVAARRAQTPAAWLEKEQATETGSLVPGTAVSFKKSKPEVLSAAEGCGTLSKFTVTIKPLVWKEFVQQDSEPCVEGTAFGGLQSVSKQVTLSTQEFSSQSQKGILNLVKPSRGDSPSFQX

SEQ ID NO: 31094 - protein, 279 aa, Homo sapiens
MAVTRRSGLEKSFLSCKSLFLSTYDVSPLSRLKNREGAGNGPDIEECRNIIVQFGVREVTAAQVARVLGMMARTHSGLTDGIPLQSISAPGSGIWSDGKDKSDGAQAHTWNVEVLIDVLKELNPSLNFKEVTYELDHPGFQIRDSKGLHNVVYGIQRGLGMEVFPVDLIYRPWKHAEGQGQSPSIRQLIMHAMAEWYMRGEQYDQAKLSRILDVAQDLKIVILEILRSVSQELSETILTMVANCSNVMNKARQPPPGVMPKGRPPSASSLDAISPVQVK

SEQ ID NO: 31095 - protein, 86 aa, Homo sapiens
  misc_feature (1)...(86): Xaa = X or * as defined in Table 2
MYPGYTTSDFCSGTFVLIFAWLTLSXXXXXXXXXXXXWFFIFLRRFYYGELAYANMEXXXXXXXXXXXXXXXXXXXXXXXXXXQRN

SEQ ID NO: 31096 - protein, 435 aa, Homo sapiens
MRTNVPEQKSEVVYTGYIRGTGRKHVLGFIREPPSPFVEGVKGKAQVSLSDSSKNLSSKEERHSYLLTSIPHPRRSSSIRAQRKMCIFKKYNYTKAAGLGGSSIMPAAGTMYLTTSTGYPYTYHNGVAYFHTPEVTSVPPPWPSRSVCSSPVMVAQPIYQQPAYHYQASKLRHWGKWPRRQLPRVLSGHRELGHRNEDPPPPHQSAGGKRRLASEKFCPTNPPAAVAGSLNGSDPAAGLVSQTFRSSLTSRGVEASTALATPRLGRLGRVRPQERQRRCLAQFRRESGLPARTSLDSERLGPSPRPSKPSGTGSTLLLLPAIPRPGALIAVLTGPDSVSIFLSALQRRGVGKRSLKFETTFTPRQQRCLSCLGLSPPGGEGGCGSCREAGSDPGPEPATWRKVYEFVLGRIQMRPMGHQLDKLEEQGQTSVLKAF

SEQ ID NO: 31097 - protein, 96 aa, Homo sapiens
MGTAMLHKRKRRHILYANLMTFRSTGPSEYEILSMCDRQGSLGQTPASAQQWGRGSRSPDFLQIRMNQDHQNKRKPGTTCEDLEEITNADFWQYDG

SEQ ID NO: 31098 - protein, 234 aa, Homo sapiens
  DOMAIN (71)..(112): CORE POLYPROTEIN PROTEIN GAG CONTAINS: P domain identified by eMATRIX, accession number PD02059A, p-value=5.163e-10, raw score of 28.10
MGHTEYKNYTYLFYIKLRLKQKKVQVPMGNMVTLFRAVVKFCPWSPEKGTLDVDLLKQGRVRVTMENMVTLFRAVEKYCPWFPEKGTVYVKVWDHVGSTFWELVPARNYVIVTVWGGWALVRAVLVVCRSRDPLQLSQFSAFSSVSLPFPQPSSPIQPLLSAQPLPSPTPPPPNNTKNSMSNSAWWAEEARLQAQLNRTNGILTTQAQLTGSDSFSDTYAQLGFDALTTKQVTK

SEQ ID NO: 31099 - protein, 127 aa, Homo sapiens; identical to SEQ ID NO: 30478
  misc_feature (1)...(127): Xaa = X or * as defined in Table 2

SEQ ID NO: 31100 - protein, 712 aa, Homo sapiens; identical to SEQ ID NO: 30479
  DOMAIN (163)..(181): RNase H domain identified by eMATRIX, accession number PF00075J, p-value=2.688e-14, raw score of 15.78
  DOMAIN (69)..(226): Integrase core domain identified by PFam, accession name rve, E-value=2.8e-38, PFam score of 136.4

SEQ ID NO: 31101 - protein, 663 aa, Homo sapiens
  misc_feature (1)...(663): Xaa = X or * as defined in Table 2
MGKDFMSKTPKAMATKGKIDKWDLIKRKSFCTAKETIIRVNRQPTEWEKIFAIYSSDKGLISRIYKELKQIYKKKANNPIKKWAKDMNRHFSKEDIYVAKRHMKKCSSSLVIREMQIKTTLSHYLDIVEVNIAHQISLRSEAFFHAMTSQHELQDYLRKTSQAVKMLRDKIAQIDKVIKSCEDHKARNNKFLLEKTVCRCCETIKEIMKEIVDVTRVRNEGFQDKNLGEIQQLIGTTTEELTEDDLTEMSVLKPMPDNEEKEIEAAVPENKMTLDNLAAEHLGSQLCELEKLIDKMMIAEFSTYSHSDLNRPLEDDCQVLEECVINKVSQTEEIDTDVVVKLADQMRMLNFPQWFDLLKDIFSKFTIFLQRVKMGPSSSRKISSGLPLTLHYDELYNYFIIFYNVITVEIKCIIKVHPKTISPQTPWSMEKLFSMKPVPGAKKIEDCCAIFSSFVHVGTRFPLVGAEKCHRFGPQKCLFDSLTTGVTGPLPQGLVSLVLGRASTSAKGITIHTGLINSDSVDEIKLIVSAKLPVSIPAVSFHTDLPATQNYSYWAYVPFPPLIRPLTWMDAPAEIYTNDRPRALPSAGGKASPASVLLFKTASAPKSSXAGPEMLSKSQGLESGTPRAHSVFEPTMAKGVLPEQRLVLSHTQLMYKVVLEKIL

SEQ ID NO: 31102 - protein, 335 aa, Homo sapiens
  misc_feature (1)...(335): Xaa = X or * as defined in Table 2
XTPPPPNDAENSMSNSGDFGLTLPPADLVSFHEEPVLISSRGHDSDSPGPYTLILLSSNLRSHLMAPGPNYNLPIILQALPHPLQPLTLLSFPFLNRSLCHPLSLPLCTLLHTCTPHLQFRIWWSQEAHLQAQLNRTNSILITQAQLTGSDSFSDTYAQLNFDALTTEQVTKPNYKMPLKNLSDEHAQVSFHTDLPATQNYSYWAYVPFPPLIRPLTWMDAPAEIYTNDMCWTSQRILRQNRENKPSSPWHIYIKRKGEMLQEVRDPERRDRLKPWQKNINCEDFMDNLQRSLTLWPPPPKAHREYCQATVNVHKIQGLFSQLVVKAARPGTHPS

SEQ ID NO: 31103 - protein, 82 aa, Homo sapiens
MGYRYPPLCLRHAPGCIHLETQIWAAYLPERSATEEPGHLVSSISLSPLRKMKGGVMGDTPHFQYKPGENHALKILRPHLKL

SEQ ID NO: 31104 - protein, 42 aa, Homo sapiens
  misc_feature (1)...(42): Xaa = X or * as defined in Table 2
MITRXXXXXXXXXXXXXXXXXXXXXLKSREADSAAFSLWPKA

SEQ ID NO: 31105 - protein, 185 aa, Homo sapiens
  misc_feature (1)...(185): Xaa = X or * as defined in Table 2
XWPIMGLHLVTVPRSFKPRQQKQQGSKDDNNEEIKGNGDHPQDYFLPSTGAQEDSLSTREAFPKSHSEKHHVCLLCGMVTAGAAETSTNQYPYPNIQYPNNQYPISQEDLADQFVRAKGSLMVLPKTSLLLLKHTKHAQALGFARLSDWNAQNPSSREQNTPLPSFSWILAKATTSETPALTTLV

SEQ ID NO: 31106 - protein, 44 aa, Homo sapiens
  misc_feature (1)...(44): Xaa = X or * as defined in Table 2
XIVCQLQRMLSIAVEVDRTPTCSSNKIAEMMFGFVLDIPERSQS

SEQ ID NO: 31107 - protein, 178 aa, Homo sapiens
MPMDISALSSPNCSPSPQSETPLEKVPWLSVMETPARKEISLSEPAKPGSAHVQSRTPQGGLDNRPCLHRLKYFLRPPAHHLFFQTLIPDQDTRENKGQKLQPIPHRRLRMVTNTIEENFPLGTVHFLMDFVSPQHYPPREIVAHIIQKILLSGSETVDVLKEAYMLLMKIQRLHPAN

SEQ ID NO: 31108 - protein, 71 aa, Homo sapiens
TLEDDFQQTLRRQRQHLQQSIANMVLSCDKQPHNVRDVIKWLVKAVTEDGLTQPPNGKSNVFRNRNLESQQ

SEQ ID NO: 31109 - protein, 135 aa, Homo sapiens
  misc_feature (1)...(135): Xaa = X or * as defined in Table 2
XVAGDKGKSTRTPWEALIHRAKATRAISRRHLMRRKAAEKRLPAGKAAPEPASRWRPGLRELSPRPDWNTEGTEVKVPQPGVQMVTIHDQRVRARTVKRLIRLLARYLIIHLQISKDNEIPLHIHEYGYNQKDKQ

SEQ ID NO: 31110 - protein, 81 aa, Homo sapiens
MWHSNKAPPKYQREGSGICFPLSSWSSELKLSAPLRAGHQRAVYPHLLLPSSRGPEERGIQVLDKWCQIGMSGPAPNCPLM

SEQ ID NO: 31111 - protein, 546 aa, Homo sapiens
  DOMAIN (121)..(183): Gag P30 core shell protein domain identified by PFam, accession name Gag_p30, E-value=2.9e-11, PFam score of 42.9
MGNRKIPHKYSLERLVGLFEKADETVKEFARSKGACRGGSRIYHIFRKGNPAGFGKIPRSIKIPEEKSPLKGGAPMREKGHRRNHIQLLLSLPPILAQAPSLTLTSVLVIECSLQEVAETEGMRKYTNPDPVSPERTTVLNLRFISQSTPDIWCKLQKLDDGPQTPQRDLLNLAFKVFNNCDEEVKGKNRQSFKCLPPPLEALQVPEAATPQRSLLAIHLHLVPVSSAAMKATGPNNAQTQKVAIIYCSGHQTPDNPISAGNALADQVAKQVALQPVQGQFLSLSLFSPLYSSEEKEDFQAQNLQRQGPWPSPKTQGHLAPAGCISKRAEAGRELAGRHAPLKIEKEAIQPILLGKKNKVLYGAPVGSQELVLFLSKSSRSGLRMYLADSLQGLYLVQDLSCCALQSVAALTFRPHLLQLLLTNNSCSMNAKENLLLGDLETLCQMTLTQGPGGPAEPLDYMEIEGFLSTLFLLFNLLSALHHGLMSDESLSLPHLRNTNNHQRRLGTPPDDAHKQDNLEEMDKFLDTYTFLRLNQEEIDSLTNDQ

SEQ ID NO: 31112 - protein, 160 aa, Homo sapiens
MYPFEWSTSQSNSDLGVQGSSKEIWSLGSSRAWHQHLARAFILHHLMEENKKAIQNRKRRLSRRLSAMSPAAAGNSGGQTRGLSGPTSMDSFGLPSFKPQLFGDFTNEPQLTYVLLCFSSTNQCWSSVGFPKEPLEENGKNGDTEASTGFESLLCLLQDM

SEQ ID NO: 31113 - protein, 505 aa, Homo sapiens
  DOMAIN (364)..(417): Clathrin light chain proteins domain identified by eMATRIX, accession number BL00224B, p-value=1.655e-09, raw score of 16.94
  DOMAIN (238)..(331): Leucine Rich Repeat domain identified by PFam, accession name LRR, E-value=2.9e-13, PFam score of 57.5
MRILRAIPGKQLPRWNALPEQHVAGPHGGSTQWLNTRKELALGVQTSETWALELMTQYVNNWNWVYDNIIDQDESELTGLLGNTQELSPALELTSEHEGNVGHAGKGPLESSSSDPFLCAREKGCRTATSPISVVAEGDVDTEVVVVAAPVGARREARSAASGRRRSRIGGDGGLRRRRLAPFTRRNPGAGARSAGVTMTKAGSKGGNLRDKLDGNELDLSLSDLNEVPVKELAALPKATILDLSCNKLTTLPSDFCGLTHLVKLDLSKNKLQQLPADFGRLVNLQHLDLLNNKLVTLPVSFAQLKNLKWLDLKDNPLDPVLAKVAGDCLDEKQCKQCANKVLQHMKAVQADQERERQRRLEVEREAEKKREAKQRAKEAQERELRKREKAEEKERRRKEYDALKAAKREQEKKPKKEANQAPKSKSGSRPRKPPPRKHTRSWAVLKLLLLLLLFGVAGGLVACRVTELQQQPLCTSVNTIYDNAVQGLRRHEILQWVLQTDSQQ

SEQ ID NO: 31114 - protein, 107 aa, Homo sapiens
MHLAPVRGRPSAGTLHGSRVRKRDGCPALGPGAQEESGDLQTAGTDITVDSAEKPSIIKFSVKAFMFSEQNVRGVPSQNQLLPCPFNSCEPLKETGIAHSGSSVVGD

SEQ ID NO: 31115 - protein, 58 aa, Homo sapiens
MWGQAVCLGISFLPFRFYFFLWRQKLGIRQYEGLSPPLKSRTGGIVRSYSFQNLLKTL

SEQ ID NO: 31116 - protein, 90 aa, Homo sapiens
MLHRAGLSRLTGCLNCPLITSLPSQGTKKCSRTSRRQNPSDTELKKEGLYSAGSFGKTHVSKNRAPRHLDVNPVLLLLNAAEYTLNRWDL

SEQ ID NO: 31117 - protein, 255 aa, Homo sapiens
MSFHKSLCHQQLPGPNVKKHKTRHVLVGGGTLTEVSQSCHTSRSAQEQSSHSLHAAHVSRQQGPMSEVTGEPHGCLRAGKPGIQFELPMVSRWITRLAAPFSCLHWGRTAYVTEKAETSEYDTGDLPVCLEVNFHFRHMHTKTDQAATPNRQQMTILLLLTIRSSTLLHFGKWNKCSGEDREHRTYLPGGDIKEQPQDLQNKVVPMNYLCLQPHLAPSAKPASDKQLFPRQPPLPSILGTHPENSPTCSTTTKLF

SEQ ID NO: 31118 - protein, 143 aa, Homo sapiens
  misc_feature (1)...(143): Xaa = X or * as defined in Table 2
XIAYGKKEFERRRWKIESRVQEWEEGFVPCARLPPSDQTEDTQMRDGEVTGSFDKLRHLESGLKDDSRKLISFCSVATDCVDLGISEIAEIVSYQPREATPVSEAGSGLGWLCPTIFTKSCLIFEDVELAMESKIPLAVPLVP

SEQ ID NO: 31119 - protein, 337 aa, Homo sapiens
  DOMAIN (19)..(64): kw TRANSCRIPTASE REVERSE II ORF2 domain identified by eMATRIX, accession number DM01354N, p-value=4.282e-21, raw score of 13.17
MIKRILTTNPTEIQTTINEYYKHLYTNELENLEMDKFLDTYTLPRLNQEEVESLNRTITGSEIEAIIAYQPTKFQDQMDSQPNSTTVSKAIHKASQNSRETDSTCGREEQHVGTGMERLTGHHTGKLSITQFDLLNTKGATAGIALRLDGRTSPFFFLPLQALLCSVLTTDLYGLGADAPGINPTRSFEMSFINTLPLFFLILIKWVGLSIPPDETILDIVEVKDLRQTLPFEKGYRDAKKSAGNGRKYFVGTLNKNNCYTFFTRNLLSLRYISINSMKTDQYTKLVPVEWGVAENIPENMEAILDLRTDRCWYSLGGSEDKKMGKFGTSWRPIEWH

SEQ ID NO: 31120 - protein, 46 aa, Homo sapiens
MWVYPSATPTENRGTTQSIPINPTDSLEITNYCFKPTRFWGRVVKQ

SEQ ID NO: 31121 - protein, 110 aa, Homo sapiens
MLTRLRETPPLPPPPTHNVLLDPPSTIPRPAALTEKGRAVEERGVKGAHAKPRPCRDVWRRDASPRNANREKGHLFSGKSSAVNDERLSFHQLLVTPETSSVRGEEWDNS

SEQ ID NO: 31122 - protein, 51 aa, Homo sapiens
  misc_feature (1)...(51): Xaa = X or * as defined in Table 2
MKRRKQDEGQREGSCMAEDDAVDIEHENNNRFEEYEWCGQKRIRATTLLEX

SEQ ID NO: 31123 - protein, 184 aa, Homo sapiens
METAIREELELGGIKEAPNPAQSKEGFLRRFEPDVRILLTKYSNSNGSQSPWMEEQIRDALGNMVLKMLYVKRMKLVKEIRSGGQLEKNKGAFSNGYDIANKVMNGHSFQPFQKFREILAARGKFREIFRFNPHVKREGSCMAEDDAVDIEHENNNRFEEYEWCGQKRIRATTLLEGGFRGTSS

SEQ ID NO: 31124 - protein, 45 aa, Homo sapiens
  misc_feature (1)...(45): Xaa = X or * as defined in Table 2
REGSCMAEDDAVDIEHENNNRFEEYEWCGQKRIRATTLLEGGFRX

SEQ ID NO: 31125 - protein, 215 aa, Homo sapiens
MGRKEPRTGRGRGVGWKDLAAAKDWTFLRVRANRQTRLNDLFYYSGKRNGRMPWLLQESPHPMPWRDSGIAHSQPGPEVGGLGISPEPRLEGRITEDSAVTTFEALKARVRELERQLSRGDRYKCLICMVSRKEPRGALGQASTPSGGVGEGLVLDAPNVHPVLARALRGVLAADPEMMEQVRVGTIRAAFSGFPEPSDLAAKARIWENETEEAR

SEQ ID NO: 31126 - protein, 257 aa, Homo sapiens
MLRIDQDPRCSFEKGAFASLFPKGAVAFCRSAAWRPQHQGQSIASTDCADNEPEVLLGVLGTKASLQRALTVLTMNQVPALSATTALQESRDQMKNMEAIRGPMSPASSKATPSLYTHSRQGRGVMYSFIEASMSSHTKTDVLHYGTASYSEFISNTKTSNQGALGIGTWPILTQASPLIKAPAETGNAERDKDAEFLRGRRSTWIDRVLSEGQLSCAMENENVNFGQPVLKGSLPEVCGRDLPATSPPMEPRSPGS

SEQ ID NO: 31127 - protein, 46 aa, Homo sapiens [sequence omitted]

SEQ ID NO: 31128 - protein, 75 aa, Homo sapiens
MRPTARPGSASLEEGWRCLGNRSKRRPPADAVKRGAAAVSTFERPVVNANVSVPLMFREEVAEFPQEELPVKLSQ

SEQ ID NO: 31129 - protein, 479 aa, Homo sapiens
MYLMQGHQSYRIKGQPCSSITVGSPLWESSATNSWAATETMTYQDRSRIMNYPLANSKGSLKAWIFSRSLEVEKSKIKALNLVRAFLLSHPTAEGGRAGAHTRERERDDKLGNYISLILPTVFSPDSTNERHLHEIWLGRKGEAIVFLRQQQMADMEFCLKLLGVLLKILQLALQAAESNGSGFLVIPALPDFLKERMQQQGTSLEAEIKPLSDAKPAYALIWDFPASRTMRNKFLLFVNYPVYGLQEKGEESLQVALCGESHPTGMVAFIKECSQPGEPSPQGSKANRYFTLSFLLPSHVLPVFSIGQAQPRIQKTRESADTAHPVCPQTKDGHVRIPQRLVDCAAADVGRRRFFGKQGGFEQTNDLARTGIVCAWQKQRRDSRDVTMGLQHLSSVTSTLRRRPALAQMLLEPSEACNLGSFLVISHMVVDNGCWGLGLEASEVTVDAGCQPGAQLGCQLERLHMDSPCSLDCAQAGG

SEQ ID NO: 31130 - protein, 112 aa, Homo sapiens
VENVRIIGKTKLKKEFGVPKEFCATCRPAIPFAREGTEAFAGEAAERRKRTGDSPDSKGLQLVGEARQPQRKHSMFGPVLPDGAVQLQALSVLTEELDEIHTDSKAAKVYDA

SEQ ID NO: 31131 - protein, 158 aa, Homo sapiens
GESCFGNFQWSALALATGWETQEEVERTRMRGSEGERKAAIEEEALQPTCACRSIIEHPKCCLSRAEARRDAAKVALINSLFNELPSRRITKEFIMESVQEAVASTSGTLDDADDPSTSVGAYHYMLESNMGEDYAGVSGADDHFPTIALEWKPKSPS

SEQ ID NO: 31132 - protein, 61 aa, Homo sapiens
MSLIPPYPPLPQPLRTDSGTAKPPGTEGRRAGTDRLLPVRGSPPRSRSKRLGAGMKYNSWP

SEQ ID NO: 31133 - protein, 29 aa, Homo sapiens
MVFCLNYQVHGLLLALAEAPGRSFQKFLQ

SEQ ID NO: 31134 - protein, 375 aa, Homo sapiens
MEDEEEVENQKVVRALLEKEEEEEEEEEGWEGLPQPEPCVSVHIGTPPHLISACFYRGTDGCVWGLVPTQISTGSSAGRRDPANGIHEETHVRLEKKFKLTPVPALELDQVLATAPTWNAGSVAPKPKAKGKRNEVWDGGRPLIRGSDWGGLPGMPPPTPSPAEDSSAAGLPEALTPASPLGAIDADLGVRLGEVLGIKRHELRFLLHNFSMREEDIEYLTQSSGMEPSKTLFPSLELLCKKDFRSETPQCGSKTRLGCPGMERGLSLDWNSWNRRGLVSLSQALRTAYSSRQGHLGREKVERVFGKGETLENAAPPHPDCSFSPAMEQSWMENDFDELTEVGFRTWVITNFSELKEDVRTHHKEAKNLEKRLDE

SEQ ID NO: 31135 - protein, 315 aa, Homo sapiens
  DOMAIN (166)..(193): Protamine P1 proteins domain identified by eMATRIX, accession number BL00048, p-value=4.488e-09, raw score of 6.39
MALGKFPAYREKEGAFTLFSAGQGEKGGSYVAKGRRPPTRLSLTNAVVPDLGRRCTSRGTCGRNKVTASRRGTPVLSDVKPTPSGCAHSLGKGQIRVPQNRQHRREESWDGQATPGEGSPPRSRSKRLVAASNSASGLGGRVPGKKETKKSQTPVEQDPGEVPKWARRRRGESSTGAGYGPRPRVRPRRRHSKVRINSTQGAGGSESSGSPAADESSAGDGVGGASLEARPSLEEKGASKLPDKALGLRNCGYFFFSQSQIIREQPLEHSLQIQSLPEPPMRGRPPSHTRSSSPSPSAWALLSRRPGWSSRQNLI

SEQ ID NO: 31136 - protein, 85 aa, Homo sapiens
MGKQDSQRAVRHQASHCPYLYSQAIIRNDCRSDPTYRPCCCEDETRGIKKKLMTDLLKECMQRSKNNKDCAKIGLMCTVKQQATG

SEQ ID NO: 31137 - protein, 19 aa, Homo sapiens
MTVVGNTSNMLISMRGNDA

SEQ ID NO: 31138 - protein, 181 aa, Homo sapiens
MWAPQVGAPFPLPCMSIAGFNVSGRQKTTAAHGGPYQTQDRDHSISTQVLIAFPPPSPSILCTVGPRGDKVIFSLPGHLGAQTTSWRNDAERADAPAYQDVTELTLPEPELPESSWRNTYPCGQTLSPHAQSSLRIAGELGEHCSLLSLDPSSMDFCGPAFLPDAPDCLHSTFLFVTFFKA

SEQ ID NO: 31139 - protein, 43 aa, Homo sapiens
MLPQGALSGKGNGKKTQDLLTKAQNGEKHQSLGSWAVRYKSTK

SEQ ID NO: 31140 - protein, 222 aa, Homo sapiens
MEPFHPLPSFQAQALRPTLLFVSAPASSLFTSIQTTEQEEFQKGPPQGALSGKGNGKKTQDLLTKAQNGEKHQSLGSWAVRYKSTNCWQIGYQSLKLFQISSSGLTKKFKWTCRVVGLISKPELTFPSPFTKDLTAASNQAIALSTPCFEKGTKQFLFQVNPVLTPVPSGFFPERLFPGARWCWWGRAEVALEAQSALGSVTEHVGFRSLFRFSCLSNPVSV

SEQ ID NO: 31141 - protein, 27 aa, Homo sapiens
  misc_feature (1)...(27): Xaa = X or * as defined in Table 2
XGSAVCRGSMGCVVFIVAGRWTMGPQX

SEQ ID NO: 31142 - protein, 218 aa, Homo sapiens
MENWPFLQINNESVTKEHLQNKQKSKAILRRPSPSFAIARHRTPSLEICRHLDFSHAVCQVSAATRRQGAGPCGLCCTSDGFAPASALSLLQHSDLHPLRGFHCPRGENAPGIVIVMSATKARDGSAVCRGSMGCVVFIVAGRWTMGPQGTISNVEQMEKVAEGGIYTCPRGHGEKVQLISPLEVKTTLAGVGAKITLKYVLSWPEMAIKMSPSSSRQ

SEQ ID NO: 31143 - protein, 154 aa, Homo sapiens
MPSPEDEDLLPGPGEEENPLFTRATLSPVILEMKLWDYLYYHHPQPTKDNTLTLLSDAGPSHHQVPEALVEAQFILILSSLAQVSPRSGLIEQQELGSGTRDPASLGILDSRKDPGDLPLYEAQSPLTVMASLDPTGNQIRRPHRPWGKNKSKV

SEQ ID NO: 31144 - protein, 66 aa, Homo sapiens
  misc_feature (1)...(66): Xaa = X or * as defined in Table 2
XSVGAQALKNLLVAGPRAQERCQRAGASPEPREEGCNGSPIVDRDIRIPSPGSLKTSPEFGSWKEL

SEQ ID NO: 31145 - protein, 48 aa, Homo sapiens
MQDEIALLLGIFLILYSEKVVILFPTGPVTSLLSCSSSWHQSPGLSCW

SEQ ID NO: 31146 - protein, 42 aa, Homo sapiens
MAVSTETSIHGIACPPYPSLLSTAEDSLFRVAALESRSNRRN

SEQ ID NO: 31147 - protein, 52 aa, Homo sapiens
MDKKSTHRNPEDARAGKYEGSQTDSSIEDAAKGKIKKKRREKTNKWEKRKRD

SEQ ID NO: 31148 - protein, 390 aa, Homo sapiens
MDKKSTHRNPEDARAGKYEGKHKRKKRRKQNQNQHRSRHRSVTSFSSDDPMFPSSSSSSSGSQTDSSIEVHEGTRFPLVGAVKHQSAWSTDKRVQLPDEWLFGKQKEVKMPSIYLPGKELRTLVKGTLENLPLPSGNFQQPAWGLTQGESGIWPGPRDRNTTSMASRAFKTSFQNLIGPTEEPSGGAAGTGDRNSTSRNLVSAKASSPGQSCGKSPAEMVLETLMMELTGQMREAERQQRERSNAVRKVCTGVDYSWLASTPRSTYDLSPIERLQLEDVCVKIHPSYCGPAILRFRQLLAEQEPEVQEVSQLFRSVLQEVLERMKQEEEAHKLTRQWSLRPRGSLATFKTRARISPFASDIRTISEDVERDTPPPLRSWSMPEFRAPKAD

SEQ ID NO: 31149 - protein, 76 aa, Homo sapiens
MDKKSTHRNPEDARAGKYEGKHKRKKRRKQNQNQHRSRHRSVTSFSSDDPMFPSSSSSSSGSQTDSSIEDAAKGKN

SEQ ID NO: 31150 - protein, 42 aa, Homo sapiens
MFHRTYQRESGSLMHLGKKKDHVGARYRGTCPDNHVGSFLFS

SEQ ID NO: 31151 - protein, 126 aa, Homo sapiens
MTGLMIIFLMMSQLFKKVIRRKNIQLERFARVQILFIPGSVGFTEGLVIHSTGTVPENDLYKAVLLGYPAVDKGKQEDMPYIPLMEFSCSHSHLVCLPAEWRTSCMPSSKMKEMSSFFQKTGTNLF

SEQ ID NO: 31152 - protein, 277 aa, Homo sapiens
  misc_feature (1)...(277): Xaa = X or * as defined in Table 2
MKENVHNTENKGKAPLMLPALNTLPPPKSPEDIDSLNSETFNDWSDDNIFDDEPTIKKVIEEKHQLKDLPXYTLKLMIDKASLGPIEDFRELIKYLEEYERDWYIGLLPLKKEAIIVSNSLSISECPRIEFLQQKHKDEKKISLKHELFRHGILLITKVFLGQSVQAHEKESISQSNYPMVNSVFIPRKYLLNSVMGQRNCDCSVRQCKWFVFDHDLVLPEYVVEFEYITMSLNLHGNSLSKLRDLSKLTGLRKLNISFNEFTCLDDVYHLAQALLX

SEQ ID NO: 31153 - protein, 57 aa, Homo sapiens
  misc_feature (1)...(57): Xaa = X or * as defined in Table 2
MVGAGEVDEDLEVETKEECEKYGKVGKCVIFEIPGAPDDEAVRIFLEFERVESAIKX

SEQ ID NO: 31154 - protein, 105 aa, Homo sapiens
MKQVGLQGDQIQILMKMKIMSEERRKRSMGGAAIAPPTSLCTEEQDRPEISNPDLSNSFLANMGGTVAHKIMQKWRRRYKRGGKIIVGDATEKDASKKSDSNPPD

SEQ ID NO: 31155 - protein, 109 aa, Homo sapiens
MMCLCGRTKPQYKQRRGSSATLPRCLLSLSVSVYFYGWTFFTEDKLGAPVASAQLQGLLVPMDLAGGKPSRSYRVGNTSVLIAFLVFLSPSDKLLSGNSACSTGIGKFH

SEQ ID NO: 31156 - protein, 217 aa, Homo sapiens
  DOMAIN (31)..(55): Granins proteins domain identified by eMATRIX, accession number BL00422D, p-value=1.000e-08, raw score of 19.48
  misc_feature (1)...(217): Xaa = X or * as defined in Table 2
XFLSTREKDPHQRQRKDDRQREDDRQRDLTRDRLQREEKEKERLNEELHELKEENKLLKGKNTLANKEKEHYECEIKRLNKALQDALNIKCSFSEDCLRKSRVEFCHEEMRTEMEVLKQQVQIYEEDFKKERSDRERLNQEKEELQQINETSQSQLNRLNSQIKACQMEKEKLEKQLKQMYCPPCNCGLVFHLQDPWVPTGPGAVQKQREHPPDYQX

SEQ ID NO: 31157 - protein, 801 aa, Homo sapiens
MKMQVTRFLVIKDSVASCLHSPLPSVTSLTLGKAGCHLVSSSPCSEKLSAPAHIPCCDYRYEPPCLTCVGYFYGQLMLHPAGPSEEPYVMNVRIVPLEDPRGKHFQQPHPSFVKYALSVLTLQYFQVTRGCAKVAAIETTTFEERVLLLTVPKWRGMPCHTRPHTGKHQLRSEGRNNEQKVWAKGFYCGFGGKGKVEARHTQKTMRVSDIEATITLSPGPGGGALRELSEGALLFRGVKNSNSVCLALVAPSNLVFMGFMWSRIEAAPLPNTRWCLPHGYSGPANSGGCYYITTGMSCWLSDLYPRHDGVHVGLQGKDLEHDIPVDLGSRPTSVDPVSRSAPGPQGPKAPVDSGSRTTPANPGAGPSPVDPSSRPAPVASGFRLIMIDQNTKLIPVPGWPLRLRLKIYLSSRSASLDSGSRFAPVDTNFIPVPTDRGHSHAPEDPVDRLTSVDPTKEKNWMENEFDKLTEVGFRRSVITNFSELKEHVLTHRKEAKNLEKRGVECDVETLAPKARTWRSKAKAKKGVMKYEKMFPVALQGQDNEGDPIQENVDSESWKKCKFAIASEVRPNKQEPGEGFRVYAENISELIIQYTDPPWQYIPFLWLKFEAVSKPVNIIEGCSVSVERSVWMLGERVDVVVGGRVYCGGDDIVVLYGCEFGSMCVVYGGGRETSYNTDMKGKLGRGWGESQKGKENTNGRCETWGAYASELEAALEYKGLVCSCLILFWQQLREVEGASPPVYTGKHEGLKRRRYLPVIQQGSKFITNFTVQNKHHHKRQEEEDDKDEGGVDLLVHRAGPLF

SEQ ID NO: 31158 - protein, 253 aa, Homo sapiens
MRKMQKRKPLIKPSDFRRRIYYHKSSMGETTPIIHIISHWVAPITHGNYGSTIQDKIWIKACQMEKEKLEKQLKQMYCPPCNCGLVFHLQDPWVPTGPGAVQKQREHPCCDYRYEPPCLTCVGYFYGQLMLHPAGPSEEPYVMNVRIVPLEDPRGKHFQQPHPSFVKYALSVLTLQYFQVTRGCESMELDKKIQDLIERNASPHPKRFTPEAMPTHRNLCSLKPLPVTKEILQQKNLLALSTLKCPGSCDYKK

SEQ ID NO: 31159 - protein, 116 aa, Homo sapiens
MSTHDMVSAEQSKRIDLEKDGLLNVDSSMLLAWKLINRSPQMKASQNTIIRCHNAITEQNDSKIEAPANGMIKVAISADVKEVLLTDGNEKAIRSILIQIENGFVVLIPFSWLSNN

SEQ ID NO: 31160 - protein, 44 aa, Homo sapiens
  DOMAIN (32)..(43): ADRENODOXIN SIGNATURE domain identified by eMATRIX, accession number PR00355A, p-value=7.923e-14, raw score of 7.47
  misc_feature (1)...(44): Xaa = X or * as defined in Table 2
XRSGQRIPVSGRVGDNVLHLAQRHGVDLEGACEASLACSTCHVY

SEQ ID NO: 31161 - protein, 531 aa, Homo sapiens
  DOMAIN (107)..(161): ADHESION GLYCOPROTEIN PRECURSOR I domain identified by eMATRIX, accession number PD02929A, p-value=3.908e-21, raw score of 28.27
  DOMAIN (41)..(458): Immunoglobulin domain identified by PFam, accession name ig, E-value=4.7e-06, PFam score of 24.6
MAPSSPRPALPALLVLLGALLPGPGNAQTSVSPSKVILPRGGSVLVTCSTSCDQPKLLGIETPLPKKELLLPGNNRKVYELSNVQEDSQPMCYSNCPDGQSTAKTFLTVYWTPERVELAPLPSWQPVGKNLTLRCQVGGAPRANLTVVLLRGEKELKREPAVGEPAEVTTTVLVRRDHHGANFSCRTELDLRPQGLELFENTSAPYQLQTFVLPATPPQLVSPRVLEVDTQGTVVCSLDGLFPVSEAQVHLALGDQRLNPTVTYGNDSFSAKASVSVTAEDEGTQRLTCAVILGNQSQETLQTVTIYSFPAPNVILTKPEVSEGTEVTVKCEAHPRAKVTLNGVPAQPLGPRAQLLLKATPEDNGRSFSCSATLEVAGQLIHKNQTRELRVLYGPRLDERDCPGNWTWPENSQQTPMCQAWGNPLPELKCLKDGTFPLPIGESVTVTRDLEGTYLCRARSTQGEVTREVTVNVLSPRYEIVIITVVAAAVIMGTAGLSTYLYNRQRKIKKYRLQQAQKGTPMKPNTQATPP

SEQ ID NO: 31162 - protein, 300 aa, Homo sapiens
MPTVKQSGVKKCGTQELQPQPRYGPSSPRPALPALLVLLGVCSQEELPGKCRDGSQLSHHRPSAGGRGPGYREASQMLILAGIRNCGSLISSMGSGPTFSSVTGKAPETAEPLPGHRESGPGFEGVTLKFQIKPDSSCRSSPRTGPPRALGQVKNIVPDSATHWIRWPERSTNTTFTLGTVEVRMPNWMMGSGPGRGEPGKHGSVSGCAEPRPPASDGLTLPAPGAPGRPFLCQNGHHGTIRVVAQACWTLLVCCLLTPDPTGRPETHFAHLLPSPEPSPEGSYWASTPRASAATTRTPT

SEQ ID NO: 31163 - protein, 522 aa, Homo sapiens
  DOMAIN (86)..(140): ADHESION GLYCOPROTEIN PRECURSOR I domain identified by eMATRIX, accession number PD02929A, p-value=1.000e-40, raw score of 28.27
  DOMAIN (107)..(439): Immunoglobulin domain identified by PFam, accession name ig, E-value=7.9e-08, PFam score of 30.3
  misc_feature (1)...(522): Xaa = X or * as defined in Table 2
XVQGQEFLLRVEPQNPVLSAGGSLFVNCSTDCPSFEKIALETSLSKELVASGMGWAAFNLSNVTGNSRILCSVYCNGSQITGSSNITVYGLPERVELAPLPPWQPVGQNFTLRCQVEGGSPRTSLTVVLLRWEEELSRQPAVEEPAEVTATVLASRDDHGAPFSCRTELDMQPQGLGLFVNTSAPRQLRTFVLPVTPPRLVAPRFLEVETSWPVDCTLDGLFPASEAQVYLALGDQMLNATVMNHGDTLTATATATARADQEGAREIVCNVTLGGERREARENLTVFSFLGPIVNLSEPTAHEGSTVTVSCMAGARVQVTLDGVPAAAPGQPAQLQLNATESDDGRSFFCSATLEVDGEFLHRNSSVQLRVLYGPKIDRATCPQHLKWKDKTRHVLQCQARGNPYPELRCLKEGSSREVPVGIPFFVNVTHNGTYQCQASSSRGKYTLVVVMDIEAGSSHFVPVFVAVLLTLGVVTIVLALMYVFREHQRSGSYHVREESTYLPLTSMQPTEAMGEEPSRAE

SEQ ID NO: 31164 - protein, 38 aa, Homo sapiens
MSVIQLLCLLSSSKYSLCISTFSKTFKLPNEIQMFFHG

SEQ ID NO: 31165 - protein, 171 aa, Homo sapiens
MLASAISNLYFRQKYLYAFSIVPMKLMDAAELVKQPPDVTENPYRKSGQEASIGKQILAPVCYLALAKGGLSDDHVLILPIGHYQSVVELSAEVVEEVEKYKATLRRFFKSRGKCCSTTDDIKDAFITQAQEQQIELLEIPEHSDIKQIAQPGAAYFYVELDTGEKLFHRI

SEQ ID NO: 31166 - protein, 57 aa, Homo sapiens
  misc_feature (1)...(57): Xaa = X or * as defined in Table 2
MTXXXXXXXXLXXXXXXXXXXXXXXXXXXXXXXXXXXXXXXXXXFLSSYVNKKNKTK

SEQ ID NO: 31167 - protein, 69 aa, Homo sapiens
MFYKYFLQVCGLSSPSLDLWGIYIFLITTTLFMSVNSSLQVSLAAYLEPFEPCQIPTVSSFLDNSLYSV

SEQ ID NO: 31168 - protein, 163 aa, Homo sapiens
  DOMAIN (63)..(79): Glycoprotein hormones alpha chain proteins domain identified by eMATRIX, accession number BL00779B, p-value=7.835e-09, raw score of 6.45
MLMKIRMVQVMISSTSAEGFMVGANIIAITFNGKNCNYVCSNLITDVEVHTNCVCKAVLIQSSRALPTPSSFRATLTVSERRCCLHLRPPPLSFRGKARNKSLAHLVPFGGLLLRPPELTRSPDPPPHPHPSTPPAFPRLLQAIWAYTCKSQGMRWLGLGSEA

SEQ ID NO: 31169 - protein, 171 aa, Homo sapiens
MVWRDNGRCFSGLLQAGFGVAWEPRVEEIKLKEDSVNEHSGNRRNVQIMSGYFQSPVHGFQRAMPVLSVGSELTIGEWGDITFITEGRPAAHVGLEPPAASTVLGSLREPWCGGGDTDPEDKQLGLNASSATLSDVALGKLLKRLCLYFLIYEMGMKIALTLEGCVEEQVT

SEQ ID NO: 31170 - protein, 207 aa, Homo sapiens
MSWKPFLEVLREVSQGQPRAYADEENEVRIRVQIHRLKTDTARSPRKPTRPSQMLWVTLTVEGSHATPNPTRSSPEKHRPLFLHTTPENFYRPNALPLFHFIFLINIRRQERQASEPKLSHHIPCDLHKWYCPDPKTDMPAQGMPSLTLNSIDSQSLPQAGNSVEEQLVSSLKTHGDTRNGRLQCPLESEKGSTPFLMSAGSPAGPS

SEQ ID NO: 31171 - protein, 133 aa, Homo sapiens
MAGAPPPASLPPCSLISDCCASNQRDFVGVGPSEPARLHPGEINSRVPHTKPVWWSLHTDAYEIWYHDSDWGDLPWEINPLSSCSLLHEKDPPTTSGPQTNQPKKHLTNFKSRKVERTKGSFKNTPHQAQPPA

SEQ ID NO: 31172 - protein, 14 aa, Homo sapiens
MFLGLVGLRTRGRK

SEQ ID NO: 31173 - protein, 52 aa, Homo sapiens
MSQEKEFHKVMSPVKAGTGHFHFFCDSLLASGHLDVYMQAWAQRSDIPVFLY

SEQ ID NO: 31174 - protein, 352 aa, Homo sapiens
  DOMAIN (306)..(317): GUANYLIN PRECURSOR SIGNATURE domain identified by eMATRIX, accession number PR00774C, p-value=5.418e-09, raw score of 11.76
  DOMAIN (288)..(305): Zinc finger, CCHC class domain identified by PFam, accession name zf-CCHC, E-value=0.00037, PFam score of 27.3
MWKGPKGLDMYGKSSVSPKTSDILGRDTLLLALKVQTVVLQTACGEGHVAGNCGRPLETEGSLQLTATKKLRDSVLQPKSPEFCQQFTRAWNRTQVPDETEAPAGTYAAQSGDLPWEINPLSSCSLLHEKDPPTASGPQTDQPKEHLTNFKSGFRGVRPRRDACLGPSPLAASPAFLGKGQVPQPLLSVSLPLLRLSGGQETPNPFSFTLSGKSAFLEEQVPQPRISVPQSLISTPRPLISVAQSLISAPQPLISLCPNPLFPCPDLLSLHPNPLFPRPNPFPAFLEGACYKCQKSGHQAKECLQPGIPPKLRPICAGPHWKSDCPTHLAATPRAPGTLAQGSLTASQIFLA

SEQ ID NO: 31175 - protein, 8 aa, Homo sapiens
MRMKFGLD

SEQ ID NO: 31176 - protein, 42 aa, Homo sapiens
MRGSERQASGLYYSIACLCWCVAIRPGGTTINKSSVIGVRNR

SEQ ID NO: 31177 - protein, 118 aa, Homo sapiens; identical to SEQ ID NO: 30811
  DOMAIN (48)..(65): Zinc finger, CCHC class domain identified by PFam, accession name zf-CCHC, E-value=7e-05, PFam score of 29.7

SEQ ID NO: 31178 - protein, 302 aa, Homo sapiens
  DOMAIN (238)..(255): Zinc finger, CCHC class domain identified by PFam, accession name zf-CCHC, E-value=0.0001, PFam score of 29.1
MASSAQLLGSSQETYNHSKRQRGGEMSHMAGARRKRERGEMLHTFKQPDLMRWSSVCRKNKEKVGNSRKRRNVRYCFSRKFNGTSKVFESWQVVVVGEINSHVAHTKPVRWSLHTDAHEIWCRDSDRRTSLGRSIPCPPVLCSMRKIHLQAQVLRPTSPRNISPILNRRKRRHVLSVDPKLRHRSWTREGSLPLVFNLCRDASLIIHPGFRGVRPRRDTCLGPSPLAASPTFLGEGARACYKCQKSGHQAKECLQPRIPPKLCPICAGPRWKSDCPTHLAATPKAPGTLAQGSLTPSQIFLA

SEQ ID NO: 31179 - protein, 16 aa, Homo sapiens
  misc_feature (1)...(16): Xaa = X or * as defined in Table 2
MSQVEGSSRDDVISEX

SEQ ID NO: 31180 - protein, 237 aa, Homo sapiens
MGKWGECQLDQRDTVMRMRCGIQNNVGGRIEVQAKNNGNCGTQQRASEAIGRCQSSAAKPRRSGKESESFGPEFQGLWEWLPDLLVTGMTCTVFSMVLDSESAVVVQFLAHLVPAVLISSSVHDLALLAAFGLQPARSSISACSWTEHATSGFHVRHWRLDKGNMVVPKNSEMPAIMETQRVLQLLLGESQGQQGRMQAIQRVKNAKSLGGTCRKEEPMIALGQISEAPPMGTVCRM

SEQ ID NO: 31181 - protein, 225 aa, Homo sapiens
  DOMAIN (77)..(92): TYPE I ANTIFREEZE PROTEIN SIGNATURE domain identified by eMATRIX, accession number PR00308A, p-value=7.152e-10, raw score of 5.90
MGAVCEALRQYSPEGDGLTLHCESYPKLGIRDGLGASEAIRQRQSSAAKLRRSGKESESLGPEFQGLWEWLPVRVTLAAAAAAAAAAAAATVVAAAVVAVAAEASWLSAPCLLNFTPLKSGWWPSPWLHGSRAKHMHDQRTNHAWARYRNSIHSFIHLLTLPITYHSMSIDSVPVEKQIGGSIAYGINQTKKKEWAYVRGIEFPVTNLETLPDTVKKPFKGQATC

SEQ ID NO: 31182 - protein, 224 aa, Homo sapiens
MGAVCEALRQYSPGNVLSLMGVRGASEAIGQRQSSAAKPRRSGKESESLGPEFQGLWEWLPDSGAQLASPTGSCMGAAGGAACQSHAVCTHSSALGWSMGLGAVEQGAALMGEARAAQEPMEWVGGSGMTGCRSRAVPHGKAAKAGREIEHSASGLALLGDPVHPLQPLARVLSHSLPRPAGPAGCSECGARQAHAYPELQLARKRGAQPWFLLAPLPPHLPAS

SEQ ID NO: 31183 - protein, 340 aa, Homo sapiens
MLYGLNVTYLALFCIPSYKDAYFTQVNQINVPYSPKLGTLNRLFLFIVAKKDYFSVNWQYNVDLGPSAAIFPIMCKVFEKKAKKIKRNSGKVSGQRKFWGMVWRDNGRCFSGLLRVGLGASWEPRVGEIKLKEDFVAGLLSDYIEVGRPNRRIMSDRREEMTAVTFSDPVGKTSTYPVKVSTQTKRGLPRRLGRISLQPLSREDLGRSQRALGHSSRGSESGCQIKRVSVLYQKRKGTEIKRRERLKGDAKIERRKWLRDSERGQQSFSEYHKRNAQVIKHQVSHTYDPELFWLQVPLALSDCLPTLRPQESQHILHIPPAKSVHWQKCIADNLESKIVS

SEQ ID NO: 31184 - protein, 310 aa, Homo sapiens
MEEKEERKRRRKRKRRREEGRDGERKRMEKQKENQDPKDPPTTSGPQTDQPKKHLTNFKSETKETRFIRGPKTPAPVTDWEGSLPLVFNHSRDTSLIIHPGFRGVRPRRDACLGPSPLAASPTFLGKGPAAPRQTELGPNSSSASAPPPYNPFIASPPHTWSGLQFPSMTSPPPPAQQFTLKKVAGAKGIVKDLINLTFKVYNNRKKLQFLASTVRQTPATSPAHKNFQTPELQQPGVPPEPPPRGACYKFQKSGHRAKECLQPRIPPKPHPICVGPHWKSDCPTHLAATPRAPGTLAQGSLTPSQIFLA

SEQ ID NO: 31185 - protein, 120 aa, Homo sapiens
MGAVCEACSSTAQASEAIRQYQSSAAKLRRSGKESESLGPEFQGLWKWLPGSSEEKDIQLSGGKEQRRVLDFPEDENSCMAEMQQPRAKRVLPGGSQLVKTENPDPKIQPDLSYQQATTK

SEQ ID NO: 31186 - protein, 514 aa, Homo sapiens
  DOMAIN (450)..(467): Zinc finger, CCHC class domain identified by PFam, accession name zf-CCHC, E-value=0.00037, PFam score of 27.3
  misc_feature (1)...(514): Xaa = X or * as defined in Table 2
XVNTLNPSPFHDGTRELGASEAIGQCQSSAAKLRRSGKESESLGPEFQGLWKWLPGSSQCFARESLEEKLSLCFRPSDPGAEPPRTAVRPITERSLLQGDEYCCALGQGVPNPWSTDRYWNWATLQEIGPSSCRKTSSGLPLILRYGHVRDLHGSSSHHRPGGPKRNKWFRELGLGSACCMRPRDLVPCVPAAPAVAERGESTAQAVASEGASPKPWQLPGGVGPVGAQKSRIEVWEPLPIFRRMYGKACMSRQKFAAGAGFSWYVPVAVVGAKVHDVNLHMLSFPSKWKLHTCMKFGAVTQIVTSLGRSSCSLLLEKDPPMVLRPTSPRNISPISNLTKETRFIRGPKTPAPVTDWEGSLPLVFNHCRDASLIIHPGFRGVRPRRDACLSPSPLANLINLTFKVYNNRKKLQFLAFTVRQTSAMSPAHKNFQTPEPQRPGIPPEPPPPGACYKCQKSGHQAKECLQPRIPPKPRPICAGPHWKLDCPTHLASTPRAPGTLAQGSLTASQIFLA

SEQ ID NO: 31187 - protein, 138 aa, Homo sapiens
  DOMAIN (68)..(85): Zinc finger, CCHC class domain identified by PFam, accession name zf-CCHC, E-value=0.00037, PFam score of 27.3
MDTYRGTTDTGAYLKTRMKFGAVTQIGGPPLGDQPLSSCSLLREKDPPTTSGPQTHQPKEHLTNFKSGACYKCQKSGHQAKECLQPRIPPKPRPICAGPHWKSDFSTHLAATSTAPGTLAQGSLIDSFPDLLGLAAED

SEQ ID NO: 31188 - protein, 465 aa, Homo sapiens
  DOMAIN (395)..(412): Zinc finger, CCHC class domain identified by PFam, accession name zf-CCHC, E-value=0.00025, PFam score of 27.8
DTGTSQQLHPLDPWHELLRAQELQGATNHKGYSHAEHEHAGLGVQGGNGALAFSNSGHRHAVPTISSGTGRRRTPSSSAFGLLNLHQWFVSGFQAFSDRLKAALSASLLLRFGDSDWLPSSSACKCLMLGLHFVIVGNICATLKEKYSSMLHLDVTMKKNGEKRTRLQKRKKGMPPHPAYEDLNIAAITLPANVVLHQPSGFRTSGQLDPVWWSLDTDAHEIWCQDPGLGSGDFPWEITPLSSYSLLHEKDPPTTSGPQTDQPKKHLTNFKSKTKETGFIHGPKTPAPVTDWEGSLPLVFNHCRDTSLIIHPCFKGVRPRRDACLGPSPLAASPAFLEKGQDLINLAFKVYNNRKKLQFLASTVRQTAATSPAHKNFQMPEPQRPGVPPEPPPTGACYMCRKSGHWAKECPQPGIPPKPRPICVGPHRKSDCSTYLAATPRAPGTLAQGSLTDSFTDLLGLAAED

SEQ ID NO: 31189 - protein, 136 aa, Homo sapiens; identical to SEQ ID NO: 30815

SEQ ID NO: 31190 - protein, 54 aa, Homo sapiens
  misc_feature (1)...(54): Xaa = X or * as defined in Table 2
XAFILSFTQQVFMELQGTRLWARGFHCESYLKLGIRDGLVGGFRGDRAASAFSR

SEQ ID NO: 31191 - protein, 123 aa, Homo sapiens
MAWRNSVNRQGKQEQGLPRRSGSVSLQLLSREDLGRSQSESLGPEFQGLWKWLPDESSVWPAPGCLLLYCTHVDKEKGRRSLHVEHALLPVKGRDDPSKFRTNSRLFTLPGDRGTTLGSSYSW

SEQ ID NO: 31192 - protein, 94 aa, Homo sapiens
  misc_feature (1)...(94): Xaa = X or * as defined in Table 2
XLVIYSQRFMGIVTTFFAEEGMRHSEKDTHHGGILQYEPARVVGVGAAGYFNAKRKKKVAEIHQALNSDPTDVAALRRMAISEGGLLTDEIRRK

SEQ ID NO: 31193 - protein, 938 aa, Homo sapiens
  misc_feature (1)...(938): Xaa = X or * as defined in Table 2
MQGSITTPGSIALAQAQAQAQVPAKAPLAGQVSTMVTTSTTTTVAKTVTVTRPTGVSFKKDVPPSINTTNIDTLLVATDQTERIVEPPENIQEKIAFIFNNLSQSNMTQKVEELKETVKEEFMPWVSQYLVMKRVSIEPNFHSLYSNFLDTLKNPEFNKMVLNETYRNIKVLLTSDKAAANFSDRSLLKNLGHWLGMITLAKNKPILHTDLDVKSLLLEAYVKGQQELLYVVPFVAKVLESSIRSVVFRPPNPWTMAIMNVLAELHQEHDLKLNLKFEIEVLCKNLALDINELKPGNLLKDKDRLKNLDEQLSAPKKDVKQPEELPPITTTTTSTTPATNTTCTATVPPQPQYSYHDINVYSLAGLAPHITLNPTIPLFQAHPQLKQCVRQAIERAVQELVHPVVDRSIKIAMTTSLRTASPQQREMMDQAAAQLAQDNCELACCFIQKTAVEKAGPEMDKRLATEFELRKHARQEGRRYCDPVVLTYQAERMPEQIRLKVGGVDPKQLAVYEEFARNVPGFLPTNDLSQPTGFLAQPMKQAWATDDVAQIYDKCITELEQHLHAIPPTLAMNPQAQALRSLLEVVVLSRNSRDAIAALGLLQKAVEGLLDATSGADADLLLRYRECHLLVLKALQDGRAYGSPWCNKQITRCLIECRDEYKYNVEAVELLIRNHLVNMQQYDLHLAQSMENGLNYMAVAFAMQLVKILLVDERTSEYDDPPGLREKAEYLLREWVNLYHSAAAGRDSTKAFSAFVGQMHQQGILKTDDLITRFFRLCTEMCVEISYRAQAEQQHNPAANPTMIRAKCYHNLDAFVRLIALLVKHSGEATNTVTKINLLNKVLGIVVGVLLQDHDVRQSEFQQLPYHRIFIMLLLEVNAPEHVLETINFQTLTAFCNTLPHLEALPKLPGFVYAWLELISHPDIYCKNAGHIPPQAEX

SEQ ID NO: 31194 - protein, 110 aa, Homo sapiens
MALSIPLLGMFLSCLSLLAQAWAQQDPFDVNEGRGIPEAFLAFLDPLQLPGDPGYYFFSLIQARELESREAELRRRDTFYKEQLERIERKFRTDSKNLFRGKLDKLLHHP

SEQ ID NO: 31195 - protein, 276 aa, Homo sapiens
MESQGDDFYLAKGLGKKDSIKVSHNTPGRQLLPSAVDSKASVQEIKIPPASPSPILISLAMAGLGDQRGLPVAARQISLAHYLVGKGMQLGGSGIAQCGTALDFSCSEEDFAFLRDVKHLAGKGQNLPQTPKSQASGLKIQAEKQESNLFDSGPCKLPPNNLLGLSFGWLGCYEDSKNFFTFPLEGSALSFQGKRLYVPAHFFPEMGKGRRRTCGKEDNGFPEEIPSQGLTVDLSTAEPHGRLRKRFCGSTRHVAVRVLRSPGKDAASNPFLNITN

SEQ ID NO: 31196 - protein, 837 aa, Homo sapiens
MEPELLVRKVSALQALGRGFLVRRQFQSVRAEYEAIVRKVEGDLGTLQWTEGRIPRPRFLPEKAKSHQTWKAGDRVANPEQGLWNHFPCEESEGEATWEEMVLKKSGESSANQGSLCRDHSSWLQMKQNRKPSQEKTRDTTRMENPDRGFVPGKECSFEQLEHVREMQEKLARLHFSLDVCGEEEDDEEEEDGVTEGLPEEQKKTMADRNLDQLLSNVGSCLGALVPGGMRGGEGEGTKPVQDGRPGWEEGLVQSATILDGHSQKLHLAENAEPEEQSAAWPQTLSRTVPSQDPPVDAKKPILLQGHERSITQIKYNREGDLLFTVAKDPSGPLVIEKVRNYSLPLWSVLSVGSTQEEALSRCPQEQCPWLPTSAKRPNPRKPLLPGDGEGLMPSQRPMDDKKKKRSPKPCLAQPAQAPGTLRRVPVPTSHSGSLALGLPHLPSPKQRAKFKRASPAGELHAPGGGLWGLGAKHGQLAESAGRLPLTVTCKAGTEHHLPGSPGHGELFDSTTLEHQKTFRTERPVNSAALSPNYDHVVLGGGQEAMDVTTTSTRIGKFEARRKALQDAVNALCATSPPGSQRCPPPITRNGKQLALLKTNSAVRTCGFDFGGNIIMFSTDKQMGYQCFVSFFDLRDPSQIDNNEPYMKIPCNDSKITSAVWGPLGECIIAGHESGELNQYSAKAVGEEDEEDEEGESLDSVKALTAKLQLQTRRPSYLEWTAQVQSQAWRRAQAKPGPGGPGDICGFDSMDSALEWLRRELREMQAQDRQLAGQLLRLRAQLHRLKMDQACHLHQELLDEAELELELEPGAGLALAPLLRHLGLTRMNISARRFTLC

SEQ ID NO: 31197 - protein, 50 aa, Homo sapiens [sequence omitted]

SEQ ID NO: 31198 - protein, 1749 aa, Homo sapiens
  DOMAIN (1681)..(1708): PROTEIN PHOSPHATASE PP2A 55KD REGULATORY SUBUNIT SIGNATURE domain identified by eMATRIX, accession number PR00600J, p-value= 5.207e-09, raw score of 12.56
  DOMAIN (925)..(945): IQ calmodulin-binding motif domain identified by PFam, accession name IQ, E-value=0.04, PFam score of 20.5
MRMRGRASRLEGARGVGGCARGGRTWGLRGGGGAGSPATSVSGPEPIPRPACREGAGCAGKWLQGEEASSLTRCGSCAPKACPGTSGSPDPPRPESRWRPPPGPAGPFILRSFVRLLWGFLIQAAKNFEVWKIATVFVSKGSSPDPASLITMKNQDKKNGAAKQSNPKSSPGQPEAGPEGAQERPSQAAPAVEAEGPGSSQAPRKPEGAQARTAQSGALRDVSEELSRQLEDILSTYCVDNNQGGPGEDGAQGEPAEPEDAEKSRTYVARNGEPEPTPVVNGEKEPSKGDPNTEEIRQSDEVGDRDHRRPQEKKKAKGLGEQRAALCEAGKEITLLMQTLNTLSTPEEKLAALCKKYAELLEEHRNSQKQMKLLQKKQSQLVQEKDHLRGEHSKAVLARSKLESLCRELQRHNRSLKLGDPCEVAVDDGSRADFFAQEEGVQRAREEEEKRKEVTSHFQVTLNDIQLQMEQHNERNSKLRQENMELAERLKKLIEQYELREEHIDKVFKHKDLQQQLVDAKLQQAQEMLKEAEERHQREKDFLLKEAVESQRMCELMKQQETHLKQQLALYTEKFEEFQNTLSKSSEVFTTFKQEMEKMTKKIKKLEKETTMYRSRWESSNKALLEMAEEKTVRDKELEGLQVKIQRLEKLCRALQTERNDLNKRSGPLVIEKVRNYSLPLWSVLSVGSTQEEALSRCPQEQCPWLPTSAKRPNPRKPLLPGDGEGLRPSQRPMDDKKKKRSPKPCLAQPAQAPGTLRRVPVPTSHSGSLALGLPHLPSPKQRAKFKRVGKEKCRPVLAGGGSGSAGTPLQHSFLTEVTDVYEMEGGLLNLLNDFHSGRLQAFGKECSFEQLEHVREMQEKLARLHFSLDVCGEEEDDEEEEDGVTEGLPEEQKKTMADRNLDQLLSNARGRAWQLAPMEPELLVRKVSALQACVRGFLVRRQFQSLRAEYEAIVREVEGDLGTLQWTEGRIPRPRFLPEKAKSHQTWKAGDRVANPEQGLWNHFPCEESEGEATWEEMVLKKSGESSANQGSLCRDHSSWLQMKQNRKPSQEKTRDTTRMENPEATDQRLPHSQPQLQELQYHRSHLAMELLWLQQAINSRKEYLLLKQTLRSPEAGPIREEPRVFLEHGEQACERDQSQPSAPLEDQSYRDRTTGELEQEDDSCHRVKSPHRSPGSLATTQKNIAGAKCREPCYSKSGPPSSIPSNSQALGDRLTKGPDDGRQTFGGTCLLQMKILEDQTPRGLKPRNHCPRKSRTQLSALYEDSNIKEMSPRKLDHKEPDCRTVRTQELGLSEDHIIWDGGSPAAKRVVVYRNGDPFFPGSQLVVTQRRFPTMEAFLCEVTSAVQAPLAVRALYTPCHGHPVTNLADLKNRGQYVAAGFERFHKLHVFRNGDLVSPPFSLKLSQAASQDWETVLKLLTEKVKLQSGAVCKLCTLEGLPLSAGKELVTGHYYVAVGEDEFKDLPYLELLVPSPSLPRGCWYAQGHRAQVTQPSPKEPDRIKPSAFYARPQQTIQPRSKLPTLSFPSGVIGVYGAPHRRKETAGALEVADDEDTQTEEPLDQTVQGKGTLMATRKQNSCRGKGRMGKGRVLTHSGEMGSGKELTQVASNTKQNSSKPGPTCRCQGEVIEKGSTLVEEKGHQKPILLQGHERSITQIKYNREGDLLFTVAKDPRTRARVNFVIFLNNSSGDTKHVLTGSADNSCRLWDCETGKQLALLKTNSAVRTCGFDFGGNIIMFSTDKQMGYQCF

SEQ ID NO: 31199 - protein, 176 aa, Homo sapiens
MSSSAEEVPLSYYTNFRLCTLEGLPLSAGKELVTGHYYVAVGEDEFKDLPYLELLVPSPSLPRGCCDFDYFRRWTWTWNKEMQRLRPKPGHTARVCGRAFGIRRSHLACSLACRSACRITWMAVAMAAARSAVSGYAFSLMLTDRVAQESFMRLVEACGDSEQSMDNWLSRLDGCR

SEQ ID NO: 31200 - protein, 100 aa, Homo sapiens
MDRFLVKGAQGGLLRKQEEQEPTGEEPAVLGGDKESTRKRPRREAPRNGGHSAGPSWRHIRAEGLDCSYTVLFGKAEADEIFQELEKEVEYFTGALARVQ

SEQ ID NO: 31201 - protein, 86 aa, Homo sapiens
MAVTTSGSTEMMKENWPLGTPIASVSFGACRDFVFRHKDSRGKSPSRRVAVVRLPLAHGSLLMMNHPTNTHWYHSLPVRKKVLAPR

SEQ ID NO: 31202 - protein, 56 aa, Homo sapiens
  misc_feature (1)...(56): Xaa = X or * as defined in Table 2
XDFVFRHKDSRGKSPSRRVAVVRLPLAHGSLLMMNHPTNTHWYHSLPVRKKVLAPR

SEQ ID NO: 31203 - protein, 185 aa, Homo sapiens
  misc_feature (1)...(185): Xaa = X or * as defined in Table 2
XWTDFLGGKGLQGGLLRKQEEQEPTGEEPAVLGGDKESTRKRPRREAPGNGGHSAGPSWRHIRAEGLDCSYTVLFGKAEADEIFQELEKEVEYFTASLLMRVGLMGTNREDSVEKENTYTHERNRLNVGSGKSAQYPATGAKSMMKPMLDGIQCSKLCFPAAAGIMAAATTINNGVGAGRGGLCL

SEQ ID NO: 31204 - protein, 170 aa, Homo sapiens
MDRFLVKGAQGGLLRKQEEQEPTGEEPAVLGGDKESTRKRPRREAPGNGGHSAGPSWRHIRAEGLDCSYTVLFGKAEADEIFQELEKEVEYFTGALARVQVFGKWHSVPRKQATYGDAGLTYTFSGLTLVPKPWIPSLERIRDHGLWGDWTDLQLCAHQQVPAETLSFRA

SEQ ID NO: 31205 - protein, 108 aa, Homo sapiens
  misc_feature (1)...(108): Xaa = X or * as defined in Table 2
MGSNGGVRASLPLLQLPHLSMGLANLSTQRMGRRTGWGSTWKNQGGQTPQSYSCRTGEGHGPRASWKTXRPWAIVCVLVPRRCQLRLLSCGLQGRREGEASSDVLVRS

SEQ ID NO: 31206 - protein, 120 aa, Homo sapiens
  DOMAIN (1)..(16): WILM'S TUMOUR PROTEIN SIGNATURE domain identified by eMATRIX, accession number PR00049D, p-value=1.153e-09, raw score of 0.00
MARAPAPQVPPPPPPCSASSSAAAATAAGLSAHPQPHFRHGRRSALLPRPPWAVRSRGALAGPRTRAAAGLRGGRSHSVITRILTLIQSRRRTFPWQQRSPMLPNGILTEGTSARSSNKN

SEQ ID NO: 31207 - protein, 111 aa, Homo sapiens
MARASCSSTFFFNPSHSVPTLSLFQNGSSTVGAPTCQWLSNTPCAIFQERKGSGTATPQLAMTVFIEDMICGERHQPLIAENTKKVKRLKWEFRLTYIHIFGLISFLNHQL

SEQ ID NO: 31208 - protein, 391 aa, Homo sapiens
MGDRCCHGNVLRLDCINVNILVMTLWDLCIEGNRSKPSHYFEETLVTQRESWQETSRLPVPAPPLPLPGARRPRVSAALRGLPGSGQPRAAGGGARCDGRGESAVVDARRGRQRWQRQRRRKLSRAAAAVEPAGLGRAPWARLHCTEDPVPEAVGGDMQHLNQLGAQVERFLAQLSEFATTNQISLGSLRSIVKSLLLVPNGSLGDSDVHPCQYSLKLFCGCHQRSSRPPSAHLGISLGSQSHLLRSPPGSSQSQLQRQVPDCSCHMKRAQKAPLRMLDLRTGAHALHPALSSQILEAQSKLWAKGAGRAEACFVSAGSGELGALAGAHGPGPNQPPSVSLKKGLRVPHRAMMLSWWASAWQPAHVEAWRQVVHGFCGHFSGEKRKQGQLC

SEQ ID NO: 31209 - protein, 109 aa, Homo sapiens
MLGAQQFSALTEVLFHFLTEPKEVERFLAQLSEFATTNQISLGSLRSIVKSLLLVPNGALKKSLTAKQVQADFITLGLSEEKATYFSEKWKQNAPTPCSLGHRATTLDD

SEQ ID NO: 31210 - protein, 39 aa, Homo sapiens
MTMHRAVPPTEPTPSFLWEKQERAYPLFILHKQPEAWAS

SEQ ID NO: 31211 - protein, 549 aa, Homo sapiens
  DOMAIN (193)..(239): PROTEIN NUCLEAR RIBONUCLEOPROTEIN domain identified by eMATRIX, accession number PD02784C, p-value=6.894e-09, raw score of 20.76
  DOMAIN (3)..(264): RNA recognition motif. domain identified by PFam, accession name rrm, E-value=0.025, PFam score of 19.4
GLGLCESVVEADLVEALEKFGTICYVMMMPFKRQALVEFENIDSAKECVTFAADEPVYIAGQQAFFNYSTSKRITRPGNTDDPSGGNKVLLLSIQNPLYPITVPTRLNVIRNDNDSWDYTKPYLGRRDRGKGRQRQAILGEHPSSFRHDGYGSHGPLLPLPSRYRMGSRDTPELVAYPLPQASSSYMHGGNPSGSVVMVSGLHQLKMNCSRVFNLFCLYGNIEKVKFMKTIPGTALVEMGDEYAVERAVTHLNNVKLFGKRLNVCVSKQHSVVPSQIFELEDGTSSYKDFAMSKNNRFTSAGQASKNIIQPPSCVLHYYNVPLCVTEETFTKLCNDHEVLTFIKYKVFDAKPSAKTLSGLLEWECKTDAVEALTALNHYQIRVPRRHAFCVGHCTRRLGHLFLGGCGAGPWRGRSTAQAQREICTLKFEMPRANSHGDWCQEITFSKRWKINENFRCRSNLKGKNCGLHSASLPAMRETYLRVLQLPVGCTSKQESPDLASELATEGRDLESAQQSEFCLRAALLKLKGTTLSRTVSLHIRFPLWQLRC

SEQ ID NO: 31212 - protein, 49 aa, Homo sapiens
  misc_feature (1)...(49): Xaa = X or * as defined in Table 2
MGDEYAVERAVTHLNNGQIIGKRTNGWGAKPPLVGPSPKIEPEGRDPAX

SEQ ID NO: 31213 - protein, 686 aa, Homo sapiens
  DOMAIN (330)..(376): PROTEIN NUCLEAR RIBONUCLEOPROTEIN domain identified by eMATRIX, accession number PD02784C, p-value=6.894e-09, raw score of 20.76
  DOMAIN (140)..(401): RNA recognition motif. domain identified by PFam, accession name rrm, E-value=0.025, PFam score of 19.4
MWNSASLLAAQSPRTAGRDVPSQKRRCGGEDWPARSECARPTATPTRLPAGPSGRRHVLLLFLPQGDVRGGPGVREPGQASQDRGGGDRLLGRGRREPPGSDAPGRGDGGGGGASFSQPVTKRGPPVRCAWLLPGKQGLGLCESVVEADLVEALEKFGTICYVMMMPFKRQALVEFENIDSAKECVTFAADEPVYIAGQQAFFNYSTSKRITRPGNTDDPSGGNKVLLLSIQNPLYPITVPTRLNVIRNDNDSWDYTKPYLGRRDRGKGRQRQAILGEHPSSFRHDGYGSHGPLLPLPSRYRMGSRDTPELVAYPLPQASSSYMHGGNPSGSVVMVSGLHQLKMNCSRVFNLFCLYGNIEKVKFMKTIPGTALVEMGDEYAVERAVTHLNNVKLFGKRLNVCVSKQHSVVPSQIFELEDGTSSYKDFAMSKNNRFTSAGQASKNIIQPPSCVLHYYNVPLCVTEETFTKLCNDHEVLTFIKYKVFDAKPSAKTLSGLLEWECKTDAVEALTALNHYQIRVPRRHAFCVGHCTRRLGHLFLGGCGAGPWRGRSTAQAQREICTLKFEMPRANSHGDWCQEITFSKRWKINENFRCRSNLKGKNCGLHSASLPAMRETYLRVLQLPVGCTSKQESPDLASELATEGRDLESAQQSEFCLRAALLKLKGTTLSRTVSLHIRFPLWQLRC

SEQ ID NO: 31214 - protein, 49 aa, Homo sapiens; identical to SEQ ID NO: 31212
  misc_feature (1)...(49): Xaa = X or * as defined in Table 2

SEQ ID NO: 31215 - protein, 93 aa, Homo sapiens
MFGTPSCTPICTDETGIEQLKKGMREDGLKKQNGLNIESRFWPPLLSRLGQPLCHARPREGRPVPVCGLKDPGPAWPLRHKSTPQALPSHPFS

SEQ ID NO: 31216 - protein, 175 aa, Homo sapiens
MVTWLYRFLPTSNMAAKLRSLLPPDLRLQFWLHARLQKCFLSRGCGSYCAGAKASPLPGKMAMGLRVRTPGASAHCYSPGSGSTAGAGTSQWLGKPLTTRLLFPVAPCCCRPHYLFLAASGPRKPQYLCYLFCRSPGSGPSCCCCNSLTHKQVPEGGFLERLQNVVQTAAEQSFR

SEQ ID NO: 31217 - protein, 50 aa, Homo sapiens
MFIQTRWPFYVSSSEKLTTKQRLNLCKNKTVMMLWTPTTTTYGMLPFWNT

SEQ ID NO: 31218 - protein, 113 aa, Homo sapiens
MYRSELLSFIKKLREPLVLTIILSLFVKLHNVREDIVNDITAEHISIWPSSIPNLQSVDFEAVAITVKELVRYTLSINPNNHSWLIIQADIYFATNQYSAALHYYLQAGAVLF

SEQ ID NO: 31219 - protein, 269 aa, Homo sapiens
MVCYDLGAAYFQQGSTNSAVYENAREKFFRTKELIAEIGSLSLHCTIDEKRLAGYCQACDVLVPSSDSTSQQLTPYSQVHICLRSGNYQEVIQIFIEDNLTLSLPVQFRQSVLRELFKKAQQGLQSVDFEAVAITVKELVRYTLSINPNNHSWLIIQADIYFATNQYSAALHYYLQAGAVCSDFFNKAVPPDVYTDQRKSVRVDGSAKPITTAEKGSDWLEHQHCEEQLWQRKCHGPTPSPDSVERPLEFPTRFSSEQLHLQISIESSQ

SEQ ID NO: 31220 - protein, 97 aa, Homo sapiens
ALSILMLPHNIPSSLSLLTSMVDDMWHYAGDQSTDFNWYTRRAMLAAIYNTTELVMMQDSSPDFEDTWRFLENRVNDAMNLRQVPAGQRCDSRARVT

SEQ ID NO: 31221 - protein, 65 aa, Homo sapiens
MASSMARRVYQLICKETHTPAVVWCNSEAVPTTRPWELPGFPLDYFLTVTDTSGPLDNTLVPSMA

SEQ ID NO: 31222 - protein, 168 aa, Homo sapiens
MRFLDHTQPTQSILLDKGLAVCSSTSILPIWILNYINSTRWGSDKLQVRNYNRELSRGFQRGGRGCVPIEERGRGPVATGRVAVGDVPLPKWRRRRYLHPHAPSQHPVQPEPLTSMVDDMWHYAGDQSMILTGTPAEPCWCHLQHNRAGDDAGLLSNFEDTWRFLENR

SEQ ID NO: 31223 - protein, 300 aa, Homo sapiens
MAAAAVSGALGRAGWRLLQLRCLPVARCRQALVPRAFHASAVGLRSSDEQKQHPPNSFSHQHSETQGAEKPDPESSHSPPKYTDQGGEEEEDYESEEQLQHRILTAALEFVPAHGWTAKAIAERAQSLGLSSAGCNTRLTRVLEEEQKLVQLGQAEKRKTDQFLRDAVETRLRMLIPYIEHWPRALSILMLPHNIPSSLSLLTSMVDDMWHYAGDQSTDFNWYTRRAMLAAIYNTTELVMMQDSSPDFEDTWRFLENRVNDAMNMGHTAKQVKSTGEALVQGLMGAAVTLKNLTGLNQRR

SEQ ID NO: 31224 - protein, 87 aa, Homo sapiens
  misc_feature (1)...(87): Xaa = X or * as defined in Table 2
XTKGPEIRTGLIKGVFIRDKLMERRNRRTGRTEKARIWEVTDRTVRTWIGEAVAAAAADGVTFSVPVTPHTFRHSYANAHCCMPVYR

SEQ ID NO: 31225 - protein, 129 aa, Homo sapiens
  DOMAIN (20)..(72): Pyruvate kinase proteins domain identified by eMATRIX, accession number BL00110D, p-value=1.000e-40, raw score of 24.83
  DOMAIN (1)..(129): Pyruvate kinase domain identified by PFam, accession name PK, E-value=3.2e-88, PFam score of 306.5
KGADFLVTEVENGGSLGSKKGVNLPGAAVDLPAVSEKDIQDLKFGVEQDVDMVFASFIRKASDVHEVRKVLGEKGKNIKIISKIENHEGVRRFDEILEASDGIMVARGDLGIEIPAEKVFLAHKMMIGR

SEQ ID NO: 31226 - protein, 198 aa, Homo sapiens
  DOMAIN (94)..(137): Pyruvate kinase proteins domain identified by eMATRIX, accession number BL00110G, p-value=7.750e-38, raw score of 25.72
  DOMAIN (1)..(197): Pyruvate kinase domain identified by PFam, accession name PK, E-value=7.3e-127, PFam score of 434.9
MIKKPRPTRAEGSDVANAVLDGADCIMLSGETAKGDYPLEAVRMQHLIAREAEAAIYHLQLFEELRRLAPITSDPTEATAVGAVEASFKCCSGAIIVLTKSGRSAHQVARYRPRAPIIAVTRNPQTARQAHLYRGIFPVLCKDPVQEAWAEDVDLRVNFAMNVGKARGFFKKGDVVIVLTGWRPGSGFTNTMRVVPVP

SEQ ID NO: 31227 - protein, 763 aa, Homo sapiens
  DOMAIN (506)..(555): Pyruvate kinase proteins domain identified by eMATRIX, accession number BL00110F, p-value=2.831e-29, raw score of 16.62
  DOMAIN (272)..(617): Pyruvate kinase domain identified by PFam, accession name PK, E-value=2.6e-143, PFam score of 489.5
MRKNQMAHEAPSPVPYSPPKTGVAVSLEAAFGPLGHRSCSVCTGTADPAGGQIESDRELQTTYFNMLTIEEDEFSQIYEARVQRGEELALKFKAIQPKVAESDLHPCPSAQSWCFYPVQHSVFPVGCDSPVVEQALSIAVCHIQSDLVAWAFSHPMGSSCSCCQGSRIFSQRQLMSKGAMIRESVLLKIPRFVLTIVGVIPGCISNSVGTEILKVVAQVGQHWRTSEAMLKPHSEARAAFIQTQQLHAAMADTFLEHMCCLDTDSPPITAWSTGIICTMGPASPLLEMLKKTIKSGINVAHLNSHGAHEYHTETIKNVRTATESFASDSILYQPIAVAPDTKGPEIPTGPVKGSGTAEVELKKGATLKFTLDNTYMEKVKQKDAHFLVTEVENGGSLGSKKSVNLPGAAVDLSAMLEKDIQDLKFGGEQDVDMMFSSFICKTSDVHEVRKVLGEKGKNSKITSKIENHDGGWRFDEILEASDGIMVARGDPPQAVEMRFLQGSWEACHLATQMLEDVIKKLHPTWAEGSGVANAVLVEADCIMLSGETAKGNYPLEAVHMQHLIACEAEATIYHLQLFEEFCHLAPITSDPAEATAMGTVEASFKCCSGAIIVLTKSAGVPTRPAMLIELTLGCSVALVGWNTREEDLCLAETWLFLEPAVAGEPGAWLPIMWPHPSKRRRRNAEQRPPECMARGWQLPFFCVLCLVALENGSPEDSQPCPGVRKQPLSCSKHFTLHLPFSPTTAAASEPVAIEPISMSINNS

SEQ ID NO: 31228 - protein, 794 aa, Homo sapiens
MGTYYQKHQTARDLLALGGNPFLSLLGKGWVQLMKTVWSSLPGKERTEIGLGPGIWELGLLSWVELSQASGADQWGLKLEILVRQLQGYPKEKTKLMEAARKQDTPQNKRWITKWKNEAEEIGGGLHSFTSKEDNYTLVVDMNCLDVQGCGDDVNNRLLHSASYPTASWVDEAMPTASGRSQHQAHLTQLRQSCTENTYACSLCLSYKVPYSVSSRHTDTAILPTKKGMQTQPTSAFGVGPQWNAYILSQLPRPSGKSNACPHISQSQTSSSALSTSYNYVFTCVLTALTSYLWTDVYVPPKFTCTAVRIKVTIHDAQSTYQGKVPAGTQASAIVEFGFSLPQIPDCPWSFKKDSLSLGQESGAKQEHQGYGLRMLSAGSNDQAGHWELLSRLQAGLHEGPCLPFQPLPQTLERWLHTGITWGAFKRYGGLGLTPAQDLRKGLPRANPQSLGLTWPPGLQTSQPLRAREEPGERHGPGTPGPGSAVAREDAAPAVARGRGRTGAAASRARNGNWLRLQPQPRPSVGAPKSLPAAGRGRRRAGAVKAGSHGAAIRPGEINSFIAHAKPFGGLFTRTRVTFGAEDPGQEDSFRRPVPCPHPHSVRRSTYDLGSSDQTAQGTSHQFQIGSSRTDAARSPQKPPGPSQMLWVTLTVEAWPFKSYKLSLQFPHFTCPKTGQALQEAGVIHCKGHQKASDPITQGNAYADKGTKKWKKEAEEGEPERWQPEKDLPEKDSADIAGFEDGEMRLSQGMQVASGAAKDKEMDSPTDPPEGMQTCQHYDFSPVRPILECWPPEP

SEQ ID NO: 31229 - protein, 222 aa, Homo sapiens
MLKDHQRIRSAPIDPGFRLAPKDTGSRPTLKDPSSEPNHTHPINRLGTGETCNPELPTGINNNNKNKNKFNLAFSGLCSSKKPNRDLVESPNSCSTAKRCPASEEESREALWSQPLAALCKGANWTENEFDKLTEVGFRKWVITNSSEQKEDVLTQCKEAKNLHKRLQKLLTRITSLEKNINELMMELKNTVRELREGYRSINSRIDEVEERISEIEVSLMK

SEQ ID NO: 31230 - protein, 135 aa, Homo sapiens
MLPTKRLWVRKVWIEQGPKQAKGRLAKHSLPGKNVCEDWLTVRHSCNCCVLSSGKSYEQEKYTLQREVELKSRMLESLSCECEAIKQQQKMHLEKLEEQLSRSHGQEVNELKTKSSRVNHSKQLNVLPCKDAFHT

SEQ ID NO: 31231 - protein, 80 aa, Homo sapiens
MEADIITNLRCRLKEAEEERLKAAEHGLQLVESQNELQNRLDKCRNEMMTMTESYEQEKYTLHREVELMSRMLESLSCRM

SEQ ID NO: 31232 - protein, 166 aa, Homo sapiens
  misc_feature (1)...(166): Xaa = X or * as defined in Table 2
XHKLHRLEMPTATRDTGEAGQCRRTRGASLHVRGLTGQAAPPVHPRSSPPVLYPRHPLPRSREMPGALPTRLYRRKTNLEPHRAHAQKAQSGSRDRGQKVSYELHLPDDLAVLNISSFGRIQVWNFSRHGRFLWPAAAAAPPPLALWLHLLGSGPLDAHPEKTRWT

SEQ ID NO: 31233 - protein, 61 aa, Homo sapiens
  misc_feature (1)...(61): Xaa = X or * as defined in Table 2
MTSKYFPKTSGNEAATCEDTASRVTLARGWLSHELHPPDDLAVLNTSSFGRIHEWNFSRRX

SEQ ID NO: 31234 - protein, 78 aa, Homo sapiens
  misc_feature (1)...(78): Xaa = X or * as defined in Table 2
XHKLHRLEMPTATRDTGEAGQCRRTRGASLHVRGLTGKESTSSPPSLQPSRTLPPASSAPKQGDAGSPPYQARNRRPX

SEQ ID NO: 31235 - protein, 250 aa, Homo sapiens
MAYCCLLVFGDCREDSLAGVESTAKGWHHLEVTSLTCLQRTWGLASGPIGDLPVTLGFQVAEHSQDIQSFDLVIKGTIESRCLLPTTCGRHPRVVTATQRRARSQLHGLMPSGSILKSSWLWIGGFLVSTDLSSGHFQTVQLVAKVTGRCRSFQSWMRIRTEGLRPSCLGAKHLLWGEKGKEGCGGRGGQGRRSRQHRFLGSCEGIMRRAELSSQVEDSTLHAWIRYSLVLDVELLAYCSTTRDVRMPPS

SEQ ID NO: 31236 - protein, 163 aa, Homo sapiens
  DOMAIN (127)..(149): SODIUM/POTASSIUM-TRANSPORTING ATPASE SIGNATURE domain identified by eMATRIX, accession number PR00121D, p-value=7.565e- 12, raw score of 16.72
MVTNNLPDSNGSINSSSQTAPNSLTVLYQPLHAPHFAGGAYGIDALLELKPFIEELLQGKHLTLPFQGIGTFGNQVGFVKLAEGDHVNSLLEIAGLFLVTLSLSWKMFYEAKNIPAQARTTTLNEELGQVKHEFSDKTGTLTQNIMVFNSDWVHEASMLILQE

SEQ ID NO: 31237 - protein, 85 aa, Homo sapiens
MSDWPKQWSVMVPFILPVLVMQLLNEDEVNIGIDALLELKPFIEELLQGKHLTLPFQGIGTFGNQVGFVKLAEGDHVNSLLGDSS

SEQ ID NO: 31238 - protein, 72 aa, Homo sapiens
MGALFRLLLQERGKAAEFYSRGRKQRRPSASCTFGGIWSSGVDMLPNGAVGSLTQLGPSRPVLGIRLFKEGI

SEQ ID NO: 31239 - protein, 779 aa, Homo sapiens
  DOMAIN (29)..(68): PROTEIN ZINC FINGER ZINC-FINGER METAL-BINDING NU domain identified by eMATRIX, accession number PD01066, p-value=5.941e-27, raw score of 19.43
  DOMAIN (271)..(769): Zinc finger, C2H2 type domain identified by PFam, accession name zf-C2H2, E-value=4.1e-146, PFam score of 498.8
MAANGDSPPWSPALAAEGRGSSCEASVSFEDVTVDFSKEEWQHLDPAQRRLYWDVTLENYSHLLSVGYQIPKSEAAFKLEQGEGPWMLEGEAPHQSCSGEAIGKMQQQGIPGGIFFHCERFDQPIGEDSLCSILEELWQDNDQLEQRQENQNNLLSHVKVLIKERGYEHKNIEKIIHVTTKLVPSIKRLHNCDTILKHTLNSHNHNRNSATKNLGKIFGNGNNFPHSPSSTKNENAKTGANSCEHDHYEKHLSHKQAPTHHQKIHPEEKLYVCTECVMGFTQKSHLFEHQRIHAGEKSRECDKSNKVFPQKPQVDVHPSVYTGEKPYLCTQCGKVFTLKSNLITHQKIHTGQKPYKCSECGKAFFQRSDLFRHLRIHTGEKPYECSECGKGFSQNSDLSIHQKTHTGEKHYECNECGKAFTRKSALRMHQRIHTGEKPYVCADCGKAFIQKSHFNTHQRIHTGEKPYECSDCGKSFTKKSQLHVHQRIHTGEKPYICTECGKVFTHRTNLTTHQKTHTGEKPYMCAECGKAFTDQSNLIKHQKTHTGEKPYKCNGCGKAFIWKSRLKIHQKSHIGERHYECKDCGKAFIQKSTLSVHQRIHTGEKPYVCPECGKAFIQKSHFIAHHRIHTGEKPYECSDCGKCFTKKSQLRVHQKIHTGEKPNICAECGKAFTDRSNLITHQKIHTREKPYECGDCGKTFTWKSRLNIHQKSHTGERHYECSKCGKAFIQKATLSMHQIIHTGKKPYACTECQKAFTDRSNLIKHQKMHSGEKRYKASD

SEQ ID NO: 31240 - protein, 148 aa, Homo sapiens
  DOMAIN (82)..(115): ESICULAR LUMEN DOMAIN domain identified by eMATRIX, accession number DM01292C, p-value=4.672e-09, raw score of 12.45
  DOMAIN (1)..(31): Adenylate and Guanylate cyclase catalyt domain identified by PFam, accession name guanylate_cyc, E-value=1.3e-06, PFam score of 29.1
MFASIPDFKEFYTESDVNNEGLECLRLLNEISLTLMIQAPCMKSNNALIVILGTVTLDAVGIGLVMPVLPGLLRDIVHSDSIASHYGVLLALYALMQFLCAPVLGALSDRFGRRPVLLASLLGATIDYAIMATTPVLWIYPLVNSPSC

SEQ ID NO: 31241 - protein, 63 aa, Homo sapiens
MCSSSDFTRSVLEDAGDATGSAPLISSCPLLDLKCFLRAGQSPAIHGSTTSSKPTQSSACPVS

SEQ ID NO: 31242 - protein, 698 aa, Homo sapiens
  DOMAIN (541)..(561): FLAVOPROTEIN PYRIDINE NUCLEOTIDE CYTOCHROME REDUCTASE SIGNATURE domain identified by eMATRIX, accession number PR00371D, p-value=2.946e-16, raw score of 14.55
  DOMAIN (266)..(492): FAD binding domain identified by PFam, accession name FAD_binding, E-value=1.5e-49, PFam score of 178.1
MRRFLLLYATQQGQAKAIAEEMCEQAVVHGFSADLHCISESDKYDLKTETAPLVVVVSTTGTGDPPDTARKFVKEIQNQTLPVDFFAHLRYGLLGLGDSEYTYFCNGGKIIDKRLQELGARHFYDTGHADDCVGLELVVEPWIAGLWPALRKHFRSSRGQEEISGALPVASPASLRTDLVKSELLHIESQVELLRFDDSGRKDSEVLKQNAVNSNQSNVVIEDFESSLTRSVPPLSQASLNIPGLPPEYLQVHLQESLGQEESQVSVTSADPVFQVPISKAVQLTTNDAIKTTLLVELDISNTDFSYQPGDAFSVICPNSDSEVQSLLQRLQLEDKREHCVLLKIKADTKKKGATLPQHIPAGCSLQFIFTWCLEIRAIPKKAFLRALVDYTSDSAEKRRLQELCSKQGAADYSRFVRDACACLLDLLLAFPSCQPPLSLLLEHLPKLQPRPYSCASSSLFHPGKLHFVFNIVEFLSTATTEVLRKGVCTGWLALLVASVLQPNIHASHEDSGKALAPKISISPRTTNSFHLPDDPSIPIIMVGPGTGIAPFIGFLQHREKLQEQHPDGNFGAMWLFFGCRHKDRDYLFRKELRHFLKHGILTHLKVSFSRDAPVGEEEAPAKYVQDNIQLHGQQVARILLQENGHIYVCGDAKNMAKDVHDALVQIISKEVGVEKLEAMKTLATLKEEKRYLQDIWS

SEQ ID NO: 31243 - protein, 540 aa, Homo sapiens
  DOMAIN (1)..(216): Adenylate and Guanylate cyclase catalyt domain identified by PFam, accession name guanylate_cyc, E-value=0.0066, PFam score of 15.3
MPRLLNEIIADFDDVVSTPALKHACAFVQTTWVLSTSSPATTLVAAFLYLAVTLNGAYVYSLHLSSHPSLLITESWAFSSLSVKESDPGARAEYMHIGTMVEFAFALVGSWMPSTSTPSTTSNCEGECSLGDAVSHQKSQWCHCKCDCAEDFSWPVWLGKALENSFSDDRLSRKLKGAFGLPRDEPRPADPRIHVHLSRIINVKGKGDLKTYFVNKKCQGPFPRATWHPEESLHFGKKTVFSGRATSSPASFIMVLKVGQSKIKALADLVLAVQPRPSEPTLVVKPCPQGPCPKEAYSLEKTQKDAKKPNDLPRLQGSASNRNMMRATCVVSYLTPNAGREHDSGRRNVLAQVPFGAFYWSWVPSRALRQCALAQGWWKSRWQVRARLARRGRFPGLGKPHSGRGELGNMPGWGGALRGPGTFRAPTRRDAAVSSAAAVSSAHRLRAASGAAGPGPPLRVVGRWCRIVGSSRDEGLIDPGKPSGLCFMGSDRNFSCTGTAKAIAEEICEQAVVHGFLQIFTVLVNPIRLEPYSGFYRFVL

SEQ ID NO: 31244 - protein, 30 aa, Homo sapiens
MCWVSLLKTADTWLVNFYSFCYSVSFKWHI

SEQ ID NO: 31245 - protein, 246 aa, Homo sapiens
MAEWITIHQPSIHCLQETHQTHKDSHKLKEVVAKSVQPFDLGGLRRDLVQISATLAPAMAKRVPDICQATAPEDASCKPQWLPRGVMPAGAQRAIAEDWGPPPRLQRMYENAWMSKQKSAAGEHKRSPEKGFKIPYPATVNERQFLDADFPPGPHHSLVSILVFTKALTPSSGKTELCSIRSKLFDGGTVFFNQLDSEFILRNEYRSGGLPAETLGARAEEGDARAHTHQSMAGTEGCRPNSGALL

SEQ ID NO: 31246 - protein, 30 aa, Homo sapiens; identical to SEQ ID NO: 31244

SEQ ID NO: 31247 - protein, 426 aa, Homo sapiens
MAAFANHCPSRCTVLLTEPPDFGYPTGGVESGPQQNLLGASHKSSQNEGVQSHCSGGTLLALGADLSFCILQALPGARTKPRERWTGVGSHCEGTHFYHLIKSLSEKRALFLLELSLRELTRKLTELHRVAPGGPKGAVLAWYKDPRQKSSNVLNSPPVRGTQNMQLHFNEQLLSFFGCYGSALPRMQPLGSLNPAGRLAQKCQIASSKALEVIHPQAQFFFICEPGKFKKQVIYSQNTKVRSAWDNSEPGKFEKQVIYSQNTKTCLRIRARYPPVIKKTMVGIGRKVMFNKYLLNDLNGRFLLQRTHVLLNWTPGKAKEKGKTLLIAEWIRIHQSSICCLQETHLTHKDSHKLKHCVCCIPEGLIDCVTIIVQFNEFVNFHLDFIADSTVIQKQATSAPPSEQMLLKRQDGHFVLKVFLSIRQAL

SEQ ID NO: 31248 - protein, 588 aa, Homo sapiens
  DOMAIN (216)..(247): Orn/Lys/Arg decarboxylases family 1 pyridoxal-P attachment si domain identified by eMATRIX, accession number BL00703I, p-value= 3.000e-30, raw score of 14.40
  DOMAIN (201)..(287): Orn/Lys/Arg decarboxylase domain identified by PFam, accession name OKR_DC_1, E-value=9.3e-42, PFam score of 151.8
  misc_feature (1)...(588): Xaa = X or * as defined in Table 2
XLKKPAVSRKLQSSSVKLKKKRVVNSKKKHVALLKKHVVWRKKTNGLITRNRLKIPAIITSLLLNMLARQKTKAIVKSKAAVAVVVTRKQRVRRKATNTLNQKLIVKKHAQQYVAVKAENQGFQKPAQAVNRDVVIGETITVGELANKMAVKGSQVIKAMMKLGAMATINQVIDQETAQLVAEEMGHKLSCVVKTSWKRRMNPQEANYAYLRGEVELVRLPDAEGRIAAEGALPYPPGVLCVVPGEIWGGAVLRYFSALEEGINLLPGFAPELQGVYIEEHDGLNHTDDGQHDGLRYHHAADKACRSRDNLNYLLAGDSRRLNGTGMGIRKCGMFSRKSGGMGGYAEYAFGKSGNFMANYTYGVSLLIANVAIAISAVGYGTELLGASLSPVQIGLATIGVLWICTVANFGGARITGQISSITVWGVIIPVVGLCIIGWFWFSPTLYVDSWNPHHAPFFSAVGSSIAMTLWAFLGLESACANTDVVENPERNVPIAVLGGTLGAAVIYIVSTNVIAGIVPNMELANSTAPFGLAFAQMFTPEVGKVIMALMVMSCCGSLLGWQFTIAQVFKSSSDEGYFPKIFSRVTK

SEQ ID NO: 31249 - protein, 414 aa, Homo sapiens
MPLYFLTYSRYPGLMSHLYNGDKNGHLGQGRTLPAATEGSEESCGDAKTKCAAVEEQALNPHTLAVRMTYRKLHTTPQLARTRSGFCSWLSLLKPGIKASPPLLLTQEMCIVTVSLMSRQLNCKEKRPVMQKSNSLASGIRPPSNGSSEKPSSHYPQYWIHLLILEVTEAQHWHARGPQEISVASTREPEEKHLAWRGQLSGCWQPCYEGGQIGKGAVTSEALKDPDGRISDLASELSQAPPSHIPPPPRHAQRSPEASQTDFPLHLQAARNTSWRPNAFWGYPDLSRAGLLRWSAASHRRRQQQPGLRCPLPAHHEHALNSPTVIVSPDHNVQLTASSSFWKLADLQATLGMNTILSRYKRISRAPLQPGRMPFPSINQVRGANGLVGEIEAIITNGTPEVNTTRAASDRQRC

SEQ ID NO: 31250 - protein, 109 aa, Homo sapiens
  misc_feature (1)...(109): Xaa = X or * as defined in Table 2
XPVHAHHICHGRSTFTRKGRIVPLENRDAEYPEWLFEMNLGPPKTLGRKLGPREAREYLAGGLRENKNILAPQPGLSKEQRGCSMGGARHSLTPTPKGLPFFPEDRGLL

SEQ ID NO: 31251 - protein, 84 aa, Homo sapiens
  DOMAIN (17)..(57): DNA polymerase (viral) N-terminal domain proteins domain identified by eMATRIX, accession number PF00242G, p-value=6.198e- 09, raw score of 13.52
EIMNQTDKNQQEIPSYLNDEPPEGSMKDHPQQQPGMLSRVTGGIFSVTKGAVGATIGGVAWIGGKSLEVTKTAVTTVPSMGIGL

SEQ ID NO: 31252 - protein, 364 aa, Homo sapiens
  DOMAIN (43)..(83): Cyclophilin-type peptidyl-prolyl cis-trans isomerase signatur domain identified by eMATRIX, accession number BL00170B, p-value= 3.057e-26, raw score of 20.97
  DOMAIN (1)..(85): Cyclophilin type peptidyl-prolyl cis-tr domain identified by PFam, accession name pro_isomerase, E-value=2.6e-38, PFam score of 135.2
MFFDIAVDGEPLRCVSFEPFADKFPKTAENFHALSIGEKGFGYKGSCFQIIIPGFMCQGGDFTRHNGTGSKSIYREKFDDENFILIKQVLASCPWQRLDPTQTVPSFSSALPRLSGWMASIWSLARKIPLTILCLFDLTQTSPSMNCLFPGEFLKNTQRHLFNIVAVLGVKTVGGTNKLTESLKGKGSSYPPDRGGNKSEAAAVRKPAVEEVQAGLRAPWSCQGLGTGSSAGSGCGRSPEVHAGAGSMSGLGSQAPCMKSNNALIVILGTVTLDAVGIGLVMPVLPGLLRDIVHSDSIASHYGVLLALYALMQFLCAPVLGALSDRFGRRPVLLASLLGATIDYAIMATTPVLWIYPLVNSPSC

SEQ ID NO: 31253 - protein, 197 aa, Homo sapiens
MFPVAPKPQDSSQPSDRLMTEKQLEQSRAANQEQRANDLEQIMESVKSKIGELEDESLNRACHQQNKIKDLQKEQKTLQTHQNRDSTAPASPHSWSPTDILPPPPRGLQHCNASWTQCYGQFLSTLAHKDRPNPPITAIANTHPCMPPRSLETGLTSPLAPPLALMHTTQGPEGQPVDITATANTTSATQGPEDLPA

SEQ ID NO: 31254 - protein, 225 aa, Homo sapiens
  DOMAIN (73)..(108): Matrix protein (MA) p15. domain identified by eMATRIX, accession number PF01140D, p-value=6.063e-10, raw score of 15.54
MPLQLAWATEQDSVERKKDKRKKEREREHTHEREKAAQATSTSSREQETKNASTQPQGSKAQPSKHRRSKERRTHRPGPAPKGEERRERKGKERKGKERKGEEMRKLLGTRAKLLWKLYYCVSCATHNKVVRIDLMKEKDRTPPPQFRLRVLPHDPHQSPSGNKYDIQTNYHKFKTVSHLATGRTIWPTIVKLLPSAQPYGRPVAERVRLKIQTINEMKGVSSKR

SEQ ID NO: 31255 - protein, 74 aa, Homo sapiens
  DOMAIN (1)..(44): Ribosomal protein S26e proteins domain identified by eMATRIX, accession number BL00733A, p-value=1.000e-40, raw score of 11.62
  DOMAIN (1)..(74): Ribosomal protein S26e domain identified by PFam, accession name Ribosomal_S26e, E-value=1.3e-33, PFam score of 125.1
MTKKRRNNGRAKKGRGHVQPIRCTNCARCVPKDKAIKKFVIRNIVEAAAVRDISEASVFDAYVLPKLYVKLHYC

SEQ ID NO: 31256 - protein, 95 aa, Homo sapiens
  misc_feature (1)...(95): Xaa = X or * as defined in Table 2
XWSRPPKCRFFVKNTLRGKPPSPLEVEPPRIPIENVKGPKIPGLRKGIPSLNQPETDPFAGQASLERWDVLWSDLQLFKKESYSSIFVLRLRGWC

SEQ ID NO: 31257 - protein, 130 aa, Homo sapiens
  misc_feature (1)...(130): Xaa = X or * as defined in Table 2
MGCGMDVVLAGTKTTFISLYISVRAPRKSPEKEEGLLSLQSYPGKAGTFGKEEQRKGKGLRFKGLESYMIPGGRNMTSLQSGPRWSCRSGVDFAGCLERKLSVFNNLVLSPPEKSFESSEERSVAIVACX

SEQ ID NO: 31258 - protein, 170 aa, Homo sapiens
  DOMAIN (71)..(122): Ribosomal protein L30 proteins domain identified by eMATRIX, accession number BL00634, p-value=7.796e-20, raw score of 34.38
  DOMAIN (66)..(118): Ribosomal protein L30p/L7e domain identified by PFam, accession name Ribosomal_L30, E-value=1.2e-10, PFam score of 40.0
RKAYQALKATQAKQALLAKKEKKGKGLRFKRLESFLHDSWRQKRDKVRLKRLEVKPHALELPDKHSLAFVVRIERIDGVSLLVQRTIARLRLKKIFSGVFVKVTPQNLKMLRIVEPYVTWGFPNLKSVRELILKRGQAKVKNKTIPLTDNTVIEEHLGKVWRHLLGRPHS

SEQ ID NO: 31259 - protein, 120 aa, Homo sapiens
MYTKIPYSITGETSETSDLYLSGLGSIMTLLIKGSINVPVSPLPEGRRHVNPKEFTLGFYCQNTNSPQSLLPCRCSFFHNFFSYRPAFSPSPQRATNEGRRKPIDGPAFTIPPPCPFPWY

SEQ ID NO: 31260 - protein, 445 aa, Homo sapiens
MYGKLSLRGFVPLGAGAAVNLEKGQWEGESGDCGEQFELLPIHETWKQKTLSPRGLMENGVEERESRAAHMRAVKGQGPEGITEASVMLFFPPPLQSAPQNPMSSDKMPPKSLKAPTSHPAEDNLDLHLLDGIEAVTNTEPSRAAAPNLFDTRNWFRGRQFFHGLGTNLMLNMEDNHNSSLWIITAYICLSYEIMHLEGASPNTRHMRMWIDPRVLSEPSFHEVIYSIESVVFIKLGAAGSCGEGGECTASVQKAENPRTSFHVDRGCLASRNKRFCSMLAGAFETWSTHRVLNKDKGPWLTGTSKREVEDGVYIHTASTRRCGILTVPGVPFQKMSQKQRLGLGKALTMEMQQMKLSRVHERGAQAKAQAILPSQPLEQLGPQMSVRPLSWTFSPAAEYSQQLEEIDGRWQRKEEKRSQSLKNARIKKRKALGRQRKRQREGRS

SEQ ID NO: 31261 - protein, 45 aa, Homo sapiens
MKTNSKFFICSSVSNNCLAEICLINGFNLFLSSVVGFHITLVIRG

SEQ ID NO: 31262 - protein, 84 aa, Homo sapiens
MNSCVFGHMGDMRRNAYLFYPLEGWANHFEAVHPMWRSQGNTRVMGKWANGILQLLPHRISRPASVKMLQVLRDISLTRVLISD

SEQ ID NO: 31263 - protein, 74 aa, Homo sapiens
MLPIQPAERSAASNPEVITHQEGIIPGTAGSASLLGFRSQKPIRQLNSNNDPPLNTLREEHDEEFVQEEARSTC

SEQ ID NO: 31264 - protein, 166 aa, Homo sapiens
  DOMAIN (64)..(107): 'Homeobox' domain proteins domain identified by eMATRIX, accession number BL00027, p-value=8.435e-20, raw score of 26.43
  DOMAIN (50)..(101): Homeobox domain identified by PFam, accession name homeobox, E-value=1.2e-23, PFam score of 92.0
  misc_feature (1)...(166): Xaa = X or * as defined in Table 2
XVPASSSGRRGLETLARFGVRRFPRGTKEEGDREITSSRESPPVRAKKPRKARTAFSDHQLNQLERSFERQKYLSVQDRMDLAAALNLTDTQVKTWYQNRRSAASNPEVITHQEGIIPGTAGSASLLGFRSQKPIRQLNSNNDPPLNTLREEHDEEFVQEEARSTC

SEQ ID NO: 31265 - protein, 57 aa, Homo sapiens
MGGIGKGTQPFRPFPQSRPASLPCGCRRLQCHSPGFRLGRRRDCRPDPNAEALRLLM

SEQ ID NO: 31266 - protein, 63 aa, Homo sapiens
MLPIQPAERTAASNPEVITHQEGIIPGTAGSASLLGFRSQKPIRQLNSNNDPPLNTLREEHDE

SEQ ID NO: 31267 - protein, 360 aa, Homo sapiens
MFLRRLGGWLPRPWGRRKPMRPDPPYPEPRRVDSSSENSGSDWDSAPETMEDVGHPKTKDSGALRVSRAASEPSKEEPQVEQLGSKRMDSLKWDQPISSTQESGRLEAGGASPKLRWDHVDSGGTRRPGVSPEGGLSVPGPGAPLEKPGRREKLLGWLRGEPGAPSRYLGGPEECLQISTNLTLHLLELLASALLALCSRPLRAALDTLGLRGPLGLWLHGLLSFLAALHGLHAVLSLLTAHPLHFACLFGLLQALVLAVSLREPNGDEAATDWESEGLEREGDITALSHIPLVTSHEPLSPCNTRRLAAAIAAFSRLFSNLSRYRWENAPLTDRHEPAKGARRRVSEVRAHAPRPPSRC

SEQ ID NO: 31268 - protein, 283 aa, Homo sapiens
  misc_feature (1)...(283): Xaa = X or * as defined in Table 2
MFLRRLGGWLPRPWGRRKPMRPDPPYPEPRRVDSSSENSGSDWDSAPETMEDVGHPKTKDSGALRVSRAASEPSKEEPQVEQLGSKRMDSLKWDQPISSTQESGRLEAGGASPKLRWDHVDSGGTRRPGVSPEGDSSVPGPGAPLEKPGRREKLLGWLRGEPGAPSRYLGGPEECLQISTNLTLHLLELLASALLALCSRPLRAALDTLGLRGPLGLWLHGLLSFLAALHGLHAVLSLLTAHPLHFACLFGLLQALVLAVSLREPNGDEAATDWESEGLEREX

SEQ ID NO: 31269 - protein, 82 aa, Homo sapiens
MWFKIHQNQVPGCCEYPKETKKLPVQLQTSLHQQRDLLPQTLGFFLLLWPSMVSVILLSQKTAWHKHWLIPWQVCNSRTFSI

SEQ ID NO: 31270 - protein, 50 aa, Homo sapiens [sequence omitted]

SEQ ID NO: 31271 - protein, 80 aa, Homo sapiens
VLLRSSQPLTGPQKRRCYRDQELLRTALAGARPWARGFIMDTLSAQAAKQARESFMRLVEGCGDSEQSMDNWLSRLDGCR

SEQ ID NO: 31272 - protein, 119 aa, Homo sapiens
MAKEPSGVVKEVLTKMSPPSLTPQVEFGASSVCSPNTLSSDTERTSVTDGLFTGFCVSLIGLEHLLPGCTWQGLELEKMTRLPPPRGRPLQESFMRLVEACGDSEQSMDNWLSRLDGCR

SEQ ID NO: 31273 - protein, 17 aa, Homo sapiens
MGPASKGKTKLMNRQEI

SEQ ID NO: 31274 - protein, 195 aa, Homo sapiens
MGALRARVTYLAADQLHPYFPDPVLANSPNQPGVCLLHLWTLTVATVPVQPPKITLQKDSPGFQSIITVKLEHACPSVDRSAGAAAASSKIELSWLLQLLTSSCISQPALPLLSSHHAISPRLLPLTWTGARWDITQSTTLVSQRCLHGSALVPQSPGGSWIPVLCPFSPSQFWIGHQVSLTSDGPLEAPSKAMA

SEQ ID NO: 31275 - protein, 336 aa, Homo sapiens
MLSASGAEIVSNTPCHFQDLIYPAIRERMISDDQIAGQERTTRPGLESLTHMSLAPAAFSKRAGIHSCDFECQYLIVCALGPQSRFPELLYREKSAEALVPMALLARWLKLIDDSKLRKLFQSAILLEVALLALPLCFYLWLSRYMIIAECVYGRRNGKATRALYSCSEAWGVNLGGRVRLCLKTTTATTTIRRQLLVEPVVDTYLFTSPPKSNWLSTLGTITNDQNQANNKNSNKGKRENKEKGNKWEKPRLPAIGLFLGTDDFILMKFYDSVQGLRKSENFSTYKIRVLINVSMYRMECHSVAAEVDIINMADKVNSTKKQCIPTPYTVRKETG

SEQ ID NO: 31276 - protein, 52 aa, Homo sapiens
MHVRLLALCLVVHDSVSRIGGFLDSLTSRMKPRTLAVSVTVLKDGVKLQTFA

SEQ ID NO: 31277 - protein, 252 aa, Homo sapiens
  misc_feature (1)...(252): Xaa = X or * as defined in Table 2
MHVRLLALCLVVHDSVSRIGGFLDSLTSRMKPRTVAVDKKVLQVPTHSEAQPASPLTGTPCGTLRHLAQALWQPRGSWSPDEAQQFQSRFYIFGYLLSNAPVYQYQFTVLVHFHTADKDLPKTGKKKRFNWTYSSTWLGRPQNHNRRQKALVIWRRQEKNEEDAKAETLIKPSDLMRLIHYHKTSMGETASVIHIISHWVPPTTCGNCDSMIQDEIQVIEIMCEKRGIKTQATCFPLKKLLLTKYTVSSDNX

SEQ ID NO: 31278 - protein, 227 aa, Homo sapiens
  DOMAIN (30)..(126): PH domain identified by PFam, accession name PH, E-value=5.4e -05, PFam score of 22.9
  misc_feature (1)...(227): Xaa = X or * as defined in Table 2
MGQWALSLSGIFELSSLAPVKEHKQTFPNILKKGYLEIRKDHDSYWQSCYAELSPYNLYFYSLDSSGNQNLYATYQLSHFQSISVLGNLEARMVDTVLYDNTQLQLKAESPWEALDWGQKLWEVVHAAVPGYMGRQNELTISPGLGHHDDYTQNHSFQKKTSGAAATVPCPGQLQTVPKHPHVRVSLQADCPKQLEGIYICAEQGVPYGFSACQDRRGSAVELQRAX

SEQ ID NO: 31279 - protein, 204 aa, Homo sapiens
  misc_feature (1)...(204): Xaa = X or * as defined in Table 2
XAEVGFCFAAGYEQGLLSGSPRGHWKFPAMWLSPEASHSMAGPNMHSEGKSKCGGVTAKPARSDGEHDPEAEPQGSQHCCFRSSSDVPELLAPHLKMRANIPLSASQCEGALSGSDLCIPAARIKPGTPQTCQMIRTPWTDAHMTSLILGNAHQWLWVEAWESVLIRKSLNLLMIWNPPPLQALQLPVDPPFRTEPMFILHEFD

SEQ ID NO: 31280 - protein, 214 aa, Homo sapiens
MKRHAIVSSEPSHEIQHTTSDHTLGRPASRVRPPLLLVASGAHFGPRMTFNRSPAVEPGVRASSKGVRGAWKWNNLPGSHPPRGPPRRLNRKKTRDPREDSESANAGRQESQRACVQFTLRLPGAPRPPARKCAGAGKMAGGVRPLRGLRALCRVLLFLSQFCILSGGESTEIPSYVMKCPSNGLCSRLPADCIDCTTNFSCTLWEACHFLTVQ

SEQ ID NO: 31281 - protein, 60 aa, Homo sapiens
MKLQGSCIAKAFNAFHVLWWMWGAVDRLLLFLLSKYPGLDIWDRSCPLFKAEAKNHTKVV

SEQ ID NO: 31282 - protein, 58 aa, Homo sapiens
MESMPDSYVMNKGLDEHTDLISDDNASINALEHQIAFGCQQLEAWAEQVEGAANDPEG

SEQ ID NO: 31283 - protein, 106 aa, Homo sapiens
  DOMAIN (54)..(92): Zinc finger, C3HC4 type (RING finger) domain identified by PFam, accession name zf-C3HC4, E-value=2.1e-07, PFam score of 28.3
MLLELARSLFNRMDFEDLGLVVDWDHHLPPPAAKTVVENLPRTVIRGSQAELKCPVCLLEFEEEETAIEMPCHHLFHSSCILPWLSKARKQQQQHRLENLHGAMYT

SEQ ID NO: 31284 - protein, 65 aa, Homo sapiens
  misc_feature (1)...(65): Xaa = X or * as defined in Table 2
MASYFDEHDCEPSDPEQETRTNMLLELASCPLDDDTYEGAQTEIKVRKTAAATPTGGTSMEPCTX

SEQ ID NO: 31285 - protein, 44 aa, Homo sapiens
TNSCPLCRYELPTDDDTYEEHRRDKARKQQQQHRLENLHGAMYT

SEQ ID NO: 31286 - protein, 30 aa, Homo sapiens
MACLFSMNTTASRRTLKQETRTQHAAGARK

SEQ ID NO: 31287 - protein, 106 aa, Homo sapiens; identical to SEQ ID NO: 31283
  DOMAIN (54)..(92): Zinc finger, C3HC4 type (RING finger) domain identified by PFam, accession name zf-C3HC4, E-value=2.1e-07, PFam score of 28.3

SEQ ID NO: 31288 - protein, 65 aa, Homo sapiens; identical to SEQ ID NO: 31284
  misc_feature (1)...(65): Xaa = X or * as defined in Table 2

SEQ ID NO: 31289 - protein, 44 aa, Homo sapiens; identical to SEQ ID NO: 31285

SEQ ID NO: 31290 - protein, 54 aa, Homo sapiens
GPREGSPNRLFACLPVFRSLNLRLCSLNKLSFINGASSIAATREQEICLCLSPG

SEQ ID NO: 31291 - protein, 60 aa, Homo sapiens
  misc_feature (1)...(60): Xaa = X or * as defined in Table 2
MATENQRHSMENNDDPQYLPAAKRLSEARESALSTSGDHKEKVLYNFDLLTREEHLLNIX

SEQ ID NO: 31292 - protein, 172 aa, Homo sapiens
MEQIDIPAGFLLVGAKSPNLPEHILVCAVDKRFLPDDHGKNALLGFSGNCIGCGERGFRYFTEFSNHINLKLTTQPKKQKHLKYYLVRSSQGVLSKGPLICWKECRSRQSSASCHSIKPSSSVSSTVTPENGTTNGYKSGFTQTGMGYFLLAFQASHVYLMRLFKIYTYCWL

SEQ ID NO: 31293 - protein, 162 aa, Homo sapiens
  DOMAIN (93)..(134): OPACITY PROTEIN domain identified by eMATRIX, accession number DM01071C, p-value=7.348e-09, raw score of 5.16
MGRTWTWPAGTATLSQLQATAMGDGEATDAHFRFRPAAERGGLPSSHIWRIRPEDLGTGHRRTSTAAPTSSPMDANIGGSNHFIFMAKRSPEGTHMDVFKVLQAAGVGERLALGGDREAGGISAAQPGYRRWSRARRSGSEGLQPNGARSQTVLVAPELSEA

SEQ ID NO: 31294 - protein, 400 aa, Homo sapiens
METIAFTGPLARGCRPRLQPTCHIEQVLRCCWKAWKSICNCCFFLFFHSSSFSSSSTTGILFVILFVITVECLTLWRPGNPTYLRSCKGQVNRQEVQKESHLPPPERTEQNPYTPRRSQQASGKCQSSPQQTRHMGCSEVHARVLQAGAHTRVRSLFWTGTSALAGYPGVPDGERVESGSPGTVETREMHRYGVLQHPGEHAGSQRGKSSEASRRNGTDLALKEEAGLPVADAGPTRGSSKRKAEIKPLESWHSHGRSEPEENQGSGGAGCALTGATDLGCVPRLPYKGYSVWVPAPLSGLSDWLQLQLLPVTEQQGPVSFPKDFRQSPVLLAILLVSTLGKLGAGDSETTVQTSSPSQAQPTGCDPTETPPQQVIHSVLLASLGFLITCCFRREQSTLE

SEQ ID NO: 31295 - protein, 46 aa, Homo sapiens
MSARATRPRSRRGRHAPPGELDPVAESSEEVEAASGSSKPSFAPPP

SEQ ID NO: 31296 - protein, 190 aa, Homo sapiens
MESQTPPPPRLFAQEAIWKGKAYLPAPLRQFARFGRNFFRYLTCLMGPCRLLDKIAGSLQLAAPAADLCAPQGGLRFSLLSQAKDPLLVFLILSPPSLASDSHGAMAATLACKSWLCASLLNHRVSGVIWQLETGTVALAAAPSSHHCRRSLHPHDTLPLIPQQHGPSPRHTGSGEMAEEGGSSRTLRVK

SEQ ID NO: 31297 - protein, 886 aa, Homo sapiens
  DOMAIN (431)..(448): RNase H domain identified by eMATRIX, accession number PF00075A, p-value=4.429e-09, raw score of 14.44
  DOMAIN (591)..(696): Integrase core domain identified by PFam, accession name rve, E-value=2.7e-19, PFam score of 70.7
MVEEVLLDNILKSVFRLGSILPITFSFPSDSQGPLLQVCRSLLEIHSRPCLPGYHQWRLQNSKDCCLFLPLEASSQRGTCQMPAGALFYKVSVDPFWEVSSSQETWGSGIHLRRQSVPYQSSSAVLGDLLFSSEPACKNKSAEAVPTAAPSPRDALSREEESREAVWPQRLSHAPMGSAQLELPGGFVYTVRRKLPTQASVMLDAPPATKLEHPRSSSDCCVGSKNFKPVDLSLLGSMGVGSVELDHLAPWLQPPFQESERFCLSGVPVSPPLSEEINHALPKATVMASLGAVARKDNADSLHVPPPTPLFASRPVTALKYWQAPREDLQPFTRVTLHWGKGNDQTFWGLVDTSSELTLTPNDPKHHYGPPIKVGAYGGQVINGVFAHIQLRVNPMGHWTRPLVIFPVPERKISIDILSSWQNHIGSLIGRKTDGSWRMTVGYRKLNQVVTPIAAAVPDVVSMLEQINPSPESECLKMSHQITMRPELPIMNWVLSDPSSHELGYAQQHFIIKWKWYICDRAPAGSESTTSPFITQWVHEQSGYGDRDGGYTWAQQHRLPLTKNDLAMATPSAQFPSSETNTEPLTWRHPRGDQPATWWRVDYIAPLPSWKGQRFFFTRIDTYSGYKFIYPAPNASAKNTICGLMECLIHCHGIPHSIASDEGTHFIAKEVQQWAHAYRIHWSYHVPHHPEGWGKVLQKAVHALNQHPIYATASLIARIHGFRNQGVEVLSLTITLSDPLAKFLLPVSVTLCSAGLEVIVPEGGMLPPGDTTMIPLNWKLRLPPIHFGFLLSLSQQAKKGVTILAGAIDPYYQGEVSLLLNNGRKEEYVNGKQQQPNPSRTTNGPDPSGMVWVTPPSKKPRTAEVLAEDKGNTEWVVEESSHQYQL

SEQ ID NO: 31298 - protein, 449 aa, Homo sapiens
  misc_feature (1)...(449): Xaa = X or * as defined in Table 2
MPLNGRMLNYIAKRKEWAGHVMCDCYNCHIRYKEDWIHLALYGTTLVRQTPIGGNAEALKLSIGVVAITGCMYADDGLLMGAGKLYEEWMLYELPFVIAEGRSGIVTRNMRVHAYQVLTCTLKTTRVDGFERRCPWREGAREGSRGCTNGKPERGEDKYSVRNCYASATVTGYAFSSRSRAASTCAFPTRCQPKFSRSIDPTGKAVQTADIRLSARATLWLGGSIEESPVLCSTLRLLLRRLPPPLTWTSPNRPTQPCTAQTQTNQSVGIAAPSAIRVIYPESVVLNAVIYLPGDPEVSGLPRAFKRRFSVEVRLDCGTFKLLLVYCTHPGDKKVNTCKTGISSEVYTLRLRFVLKVAKLTEALRSIFLSELQSGPSAAGLLEFAGGPLQTLFACVSPVEAAEQQRLLPVPSYGSFIPEGHLPDASRRAGRQERLTLLKLCLQPPLPPX

SEQ ID NO: 31299 - protein, 157 aa, Homo sapiens
MSEMHTKAQDLGLILTSAPSGPFFPILFWLQPLVSSQLLPTKKKPSCVWKKSGIKGEESEGKNLESSSYFASILTLDVEDYYQGVTFYFLQGSSQNFDNFFLQSLMLEKVIEHSLKLRGFLYLQDLLIGHTHKSVTCSMPVTQELQESSSYVMRMRQ

SEQ ID NO: 31300 - protein, 60 aa, Homo sapiens
MTRTWKRNRRVGREEMPADPEPINDRTVAGSALLASNLQSRALALFFLLCPCPLVSAANN

SEQ ID NO: 31301 - protein, 120 aa, Homo sapiens
MSHVSRHLQVCPHPTTNSRDDQDLEEKQKEQGTGTLLPVMPVSTVVSCKQACLRAVPTHMSLRAHALWNRASFHPLAKLGLSRMTGASATVLQKQQAQMLQELINVQYPRRGEETRVLDD

SEQ ID NO: 31302 - protein, 66 aa, Homo sapiens
MLVIKKGNTKDLQLSGFPVVGNLPSQPVKNGTGPSVYKGLVPKPAAPPTKPTQWKSQTKENKVGTS

SEQ ID NO: 31303 - protein, 106 aa, Homo sapiens
  misc_feature (1)...(106): Xaa = X or * as defined in Table 2
XSSNQTGHECALIRRVEFLKALKRDRVEEEHEDESRAGSEKDDDSFNLHNSNSTHQERDINRNFDENEIPQENGNASVISQQIIRSSTFPQTDVLSSSLEGRTQVV

SEQ ID NO: 31304 - protein, 506 aa, Homo sapiens
MSKRWALAGLGCLQCARACLGQLSSAVCTSPPNSSDFVLVEEEFYHRKGQKGSCGASRFWIYLTAQVSMLQSESQAMPTTSAISSSPTCFQQHCHRCRSMSFNTVNRLIYLPHYNVRFSEDRFDTWFGVPVGPILMPEGMSQCGLTCNEDLEAGTGRAELSRGSGKWPRAEGVVNGPPELRDEAHHLPGARGHEVLIASQSTLRHSFWHQNWTYRDPAVSGEADVRGAGGSCRQCLPKLRTANHSWYCPGPALSTLTSARAEDAKPVAAGAAGTSPDHSLLLQCLSSFISICCSMIGCSPHVSDSCGRVDSPETTGEADLITGIIAPLCSNTAQYFSQEPKLASKILGFQAHHSRQVLKGNVPRPEQRTFTFKYTLDQREKAPASLHQIDSRLSSCPESKDQRKREASRRDERTADENEPAGNQALRRNGQAAKSRAETAAVAAAAMKSPSYEWQALRTMMEQEVNAEGRQRAPETISKMSGENRQDLDLGMGSRGPYPSSRGTGS

SEQ ID NO: 31305 - protein, 87 aa, Homo sapiens
MLRVPLWVSCPSPQALEVATIWNITNLRDEGKVDSMNQGLALKTFTQKSCMPLPLTSHTVTPKFNEAGMYIPPTGKSTEREKHQPIS

SEQ ID NO: 31306 - protein, 80 aa, Homo sapiens
  misc_feature (1)...(80): Xaa = X or * as defined in Table 2
XCLVDVQQPFFTPVRRPLSKQGRVCPGLLGIPLNAGSTQTLLRRPAAYRVEEPGECTPCGPERLGRTPWESDGKYGPICX

SEQ ID NO: 31307 - protein, 179 aa, Homo sapiens
MTLGFANAKRNVQAPARDPSENSAWAVRNFAEPFSREAPSGAGAVGRWCGSTVAAARRGENWSGCPDAPALVPEILYPPRSPKPLLQIRRGEAGTVLYFRPVASAKPPVLRQISPIHPVSMVVLLRKSTFLSYTVTCVRKLTLTTDLQVRTCYPCFTDKGADSQEDSLMQPGLHRQLRE

SEQ ID NO: 31308 - protein, 49 aa, Homo sapiens
MTVPQRPLLCSHPRTGLILPALGLCADSAAQCHINVGSFLISPPPKPLF

SEQ ID NO: 31309 - protein, 22 aa, Homo sapiens
MLHLYLQRFYVMVSCISLYTTV

SEQ ID NO: 31310 - protein, 47 aa, Homo sapiens
MVDMPAGFLQMYFSCVNFLLCEVFILNMTSKCVWVCAEDNRTAISDD

SEQ ID NO: 31311 - protein, 22 aa, Homo sapiens
MLHLYLQRFYVMVSCISLYTTV

SEQ ID NO: 31312 - protein, 105 aa, Homo sapiens
  misc_feature (1)...(105): Xaa = X or * as defined in Table 2
MARNRTVEVFGDDKLEGRRNEQEDIETDNVKQWSENDRQAKKGEEHTLFQMVDAQPSVTPSPNIERKNLQLCLSRTKQAVFDFRDSLYNVQSPFPWIVKTAAGEX

SEQ ID NO: 31313 - protein, 297 aa, Homo sapiens
  DOMAIN (16)..(35): Eukaryotic  RNA-binding region RNP-1 proteins domain identified by eMATRIX, accession number BL00030A, p-value=1.000e- 12, raw score of 14.39
  DOMAIN (16)..(153): RNA recognition motif. domain identified by PFam, accession name rrm, E-value=5.7e-33, PFam score of 123.0
MSKSESPKEPEQLRKLFIGGLSFETTDESLRSHFEQWGTLTDCVVMRDPNTKRSRGFGFVTYATVEEVDAAMNARPHKVDGRVVEPKRAVSREDSQRPDYFEQYGKIEVIEIMTDRGSGKKRGFAFVTFDDHDSVDKTVIQKYHTVNGHNCEVRKALSKQEMASASSSQRGRSGSGNFGGGRGGGFGGNDNFGRGGNFSGRGGFGGSHGGGGYGGSGDGYNGFGNDGSNFGGGGSYNDFGNYNNQSSNFGPMKGGNFGGRSSGPYGGGGQYFAKPRNQVAMAVPAAAVAMAVAEDFN

SEQ ID NO: 31314 - protein, 320 aa, Homo sapiens [sequence omitted]

SEQ ID NO: 31315 - protein, 60 aa, Homo sapiens
ASLQPLHAFILQPGPCQQDCARQDSLYTPRGQWAPQHGQTANETMFSLHEESSHTQLQSI

SEQ ID NO: 31316 - protein, 248 aa, Homo sapiens
MLRQRLRSPLDTEAESPGKLTTARHRLKGVCEGWGPPLPQAQDSAITNASGPWNTSARLSLPDAQFREAHGKTQSPLEELILHVPAIDAVGRKYTEVHKENLAAGRVWTDAGSNRHFLFLGMVTAIQTHCPQRVLVTAQGSWGWPEIASDTDKQKTRRSCEMEESSEKEAGASWTSKRLCFINGNHRKQTPELEASSEAIKSKPLTLQLEELAPETERGSARKQNQAPPGDEHFKGFTMGDGDHACHN

SEQ ID NO: 31317 - protein, 84 aa, Homo sapiens
  misc_feature (1)...(84): Xaa = X or * as defined in Table 2
XRKKDEGLYECRVTDANYGELQEHKAQAYLKVNANSHARRMQAFEASPMWLQDMKPRKNVSAAIPSSIHGSANQRTHSTSSPQV

SEQ ID NO: 31318 - protein, 324 aa, Homo sapiens
  DOMAIN (29)..(63): Immunoglobulin domain identified by PFam, accession name ig, E-value=0.052, PFam score of 11.5
  misc_feature (1)...(324): Xaa = X or * as defined in Table 2
XAKKPECKWTLVAYTPMASTKSNTICFRFTWVLTVKVQGNDISHKLQISKVRKKDEGLYECRVTDANYGELQEHKAQAYLKVNANSHARRMQAFEASPMWLQDMKPRKNASPAASDGSAKPTNALHLRPSSGSQNPQTKSTIRYGTPFRAFYFTTHKRSTESIWTCDDAKVDETEGSERLFTSGNLSNLCLADGKWIGSPVGLAVIDSECAMVIKLAGVWTELLPGQAHGDNKLLKMTFQEPRSFQASMVPVGYQMQVALGRVWPWEEEDPEGADSWSRMFMNSLQLRNKPFPEEGGRAVGLIKMCVLTIAKMWNQTKSPLINE

SEQ ID NO: 31319 - protein, 46 aa, Homo sapiens
MLRAQLRPELASYGTNACQGGTFPRNKLIHPRGLLVDATDDEEEMV

SEQ ID NO: 31320 - protein, 90 aa, Homo sapiens
MCQVPYAWKSGNAVSSREQQTGKNYVQTAADKLSYLMHEFHKFWIEEDPMDIMEFNRVREKFRKRIIKQLQNPDMALCPHFAAAEGLINM

SEQ ID NO: 31321 - protein, 46 aa, Homo sapiens
MYVQRLKNNLERVHPSNSSSLEISASLRLRLYSTSSDYTTTINLLL

SEQ ID NO: 31322 - protein, 99 aa, Homo sapiens [sequence omitted]

SEQ ID NO: 31323 - protein, 59 aa, Homo sapiens
MEFFSFDYQGLSLQAVLFLVPKNVSKSRIANDICQVECTQSFSYPVQVNQHQARGDALG

SEQ ID NO: 31324 - protein, 81 aa, Homo sapiens
MVTCNNLEWEWKFEMKRGLSETVFYLVTWGLTPCGARALIHSFLEKSEPEPARIGDLTHPVQQRGHLQKYIPKARLGGRVK

SEQ ID NO: 31325 - protein, 52 aa, Homo sapiens
  misc_feature (1)...(52): Xaa = X or * as defined in Table 2
XPGRVWTITRPTKAVGTWTGVLIKYDQTMENNPGFLQLQLGNNKATYTLSQA

SEQ ID NO: 31326 - protein, 53 aa, Homo sapiens
MFLSQMPGAHPQDGKDLSPASHSCPQADCGTRDSFQRQEDRKAVIKVHVSKTA

SEQ ID NO: 31327 - protein, 51 aa, Homo sapiens
MKMTLIFPSAVLYSTFWQLKVLFSGGHPQTSTVKAFSMSAKWCLLLSSSLH

SEQ ID NO: 31328 - protein, 111 aa, Homo sapiens
MELGRAAQPLQGNSVALGGTAWALPSAWKPSVSSSSTFTYTPTSTLFNLCSHFAQQVRLEDGSFSISLPGPFPGTSMPELSSGPTHAPGTGGTVGSGTDHSPIVETAVKKQ

SEQ ID NO: 31329 - protein, 88 aa, Homo sapiens
  misc_feature (1)...(88): Xaa = X or * as defined in Table 2
XEERRVTTRVIRRRLIIKGEEAKNIPGESVTEEQFTDEEGNLITRKITRKVLRRIVIPQERKRDDVQGEGFKVKTKKEIRHVEKKSHS

SEQ ID NO: 31330 - protein, 113 aa, Homo sapiens
MLRQEINLSTQTSYSQGNLPRHLRPRLSLWQTSGHWRQLVRVCILVLPLFTYDHKFLLPVLRNSWKKCQQEVKIHREQDLATMDLIPRRVFTTGFEDRDGVRRRISRRSKIEV

SEQ ID NO: 31331 - protein, 4274 aa, Homo sapiens
  DOMAIN (4105)..(4121): Death domain proteins profile domain identified by eMATRIX, accession number BL50017B, p-value=5.263e-11, raw score of 17.60
  DOMAIN (73)..(794): Ank repeat domain identified by PFam, accession name ank, E- value=4.3e-259, PFam score of 874.1
MAHAASQLKKNRDLEINAEEEPEKKRKHRKRSRDRKKKSDANASYLRAARAGHLEKALDYIKNGVDINICNQNGLNALHLASKEGHVEVVSELLQREANVDAATKKGNTALHIASLAGQAEVVKVLVTNGANVNAQSQNGFTPLYMAAQENHLEVVKFLLDNGASQSLATEDGFTPLAVALQQGHDQVVSLLLENDTKGKVRLPALHIAARKDDTKAAALLLQNDNNADVESKSGFTPLHIAAHYGNINVATLLLNRAAAVDFTARNDITPLHVASKRGNANMVKLLLDRGAKIDAKTRDGLTPLHCGARSGHEQVVEMLLDRAAPILSKTKNGLSPLHMATQGDHLNCVQLLLQHNVPVDDVTNDYLTALHVAAHCGHYKVAKVLLDKKANPNAKALNGFTPLHIACKKNRIKVMELLLKHGASIQAVTESGLTPIHVAAFMGHVNIVSQLMHHGASPNTTNVRGETALHMAARSGQAEVVRYLVQDGAQVEAKAKDDQTPLHISARLGKADIVQQLLQQGASPNAATTSGYTPLHLSAREGHEDVAAFLLDHGASLSITTKKGFTPLHVAAKYGKLEVANLLLQKSASPDAAGKSGLTPLHVAAHYDNQKVALLLLDQGASPHAAAKNGYTPLHIAAKKNQMDIATTLLEYGADANAVTRQGIASVHLAAQEGHVDMVSLLLGRNANVNLSNKSGLTPLHLAAQEDRVNVAEVLVNQGAHVDAQTKMGYTPLHVGCHYGNIKIVNFLLQHSAKVNAKTKNGYTPLHQAAQQGHTHIINVLLQNNASPNELTVNGNTALGIARRLGYISVVDTLKIVTEETMTTTTVTEKHKMNVPETMNEVLDMSDDEVRKANAPEMLSDGEYISDVEEGEDAMTGDTDKYLGPQDLKELGDDSLPAEGYMGFSLGARSASLRSFSSDRSYTLNRSSYARDSMMIEELLVPSKEQHLTFTREFDSDSLRHYSWAADTLDNVNLVSSPIHSGFLVSFMVDARGGSMRGSRHHGMRIIIPPRKCTAPTRITCRLVKRHKLANPPPHGERRGISSRLVEMGPAGAQFLGPVIVEIPHFGSMRGKERELIVLRSENGETWKEHQFDSKNEDLTELLNGMDEELDSPEELGKKRICRIITKDFPQYFAVVSRIKQESNQIGPEGGILSSTTVPLVQASFPEGALTKRIRVGLQAQPVPDEIVKKILGNKATFSPIVTVEPRRRKFHKPITMTIPVPPPSGEGVSNGYKGDTTPNLRLLCSITGGTSPAQWEDITGTTPLTFIKDCVSFTTNVSARFWLADCHQVLETVGLATQLYRELICVPYMAKFVVFAKMNDPVESSLRCFCMTDDKVDKTLEQQENFEEVARSKDIEVLEGKPIYVDCYGNLAPLTKGGQQLVFNFYSFKENRLPFSIKIRDTSQEPCGRLSFLKERKTTKGLPQTAVCNLNITLPAHKKETESDQDDEIEKTDRRQSFASLALRKRYSYLTEPGMIERSTGATRSLPTTYSYKPFFSTRPYQSWTTAPITVPGPAKSGFTSLSSSSSNTPSASPLKSIWSVSTPSPIKSTLGASTTSSVKSISDVASPIRSLRTMSSPIKTVVSQSPYNIQVSSGTLARAPAVTEATPLKGLASNSTFSSRTSPVTTAGSLLERSSITMTPPASPKSNINMYSSSLPFKSIITSAAPLISSPLKSVVSPVKSRVDVISSAKITMASSLSSPVKQMPGHAEVALVNGSISPLKYASSSTLINGCKATATLQEKISSATNSVSSVVSAATDTVEKVFSTTTAMPFSPLRSYVSAAPSAFQSLRTPSASALYTSLGSSISATTSSVTSSIITVPVYSVVNVLPEPALKKLPDSNSFTKSAAALLSPIKTLTTETHPQPHFSRTSSPVKSSLFLAPSALKLSTPSSLSSSQEILKDVAEMKEDLMRMTAILQTDVPEEKPFQPELPKEGRIDDEEPFKIVEKVKEDLVKVSEILKKDVCVDNKGSPKSPKSDKGHSPEDDWIEFSSEEIREARQQAAASQSPSLPERVQVKAKAASEKDYNLTKVIDYLTNDIGSSSLTNLKYKFEDAKKDGEGGQKRVLKPAIALQEHKLKMPPASMRTSTSEKELCKMADSFFGTDTILESPDDFSQHDQDKSPLSDSGFETRSEKTPSAPQSAETTGPKPLFHEVPIPPVITETRTEVVHVIRSYDPSAGDVPQTQPEEPVSPKPSPTFMELEPKPTTSSIKEKVKAFQMKASSEEDDHNRVLSKGMRVKEETHITTTTRMVYHSPPGGEGASERIEETMSVHDIMKAFQSGRDPSKELAGLFEHKSAVSPDVHKSAAETSAQHAEKDNQMKPKLERIIEVHIEKGNQAEPTEVIIRETKKHPEKEMYVYQKDLSRGDINLKDFLPEKHDAFPCSEEQGQQEEEELTAEESLPSYLESSRVNTPVSQEEDSRPSSAQLISDDSYKTLKLLSQHSIEYHDDELSELRGESYRFAEKMLLSEKLDVSHSDTEESVTDHAGPPSSELQGSDKRSREKIATAPKKEILSKIYKDVSENGVGKVSKDEHFDKVTVLHYSGNVSSPKHAMWMRFTEDRLDRGREKLIYEDRVDRTVKEAEEKLTEVSQFFRDKTEKLNDELQSPEKKARPKNGKEYSSQSPTSSSPEKVLLTELLASNDEWVKARQHGPDGQGFPKAEEKAPSLPSSPEKMVLSQQTEDSKSTVEAKGSISQSKAPDGPQSGFQLKQSKLSSIRLKFEQGTHAKSKDMSQEDRKSDGQSRIPVKKIQESKLPVYQVFAREKQQKAIDLPDESVSVQKDFMVLKTKDEHAQSNEIVVNDSGSDNVKKQRTEMSSKAMPDSFSEQQAKDLACHITSDLATRGPWDKKVFRTWESSGATNNKSQKEKLSHVLVHDVRENHIGHPESKSVDQKNEFMSVTERERKLLTNGSLSEIKEMTVKSPSKKVLYREYVVKEGDHPGGLLDQPSRRSESSAVSHIPVRVADERRMLSSNIPDGFCEQSAFPKHELSQKLSQSSMSKETVETQHFNSIEDEKVTYSEISKVSKHQSYVGLCPPLEETETSPTKSPDSLEFSPGKESPSSDVFDHSPIDGLEKLAPLAQTEGGKEIKTLPVYVSFVQVGKQYEKEIQQGGVKKIISQECKTVQETRGTFYTTRQQKQPPSPQGSPEDDTLEQVSFLDSSGKSPLTPETPSSEEVSYEFTSKTPDSLIAYIPGKPSPIPEVSEESEEEEQAKSTSLKQTTVEETAVEREMPNDVSKDSNQRPKNNRVAYIEFPPPPPLDADQIESDKKHHYLPEKEVDMIEVNLQDEHDKYQLAEPVIRVQPPSPVPPGADVSDSSDDESIYQPVPVKKYTFKLKEVDDEQKEKPKASAEKASNQKELESNGSGKDNEFGLGLDSPQNEIAQNGNNDQSITECSIATTAEFSHDTDATEIDSLDGYDLQDEDDGLTESDSKLPIQAMEIKKDIWNTEGILKPADRSFSQSKLEVIEEEGKVGPDEDKPPSKSSSSEKTPDKTDQKSGAQFFTLEGRHPDRSVFPDTYFSYKVDEEFATPFKTVATKGLDFDPWSNNRGDDEVFDSKSREDETKPFGLAVEDRSPATTPDTTPARTPTDESTPTSEPNPFPFHEGKMFEMTRSGAIDMSKRDFVEERLQFFQIGEHTSEGKSGDQGEGDKSMVTATPQPQSGDTTVETNLERNVETPTVEPNPSIPTSGECQEGTSSSGSLEKSAAATNTSKVDPKLRTPIKMGISASTMTMKKEGPGEITDKIEAVMTSCQGLENETITMISNTANSQMGVRPHEKHDFQKDNFNNNNNLDSSTIQTDNIMSNIVLTEHSAPTCTTEKDNPVKVSSGKKTGVLQGHCVRDKQKVLGEQQKTKELIGIRQKSKLPIKATSPKDTFPPNHMSNTKASKMKQVSQSEKTKALTTSSCVDVKSRIPVKNTPRDNIIAVRKACATQKQGQPEKGKAKQLPSKLPVKVRSTCVTTTTTTATTTTTTTTTTTTSCTVKVRKSQLKEVCKHSIEYFKGISGETLKLVDRLSEEEKKMQSELSDEEESTSRNTSLSETSRGGQPSVTTKSARDKKTEAAPLKSKSEKAGSEKRSSRRTGPQSPCERTDIRMAIVADHLGLSWTELARELNFSVDEINQIRVENPNSLISQSFMLLKKWVTRDGKNATTDALTSVLTKINRIDIVTLLEGPIFDYGNISGTRSFADENNVFHDPVDGWQNETSSGNLESCAQARRVTGGLLDPLGCRPDPCRDSIPSFLKGETGKFEANGSHPEITPEAMYKIYFPRIPKVM

SEQ ID NO: 31332 - protein, 109 aa, Homo sapiens [sequence omitted]

SEQ ID NO: 31333 - protein, 121 aa, Homo sapiens
MAAVELEWIPETLYNTAISAVVDNYIRSRRDIRSLPENIQFDVYYKLYQQGRLCQLGSEFCELEVFAKVLRALDKRHLLHHCFQALMDHGVKVASVLAYSFSRRCSYIAESDAAVKEKAIQ

SEQ ID NO: 31334 - protein, 113 aa, Homo sapiens
  misc_feature (1)...(113): Xaa = X or * as defined in Table 2
XCPSAVQKELLLRFQVEAWELAVIVTMGICVRRQAFILQAVDKTALAFVFCLLQSLKVSQKRVTGNFFIPISLLDFSMGWTQTPGSNNWRRGWKEVSGSSAPEGSRDGYVAAA

SEQ ID NO: 31335 - protein, 43 aa, Homo sapiens
MPGVFSRATCDSFEGVRQFTFSARLLFCPGGPLNQTTGNRLSS

SEQ ID NO: 31336 - protein, 106 aa, Homo sapiens
MGFSVMMISFSLPQPTTPIFQALTLYDSLKKPSPELQDGEMDLRVSFISALGALLCGHLAFSLGQIQLSQCICPDVCQEEEERHQGSFHKEGMNNKIVTANTKGRV

SEQ ID NO: 31337 - protein, 50 aa, Homo sapiens
MGVLKWVDGTVSEPRYFQLQTDHTPVHLALLMRSCSCLLSFLRLSTPSWT

SEQ ID NO: 31338 - protein, 80 aa, Homo sapiens
  misc_feature (1)...(80): Xaa = X or * as defined in Table 2
XSAPATSSCTPRVLQLLVKLFETEHSQLDVMEQLELKKTLLDRMVHLLSRGYVLPVVSYIRKCLEKLDTDISLIRYFVTE

SEQ ID NO: 31339 - protein, 116 aa, Homo sapiens
MTMTDTRLPKSTFCLQQLYDTLYLHYHPGHLNVGDGWCHRPVGVGRDFFQTDGHFTRDVRGCPALVCGRSHPVLPHAGAGRHCSSLYLWNSCKLFLPPSWENDQHRRYPSKTGRRA

SEQ ID NO: 31340 - protein, 81 aa, Homo sapiens
  misc_feature (1)...(81): Xaa = X or * as defined in Table 2
XKAHSVKGDDEAAPTYEGPAVADSEGSAGKCESLLEVPSPAELQDRRLLQTPHLPLDQPAYLEPAKPELGAPGLYSIFSIS

SEQ ID NO: 31341 - protein, 781 aa, Homo sapiens
  misc_feature (1)...(781): Xaa = X or * as defined in Table 2
MAGVVVQLRGPRGSCRELWAGQTLYARPALAAHGPSARQWTQSLGPVPSPDPPDPLSVLPAEPRALAQPRILPDRARSSPGKPIGNAWNPMDWLLLFIPWPGKLRHRQTLRVGGQARKAPWEAPGEQLERGRRAAGRSGRLYLSGFPAASGQRGLSMDFGLALLLAGLLGLLLGQSLQVKPLQVEPPEPVVAVALGASRQLTCRLACADRGASVQWRGLDTSLGAVQSDTGRSVLTVRNASLSAAGTRVCVGSCGGRTFQHTVQLLVYAFPDQLTVSPAALVPGDPEVACTAHKVTPVDPNALSFSLLVGGQELEGAQALGPEVQEEEEEPQGDEDVLFRVTERWRLPPLGTPVPPALYCQATMRLPGLELSHRQAIPAHHNKRGTHSLSGQPKEVTLTPLTVEETEALLHSPTSPEPPDTTSPESPDTTSPESPDTTSQEPPDTTSPEPPDKTSPEPAPQQGSTHTPRSPGSTRTRRPEISQAGPTQGEVIPTGSSKPAGDQLPAALWTSSAVLGLLLLALPTYHLWKRCRHLAEDDTHPPASLRLLPQKGYTGQQFCHESIQNKGDRVIYNLTRPPYCSVRFPLAGTGRFPLAGTGPHILYLSRSASSLELLKRGKGRGEQRKEEVACGMLRKWNMAVLPVPLPSAKMAAVEKRRQAVPPPAGFTDSGRQSVSRAAGAAESEEDFLRQVGVTEMLRAALLKVLEARPEEPIAFLAHYFENMGLRSPVNGGAGEPPGQLLLQQQRLGRALWHLRLAHHSQSAGAGARGLLGVVVRDAFLX

SEQ ID NO: 31342 - protein, 213 aa, Homo sapiens
  DOMAIN (57)..(67): C2HC-TYPE ZINC-FINGER SIGNATURE domain identified by eMATRIX, accession number PR00939A, p-value=6.318e-09, raw score of 8.95
  DOMAIN (57)..(74): Zinc finger, CCHC class domain identified by PFam, accession name zf-CCHC, E-value=0.043, PFam score of 17.0
MGPNSTLENLLKGATSVFYNRDQEEAQKKERKLRGRTKALAAALQAGKVQEPQDASISCYQCGRPGYFKEECPGSKTKPPQPCPSSGKNQWRQNCPQIWRSLGSEPVSQMKGYTCQKFCHKSTPNKGGRVIYNLTHPPYCCVRFPLAGMGPHILYLSRLASNLELLKRGTDLEVEHHSKSSPRATLLDKYDNQISDLSLTSLAFQAFVAFLPT

SEQ ID NO: 31343 - protein, 390 aa, Homo sapiens
MVGQQHVSTDESARPFTEQLKVQTRSTGGRAEHKSPLAAKAKGRDPREHVGRAQWQARSNATQRPGDNDHRSKGENSSFSTDLAGRPRAHERTSCLRHCRCPGWSSRELWSCGFGQKQMDVCRVCIVLARAACLHGGAFHLLAKLQQTLASEQAGQERSCGQTAIAKEGSGARRVPQIPTPGAFSTYTQTYAYGSYIPAPPPPFPVPVSPRELPTGIDNVELWSAFGKREEQEGLAVTRWLLSPPQKEYTRQQFCHESTPNKGDRVIYNLTRPPYCCVWFPLAGMGTHILYLSQLASNLELLKRGKGRGEQRKEEVTCGMLRKVCLYQQLENELIQPVADKESLNPPITDQTWICSLGTGKPKIHTKVCGERKQGFYLPAPSKENQAAHT

SEQ ID NO: 31344 - protein, 2234 aa, Homo sapiens
  DOMAIN (843)..(868): Bromodomain proteins domain identified by eMATRIX, accession number BL00633B, p-value=6.657e-15, raw score of 13.82
  DOMAIN (1894)..(2221): Mitochondrial carrier proteins domain identified by PFam, accession name mito_carr, E-value=5.7e-54, PFam score of 187.9
MDEGYLMGNGPPIREVVSEKYSCEENTEENKESRLMVLTLESVEENRALTAAEGMTYSFAGFLRFQANTLYILDWWSQREAGAGAYRLGPASPQGTLLGDKARGPGQGHRGGAFPDADDVAVLTDGKENGCSPSSITSSGLWTTRPRIPGARALARGRLGRPSSQKLPRKTGAGHLAADNGNHRVRELHIGLKEEHVKEDSETEPHQEEEEEEEEEEEEEEEEEEEEEEKKKKKKQFLHWRHTLSSGRHLSTLGPSSQTLAAVDGQSCVTVMAVYHCLVFIVQHDDVELKYSAILSGHIVGSLLTLPGPHSWLFMITQWPKYTQKWKAMSECSSSPCGNAPAALVFLKDKRNFSAAILQILKSIMPRKARQKGYTHQQLCHESTPNKGDRVIYNLTRPPYCCVRFPLAGTGPHILYLSRLASNLELLKRGKGRGEQRKEEVTCGMLRKELEAALHRDDVEFISDLIACLLQGCYQRRDITPQTFHSYLEDIINYRWELEEGKPNPLREASFQDLPLRTRVEILHRLCDYRLDADDVFDLLKGLDADSLRVEPLGEDNSGALYWYFYGTRMYKEDPVQGKSNGELSLSSEKQEENSLASEPQTRHGSQGPGQGTWWLLCQTEEEWRQVTESFRERTSLRERQLYKLLSEDFLPEICNMIAQKGKRPQRTKAELHPRWMSDHLSIKPVKQEETPVLTRIEKQKRKEEEEERQILLAVQKKEQEQMLKEERKRELEEKVKAVEVMKEHAMSVSGVCLAHSAFVFIVDRAKRRKLREERAWLLAQGKELPPELSHLDPNSPMREEKKTKDLFELDDDFTAMYKVLDVVKAHKDSWPFLEPVDESYAPNYYQIIKAPMDISSMEKKLNGGLYCTKEEFVNDMKTMFRNCRKYNGESSEYTKMSDNLERCFHRAMMKHFPGEDGDTDEEFWIREDEKREKRRSRAGRSGGSHVWTRSRDPEGSSRKQQPMENGGKSLPPTRRAPSSGDDQSSSSTQPPRERPAVPGTFGPLRGSDPATLYGSSGVLEPHPGEPVQQRQPFTMQPPVGINSLRGPRLGTPEEKQMCGGLTHLSNMGPHPGSLQLGQISGPSQDGSMYAPAQFQPGFIPPRHGGAPARPPDFPESSEIPPSHMYRSYKYLNRVHSAVWNGNHGATNQGPLGPDEKPHLGPGPSHQPRTLGHVMDSRVMRPPVPPNQWTEQSGFLPHGVPSSGYMRPPCKSAGHRLQPPPVPAPSSLFGAPAQALRGVQGGDSMMDSPEMIAMQQLSSRVCPPGVPYHPHQPAHPRLPGPFPQVAHPMSVTVSAPKPALGNPGRAPENSEAQEPENDQAEPLPGLEEKPPGVGTSEGVYLTQLPHPTPPLQTDCTRQSSPQERETVGPELKSSSSESADNCKAMKGKNPWPSDSSYPGPAAQGCVRDLSTVADRGALSENGVIGEASPCGSEGKGLGSSGSEKLLCPRGRTLQETMPCTGQNAATPPSTDPGLTGGTVSQFPPLYMPGLEYPNSAAHYHISPGLQGVGPVMGGKSPASHPQHFPPRGFQSNHPHSGGFPRYRPPQGMRYSYHPPPQPSYHHYQRTPYYACPQSFSDWQRPLHPQGSPSGPPASQPPPPRSLFSDKNAMASLQGCETLNAALTSPTRMDAVAAKVPNDGQNPGPEEEKLDESMERPESPKEFLDLDNHNAATKRQSSLSASEYLYGTPPPLSSGMGFGSSAFPPHSVMLQTGPPYTPQRPASHFQPRAYSSPVAALPPHHPGATQPNGLSQEGPIYRCQEEGLGHFQAVMMEQIGTRSGIRGPFQEMYRPSGMQMHPVQSQASFPKTPTAATSQEEVPPHKPPTLPLDQLSSDLNYILGSRKGRGSYRKQGRKPQPKEVVTCREDSPNSGYPKEPAALCPGIPSPCRMTHQDLSITAKLINGGVAGLVGVTCVFPIDLAKTRLQNQHGKAMYKGMIDCLMKTARAEGFFGMYRGAAVNLTLVTPEKAIKLAANDFFRRLLMEDGYGQGKSPSHKRAAAPGQACGLRLKEPDACSHRMQRNLKMEMLAGCGAGMCQVVVTCPMEMLKIQLQDAGRLAVHHQGSASAPSTSRSYTTGSASTHRRPSATLIAWELLRTQGLAGLYRGLGATLLRDIPFSIIYFPLFANLNNLGFNELAGKASFAHSFVSGCVAGSIAAVAVTPLDVLKTRIQTLKKGLGEDMYSGITDCARKLWIQEGPSAFMKGAGCRALVIAPLFGIAQGVYFIGIGERILKCFD

SEQ ID NO: 31345 - protein, 171 aa, Homo sapiens
MICGISYQLNNVGLQRVKELGMKVYLNRAVNDWKQGLLSSHWFSLDEGKYLRQYFFNILNNGMDIEMGEISVKAGFERVHLPAVLPQEYTEQRRQGHYNLTRPPYCYVQFPLAGMGPHILYLSRMASSLELFKSSKSRREQRKEEVTCEMLRKLPESILNYSTEHCHPQGA

SEQ ID NO: 31346 - protein, 252 aa, Homo sapiens
  DOMAIN (65)..(96): HMG14 and HMG17 proteins domain identified by eMATRIX, accession number BL00355, p-value=7.000e-21, raw score of 5.97
  DOMAIN (53)..(141): HMG14 and HMG17 domain identified by PFam, accession name HMG14_17, E-value=0.0041, PFam score of 23.8
MIADLSRQKKKISEFKDRSIEITQSEEQKEKYEKYVSAHIPPLMPPCPREGLKGIDTKRDKANVKDKPQRKSTRLSAKPAPLKPGPKPKKALGKERKEGTQSGSKKQPHRSPPANTSLWPAKQLDTCATGLRNSPVVHPSRYIPGPDQQLTPKSRAREVAPWATPSKHIPRSAKQKGYTRQQFCHKSAWNKGDRVIYNLTRPPYCCVWFPSAGTGPHILYLSRLASDLELFKRGKGRGEQRKEEVTCGMLRK

SEQ ID NO: 31347 - protein, 303 aa, Homo sapiens
MLYILPTVRQIPIVASSREMVVLSVPTEVNLITLDVFHIHEFNQVSMKNIWKNQMEGCICTEHVEIFVSFFRVYSSVHSDTRLPMITRYPTRGQTSCSFHRHLLTAQPENNFEILGKRPSNSFILPRSTEPLICTKKASEEAQKRMQKKQEIRVKSHVVSSPPPWGFWALLCEERGAPENAQLCITVERRIAIFRLGGLSRVKRLRRLASSRMSPCPALAHEAKCGFTVASRFGSNRVAVVGPREANTGALKKHQQLLVASVGGEGFQATERAVNAVTRAPLFAYMPNKDTVAYIRILLAMMN

SEQ ID NO: 31348 - protein, 45 aa, Homo sapiens
  misc_feature (1)...(45): Xaa = X or * as defined in Table 2
XREANTGALEKHQQLLVASVGGEGFQATERAVNAVTGAPVFPQPX

SEQ ID NO: 31349 - protein, 80 aa, Homo sapiens
MGWRRTTAGFLEPHGLTRALCGWPGMGSQPASPLAAGSPQGLGLQPVATGGRADCGGQDAGQGEGRQGWTAMSMKRPEAS

SEQ ID NO: 31350 - protein, 387 aa, Homo sapiens [sequence omitted]

SEQ ID NO: 31351 - protein, 29 aa, Homo sapiens
MWLQEACCCSTPSHFTRSLVANSGYSEQN

SEQ ID NO: 31352 - protein, 385 aa, Homo sapiens
  DOMAIN (266)..(297): Isocitrate and isopropylmalate dehydrogenases proteins domain identified by eMATRIX, accession number BL00470D, p-value=8.650e- 13, raw score of 21.75
  DOMAIN (50)..(376): Isocitrate and isopropylmalate dehydrogenase domain identified by PFam, accession name isodh, E-value=8.8e-87, PFam score of 293.1
MAVLSGVRWLTRALVSAGNPGAWRGLSTSAAAHAASRSQAEDVRVEGSFPVTMLPGDGVGPELMHAVKEVFKAAAVPVEFQEHHLSEVQNMASEEKLEQVLSSMKENKVAIIGKIHTPMEYKGELASYDMRLRRKLDLFANVVHVKSLPGYMTRHNNLDLVIIREQTEGEYSSLEHESARGVIECLKIVTRAKSQRIAKFAFDYATKKGRGKVTAVHKANIMKLGDGLFLQCCEEVAELYPKIKFETMIIDNCCMQLVQNPYQFDVLVMPNLYGNIIDNLAAGLVGGAGVVPGESYSAEYAVFETGARHPFAQAVGRNIANPTAMLLSASNMLRHLNLEYHSSMIADAVKKVIKVGKVRTSDMGGYSTTTDFIKSVIGHLQTKGS

SEQ ID NO: 31353 - protein, 118 aa, Homo sapiens
MLMAGHPLAFPLPDLHPVLQSLPCLLSPQVEDPSFMENSQNLEPVHGYHHSLLLDVGEGTAESSGLEQARDRFSSSWGEPWPGQPQSALVSPCGFQEACCCFYFHPHFHPQPKWLNSG

SEQ ID NO: 31354 - protein, 67 aa, Homo sapiens
  misc_feature (1)...(67): Xaa = X or * as defined in Table 2
XTGKLPVASEGNSGDHLVPRLTVKHFMARLSPAVKFAAGTVLRLRMQSDDMIGTDGMEQSIQSKRPS

SEQ ID NO: 31355 - protein, 47 aa, Homo sapiens
MQALAYLWWSRTGRDVSTIHPQGLLPCLLWKTAKMAVPLSIYSLLQC

SEQ ID NO: 31356 - protein, 253 aa, Homo sapiens
MAGYSSETKLPEERSGSNNCCSPISAVLQPLLLIPRQTGSGVDLQQTPTDLQLRVLTVRRKTKKQKGHPHQKPICMSPSKTKGENGTKLENTLQDIMQENFPNLARQANIQIQEIQRTLERYSSRRATPRHIIVRFSKAEMKEKMLRAAREKGWVTHKGKPIRLTADLLAETLQARREWGPIFNILKEKNFQPRISYPAKLSFISEGEIKYFTDKQMLRDFVTTRPALKEFLKEALNMERNNRYQPLQNHAKL

SEQ ID NO: 31357 - protein, 213 aa, Homo sapiens
MQYVQQKPKLKFQVHICAYRKTVLQPPLLIPRQTGSGVDLQQTPTDLQLGVLTVRRKTNKQKGHPHQKPISTSPSSKTTEKSLKDLMELKTKAREICDECTGLSSRFDQLKERVSVMEDQMNEMKREEKFREKRIKRNKQSLQAIWDYVKRPNLRLIGVPESEGEKGTKLENTLQDIIQENFPSNLARRPTFKFRKYRERHRDTPREKQLQDT

SEQ ID NO: 31358 - protein, 659 aa, Homo sapiens
  DOMAIN (122)..(167): kw TRANSCRIPTASE REVERSE II ORF2 domain identified by eMATRIX, accession number DM01354N, p-value=1.000e-40, raw score of 13.17
  DOMAIN (137)..(376): Reverse transcriptase domain identified by PFam, accession name rvt, E-value=2e-44, PFam score of 161.0
MFAVLQAPLVIPRQTGSGVDLQQTPTDLQLRVLIVRRKTNEQKGHPHQNPICTSPSSKTKVDTTTNMGEKQSRKTENSKNQSASPPPNLKKKREKNQIDAIKNDKGDITTDPTEIQTTIREYYKHLYSNKLENLEEMGKFLDTYNLPGLNQEEVESLNRPITGSEIEVIINSLPTKKSPGPDGFTAEFYQRTKDKNHMIISIDEEKAFDKIQQPFMLKTLNKLGIDGTYLKIIRAIYDKPTANIILNGQKLEAFPLKAGTRQGCPLSPLLFNIVLEVLAREIRQEKEIKGIQVGKEEVKLYLFADDMIVYLENPIISAQNLLKLISNFSKVSGYKINVQKSQAFLYTSNRQTESQIMSELPVTIASKRIKYLGIQLTRGVKNLFKENYKPLLNKIKEDTNKWKNIPCSWIGRINIMKMAIVPKVIYRFNAIPIKLPMTFFTELEKTTLKCIWNQKRAHIVKSILSQKNKAGGIMLPDFKLYYKATVTKTAWYWYQNRHIDQWNRTEPSEIMPHIYSYLIFDKPDKTRNGERIPYLIRWCWCWQNWLAICRKLKLDPFLTSYTKINSRWIKDLNVRPKTIKTLEENLGITIQDIGMGKDFMSKTPKAMATKAKIDKWDLIKLKSFCTAKETTIRVNRQPTEWENISAIYSSDKGLISRIY

SEQ ID NO: 31359 - protein, 129 aa, Homo sapiens
  DOMAIN (38)..(85): kw TRANSCRIPTASE REVERSE II ORF2 domain identified by eMATRIX, accession number DM01354V, p-value=1.000e-40, raw score of 12.97
PLLVIPRETGSGVDLQQTPTDLQLRQTESQIMSELPFTVASKRIKYLGIQLTKDVKDLFKEIYKPLLSEIKEDTNKWKSIPCSWLGRINIVKMAILPKVTYIFNAIHIKLPMTELEKTKVHMEPEKSLH

SEQ ID NO: 31360 - protein, 96 aa, Homo sapiens
TPEGTFWANNHGRNYTVLLRIAPAPTPTDAEGLPQQQQLPQLEPQPECQGPVEAEARQLKSCMKPVRRRPAEEELKTKNMDDNTFAMAEHPDVQES

SEQ ID NO: 31361 - protein, 416 aa, Homo sapiens
MAGYSSETKLPQERSGSNIYSSPISAVLQPLLLIPRQTGSGVDLQQTPADLQLRVLTVRRKTNKQKGHPTPKPHLYITIIKDQRDFADFGTTIKQDFRLLGQTSVDRLLQLSQGQAVKGNQLLPVSLVKRKTTLAPNTQTASPRALADSLMQLARQVSRLESGHVCSLASLKQSHDILPIKMAKAILSSAGNVLQIQTDRDLADLGTAIKQDFRLLGQTRDFADFGTTIKQDFRLLGQTSVDRLLQLSQGQAVKGNQLLPVSLVKRKTTLAPNTQTASPRALADSLMQLARPGFPTGKRAVSATQLMSKLLVGLVAASRWGCVQLAKPQRACYRALLALRSVDGLSVNSSGALCLAAWGGCLLPARAKSQCDSLLWVPAPSTSGILVWCPSEMRLTPRGDGTITVKEEVCAVDPLP

SEQ ID NO: 31362 - protein, 213 aa, Homo sapiens
MEFEIGERTDCLLKWVPDPQTKVPEEGSDSNICRSATFAVLQPPLVIPRQTGSGVDLQQTPTDLQLRVLSVRRKINKQKGHPHQNPICTSPSSKTKEKDFDKLTEVGLRRWVITKFSELKEDVRNHCKEAKNLEKRLDKWLTRINSMEKTLNGLMELKTMARKLRDACMSFSSRFDQVEERVSVIEDQMNEMKPEEKFREKRVKGNEQNLQEI

SEQ ID NO: 31363 - protein, 189 aa, Homo sapiens
MAEWEQLQSTAPSMSDAEDRVRPTPHTARYSSETKLPEERSGSNICCSPISAVLQPLLLIPRQTVSGVDLQQTPTDLQLRAQEHDECTSLSSRFDQLEERVSVMEDEMNEKKREEKFREKRIKRNEQSLQEIWDYVKRPNLRVIGVPESDGENGTKLENTLQDIIQENFPNLARQANILIQEIQRTTQK

SEQ ID NO: 31364 - protein, 228 aa, Homo sapiens
MVLEKAREEVDPPSMLIPPVTQCGQLPRSQCPQPTLSRMLTLEVGISLGIIVLMISLWPDTVKEYQSREALSFKKYNKNPGLLKFAGDPLQTLFAWVSPAEAAEQQISALCFLWKLRPRGAPTRCQPLLSYTRCLSAPAGSFVYTMRGKPPIQASVMADASPPTKIEHPRTTSDCCVASKNFKPVDLSLLCSMGVGSAELDHWATWLQSPFQGSERFCLAGVPGTTGV

SEQ ID NO: 31365 - protein, 1809 aa, Homo sapiens
  DOMAIN (797)..(842): kw TRANSCRIPTASE REVERSE II ORF2 domain identified by eMATRIX, accession number DM01354N, p-value=1.000e-40, raw score of 13.17
  DOMAIN (391)..(621): AP endonuclease family 1 domain identified by PFam, accession name AP_endonucleas1, E-value=7e-83, PFam score of 288.8
MLFWAFDKIQQPFMLKTLNKLGIDGTYLKIIRAVYDKPTANIILNGQKLEAFPLKTGTRQGCPLSPLLFNIVLEVLARAIRQEKEIKGIQLGKEEVKLSLFADDMIVYLENPIISTQNLHKLISNFSKVSGYKNNVQKLQAFLYTNNRQTESQIMSELPFTIASKRIKYLGIQLTRDVKDLFKENYKPLLKEIKEDTNKWKNIPCSWIRRINIVKMAILPKRTPLLSLPSTLYEELWRLRSYFPLCPQLYNMEQNTTDWVIYKEQCIWLTALETGESKSTAPAFGKGYPMAEYIIWGRLTPHMAGYSSETKLPEERSGSNICCSPISAVLQPLLLIPRQTGSGVDLQQTPTDLQLRVLTVRRKTNKQKGHPHQNPICTSPSSKTKGSNSHITILTLNVNGLNAPIKRHRLANWIKSQDPSVCCIQETHLTCRDTHRIKIKGWREIYQANGKQKKAGVAILVSDKTDFKPTKIKRDKEGHYMMVKGSIQQEELTTLNIYAPNTGAPRFIKQVLRDLQRDLDSHTLIMGDFNTPLSTLDRSTRQKVNKDIQDLNSALHQVDLIDIYRTLHPKSTEYTFFSALHHIYSKIDHIVGSKALLSKYKTTEIITNCLSDHSAIKLELRIKKLTQNRSTTWKLNNLLLNDYWVHNKMKAEINTLFETNENKDTTYQNLWDTFKAVCRGKFIALNAHKRKQERSKIDTLTSQLKELEKQEQTHSKASRRQEITKIRAKLKEIETQKILQKINESRSWFFEKINKIDRPLARPIKKKREKNQIDAIKNDKGDITTDPTEIQTTIREYYKHLYANKLENLEEMDKFLNTYTLPRLNQEEVESLNKPITGSEIEAIINSLPIKKSPGPDGFIAKFHQRYKEELEASIILIPKPGRDTTKKENFRPIPLMNIDAKILNKILANRIQQHIKKLIHHDQVGFIPGMQGSFNICKSINVIQDINRTNDKNHMIISIDAEKAFDKIQQPFILKTLNKLGIDGTYLKIIRAIYDKPTANIILNGQKLEAFPLKTGTRQGCPLSPLLFNIVLEVLARAIRQEKEIKGIQLGQEEVKLSLFADDMIVYRENPIVSTQNLHKLISNFSKVSGYKINVQKSQAFLYTNNRQTESQIMSELPFTIASKRIKYLGIQLTRDVKDLFKENYKPLLKEIKEDTNKWKNIPCSWVGRINIVKMAILPKVIYRFNAIPIKLPMTFFTELEKTTLKFIWNQKRARIAKSILSQRNKAGGITLPDFKLYYKATVTKTAWYWYQNRDIDQWNRTEPSEIMPHIYNHLIFDKPDKNKKWGNDSLFNKWCWENWLAICRRKLKLDPFLTPYTKINSRWIKDLNVRPKTIKTLEENLGNTIQDIGMGKDFMSTTPKAMATKAKIDKWDLIKLKSFCTAKETTITVNRQPTEWEKIFTIYPSDKGLISRIYKELKQIYKKRTNNPINKWVKDMNRHFSKEDIYTAKRHMKKCSSSLAIREMQIKTTLRYHLIPVRMAIIKKSKNDMLTGTRQECPLLLLFFNIVVEVMSGAIRQEKEIKGIQIEKPPLVIPRQTGSGVDLQQTPTDLQLRVLTVRKKTNKQKGIASTSTKKTSTPKPHLPKVDKTTKMGRNQSRKAENSKNQSASYLPKDCSSSSAMKQSWMENDFDELTEGAFRSLSKWHTRRLYPASSSEGPTPTEPRSLLAQQSEIELKAGCPSEMKLPEEGSGSNICRSAIFAVLQPLLVIPRQTGSGVDLQQTPTDLQLMVLTVRRKTNKQKGHPHQNPMCTSPSSKTKELKEDVRTHHKEAKNLEKRLDKWLTRINSIEKNLNDLMELKSMVRELHDA

SEQ ID NO: 31366 - protein, 88 aa, Homo sapiens
RSCDTSGSPATPPKAKGTGSVVFPAPPDYFLPPQPPMPPLEYPELPLPSPDFMETPLDFVLPPLAVAKRPPMPHPPNRHEASMFTSSK

SEQ ID NO: 31367 - protein, 140 aa, Homo sapiens
  misc_feature (1)...(140): Xaa = X or * as defined in Table 2
XPSMSQALCQKDKLKGPINGTTQPNGQMPQAADSVSAVLEEAQAHAETWKRSCDTSGSPATPPKAKGTGSVVFPAPPDYFLPPQPPMPPLEYPGAPAAVPGLHGDPPGLRAPSPRCRQEAFYAPPPPTGTKHQCSQAANE

SEQ ID NO: 31368 - protein, 552 aa, Homo sapiens
MQTAKVQAAIYRSRGTLNTLSPNASYKWIQLRVRREKPSCSSEIHEVEVVVAPDPTALEPAQSNLGASEVPDCSTLATRRHTKRGQLRMRCLEQSCSSAIHEVVVGVAPESTALEPAPSDSGVMTTRRRQKRKLDLNTTSITLYDVMVNVFLTHLSLSLLIYRRCDCCKASISVQTEKAQAVIYRSRGALNTLSPNTSHKRGYLRVRWVKPSCSSAIHEVEVAVLPDSTALEPAQSNLGSSDRPDSSTLATRRYPRWWSSVGGLQLLGSDGRRMNLCSLLPQSQLSGLLHPGLSKINWTGWQDFLADKSAQSMGPAPVRAGTRVVQSQPVALTSMSVQTAQTQPAIYRSRVALNTLSHNANHKWGQLRVWWEKPSCSSEIHKVEIAVAPTPLLWRLPSRIWEPARDLTAAHWTPEDTQRERSGRPSGVGWAAIHLKEKQPGCGEAAILGGILSKEPRNQRPINGTTQPNGQMPQAADSVSAVLEEAQAHAETWKPPMPPLEYPELPLPSPDFMETPLDFVLPPLAVAKRPPMPHPPQQARSINVHKQQMNKS

SEQ ID NO: 31369 - protein, 182 aa, Homo sapiens
  DOMAIN (1)..(133): Peptidase C13 family domain identified by PFam, accession name Peptidase_C13, E-value=1.6e-08, PFam score of -52.5
MNHLPDNINVYATTAANPRESSYACYYDEKRSTYLGDWYSVNWMEDSDVEDLTKETLHKQYHLVKSHTNTSHVMQYGNKTISTMKVMQFQGMKRKASSPVPLPPVTHLDLTPSPDVPLTIMKRKLMNTNDLEESRQLTEEIQRHLDYEYALRHLYVLVNLCEKPYPLHRIKLSMDHVCLGHY

SEQ ID NO: 31370 - protein, 31 aa, Homo sapiens
  misc_feature (1)...(31): Xaa = X or * as defined in Table 2
MIXRSPGSSRXRSSGIWMIXLSMDHVCLGHY

SEQ ID NO: 31371 - protein, 414 aa, Homo sapiens
  DOMAIN (172)..(202): HEMOGLOBINASE (C13) CYSTEINE PROTEASE SIGNATURE domain identified by eMATRIX, accession number PR00776B, p-value=8.759e- 29, raw score of 15.39
  DOMAIN (134)..(372): Peptidase C13 family domain identified by PFam, accession name Peptidase_C13, E-value=1.1e-75, PFam score of 264.9
MVWKVAVFLSVALGIGAVPIDDPEDGGKHWVVIVAGSNGWYNYRHQVTDANSNRSVNPIVICVYEESRLRTPLVVVVAVLVAVLVAVLVVVVVLVVVAVVAVAVAAVAAVAAAAVVAAAVVAVAVAVVVLVAVVVLVAVVVMVVVVVVVVAVAVVVAVAVVVVADACRAYQIFHRNGIPDEQIVVMMYDDIAYSEDNPTPGIVINRPNGTDVYQGVPKDYTGEDVTPQNFLAVLRGDAEAVKGIGSGKVLKSGPQDHVFIYFTDHGSTGILVFPNEDLHVKDLNETIHYMYKHKMYPKDESRSTPVTMMRGGPRTVGDWYSVNWMEDSDVEDLTKETLHKQYHLVHTPWTFTPSPDVPLTIMKRKLMNTNDLGGVQGSSLEEIQRAFGMAGHLHLEKFSCVRSFSFAGQRPRAE

SEQ ID NO: 31372 - protein, 109 aa, Homo sapiens
MPSRTPGLRRKELFAAERHFRCATGTTFCSRERRPAFIRCPVPGNRAHPAAEEEDDPDRPIEFSSSKANPHRWSVGHTNGKGTSAALVEGAAPQLLPRGADHLVLPEGG

SEQ ID NO: 31373 - protein, 85 aa, Homo sapiens
MLINVGNKPCLYWVSEFRSAGLGIPSSQSFRATPFEIEVINCRRSHGLPSGYGVSFFGSEALIKSLPTVSSHCLGKTLPTEVWPH

SEQ ID NO: 31374 - protein, 116 aa, Homo sapiens
MTVEAIRVQHPSWFAKVITEESKCQALSATLQDRVPPWRVLGPSTANGMHRQENILLVAMRVMGVRVGDMENREALKRLFQAKMTTKIYGNKPESTGEEPRDSGIKGVTGKGRNQG

SEQ ID NO: 31375 - protein, 352 aa, Homo sapiens
MPWQIGENINPSVLDKDKFKQIPGPTGDSFAIFHGKESEHWNKPETLLEAALALADDLVDDSYAVNHPYPPRARGSSDTAFLPESATSILRGLTLSPGAGAQSQLKIPEIWGSDEEIWGTDSAGGSLCTTHTCRLRAPVLAEPMDSASPDQCCCHSEMPLAVGETRLYAYLLHMKFLMMHATYREFYIDPVSSAPVHTADLPHPPAGAWNKVDIKKQKESKKKFFGADCKQPLRNPEGWPVTCRGSQAPVVQLTPKWSLDITHVLWIARCLATPHPSQLAKASPVGLCETLVRGGNHSCGQGGGGGQFCGPKWMYNLDSKLKNVFAAELLGVFKMLMIAVKIQEGPKLGKVF

SEQ ID NO: 31376 - protein, 286 aa, Homo sapiens
  misc_feature (1)...(286): Xaa = X or * as defined in Table 2
XIVLPCELWPMWGIPKPGTPTFPEPRIFPGPQKVQSKSRAQSFGSRGSKRHTRKKLRVKAPRAPSPSPLDHPDPENTNPMRPPAPTDPGHQPRSLMTGRQRFHTAQQRFTVRPQHHRSLIQRRPCQRQRVPNIQRGDIRSLRFGCFARHHPRHHRNIHDRTRTRPRRLTRHSRGLFEDDVRVSTTDPERRHPHPTNTTTPGPGRVLRKELNRPRRPIHLRRRRFHVQRAWQLPVPHRHHHLDHTSHTRRRLRMTDVRLDRPQPQRPARITITAVGGDQRLRLDRIS

SEQ ID NO: 31377 - protein, 63 aa, Homo sapiens
  misc_feature (1)...(63): Xaa = X or * as defined in Table 2
XKYCSLLDCVRCSLERLSRFHPPACHPVPCLGDKDSSYMGKRLDQPQMYPQYTYYYPHYLQTK

SEQ ID NO: 31378 - protein, 420 aa, Homo sapiens
  DOMAIN (102)..(112): Eukaryotic  RNA-binding region RNP-1 proteins domain identified by eMATRIX, accession number BL00030B, p-value=2.200e- 10, raw score of 7.03
  DOMAIN (63)..(212): RNA recognition motif. domain identified by PFam, accession name rrm, E-value=5.8e-33, PFam score of 122.9
MGKRLDQPQMYPQYTYYYPQYLQTKQSYAPAPHPMAPPSPSTNSSSNNSSNNSSGEQLSKTNLYIRGLPPGTTDQDLIKLCQPYGKIVSTKAILDKNTNQCKGYGFVDFDSPAAAQKAVASLKANGVQAQMAKQQEQDPTNLYISNLPISMDEQELENMLKPFGHVISTRILRDANGVSRGVGFARMESTEKCEVVIQHFNGKYLKTPPGIPAPSEPLLCKFADGGQKKRQNQSKYTQNGRPWPREGEAGMALTYDPTAAIQNGFYSSPYSIATNRMIPQTSITPFIAASPVSTYQVQSTSWMPHPPYVMQPTGAVITPTMDHPMSMQPANMMGPLTQQMNHLSLGTTGTYMTAAAPMQGTYIPQYTPVPPTAVSIEGVVADTSPQTVAPSSQDTSGQQQQIAVDTSNEHAPAYSYQQSN

SEQ ID NO: 31379 - protein, 52 aa, Homo sapiens
  misc_feature (1)...(52): Xaa = X or * as defined in Table 2
XSKAVPSTQVLPMCISWQRETHLDSSLKETGLFVGFDEEETAARIFSSQINF

SEQ ID NO: 31380 - protein, 52 aa, Homo sapiens; identical to SEQ ID NO: 31379
  misc_feature (1)...(52): Xaa = X or * as defined in Table 2

SEQ ID NO: 31381 - protein, 59 aa, Homo sapiens
MLTNHVSMSLYFVGFFSAVITILLVLLRSIYNAIIIPAFFLEYFQFGVWKIIFFLEAST

SEQ ID NO: 31382 - protein, 291 aa, Homo sapiens
MSEHIMKIVFTEHRYKAKRWLDLTRVVVVLGKAIAGRAKEDFSGGQARRDRRTKLSNDEDIPKYDIYPLEITFEFLTFSKREKDNIVGRNVDGDRGNQNGKPFVEFFYETQIKCTPPISQHQPIGAAVYFPWVGDLFSMVPLQFTMEEKSPDPDAKREFLDLARKNSGVYTGTDIVTDHLGNCLVLRYQSYLLLDHDLLFVALARGDTLHGALPRFSDEDVETKKERGPDPDPERRFLALTQERIQDTECGSLQYDCTQFFIPHSVEQYIPACCNITCSYFLQEKYTSPPQ

SEQ ID NO: 31383 - protein, 71 aa, Homo sapiens
  misc_feature (1)...(71): Xaa = X or * as defined in Table 2
XLASPRVPVFSVSKVVNLVGHSRKKLTFGVKLSSSLKKPVIVSTFRKGVSLDAHGNFKDPGLGHSSDIPSL

SEQ ID NO: 31384 - protein, 97 aa, Homo sapiens
MECKGPPMSSGAKRGADKEKVVSRTLGKEERSWRLVNWAKDTMKESDKKEGVHVPGHGRYTKVHDSSHTQRNLMPPAGSMSVLPTNVYTPPSILLGV

SEQ ID NO: 31385 - protein, 35 aa, Homo sapiens
CQLWKLLAVHLVQLQPCREWAPMPALELPTLQQLR

SEQ ID NO: 31386 - protein, 311 aa, Homo sapiens
  DOMAIN (43)..(56): PROTEIN ZINC-FINGER METAL-BINDI domain identified by eMATRIX, accession number PD00066, p-value=5.200e-14, raw score of 13.92
MAEDRIASQDHTSKYYHIEDWVLNIEFWQTLSLYIKAAFIVSHRRIHTGEKPYKCKECARSSVTVQLLQGIGEFNWREALQMQRMWQGLQSCSRLTVHRRIHSGEKPTNAMNAARSTIIHTGENHIHVMYATRSSVNVHTCKAPEKSYWRETLQMHECGKVFSQTSHLVGHREFILERNLTNVINVVFNSTSNLARHRRIHLERNLTNVMNVARSFVTINTSTSSEYSYWRETFVCNECGKAFRRSHICHRSTSEGGRPRATAATQRVRLIATLSNNDVPFVIWLLRPRPENRKRRHFRYITLRSSTFVLN

SEQ ID NO: 31387 - protein, 358 aa, Homo sapiens
  DOMAIN (311)..(358): Ribosomal protein L37e proteins domain identified by eMATRIX, accession number BL01077, p-value=8.121e-13, raw score of 16.34
MTSEKRHLRLSGGLKLEENLARLKKLPPPTGQPQLPDNAPKAPCLHSFPLEAEIIRPNSYLPSLDSWFPKKGFGPPLGVRTVHRSGQRKTTQSFPSANLFSGTTIPESGPRGWARPLAAALVTAAHERGKMRLRGLKTHREEPPPRYRAASRPVVGNKGCRNNVTDSMTYSKENYSLPVLEIGSRCNSTPETMRNLALNLGFYYHSPIKASGLLGEMADSKTRAGDNKMGLEHLVVAERKVASAKSLRDRNEEAAGELLSPKRDYPRRTRSLHAGTLSRCGPDEDSPIRSPENWESARLSGTETRSALPDEGNVIFGKRRNKTHTLCRRCGLRPTTFRSRPVANVATLPSARESAWIP

SEQ ID NO: 31388 - protein, 59 aa, Homo sapiens
MLQKTALLGFKVLFLQRKPMPESAGKKILRCLIRPVPKVLSSFKPWHSKFITFSCAWQG

SEQ ID NO: 31389 - protein, 239 aa, Homo sapiens
MIKLDPDLRRSNYNEDPNYWFWPICEVAALSQAVKHPFYRNQCILPKGTCRRDCAGSDQQVLTDVATARGPPVWPLHLQAVGRRDSWDQSTSTGPLMAPRTESWTPGASGSRHKRVEEPGTPNVRRQALAKLLRAPAPSWLGDSRWVSETGASGLQRKSKAQKLLDRGSANPGGFRVTQTLECDHSCYIDGPLEIPMIRTVGEIKGLVSVNELYQYWKPSAYFCERACVPHLLPVFVRN

SEQ ID NO: 31390 - protein, 72 aa, Homo sapiens
MGQQGTSRDSIVHLRASGVGPGQVYCSNAVQTPTDPEKNGQLLTNDGRPITGDFNLDTHASPITYGQEHSTV

SEQ ID NO: 31391 - protein, 57 aa, Homo sapiens
MITDGSLDLHAGVKSSGNGDVRWRENDHRWKKELRKCHGLSLARGPQDKREIQAHGS

SEQ ID NO: 31392 - protein, 178 aa, Homo sapiens
  misc_feature (1)...(178): Xaa = X or * as defined in Table 2
MNCVGINASIFPEVLQSHLPAYREGSSPQEQRSSQQASRVLVNSKRKSKSHAAAKKRRKNSTEGHKTEGETKAGVKGRKVHLEEGQADNLRDQGGSSPRRKSPVARRLADCRHRANLTVRYRSIGAVPQGPAGRCVNLGKLLKLVCQSQRIRTLHKTLELSVFQLSQSTDEETEAKKX

SEQ ID NO: 31393 - protein, 151 aa, Homo sapiens
MAPEVENSTPLVPSISDKGYSTYNGDNEDDVNTAEKVPRDNMLKMCEGLIQGLGQCAFTIKHEILSVYKIKDLFSGLHPDQCVGCKPTNTDDQYYSTKEVKSLCDYPSPREAASTSTFQAAMETTMLPIPLQALRDSSEDLPPESTVARLL

SEQ ID NO: 31394 - protein, 382 aa, Homo sapiens
MKLALASFTSVLENLAYPLNALQTSPFALVIAEPDDRLPHFHLMGCACGFFPRIWGISTHSILTTSETLFVINHFKSHLSYKQLLNVWPTDCSFSITWELIGNAVAKAYSRLNEELYFIKIPRGPRGAYLISSRLTPRRHNAIQAGFHNSACRRNDRRSLKGKPKFGRCLKSHWKASNEREGLYCGVNHPHVDDLNNPCMHTDIIRRDLEAEDTMPRATSILSSVLNLTTLGTSTRKFIHFRRVMSLDWAHLDNLGDSPRFKTLKLNHICKVLSAIYPLKLPEQEPSGNLVPVLHPFCETTPAQLGCSRHCRGAAGLAMLQTLTVNMQFLSFCVKHDGTVKMQESKLGFPLILHYVHGKTVFHETGPGAKKGYAKDSEIDIA

SEQ ID NO: 31395 - protein, 209 aa, Homo sapiens
MASVTGQDLPIFNLTRCNRRYLWPWDVREWKTEWGWIHAEAGAQLGNDHSVESGKMDKGLWQCSRNKQVVMDFQQGPNMLVTIHLDVEDEGGDGQSNSRFLPQVTSQAWATRVGIPWQFTFSLSLTLTLYSDADMKWLCWQPTCFQILDPAAGMKALPPGKCETKVEGDKEPMQLCHGWWWWAPPLCSSIDVLLSKAALVVSSNGDPSP

SEQ ID NO: 31396 - protein, 71 aa, Homo sapiens
  misc_feature (1)...(71): Xaa = X or * as defined in Table 2
XYPEENPRAVTAETGGENLSRDIAKQERTARKRPGVYELVSVIEPSRRKNHSDRVLSLSLPNTETRTIING

SEQ ID NO: 31397 - protein, 119 aa, Homo sapiens
MHLLQAALLLAVPCLLCYVAVGYAFSVLLTLLLTAPALLPDDFEGFNIREKTGWYGKKEGMVTLSNPQVAREKEQFNDLYFNAKQAEQKGYLNTARREASLAFKVTETTHNKSGLITES

SEQ ID NO: 31398 - protein, 182 aa, Homo sapiens
MIKSSWFYVKFKYAEKEYVVTSYMIGEGDLFESLMQNKVVVVIPWQSKKISKTWDVNLQQELYGREQCAVSQQQDSPGTRPRSATEGSLLPSSELPLLAFWTIRVLSGCYPLFIPSQPIEFQVLAVRDKWLTLFESLGVKPGCVLRGLHPVQIVDSKGFLAGLLGALIEIMGVESLDYSQSQ

SEQ ID NO: 31399 - protein, 127 aa, Homo sapiens
MGPTRKPNVCSRLSRRALGCFSRDAGVVQRTNLGILRALVCQESTKFKNVWTTHSRSPIAYERGRIYFDNYRRCVSSFGGSSLPCDLNSLMDLRIIMDFQIVQHFSCYEDRRVALPGCFRLGPETRI

SEQ ID NO: 31400 - protein, 224 aa, Homo sapiens
MPLFFFTTLRCLGGEKHKSGLLAHPGTVPSLELHYDIDSFAHKFFADLLLIITLFSYYILFAEIMKIIMNSEAGAAVLGLKAVTNIPLQIPEKQWFQSAQSKEWFSSVRVVHTSQSSFSETFLRVFKGSCYKNMISKLFNQKNGSTLRDEEHITKSFSESFCQFLREDISFFTIGLKALTNIPLQILEEASMCPEISIADSPKQVSKLLKEKKGLTLRDECTHN

SEQ ID NO: 31401 - protein, 98 aa, Homo sapiens
MYNRVLYRDIQFPGADRRQWPSSISTARGFPLLLIHLSTDPLRVSGWGTVRSFSSQEPIFQTITWGETLDNTLLSRAEVPAAFRSALCPWFIETREWR

SEQ ID NO: 31402 - protein, 75 aa, Homo sapiens
  misc_feature (1)...(75): Xaa = X or * as defined in Table 2
XSANGLFPDSIFWEESNQDTKQMMVDRQTLFYEKKNQIYQGLESTCLKIDMSMSEFFPYKSLSIVTGTKLNAESN

SEQ ID NO: 31403 - protein, 40 aa, Homo sapiens
  misc_feature (1)...(40): Xaa = X or * as defined in Table 2
XLGDALDSSNSMQTIQKTTTRRIVDGKVVSETNDTKVLRH

SEQ ID NO: 31404 - protein, 298 aa, Homo sapiens
  DOMAIN (251)..(282): Intermediate filaments proteins domain identified by eMATRIX, accession number BL00226C, p-value=7.692e-15, raw score of 13.23
  DOMAIN (98)..(291): Intermediate filament proteins domain identified by PFam, accession name filament, E-value=4.2e-72, PFam score of 252.9
MGHHRRQSLSPVLSLSSPDSMSFTTRSTFSTNYQSLGSVQAPSYGARPVSSAASVYAGAGGSGSRISVSRSTSFRGGMGPGGLAAGMAGGLAGMGGIQNKKTMQSLNDRLASYLDRVRSLETENRRLESKIREHLENKGPQVKDWSHYCKTIEDLRAQIFANTVDNACIVLHIDNARLAADDFRVKYETQLAMRQSVENDIHGLRKLETEIEALREELLFMKNHEEEVKGLQAQIASFRLTVEVDAPKSQDLAKIMADIRAKYDELAGKNREELDKYWPQQFEENTTVVTTVRRGWSC

SEQ ID NO: 31405 - protein, 177 aa, Homo sapiens
  DOMAIN (55)..(70): Intermediate filaments proteins domain identified by eMATRIX, accession number BL00226A, p-value=2.000e-16, raw score of 12.77
  DOMAIN (55)..(112): Intermediate filament proteins domain identified by PFam, accession name filament, E-value=2.5e-26, PFam score of 100.9
MSFTTRSTFSTNYRSLGSVQAPSYGARPLQGRHGVRGPGHGSEPGVMAGMGGIQNEKETMQSLNDRLASYLDRVRSLETENRSMESKIREHLEKKGPQVRDWSHYFKIIEDLEGSDLRKYCGQCPHRPFDDTNYHTDLQLETEIRGSSKEELLLHEEGTTKKEVKRPIKTPDCQLWG

SEQ ID NO: 31406 - protein, 329 aa, Homo sapiens; identical to SEQ ID NO: 31030
  DOMAIN (242)..(273): Intermediate filaments proteins domain identified by eMATRIX, accession number BL00226C, p-value=8.683e-14, raw score of 13.23
  DOMAIN (112)..(305): Intermediate filament proteins domain identified by PFam, accession name filament, E-value=2.3e-62, PFam score of 220.6

SEQ ID NO: 31407 - protein, 156 aa, Homo sapiens
MSFTTRSTFSTNYRSLGSVQAPSYGARPVSSAASVYAGAGGSGSRISVSRSTSFRGGMGSGGLATGIAGGLAGMGWHPEREGDHAKPERPPGLLPGQSEEPGDREPEPGEQNPGALGEEGTPGQRLGAITSRSSRTLRAQIFRKYLWDNARIRSAD

SEQ ID NO: 31408 - protein, 74 aa, Homo sapiens
MKGWWAGSPPRRFPSKSIPFQFLGGTLGFGGASKGAKTKPSYLLGSRVFLKKNFPFWPKFAKNWFKNLFLWFRF

SEQ ID NO: 31409 - protein, 56 aa, Homo sapiens
  DOMAIN (10)..(29): Eukaryotic  RNA-binding region RNP-1 proteins domain identified by eMATRIX, accession number BL00030A, p-value=4.706e- 11, raw score of 14.39
  DOMAIN (10)..(56): RNA recognition motif. domain identified by PFam, accession name rrm, E-value=0.005, PFam score of 23.5
MVEADRPGKLFIGGLNTETNEKALEAVFGKYGRIVEVLLMKDRETNKSRGFAFVTL

SEQ ID NO: 31410 - protein, 217 aa, Homo sapiens
  DOMAIN (140)..(158): GLYCERALDEHYDE-3-PHOSPHATE DEHYDROGENASE SIGNATURE domain identified by eMATRIX, accession number PR00078D, p-value=8.154e- 14, raw score of 11.49
  DOMAIN (3)..(216): glyceraldehyde 3-phosphate dehydrogenases domain identified by PFam, accession name gpdh, E-value=1.7e-91, PFam score of 308.3
MTAFNSGKVDIVAINDPFIDLNYMVYMFLYDSTHGKFHGTVKAENGTLVINGNPITHFPGPRSLQNQMGAPAKVIHDNFGIIEGFMTTVHTITATQTINGPSGKLSRDGCRALQDIIPVSTGAAKPVGKVIPELNGKLTGMAFHVPTANVSVADLTCRLEKPANMMTSRSNTHSSTFDAGAAIVLKDHSVKLISWYDNEFGYSNRVVHLMAHNASKE

SEQ ID NO: 31411 - protein, 71 aa, Homo sapiens
  DOMAIN (14)..(26): Glyceraldehyde 3-phosphate dehydrogenase proteins domain identified by eMATRIX, accession number BL00071A, p-value=7.319e- 12, raw score of 5.81
  DOMAIN (12)..(68): glyceraldehyde 3-phosphate dehydrogenases domain identified by PFam, accession name gpdh, E-value=1.2e-31, PFam score of 108.3
  misc_feature (1)...(71): Xaa = X or * as defined in Table 2
XRATSLRTPMGKVKVGVNGFGRIGHLVTRAAFNSGKVDIVAINDPFIDLNYMVYMFQYDSTHGKFHGTRQG

SEQ ID NO: 31412 - protein, 74 aa, Homo sapiens; identical to SEQ ID NO: 31408

SEQ ID NO: 31413 - protein, 207 aa, Homo sapiens
MDDGGYSMNFNMSSSRGPLPSKKRTTTKKWGSSLLRVLHLQDQFAVAVEWEEELLYHVEEIVMEVHLEGNRCPLVEMFICPQEMMGILLKTAIQAEITQVLVILEIMHHHHEIILTVIMVIPVHVMTIHQEDIAIEMDMVVIVTIQIIQVEVPTEIHMRVMVTHVVLHLHEGPRHLMVEAVAMMIIASSRDGYGGSRDSYSSSRSDL

SEQ ID NO: 31414 - protein, 357 aa, Homo sapiens
  DOMAIN (214)..(270): Carboxylesterases domain identified by PFam, accession name COesterase, E-value=0.0011, PFam score of 14.8
MKIPWKRSNLQVKDEEEWARQRKILFEFGATGASVGGDEKGTITKMLWSTRTLLNITKEQVPLVVEEYLDNVNEHVWKMLRNPPAPHPPHTPRRSSHGHLESLLKCCQAPSRVDRPGSGLAELEQFPMVVTAEPGFGNPRPVLDVPRDRHVPTRRGEHEQQRFVLNGKQQIFSVSEDSWSSTSIAQLRSWYGSMERSDNWRCHLLRWISSGSYGDVVVVTVQYRLGVLASSALEMSMTWQPGLPRCGSCFALGEENIAPFGGDLNCVTVLVDLPVGASSLACLSEATEEEKQLSLTMMAHGPTLPGQALKVSALCDWSYALLKCHKAASTSGALYKFFPLPEVPFRFLREELSQNGD

SEQ ID NO: 31415 - protein, 815 aa, Homo sapiens
  DOMAIN (372)..(386): C2H2-TYPE ZINC FINGER SIGNATURE domain identified by eMATRIX, accession number PR00048A, p-value=5.765e-12, raw score of 10.52
  DOMAIN (345)..(637): Zinc finger, C2H2 type domain identified by PFam, accession name zf-C2H2, E-value=6.7e-51, PFam score of 182.5
  misc_feature (1)...(815): Xaa = X or * as defined in Table 2
MTGICYTEDERSYKKNAQPTAASKKQKETQKFCLRVDGQQKVKLSVLQEKSAQLTVQLKSQKFLGHPTAGRGRSELCLDLPDPPEDPVALETRSVGTWVRERDLGMPDGEAALAAKVAVLETQLKKALQELQAAQARQADPQPQAWPPPDSPVRVDTVRVVEGPREVEVVASTAAGAPAQRAQSLEPYGTGLRALAMPGRPESPPVFRSQEVVETMCPVPAAATSNVHMVKKISITERSCDGAAEMKWEDQNIGDQCQNAKRNLRMALTSSLGCGFLQVVLRLQNLQQVIVSYFGQCKFGCLQGQSCEHQEYGEKPYTHKQRGKAISHQHSFQTHERPPTGKKPFYCKECAKTFSSLGNLRRHMAAHHGDGPYKCKLCGKAFVWPSLFHLHERTHTGEKPYECKQCSKAFPFYSSYLRHERIHTGEKAYECKQCSKAFPDYSTYLRHERTHTGEKPYKCTQCGKAFSCYYYTRLHERTHTGEQPYACKQCGKTFYHHTSFRRHMIRHTGDGPHKCKICGKGFDCPSSVRNHETYFTLERNPMECKAVWESVISMAEKPYECKTCKKAFSHFGNLKVHERIHTGEKPYECKECRKAFSWLTCLLRHERIHTGKKSYECQQCGKAFTRSRFLRGHEKTHTGEKMHECVCKVDKQNRAGYSPIMLTALATLKTQDDIETVLQLFRLGNINAKASQPYVAQGDLSGFQDIGGYTKRKLDFYSTLLAGSPGPQHPGSHLCPQTNLEKSRFSARGHRRRSIVKVSLHPADCPFQKYHTVNGPQPVKFRKALSKAKKMASASSKPKEGRSGSWKLLVVVVGX

SEQ ID NO: 31416 - protein, 39 aa, Homo sapiens
MSLPRSPSRFPRWDKPTLQLFYIMATKSPSNARLDSCSC

SEQ ID NO: 31417 - protein, 394 aa, Homo sapiens
MDPAATTLMKCFGLHHSLEFCGQQTEISSASPTQQVPSLEGPENKGLPSPGMCTTSPESGLGVAICLGCGQNPDMQTGMPTRLCTEILAECAKLKVKKKVGFMKALSYASLDKEDLLSPINQNTLQRSSSVRSMVSSATYGGSDDYIGLALPVDINDIFQVKDIPYFQTKNIPPHDDRGARAFAHDAGESTEDTGLQEHTDDNCLYCVCIDILGFQPSNQLSAICSHSDFQDIPYSDWCEQTIHNPLEVVPSKFSGISGCSDGVSQEGSASSTKSTELLLGVKTIPDDTPMCRILLRKEVLRLVINLSSSVSTKCHETGLLTEVDTQIQEIQRTPAGFYTKRTSLGHIGTRLFKASTKEKILNATREKGQITYKGTPIRLTVDFSAETLQARRD

SEQ ID NO: 31418 - protein, 200 aa, Homo sapiens
MGRKEGGKELLPAAAIGWEQPGVCESSTDLKGQCLKAVSHLRSLEGSTEGHSCTLPQFSFRDVLRFMKALSYASLDKEDLLSPINQNTLQRSSSVRSMVSSATYGGSDDYIGLALPVDINDIFQVKDIPYFQTKNIPPHDDRGARAFAHDAGESTEDTGLQEHTDDNCLYCVCIEILGFQPSNQLSAICESFRLSRYSIF

SEQ ID NO: 31419 - protein, 41 aa, Homo sapiens
  misc_feature (1)...(41): Xaa = X or * as defined in Table 2
XFSKCDRPDKLEEPVGLSSAISSEISSPRHKAPMEDELTTY

SEQ ID NO: 31420 - protein, 119 aa, Homo sapiens
  misc_feature (1)...(119): Xaa = X or * as defined in Table 2
MDMRRHVRCRAGRDVVWRNIRDLPEEWTVRLSQPVELPLTIPPGFSKCDHQTNWKSLLDFHQQFLQDLXXXXXXXXXXXXXXXXXXXXXXXXXXXXXXXXXXXXXXXXXQGIRLLWRTS

SEQ ID NO: 31421 - protein, 112 aa, Homo sapiens; identical to SEQ ID NO: 30904
  misc_feature (1)...(112): Xaa = X or * as defined in Table 2

SEQ ID NO: 31422 - protein, 106 aa, Homo sapiens
MDLFVAPHGGFPAFPEELSFIAVLLGAKLVFFSLESRLASSGFPVLTFDGPGASSLTSGFETDSAALGFFVFFSTFALSLLSSILVFSTSTSSLVPLRNSMTASLL

SEQ ID NO: 31423 - protein, 51 aa, Homo sapiens
  misc_feature (1)...(51): Xaa = X or * as defined in Table 2
XSAKPPCGATKRSIADSEESEAYKSLFTTHSSAKRSKEESAHWVTHTSYCF

SEQ ID NO: 31424 - protein, 144 aa, Homo sapiens
MGCDGGTIPKRHELVKGPKKVEKVDKDAELVAQWNYCTLSQEILRRPIVACELGRLYNKDAVIEFLLDKSAEKALGKAASHIKSIKNVTELKLSERALKEIKAEVCHTCGAAFQEDDVIVLNGTKEDVDVLKTRMEERRLRAKF

SEQ ID NO: 31425 - protein, 89 aa, Homo sapiens
  misc_feature (1)...(89): Xaa = X or * as defined in Table 2
XSLYSLLSSIIVFSKSTSSLVPLSTIIIILPGKASPTRVAKLPLLSLSKAPLKKNNTSRNHPKEAELCVWPVHLPGPPTGEDEDAPAGX

SEQ ID NO: 31426 - protein, 161 aa, Homo sapiens
MIGHLQAEEKEASSGSVQVQKPQKQEANCAVVSLWPEATGPPQTTSVSLRVQRPKNLELMSKGRRSRRKHPAREKMKARRLSKQRYPTFFCFCVLPELAANCMVSTYSRPPKRLDYRLEPPHLAPSLTVERTNAPAAGSTWLALSPNASAVATMDSTGLTI

SEQ ID NO: 31427 - protein, 149 aa, Homo sapiens
MMLDKKQNRVIFLFEFKMGCKAVETTCNINNAFDPETANEHTVQWWFKKFCKGDESLEDEECSGWPSEVNNDQLRAIIEADPLTTTQEVAKELSVDHSTVIWHLGQIGKVKKLDKWVPHELTANRKHHCFEVSSYSTQQQTIPQSDCNV

SEQ ID NO: 31428 - protein, 59 aa, Homo sapiens
MPQKTLACLVPTLITGPNEREHTVFKTKLNWDHGGLGFLDCKMGISPPTLFSPRKQFIS

SEQ ID NO: 31429 - protein, 194 aa, Homo sapiens; identical to SEQ ID NO: 30905

SEQ ID NO: 31430 - protein, 51 aa, Homo sapiens; identical to SEQ ID NO: 31423
  misc_feature (1)...(51): Xaa = X or * as defined in Table 2

SEQ ID NO: 31431 - protein, 63 aa, Homo sapiens
HVHILLGAIEHDYHHPPGRQPHTCGKLPLLSLSRLGSENTQPQHRRKQNLCRPFISQAHNGAR

SEQ ID NO: 31432 - protein, 21 aa, Homo sapiens
FWPNGFVFSSCCGGHKEPGCR

SEQ ID NO: 31433 - protein, 124 aa, Homo sapiens
MAVLLKFVSEGDNIPDALGLVEYLNEWLQILKPLCCPVIASYHEIWLFQSVAPPPSLFLPPAPAIQDVLASPSPFAMTAQGTPTTKKTNRFNLTCQLQIISSGHLKHPVENSWGCLRIRQQKMR

SEQ ID NO: 31434 - protein, 151 aa, Homo sapiens
MEKSRCIPEIDDSEFCIRIPGGGITKTLYDESCSKEIQMAVLLKFVSEGGPTIPRCIRVLLEYLNEWPSEYSKPLSDDPTVSASRVENTKFLEITLWQWFSPLHFSDLISVLYLIPKTLTTNTAVKHSIQKKLYDLVLGNYFHSKYQRKKD

SEQ ID NO: 31435 - protein, 49 aa, Homo sapiens
FMQVEDVDIDEVQCILANLIYMGHVKGYISHQHQKLVVSKQNPFPPLST

SEQ ID NO: 31436 - protein, 42 aa, Homo sapiens
  misc_feature (1)...(42): Xaa = X or * as defined in Table 2
XTTKSYKDSLQLLQDEEDSAANEEGLVLRQRLVQQQQVALAX

SEQ ID NO: 31437 - protein, 138 aa, Homo sapiens
MLLGHMSTVELLKKYHLMQFAEVTRAVSEGNLLLLHEALAKHEAFFIRCGIFLILEKLKIITYRNLFKKVYLLLKTHQLSLDAFLVALKFMQVEDVDIDEVQCILANLIYMGHVKGYISHQHQKLVVSKQNPFPPLST

SEQ ID NO: 31438 - protein, 75 aa, Homo sapiens
  misc_feature (1)...(75): Xaa = X or * as defined in Table 2
XDTSKATYRISIRSWWSASRTHFLPCPRGVESTRSPEDGGAVVSFHFGCADETGPVLQPRLPEAGTLGGAFPQGC

SEQ ID NO: 31439 - protein, 923 aa, Homo sapiens
  DOMAIN (884)..(916): HECT-domain (ubiquitin-transferase) domain identified by eMATRIX, accession number PF00632C, p-value=8.250e-26, raw score of 20.66
  DOMAIN (617)..(922): HECT-domain (ubiquitin-transferase) domain identified by PFam, accession name HECT, E-value=1.6e-179, PFam score of 609.8
  misc_feature (1)...(923): Xaa = X or * as defined in Table 2
XELFLPGICDPYVKLSLYVADENRELALVQTKTIKKTLNPKWNEEFYFRVNPSNHRLLFEVFDENRLTRDDFLGQVDVPLSHLPTEDPTMERPYTFKDFLLRPRSHKSRVKGFLRLKMAYMPKNGGQDEENSDQRDDMEHGWEVVDSNDSASQHQEELPPPPLPPGWEEKVDNLGRTYYVNHNNRTTQWHRPSLMDVSSESDNNIRQINQEAAHRRFRSRRHISEDLEPEPSEGGDVPEPWETISEEVNIAGDSLGLALPPPPASPGSRTSPQELSEELSRRLQITPDSNGEQFSSLIQREPSSRLRSCSVTDAVAEQGHLPPPSVAYVHTTPGLPSGWEERKDAKGRTYYVNHNNRTTTWTRPIMQLAEDGASGSATNSNNHLIEPQIRRPRSLSSPTVTLSAPLEGAKDSPVRRAVKDTLSNPQSPQPSPYNSPKPQHKVTQSFLPPGWEMRIAPNGRPFFIDHNTKTTTWEDPRLKFPVHMRSKTSLNPNDLGPLPPGWEERIHLDGRTFYIDHNSKITQWEDPRLQNPAITGPAVPYSREFKQKYDYFRKKLKKPADIPNRFEMKLHRNNIFEESYRRIMSVKRPDVLKARLWIEFESEKGLDYGGVAREWFFLLSKEMFNPYYGLFEYSATDNYTLQINPNSGLCNEDHLSYFTFIGRVAGLAVFHGKLLDGFFIRPFYKMMLGKQITLNDMESVDSEYYNSLKWILENDPTELDLMFCIDEENFGQTYQVDLKPNGSEIMVTNENKREYIDLVIQWRFVNRVQKQMNAFLEGFTELLPIDLIKIFDENELELLMCGLGDVDVNDWRQHSIYKNGYCPNHPVIQWFWKAVLLMDAEKRIRLLQFVTGTSRVPMNGFAELYGSNGPQLFTIEQWGSPEKLPRAHTCFNRLDLPPYETFEDLREKLLMAVENAQGFEGVD

SEQ ID NO: 31440 - protein, 356 aa, Homo sapiens
  DOMAIN (310)..(323): moaA / nifB / pqqE family proteins domain identified by eMATRIX, accession number BL01305C, p-value=6.906e-09, raw score of 11.88
  misc_feature (1)...(356): Xaa = X or * as defined in Table 2
XSPSLSAQRTQGPEPQRGRITGEGPSAPGRQGDPQGSGPSPGACCRAATLREGKAQGASQNRAPAPPPTSRSGPECCTRWTAYLRHEAWHQIGPRSRIAKPRREKEPWYTGLPNTKGIPRLRYEEGDPGHNGSGTAAGIRVRSAASQARAVWDPSARTPAPAKEPGMAQLERSAISGFSSKSRRNSFAYDVKREVYNEETFQQEHKRKASSSGNMNINITTFRHHVQCRCSWHRFLRCVLTIFPFLEWMCMYRLKDWLLGDLLAGISVGLVQVPQALRGQGPLCLFTIYPQPNIWYMTENASLRVYRSGETVLTTNGWLLHRVPCRELIEDGETPGAAALWEALKEKNWPNKGDAA

SEQ ID NO: 31441 - protein, 108 aa, Homo sapiens
LVISSSSVLHPYTLEVNFSPEGCKDSFENGEPRTNGIFSEWQTVYHFRGVNFMKENGSSLKKQPYMDPTGKTRTWESVKRTTRKEQTADGVAVIPVLQRTLHYECIVL

SEQ ID NO: 31442 - protein, 128 aa, Homo sapiens
  DOMAIN (33)..(57): 4 kw PHOSPHATASE TRANSFORMING 61K PDF1 domain identified by eMATRIX, accession number DM01111M, p-value=6.936e-22, raw score of 10.67
MAGDQVANVRFNVAKSLQKIGPILDTNALQGEVKPVLQKLGQDEDMDVKYFAQEAISVVAQRLRKLEFPVKDSGEPSVPRADKNHFPRPTVPGEDMGKGPVYQLRGDTRDTLAQLGIAELVHFSQSTD

SEQ ID NO: 31443 - protein, 290 aa, Homo sapiens
MSSERSQVFPVVGALETISDQDVGNSQVDTKRPDGVALSRAPRERHLSTTLGCPSFLCPVPHILVGCCWTPNSAGTTEGILAGKHRLRKLEFPVKDSGEPSVPRADKNHFPRPTVPGEDMGKPKETGTGIHPARCSLKEPGTYLNDLRCALLRLRRTKESARGQEEKGFSTSPDFFLALSHWISSPNFSAQTQTSTEPLHLFPRLFLQNGIWLLLRKTNNAGGTPHDYISRKGICFKRLRAIADNLLLKKLIFHWSSETVLVLTSSPGNSRKPPQGPDIVWQQCFALSTC

SEQ ID NO: 31444 - protein, 29 aa, Homo sapiens
MMGDHLQRETVSREELPSAESFRDLQTSE

SEQ ID NO: 31445 - protein, 206 aa, Homo sapiens
MAKCFIAQCDSPLYPKLLFGVQEESGHTNKLKGGWGGGKGQDGFGKGNIRAGKQECMFSLWAMGLGLRVWPSPGTTPSSTQYFPASCPYHMYKDESSTPGPLSYGNLFRLWEDRGEILKTVGNPRTGENVGIPGKSFRCLQVSEALSRRQLLSANSFSLKVVAHHLQLSVEYSSLQLVIPSSSALLWLSPGLLRTSERRKYMLIGP

SEQ ID NO: 31446 - protein, 414 aa, Homo sapiens
MKKALTVATSSFPTSALEGALGNAQPSIVCLVLFLPKLPGEARSPDPRAFGKDKSPRIFMGSNGASDFLGLLERLITSLSICSENVQKQNEIKRQRKKKTGKGSGFENCFQEVIVFRLVEQATVNPSGSSSMDETQGPLAMTVHLLANSGHGSLLQRTLDQLLDCICPEVRLFQVSERASPVKYCEKSHSKRSRFPGMSVLLFLHESPGEDRLFRVLDSLQHSPWQCYPTQDTRGRLCPYFFANQEFYSLDSQLPIWGILRATLYCSFDSYENAIRLYEMILQREATLQKSNFCFFALYASKSFALQLSLKQLPPGMSVDPKESSALQCKVQEIGQLVPLLPNPCMPISSTRWQTQDYDGDEILLQPGIRQGRQLAASSSEGYILHVDSKCLAPPWRNKMSGLQLDQLGSDSLL

SEQ ID NO: 31447 - protein, 68 aa, Homo sapiens
  misc_feature (1)...(68): Xaa = X or * as defined in Table 2
MKQKCHIIGNYDDDDDDDDDTLILDSISKLNNMSYEHQGSLFSRSLRSQLDGLLISVFNLSHPTQSQX

SEQ ID NO: 31448 - protein, 128 aa, Homo sapiens
  misc_feature (1)...(128): Xaa = X or * as defined in Table 2
MLLALAHEHPQLCVPGTETHGKWPFPRTNSGQSLRLPFSNSPEQKPRSPPLLLKTLNGQEALSNPHEPCTVPGAVPNGGSVETEKRRQQEAAATSFEKRWTVSKSLGGKKLKKDSTGPGVGTAGGLPX

SEQ ID NO: 31449 - protein, 86 aa, Homo sapiens
MFPGSNDSQAHPLGLCGWPSAGPASKSNPQGTGFQIFTSVYKNVTRNFKKTCVSPRLCLNTPNDESVWGRRTPPLNQQVGPTSPNQ

SEQ ID NO: 31450 - protein, 34 aa, Homo sapiens
MVRWGAPESSELNSCAATSAGWNAGRTASHTNPS

SEQ ID NO: 31451 - protein, 25 aa, Homo sapiens
MMLLHSCSVQRTRVLPTSPLITESG

SEQ ID NO: 31452 - protein, 63 aa, Homo sapiens
MPQVQPATVGRFFVERVFCNLWFGNLRGYEPVIQTSVQLLKREILQEASYHVVMVLKQSMKKD

SEQ ID NO: 31453 - protein, 157 aa, Homo sapiens
MAEALRILQMHCQEKESELRDAGAATGPGDPSLERSKEQLLSESEPPAQAEGGAGDIRGAGPSAPEVGAGEGECSEYHVLQGIELEAYWQLSVPQSRLLHHSGSSQMFSVLSSWSQRQLVSLELKGAGQKFVLQARSPEVSDGADNLRKAGLADTVD

SEQ ID NO: 31454 - protein, 110 aa, Homo sapiens
MRRNPFGVDICCRKGSRSPLQELYNPIQVQRRLAIRVDGFLGPSEEYGAFVPSLRFMLMPDVSPRSSFRKAINELEFEKKCDFFKELADTRGVQKQLTSNYSRSWGKGIE

SEQ ID NO: 31455 - protein, 161 aa, Homo sapiens
  misc_feature (1)...(161): Xaa = X or * as defined in Table 2
XQDKAMKPALLEVMRMNRICRMVLATCLGSFILVIFYFQSMLHPVMRRNPFGVDICCRKWSRSPLQELYNPIQLELSNTAVLHQMRRDQVTDTCRANSATSRKRRVLTPNDLKHLVVDEDHELIYCYVPKVACTNWKRLMMVLTGRGKYSDPMEIPANEAH

SEQ ID NO: 31456 - protein, 21 aa, Homo sapiens
MTRFLFVVVFFPGLIHFIFLV

SEQ ID NO: 31457 - protein, 174 aa, Homo sapiens
  DOMAIN (68)..(120): Ribosomal protein S5 proteins domain identified by eMATRIX, accession number BL00585A, p-value=4.558e-26, raw score of 28.43
  DOMAIN (71)..(170): Ribosomal protein S5 domain identified by PFam, accession name Ribosomal_S5, E-value=5.7e-40, PFam score of 145.1
  misc_feature (1)...(174): Xaa = X or * as defined in Table 2
XGFGSGIRHQGCGCGQGQGQGRGVRGGKAEYKEWMTVTKLGHLVKDIKIKSLEEIYLFSFFKTSSSLKDEVLKIMLVQKQTHTSQCTRFKAFVATGDYNGHISLGIKCSKEVATAICGAIILAKLSIVPACRGYWGNKISKPHTIPCKVAGCCGSVLVCLISVPRGTGIVLAPX

SEQ ID NO: 31458 - protein, 443 aa, Homo sapiens
  DOMAIN (246)..(298): Ribosomal protein S5 proteins domain identified by eMATRIX, accession number BL00585A, p-value=1.800e-25, raw score of 28.43
  DOMAIN (249)..(386): Ribosomal protein S5 domain identified by PFam, accession name Ribosomal_S5, E-value=5.3e-62, PFam score of 219.4
MSEYGRLHFPKNGHNSITGPTCFPPCCGLAFLNAVIPLAMASISSHSTWASLCDFLETRIWWKCHGVTCKTGFKKRRTLSFCEEPDRHVVRKPRHLNKGHMQVFWLIAPTRAPSQPLASIIRHIDNDVGSRNSHFPLNTKENNSANVMMYDNGQLGSYGVGMETCCRYQAIQREHGSFRGCGELEQPKLVVNGSLEERNPQRKRGFGSGIRHQGCGCGQGQGQGRGVRGGKAEYKEWMTVTKLGHLDEVLKIMLVQKQTHTSQCTRFKAFVATGDYNGHISLGIKCSKEVATAICGAIILAKLSIVPACRGYWGNKISKPHTIPCKVAGCCGSVLVCLISVPRGTGIVLAPVPKKLLMMTGINDCYTSARGCTATLGNFAKATFDAISKTYSYLTPDLWKETVFTKSPYQEFTDHLVKTHTRVSGQGLRLQLGLQHRGFNTEK

SEQ ID NO: 31459 - protein, 78 aa, Homo sapiens
  DOMAIN (1)..(70): Ribosomal protein S5 domain identified by PFam, accession name Ribosomal_S5, E-value=2.7e-34, PFam score of 125.1
CSKEVATAIRGAIILAKLSIVPVRRGYWGNKIGKPHTVPCKVTGRCGSVLVRLIPAPRGTGIVSAPVPKKPAHDGWYR

SEQ ID NO: 31460 - protein, 107 aa, Homo sapiens
  DOMAIN (1)..(102): Ubiquitin-conjugating enzyme domain identified by PFam, accession name UQ_con, E-value=6.6e-38, PFam score of 139.4
  misc_feature (1)...(107): Xaa = X or * as defined in Table 2
MQLYLGTFKLVIEFXEEYPNKPPTVRFLSKMFHPNVYADGSICLDILQNRWSPTYDVSXILTSIQSLLDEPNPNSPANSQAAQLYQENKREYEKRVSAIVEQSWNDS

SEQ ID NO: 31461 - protein, 79 aa, Homo sapiens
MIHNRQLLCESLALEDLPLRWLIHMAVCSRSQFITTWISPQDCLSVLTWQEVFLPVSIKNTKIRQGAVAHACNASTLGG

SEQ ID NO: 31462 - protein, 42 aa, Homo sapiens
HSHCGSGGGRRDPEAAEGDVIAGLFVSLGGGGGGGGGGGDPQ

SEQ ID NO: 31463 - protein, 363 aa, Homo sapiens
  misc_feature (1)...(363): Xaa = X or * as defined in Table 2
XESVEIVSEVRVEVGELNIIKDWGRESVEKGGAVISMEAERVKGQAMIATGGVITGLAALKRQDSARSQQHVNLSPSPATQEKKPIRRRPRADVVVVRGKIRLYSPSGFFLILGVLISIIGIAMAVLGYWPQKEHFIDAETTLSTNETQVIRNEGGVVVRFFEQHLHSDKMKMLGPFTMGIGIFIFICANAILHENRDKETKIIHMRDIYSTVIDIHTLRIKEQRQMNGMYTGLMGETEVKQNGSSCASRLAANTIASFSGFRSSFRMDSSVEEDELMLNESKSSGHLMPPLLSDSSVSVFGLYPPPSKTTDDKTSGSKKCETKSIVSSSISAFTLPVIKLNNCVIDEPSIDNITEDADNLKX

SEQ ID NO: 31464 - protein, 999 aa, Homo sapiens
  DOMAIN (836)..(879): kw TRANSCRIPTASE REVERSE II ORF2 domain identified by eMATRIX, accession number DM01354T, p-value=1.947e-35, raw score of 9.48
  DOMAIN (706)..(960): Reverse transcriptase domain identified by PFam, accession name rvt, E-value=2.5e-08, PFam score of 41.1
MLESKEEDVEVEKWSPLSLHLHTLKGYGQVQEARYSPKVIIEIWKMGVDWSTGLVLKAEQHSFAFGVMETGIRIRKKKTSNESKSGGPSPSQMGGSGNLIGRGRRKGGVKNNCKEPNLRTDPAKKVRQVKWCSWCVLEGESVEIVSEVRVEVGELNIIKDWGRESVEKGGAVISMEAERVKGQAMIATGGVITGLAALKRQDSARSQQHVNLSPSPATQEKKPIRRRPRADVVVVRGKIRLYSPSGFFLILGVLISIIGIAMAVLGYWPQKEHFIDAETTLSTNETQVIRNEGGVVVRFFEQHLHSDKMKMLGPFTMGIGIFIFICANAILHENRDKETKIIHMRDIYSTVIDIHTLRIKEQRQMNGMYTGLMGETEVKQNGSSCASRLAANTIASFSGFRSSFRMDSSVEEDELMLNEGKSSGHLMPPLLSDSSVSVFGLYPPPSKTTDDKTSGSKKCETKSIVSSSISAFTLPVIKLNNCVIDEPSIDNITEDADNLKSRSRNLSMDSLVVPLPNTSESFQPVSTVLPRNNSIGESLPSQYKSSMALVFVAGQLLSSGAARRQFGTYDSDDLRYITFQVRNASTRRHSSGFTKLKVEAATCLFVQLMPANFQAKKGATVVAGKIDPDYQEEMGLLLNEIPAKPLGLINLNVPALLAFKKKIMACPCSPPAGLLEHGPGDSSHSLHPVLRSSFFSVPTSLRTAPLLQDHGSTRLKGPKETNLEVPEKRVPVFVFSFLRDSGGLGLKGDVKGREINKVEEALSLYLASYYGALHSTVLYVLQTINAEKAFDKIQHRFMIKTPSKIGIQETYLNVIKAIYDKPIANIILNGEKLKAFPLRTETKQRCPLSSFVFNIVLEVLARAIREEKEIKGIQIGKQEVKPLLFADGMILYLENPKDSSKKLLELINSAVSRYKINVHKSVAVLYTNSDHADNQIKNSTTFTIAAKTKQNKIKYLGIYLTKEVKDLYKENYKTLLKEIIDDTNKWNTTHVHGWVKSIL

SEQ ID NO: 31465 - protein, 37 aa, Homo sapiens
IHANCRIRRVYFSDRLYSEDELPAEFKLYLPVQNKAK

SEQ ID NO: 31466 - protein, 30 aa, Homo sapiens
  misc_feature (1)...(30): Xaa = X or * as defined in Table 2
MFKNTLQSGFLSILYKHRQASLLQIWGQKX

SEQ ID NO: 31467 - protein, 159 aa, Homo sapiens
MTLEKVDATVFTDSRAFSSREYERPVQLLPWDRCAVGSGFTSKHLSAKAELMALTQALRWGKDNVLTFTLTAGAESVNLAADLDTLGAKLDVEAPKLRDQTDSILALSLAAPSSRLNLCKLTPSTSKNAINYKILWQAISAVPRNSSDDNAQSPGSITL

SEQ ID NO: 31468 - protein, 21 aa, Homo sapiens
MQLTDKILWQAISAVPRNSSD

SEQ ID NO: 31469 - protein, 106 aa, Homo sapiens
  DOMAIN (75)..(94): Eukaryotic  RNA-binding region RNP-1 proteins domain identified by eMATRIX, accession number BL00030A, p-value=8.714e- 13, raw score of 14.39
MGVLVEEAPMFPNQSAGLIETDDLEEDVSTTWHSNDDDVYRAPPIDRSILPTAPRAAREPNIDRSRLPKSPPYTAFLGNLPYDVTEESIKEFFRGKSSFQVQFCKQ

SEQ ID NO: 31470 - protein, 72 aa, Homo sapiens
MNAPKGQTGNSSRGPGDGGNRDHWKESDRYACSLSHLSSDPHVCVIKKLSSWFSEHCQIAHCEQTKVSQRRQ

SEQ ID NO: 31471 - protein, 193 aa, Homo sapiens
AVAEEHFGSGYRRDDDYREGGDRYEDRYDRRDDRSWSSRDDYSRDDYRRDDRGPPQRPKLNLKPRSTPKEDDSSASTSQSTRAASIFGGAKPVDTAAREREVEDRLQKEQEKLQRQLDEPKLERRPRKRQPSWRSEETQERERSRTGSESSQTGTSTTSSRSKSDQDARRRESEKSLEYETLNKGGRLPLSNF

SEQ ID NO: 31472 - protein, 198 aa, Homo sapiens
MRCQPIDRVPGIYQAPGSKHQIQEISKAKTSAAQDGDTGAYISSGGCGEGRSLGPSDCYQVTLCRQGSFGVFPEKLTKAKAYLGLGFLQELWLASSPRHTLTLHQVLEHVIKLKQQGLANLLSSIPDCKGGLSPRNISQRAVLTVISTLELYEGPGRKKALSPEEDNRPQTSPESDVLLHKSLLSSLWPKHPQGMVEA

SEQ ID NO: 31473 - protein, 68 aa, Homo sapiens
MEVRPSLTALFKIQCLEQCLVPSRQSANACLVSTCSVNGRSLLLGAFGFGSQMPASRVADTFNRSEVD

SEQ ID NO: 31474 - protein, 163 aa, Homo sapiens
MSFIQIKKQQSRLHSGPSSKFSKDFHWPMVIAQYMASSRSLAPRMRSSLALFGSQEQPMLFPWACMLFFTLYLMSPFIPASLRPISVITSWGTQPWFLPTLVQSPLAKGSRVLSFGSPDHHSLQVAGTTVLKETGARACGPIRADSRLGIFLLLRDQALTLHV

SEQ ID NO: 31475 - protein, 261 aa, Homo sapiens
  misc_feature (1)...(261): Xaa = X or * as defined in Table 2
XGCFEVLEGSPGPVERDRVVQRPWPAFETEGQEAGEIRESCRCVEEHAEPLEERLYLQSQLAGVCLHKDSLVTICSRFLAECEVKSRLTFGMEVVPGEQDKVLAFMEPVLHPPLMYVRVKQPSMHTYELRDCAQVNQPVTHAYELKEHGAETTVQVNQPLTLIYENRVHVQVYQPLIYTYELRVHVQVNQPLTQTYELRVHVQVNQPSTHTYEHRDHASPFSPGQKAVSWDFSDGERLRLYQRIHFLLPPVERSHSSKKPG

SEQ ID NO: 31476 - protein, 174 aa, Homo sapiens
MKVSLTPLGPLLRMLVLLGSVEVGMLVLASLTSLSLSLQDSNLRLAPMRLYTLSKRHFVLVFVVFFICFGLTIFVGIRETSIKTSFPMTVKVDGVAQDGTTMYIHNKVHNRTRTLTCAGKCAEIIVAHLGYLNYTQYTVIVGFEHLKLPIKGMNFTNIISYKPFMVLSTFLQKL

SEQ ID NO: 31477 - protein, 309 aa, Homo sapiens
MPPTEDGKGRGQKVLRTRRKQLQVVGQSGAGSQRRATCMDRRPAQETKRDLPKGCGTPDKNNGLHAGSHDWFSLSLGNSTHSELFQTPDIQVNKGMEQACVGFESIASPTDIPSSNLLDDVQARERTNSSPKENWRAAGRGKMHRKATECQTAIPRRHALTHKGHTISALVAFSTSSYSCGRKKKVNPYEEVDQEKYSNLVQSVLSSRGVAQTPGSVEEDALLCGPVSKHKLPNQDVFLQGKRFHEALESILSPQETLKERDENLLKSGYIESVQHILKDVSGVRALESAVQHETLNYIGLLDCVAEYQ

SEQ ID NO: 31478 - protein, 150 aa, Homo sapiens
MKMKLFQTICRQLRSSKFSVESAALVAFSTSSYSCGRKKKVNPYEEVDQEKYSNLVQSVLSSRGVAQTPGSVEEDALLCGPVSKHKLPNQGEDRRVPQNWFPIFNPERSDKPNASDPSVPLKIPLQRNVIPSVTRVLQQTMTKQQVFLLE

SEQ ID NO: 31479 - protein, 111 aa, Homo sapiens [sequence omitted]

SEQ ID NO: 31480 - protein, 54 aa, Homo sapiens
MSFLKITYTRVRLSLLTEEIWLYPESLKPLLQSRGSVPSRGCGAARARQRDLRS

SEQ ID NO: 31481 - protein, 84 aa, Homo sapiens
  misc_feature (1)...(84): Xaa = X or * as defined in Table 2
MGSRGKGQARLWVLATGESXAGLPLGEGPDPVVGVNRVFLDPVPGVSLSGQMDFTRGSVMLVASTLRLGRVGSQGGSSQRSLFH

SEQ ID NO: 31482 - protein, 626 aa, Homo sapiens
  DOMAIN (377)..(416): MSP (Major sperm protein) domain proteins domain identified by eMATRIX, accession number PF00635B, p-value=8.981e-26, raw score of 15.84
  DOMAIN (351)..(440): MSP (Major sperm protein) domain identified by PFam, accession name MSP_domain, E-value=1e-29, PFam score of 112.2
MDEAGSHHPQQTNTGTENQTLHVLTRKWELNNENTWTHQSDDCNDLIVEYHKPNQAAALLQLPNRAVLLLKQIIKTSVEVDHRKGLHPHGLYVEWAEEEDKGGVGLAVSGVAEMGENSPLYNSSKSTILLIFDQITNRNNESCRGHGLSLFVPFVYDRLPLRGTGQGASLVVQSSGVLMLVGLFLFASMLWHWQTSHLEGAEERSTESEKSRQCARRGRHVGRRGSQVRVAVAAGVGLSQLWDPELLTQRVAHRTGDTAAGVRAREPRAWPRPRARPSRRRRRPPPPVSKPPPRARPRSALSLRWRPPQGPWRSTSRSWSSIRPQTSNSKVMDEYLYDQNNTTLYENGVKEVKDMVPSGPFTDVVTTNLKLRNPSDRKVCFKVKTTAPRRYCVRPNSGIIDPGSTVTVSVMLQPFDYDPNEKSKHKFMVQTIFAPPNTSDMEAVWKEAKPDELMDSKLRCVFEMPNENDKLGITPPGNAPTVTSMSSINNTVATPASYHTKDDPRGLSVLKQEKQKNDMEPSKAVPLNASKQDGPMPKPHSVSLNDTETRKLMEECKRLQGEMMKLSEENRHLRDEGLRLRKVAHSDKPGSTSTASFRDNVTSPLPSLLVVIAAIFIGFFLGKFIL

SEQ ID NO: 31483 - protein, 65 aa, Homo sapiens
  misc_feature (1)...(65): Xaa = X or * as defined in Table 2
MFPMPSQGITAPGNAPTVTSMSSIYNTVATPASYHTKDDPRGLSVLKQEKQKNYMEPSXAVPLNA

SEQ ID NO: 31484 - protein, 121 aa, Homo sapiens
  misc_feature (1)...(121): Xaa = X or * as defined in Table 2
XAEMHGTYFEAEDSISDHTTHSPVRIMPDTQQALHKHDYRYSFTIKEERGEGAHAKDKPASALDIVHRASEQCLSEKPDSGVPITSTASGATRQKPASDNPSVIVKTPVILLSSQKLLVAG

SEQ ID NO: 31485 - protein, 78 aa, Homo sapiens
MNLFSFLSSLFVIVSSIIPLAFMDRVMISRFVSQTLRSSVSFRLTDPTVYSAWHQHPSCWILQILLPRCHSVVCLGTD

SEQ ID NO: 31486 - protein, 147 aa, Homo sapiens
  misc_feature (1)...(147): Xaa = X or * as defined in Table 2
MRTVQRRVVQRENSKCKGPEVRVCLECSGNINGTAKWYLGEEKLTAEEPWRCQHAVLSLCFEWLTDSPIKTQPETGLLIEASGASPPALLPLPLLSHHKEIILPPFSSQYASGRKWRGESERASGPHAESLEFKTEKPSQWWWWYSX

SEQ ID NO: 31487 - protein, 198 aa, Homo sapiens
MTSHINICSKLGAELNDFAVFTTFGLASALLLGVDGLLSGILAIIYVSAASFHLCFYSPGVPSTYKGLPCPYASCILASTSLLTKGNRFILCCMASLMILFMMDQSYYPYDKILESENWKKLVYIGDVKLQKYLCTFEKLGMDHIRMREFWAECFSTTRIYPRLRDVNTSSSQLRIFPDNDHVFPGYVKSENISHETI

SEQ ID NO: 31488 - protein, 48 aa, Homo sapiens
MHPIVKNFSSLQHVYVQYLTDDYKKSHEVIQGDGLFSSFLQMQRLRCQ

SEQ ID NO: 31489 - protein, 209 aa, Homo sapiens
MEEQRVRSISGPSVCREIHQSYRGLVMRGPIIGLSAHVYVQYLTDDYKKSHEVIQGDGLFSSFLQMQRLRCQAKHQSTLEGLTKRMLMFDPVPVKQEAMDPVSVFRVIHRLAIQVYSFIQILNKNTEQVRARDIIAAVRVAFSTKDKLRARAWNDGTPGVLHGNSVQRLVKPAETSSSKMQSKCENFGSLGEKNSLVWKLSGTGTRSYK

SEQ ID NO: 31490 - protein, 75 aa, Homo sapiens
  DOMAIN (45)..(68): METABOTROPIC GLUTAMATE GPCR SIGNATURE domain identified by eMATRIX, accession number PR00248E, p-value=9.493e-09, raw score of 17.85
MAPSSAQVLERLQGVLLMAEDKVGAASSPIVGKRETEILPVTEHMRMRQLLGVTGFLWVLCEEYAFIPVSGRGEE

SEQ ID NO: 31491 - protein, 128 aa, Homo sapiens
  DOMAIN (90)..(101): Acyltransferases ChoActase / COT / CPT family proteins domain identified by eMATRIX, accession number BL00439G, p-value=9.719e- 11, raw score of 13.40
  misc_feature (1)...(128): Xaa = X or * as defined in Table 2
XGEAKPNAFIQMALLLAYYRIYGQACATYESAWLRMFHLGRTDTIRSASMDSLTFVKAMDDSSVTEHQKVELLRKAVQAHRGYTDRAIRGEAFDRHLLGLKLQAIEDLVPAKTDCVMFFGPVVPDGYX

SEQ ID NO: 31492 - protein, 79 aa, Homo sapiens
MTFHINIIQQGGGRNQAEWNQRRLASNVIHRSTAATEVKPHTLAPRPRQSCLQVLGVWEAGYRWWPGHGVGREWPGLSW

SEQ ID NO: 31493 - protein, 36 aa, Homo sapiens
MNQYYQILSSCRVPGPKQDTVSNFSKTKKPPTHITV

SEQ ID NO: 31494 - protein, 44 aa, Homo sapiens
MPRVSEDVYRSHFIVAEDGSCGLVYEHAAAEGPPIVTLLDYVID

SEQ ID NO: 31495 - protein, 506 aa, Homo sapiens
  DOMAIN (262)..(291): Acyltransferases ChoActase / COT / CPT family proteins domain identified by eMATRIX, accession number BL00439E, p-value=2.440e- 24, raw score of 19.05
  DOMAIN (25)..(474): Carnitate acyltransferase domain identified by PFam, accession name Carn_acyltransf, E-value=2.4e-94, PFam score of 326.9
VKPLGFLKPFSLMKASSRFKAHQDALPRLPVPPLQQSLDHYLKALQPIVSEEEWAHTKQLVDEFQASGGDFLDLHGQLRFAAKLIEGVLDFKVMIDNETLPVEYLGGKPLCMNQYYQILSSCRVPGPKQDTVSNFSKTKKPPTHITVVHNYQFFELDVYHSDGTPLTADQIFVQLEKIWNSSLQTNKEPVGILTFNHRNSWAKAYNTLIKDKVNRDSVRSIQKSIFTVCLDATMPRVSEDVYRSHVAGQMLHGGGSRLNSGNRWFDKTLQFIVAEDGSCGLVYEHAAAEGPPIVTLLDYVIEYTKKPELVRSSHGSTDRHVPPMKVPPCACFTWGRTDTIRSASMGLTSPLSRPWDDSSVTEHQKVGAAAGRPLQAQPRVTPTGAIRGEAFDRHLLGLKLQAIEDLVSMPDIFMDTSYAIAMHFHLSTSQVPAKTDCVHVLRARGPRTADGVLLMNPMGGPHQLLPVGLQQLRGDQRRPPGALPGEGAPGHACPAAEPPPGQALSP

SEQ ID NO: 31496 - protein, 191 aa, Homo sapiens
MVEVELEIRKVGALCVGVKGHKGTLRGGRNGLHPEVFLVHTVVAIYGTVHKAGLTMWGNSSGIRMEFLNIVEERCGKFLKKKKLFNKCTVATQQEKCLLPLHWALGLEEETWVPVTAPLSPAVTFPVRALGREGQQLGSYPMLPEPGGPEPAVQGTSVHCTRESLCHSSCLALEEQMSARALWEASDQNQL

SEQ ID NO: 31497 - protein, 27 aa, Homo sapiens
MSLEKPSLAFPFLQINRKLGQVILYDI

SEQ ID NO: 31498 - protein, 368 aa, Homo sapiens
MLYWLMPKGKLLWIASFLTRLQGIQHTLPRVEEKSIQSVKDDNIYHPHPRPRIAVVGSSSTVISYSPGEYAFTNGTSRCPSLSLAAGPRLITNGPWEAHEVQRESTIALMKLLQVLEQKVRLREGHSLGTVKMSKNINPMGHVSNPPTSYPDELITKQVCPGSHPKRPGEVKHNEEVPTSQDRDTCTTQETQYSVRKIISAEDDFTVKNYNHIRNKFTIPSRKGQQAHRAWLNKAIPQPMPTSATSLLAALVRAAKHRNQQPQDLAQSSSHHIYLFITITFGSLRDSELKSKRGPDPQLSLELEMVAKAKAVKPENSRRWFSGNQLGSIINSPKKGSAVLEGTFQEKQKWDARLTKGDCLATNVLNRV

SEQ ID NO: 31499 - protein, 46 aa, Homo sapiens
MAAAGLLPPHLLLPGEVAAASAAIAATGTSAAARELGLSRPTLPRP

SEQ ID NO: 31500 - protein, 140 aa, Homo sapiens
  misc_feature (1)...(140): Xaa = X or * as defined in Table 2
MPKLLKWNYEGGACWGNLWKLPNVERLCFSEATVFRSAAQCLVVGLGLLLVSRACSHEDAIEWRGDSSVVNIVEDGSNAKDESKSNDTVCKEDCEESCDVKTKITREEKHFMCIFHNVQSLGTVCGEKGIDVNTMVDAGX

SEQ ID NO: 31501 - protein, 245 aa, Homo sapiens
MPKLLKWNYEGGACWGNLWKLPNVERLCFSEATVFRSAAQCLVVGLGLLLVSRACSHEDAIEWRGCRLHFDPLPHELPDGQRTGDQEGKKMATKSHFHRSIEPSTYTTLQSVRVIQFFLHTGQGFSMHWSTKNILEIGDKGDKKTELTWKEKTLISDKTEDDYTTPSLPTKSFGNTKAPRHGRGRVGLDSPSSRAAALVPVAAMAAEAAATSPGNSRWGGSNPAAAILTTTDGASLTTETWEELQ

SEQ ID NO: 31502 - protein, 369 aa, Homo sapiens [sequence omitted]

SEQ ID NO: 31503 - protein, 166 aa, Homo sapiens
MATNIPCEVVAFSDRKLKPLIYVYSFPGLTRRTKLKGNILLDYTLLSFSYCGTYLASYSSLPEFELALWNWESSIILCKKSQPGMDVNQMSFNPMNWRQLCLSSPSTVSVWTIERSNQEHCFRARSVKLPLEDGSFFNETDVVFPQSLPKDLIYGPVLPLSAIAGL

SEQ ID NO: 31504 - protein, 42 aa, Homo sapiens
MVKTASRGKRTVLKNPYRFGTCRHMEEYYLTKKAKGKRCSLF

SEQ ID NO: 31505 - protein, 69 aa, Homo sapiens
  misc_feature (1)...(69): Xaa = X or * as defined in Table 2
MKVLQARKNYTSTELIVEPKEPSNRTGINLSGFGRNSLAKIQTVGQNRQRVKRVLIGPKEHPEKALQRX

SEQ ID NO: 31506 - protein, 264 aa, Homo sapiens
  misc_feature (1)...(264): Xaa = X or * as defined in Table 2
MAPPLCPPRAPQAAAEPARAPCGARTPGTRPGTRAEKQNGCVGLQSTVSAECLSPLHYCKVEKRILNHNPLTTVEDPYLFKLPALKYLDMGTTLVPLTTLKNILMMTVELEKLGPPFIAFSCDGSTNTAEEASVGNPEGAFMKVLQARKNYTSTELIVEPEEPSDSSGINLSGFGSHLMKLLSGQQEVKASKIEWDTDQWKIENYINESTEAXEYVVTEGHYKKMKKDSQGAFSDFCHGGDALREGRVRDSEAPTEEEESEALP

SEQ ID NO: 31507 - protein, 113 aa, Homo sapiens
  misc_feature (1)...(113): Xaa = X or * as defined in Table 2
XDQFEIQLTQQLQSLIPNNNVRRLIAHVIRTLKMDCSGAHVQVTCAKLISRTGHLMKLLSGQQEHMYKPLSATRINNHAWKLHKKSSNEDKILNRDPGDSEAPTEEEESEALP

SEQ ID NO: 31508 - protein, 62 aa, Homo sapiens
MTSKASTYRSARLGLGAVLPQLVGDNLLTVCAVSCTVHYLQGWYCCPQGRECCPQRASHLYS

SEQ ID NO: 31509 - protein, 217 aa, Homo sapiens
MTSESPEVKSCEPTTNHRETIRVDEQRKKSSRPTTTDFSQHKFLPGDNATWNCESIKSLFVDKLPSFGYVFITSVNTDKYILDEPGGPNAIKRVIVRGKQEGDKSHRNPSGCVALRGFGQGYLLNNVELFDITTPGYSHSGSINGWLFVDSILFPGDSSTTPADNGQCMTQHRLTHTSTSSEKDVGASLCGFLSPPLVLGKVTALSIVNERSISRNT

SEQ ID NO: 31510 - protein, 1097 aa, Homo sapiens
  DOMAIN (456)..(476): Phospholipase D Active site proteins motifs. domain identified by eMATRIX, accession number PF00614B, p-value=4.774e- 14, raw score of 14.45
  DOMAIN (613)..(714): Sodium:sulfate symporter transmembran domain identified by PFam, accession name Na_sulph_symp, E-value=6.1e-46, PFam score of 163.9
MGICKDDLAPSLGRADEVFLLQPAHIPWQVAEVAEACVQPAHWSGDVDTLADMVVKTAQPGDHILVMSNGGFVTFRASFQYLYRQRRIEAGTAADIHFPKAQEEIHRTLNTHEIVRIRSPNWHIDHSTIFYPIEHYENRDVSVDGAEKRGVLYCRIVPPMTGKAIHVIALAMLAEWVNELPDGEPVLVAGDFNDWRQKANHPLKVQAGLDEIFTRAHGRPARTFPCGDSFMKCSWREGNKIQLLENGEQYYPAVFKAIGEAQERIILETFIWFEDDVGKQLHAALLAAAQRGVKAEVLLDGYGSPDLSDEFVNELTAAGVVFRYYDPRPRLFGMRTNVFRRMHRKIVVIDARIAFIGGLNYSAEHMSSYGPEAKQDYAVRLEGPIVEDILQFELENLPGQSAARRWWRRHHKAEENRQPGEAQANGYAVVRFGRLSGYYLVKGGVQVFEYRRRPLHGKVALMDDHWATVGSSNLDPLSLSLNLEANVIIHDRHFNQTLRDNLNGIIAAGLSAAKKILTWLFFIAVIVLLVVYAKKVDWEEVWKVIRDYNRVALLSAVGLVVVSYLIYGCYDLLARFYCGHNWRRLCMPVRSTLLDPQRVDTDWPCIAQLSEVINATAVGLLAVSLMLALHVVPWKDITRYNSAWNTLVNLATLVVMANGLTRSGFIDWFAGTMSTHLEGFSPNATVIVLVLVFYFAHYLYASLSAHIATMLPVISASSARHRMCSSPETGLSLETAAKLSEVMPGAGGRSCLERYEYAKHGACFGFDPDAYFGTMVRLNQEIKESERGKFLADNYGKTVSRRDFDAAFANFKGYYWYNFMEYIENINACDDVFSEYCFDDENISVQPERINTPGISDLDSDIDLSGISFIQRETNQALGLKYAPVDGDGYCLLRAILVLKQHDYSWALVSYKMQKEVYNEFIKMVDKKTIEALVDTAFYNLREDVKTLFGVDLQSDNQIQGQSSLMSWSFLFFKKQFIDSCLNNEKCILHLPEFIFNDNKNLLALDTDTSDRIKAVKNFLVVLSDSICSLFIVNSNVASISLGNESFSTDEDLEYGYLMNTGNHYDVYLPPELFAQAYKLNNKEMNAQLDYLNRYAI

SEQ ID NO: 31511 - protein, 280 aa, Homo sapiens
  DOMAIN (226)..(246): Phospholipase D Active site proteins motifs. domain identified by eMATRIX, accession number PF00614B, p-value=4.774e- 14, raw score of 14.45
  DOMAIN (108)..(248): Phospholipase D. Active site motif domain identified by PFam, accession name PLDc, E-value=7e-10, PFam score of 46.3
MKCSWREGNKIQLLENGEQYYPAVFKAIGEAQERIILETFIWFEDDVGKQLHAALLAAAQRGVKAEVLLDGYGSPDLSDEFVNELTAAGVVFRYYDPRPRLFGMRTNVFRRMHRKIVVIDARIAFIGGLNYSAEHMSSYGPEAKQDYAVRLEGPIVEDILQFELENLPGQSAARRWWRRHHKAEENRQPGEAQANGYAVVRFGRLSGYYLVKGGVQVFEYRRRPLHGKVALMDDHWATVGSSNLDPLSLSLNLEANVIIHDRHFNQTLRDNLNGIIAAGF

SEQ ID NO: 31512 - protein, 451 aa, Homo sapiens
  DOMAIN (7)..(207): Bacterial extracellular solute-binding prot domain identified by PFam, accession name SBP_bac_5, E-value=3.1e-26, PFam score of 96.9
MKHSVSVTCCALLVSSISLSYAAEVPSGTVLAEKQELVRHIKDEPASLDPAKAVGLPEIQVIRDLFEGLVNQNEKGGDCPRRCDSVENWQRLVDPKTLSPFAWFAALAGINNAQAIIDGKATPDQLGVTAVDAHTLKIQLDKPLPWFVNLTANFAFFPVQKANVESGKEWTKPGNLIGNGAYVLKERVVNEKLVVVPNTHYWDNAKTGILYGWCCVNRAERFLAYLQAYTSTFAEVQVLRSMYQQAVSQADIVGLCVGTRPDCVPDAVLDLLCEYKDQGYEVWLELGLQTAHDETLHRINRGHDFACYQRTTQLARQRGLKVCSHLIVGLPGEGQAECLQTLERVVETGVDGIKLHPLHIVKGSIMAKAWEAGRLNGIELEDYTLTAGEMIRHTPPEVIYHRISASARRPTLLAPLWCENRWTGMVELDRYLNEHGVQGSALGRPWLPPTE

SEQ ID NO: 31513 - protein, 309 aa, Homo sapiens
MHRLALDNLAEMGPQKLRVLDAGGGEGQTAIKMAERGHQVILCDLSAQMIDRAKQAAEAKGVSDNMQFIHCAAQDVASHLETPVDLILFHAVLEWVADPRSVLQTLWRECRKRKNGRFRQIIHATRRRFICGWKKLVGKLWTIATGSERIVLSIRLDLLELRCTIKHRTICCQAFTPVMAFPGFVIVCGGTCERDNQFFDNRKTKAYGPHWIYRNFRASGFQYYGSAPSVRLLPRFFRLPVFFSVFVGRVFARFAVAPGALAVSVASLRVLVGCSVSVVVLVAVVVLRGNVVQGQLARIVFDGCILHIA

SEQ ID NO: 31514 - protein, 1322 aa, Homo sapiens
  DOMAIN (332)..(373): Phosphorylase pyridoxal-phosphate attachment site proteins domain identified by eMATRIX, accession number BL00102D, p-value= 3.531e-10, raw score of 16.77
  DOMAIN (241)..(355): Carbohydrate phosphorylases domain identified by PFam, accession name phosphorylase, E-value=7.4e-10, PFam score of 33.0
MSGVDGVSIATCDFAQEEYDTLFGEVVSAAQTHGYLSKAAGSLMMITQYVASFRFFIKPPIWGAISASQIACQVLVESASMTQLHYRSCALTVSALTRIFKSVDAREPACRLASSGADQSESRLLDMTAAWIEIANTISSVSRRGCNSSVLKQQSPSFRQHECGYRNGYGDFVGFIKNGGYRGTISCAMGMAARQFCATSASAGSTSARRLDSAADTVRRHLPARRYRGRIFILLFGCTDSLKAYDINLTDLLEEGSTRRWVTVVWDVWRRAPRLNGNCRSVCDGLRSNYQYGLFRQSFVDGKQVKRRMTGIAVTTRGSATRSTGCAAWHQCGKTDHSSYPNDNHTAGPKLRLIQNTSSSACSVTDTPPQPESAISAESSPASGPLFSVADARLPRPCQQFPSVVMAGRAVTSGVQRLRQPMLIAFPVHADYDNPLRIASHKPTGMDIQSGATVARVMPFSATTAQCCAYAVGESLLGCQLLVDIQRGEMQVIISCFSSSSTFLSTNHSRYFLANHNCLAFKFPVIIFGIIDASTHAALLTRVRGLRRQPRHLVVTHFAVKQNRRMLVRVRDLIRTCPRLCERIEPSGTGNRALSLHSSRYSYRYWQEMVLNIRPRKFLRLRINPPASKWLLAPTQCRQTATPHRFSAGSTTQGRGRQSGSSSSPDRVLAPSYRDQRIATDVAHAVDQRRSTRPLPRPHSMRRLFINGQVPFHRPSCSVYPVAGCQGSGHLGAEVKAIVRAPASSSSTEQLHAVVTLEDPPVARLRISPPLKMVRRRCLSCMQAERELVQDCRSLALLRCVVFRRYRLAVRILRDVPGRCRRSFERDGDEKSTGVEASIQRNRFDDQRLNELSEQDVKARMLAEQKVEARVCWKVCTARWLLMPRVKRRRTERRYRYFGNVRELVFRSLCNRTSFAFAGMTPAMAKLCDRRRCCIFSFSRTSFRNGKFDPVSTVLAFSPFCWLGISINSFVIASAPITLNSREIVEGLRFSAVAIAQCSFWLTNQLVSPRAQTCQEGVSLNSGYLRKNRPEKPDGDGLYYAVSPNIRANWRVSLARSMNHYPSATPLETTEDVAEAAFHRSQHDVLYCSLLKPPRTRTRQSTIADCFLSRPSACMCPFRWRYSRFSLSNSAFWRMIRSPITWCIRRAHPYHQCDDCGGHPSSIGSSENDVQLRTRHPEKRLTKLTPHPRAIRARAYPLFCPSIFNGFFEEFFSIVFLPSRRWSSLICSWRQQVQRQEQPVLRRRSSKTSFLATRQPGGHPCLMKKLSAITNRCFSPRVCVAVRNCSPSPDRKASPVNAKCFYPLQIQGIERLKSAVCNSFCI

SEQ ID NO: 31515 - protein, 1390 aa, Homo sapiens
  DOMAIN (1346)..(1385): tRNA synthetases class II domain identified by eMATRIX, accession number PF00152D, p-value=5.875e-34, raw score of 21.30
  DOMAIN (53)..(445): Phosphoenolpyruvate carboxykinase domain identified by PFam, accession name PEPCK_ATP, E-value=1.4e-114, PFam score of 394.1
MELGRGIKGLIGHTQSCRLAARTVANRIAEDLKHGAGRLHRLQSAFQRSPEEDTNVVRHNVPGAAHSRTRFRTFSGIAGGWITTQLAIKKRQCTRACIKQTAFMDSMKSDMGGAATVTGALAFAITRGLNKRVKLFLCCADNLISGNAFKLGDIITYRNGKKVEVMNTDAEGRLVLADGLIDASAQKPEMIIDAATLTGAAKTALGIASMHCSANVGEKGDVAVFFGLSGTGKTTLSTDPKRRLIGDDEHGWDDDGVFNFEGGCYAKTIKLSKEAEPEIYNAIRRDALLENVTVREDGTIDFDDGSKTENTRVSYPIYHIDNIVKPVSKAGHATKVIFLTADAFGVLPPVSRLTADQTQYHFLSGFTAKLAGTERGITEPTPTFSACFGAAFLSLHPTQYAEVLVKRMQAAGAQGLSGLTLAGTALANVSRLKIPRHYRRHPHESDTPHPGEQYHGETTTQAERETHRPKPQPTKKPKKAGGPTRQSKDRRPKLKPTATGKCGTRHAAKPAQDDATEAEHKQTTVEHTTRNPRNARQTPPDNAPHNHQEGTTWAIAFYRFFRRTQIAIGLKTRIQGWTNIQGGLTWPDSDHSRDQRPDRRPVNFPVEPEALDAQAGTFLNQVIPRQRLLNAVHPAVVDGFRHLFLTLHLSFIWMVRAAMRLSPHHPMGGWTLAGKANTELQADDHWQDFAASSADRSADTRARNTQATVCRLHVHRSTHQTMDRSKTSPARRTDKGDVTPANARILPRTTAPVRLLMPGHVYRALYPCPLHGISEDDAIASIHRIFKNDAAPEDIAAIPPPAGHHGPFAMVNNMTDLTAQEPAWQTRDHLDDPVIGELRNRFGPDAFTVQATRTGVPVVWIKREQLLEVGDFLKKLPKPYVMLFDLHGMDERLRTHREGLPAADFSVFYHLISIDRNRDIMLKVALAENDLHVPTFTKLFPNANWYERETWDLFGITFDGHPNLRRIMMPQTWKADQSQTGSGDGSPDLQTGRVGDEARHRKRGLHVPQTRVETTGGARAIRNRGNSNGKTWRLVQKWVTPGGRHSGTPACTTTRLAVETRAATRVNSGTEAVLRSTPTAFTQSSTTASSLLGQLRLADVMLILTYADRFRIDFHQLRQRILQTAGDRHRATQRNVEIRELLCSQLGSRVNRRACFADDYFLRGHFRELLLHIEIETLSFAGSCTVTDRYQFNVMLFTQRSNGHRCFCGLSGVRVNGVGRHQFASGIDHRHFYPSTQTRIEAHRCTPSGRGRHQQIVPLRARRDALSHLIQPTFITEYPAEVSPLARRNDVNPEITDRFEFFIGGREIGNGFSELNDAEDQAERFQEQVNAKAAGDDEAMFYDEDYVTALEYGLPPTAGLGIGIDRMIMLFTNSHTIRDVILFPAMRPQK

SEQ ID NO: 31516 - protein, 728 aa, Homo sapiens
  DOMAIN (62)..(85): Dihydroxy-acid and 6-phosphogluconate dehydratases proteins domain identified by eMATRIX, accession number BL00886F, p-value= 4.273e-21, raw score of 13.15
  DOMAIN (150)..(324): KDPG and KHG aldolase domain identified by PFam, accession name Aldolase, E-value=3.2e-56, PFam score of 200.2
MAYSWGGYESLILANQPEHIAAIRPQGEIDFSGTLIRLHIGLEDVDDLIADLDAGKVPSAIHVTPEAYDGGLLAKVRDGDIIRVNGQTGELTLLVDEAELAAREPHIPDLSASRVGTGRELFSALREKLSDDKFVIRREKTLMKNWKTSAESILTTGPVVPVIVVKKLEHAVPMAKALVAGGVRVLEVTLRTECAVDAIRAIAKEVPEAIVGAGTVLNPQQLAEVTEAGAQFAISPGLTEALLKAATEGTIPLIPGISTVSELMVGSGKSQTRQRFIKLNFQSMGINCGDAKLVRRSFTINNRLCVVDSRQRGKPCKWRQCFWVHQTLPAVDKILRRYRCAIRPFCVIAQGKSPDTTFKQIANDLNLWQAHGFSGIQRRRLIFNVAHQLLLLCQYCAARNFCSIRKRNAADQQRTTHGLIYMGNNGEELKAFNVRDGYGIRVRSPLILKSLSLPGERLNCDLLEKLAIAPENVAYVGDDLIDWPVMEKVGLSVAVDDAHPQALNIARQFGCSDDAFIHRAEMFLKELWMPEIQPDGVLPQDDSFMAKPAINLAKYKAAAGKQTILLDYSRAEVNEMQILKQADVVMLNYMLPEQFSAASCLANLQFYEPRTIHDSSLSKAIHGIVAARCGLLTQSYQFWREGTEIDLGADPHSCDDGIHAAATGAIWLGAIQGFAGVSVRDGELHLNPALPEQWQQLSFPLFWQGCELQVTLDAQRIAIRTSGAVSLR

SEQ ID NO: 31517 - protein, 315 aa, Homo sapiens
  misc_feature (1)...(315): Xaa = X or * as defined in Table 2
XPLGEKVNASWGISGDGKTAFIEMAAASGLELVPAEKRDPLVTTSRGTGELILQALESGATNIIIGIGGSATNDGGAGMVQALGAKLCDANGNEIGFGGGSLNTLNDIDISGLDPRLKDCVIRVACDVTNPLVGDNGASRIFGPQKGASEAMIVELDNNLSHYAEVIKKALHVDVKDVPGAGAAGGMGAALMAFLGAELKSGIEIVTTALNLEEHIHDCTLVITGEGRIDSQSIHGKVPIGVANVAKKYHKPVIGIAGSLTDDVGVVHQHGIDADFSVLTSIGTLDEAFRGAYDNICRASRNIAATLAIGMRNAG

SEQ ID NO: 31518 - protein, 410 aa, Homo sapiens
  DOMAIN (267)..(294): Phospholipase D. Active site motif domain identified by PFam, accession name PLDc, E-value=6.7e-07, PFam score of 36.4
MGAHEVHPLHVENWPDTSHYEFLADTMWSDFAYGRNAVYPEGITATPYCRVIPLNIMRIAMFRSMRGVLYCRIVPPMTGKAIHVMCVHLGLREAHRQAQLAMLAEWVNELPDGEPVLVAGDFNDWRQKANHPLKVQAGLDEIFTRAHGRPARTFPCGDSFMKCSWREGNKIQLLENGEQYYPAVFKAIGEAQERIILETFIWFEDDVGKQLHAALLASKPNAGRKVLLDGYGSPDLSDEFVNELTAAGVVFRYYDPRPRLFGMRTNVFRRMHRKIVVIDARIAFIGGLNYSAEHMSSYGPEAKQDYAVRLEGPIVEDILQFELENLPGQSAARRWWRRHHKAEENRQPGEAQVLLVWRDNEEHRDDIERHYLKMLTQARREVIIANAYFFPGYRFLHACVKRHGAGVGSN

SEQ ID NO: 31519 - protein, 701 aa, Homo sapiens
  DOMAIN (608)..(663): Respiratory chain NADH dehydrogenase 49 Kd subunit proteins domain identified by eMATRIX, accession number BL00535A, p-value= 1.000e-40, raw score of 22.06
  DOMAIN (505)..(562): Respiratory-chain NADH dehydrogenase, 3 domain identified by PFam, accession name complex1_30Kd, E-value=1.2e-31, PFam score of 118.5
MLAQRARGEEEAHHHSSPEGAIEVDESEVDLDAISAQSLRLVRSILMLIALLSVIVLWSEIHSAFGFLENISLWDVTSTVQGVESLEPITLGAVLIAILVFIITTQLVRNLPALLELAILQHLDLTPGTGYAITTITKYLLMLIGGLVGFSMIGIEWSKLQWLVAALGVGLGFGLQEIFANFISGLIILFEKPIRIGDTVTIRDLTGSVTKINTRATTISDWDRKEIIVPNKAFITEQFINWSLSDSVTRVVLTIPAPADANSEEVTEILLTAARRCSLVIDNPAPEVFLVDLQQGIQIFELRIYAAEMGHRMPLRHEIPQLILAGFHAHGIDMPFPPFRCVWKASTVNKRGDGERRPLSWVVGDQGVYRANMQSEREPSAVNALPHHGPFAMVNNMTDLTAQEPAWQTRDHLDDPVIGELRNRFGPDAFTVQATRTGVPVVWIKREQLLEVGDFLKKLPKPYVMLFDLHGMDERLRTHREGLPAADFSVFYHLISIDRNRDIMLKVALAENDLHVPTFTKLFPNANWYERETWDLFGITFDGHPNLRRIMMPQTWKDYPARATEFSPFELTKAKQDLEMEALTFKPEEWGMKRGTENEDFMFLNLGPNHPSAHGAFRIVLQLDGEEIVDCVPDIGYHHRGAEKMGERQSWHSYIPYTDRIEYLGGCVNEMPYVLAVEKLAGITVPDRVTSFAYALLQCSA

SEQ ID NO: 31520 - protein, 579 aa, Homo sapiens
MRTVRIDEWHAGHNLIAIELQTIRKAPCADGWFGPSSVREQFGEGRYVQVVFASATFSMMSRLRSIEINGRKRKNPRQESLDNARIAAGFRLLAFELMQTLNWNYRKSPVDCPQYRDLSNRAASAGLHCLTQRRGLVIFREQIFHHQIRVQRRNTVHRETANHTQAHWSIAASGAAFYRQYGCRLIENFGQFFRIDALLFGRKKSPSLNLLATSGGTKNIVAICMFAALAGINNAQAIIDVIHLGSNRSLAQAAYPGSVRADLMNPYLALLRVEFTVPGLLPAARVAAIFVKHGRYCHKPRGMLRPRTYAGQYAEDRINAMLSTTPTSSVRLPAMPITGYGTSSPRLRHQSVPSRNTLAVNTPFTGDHQRTTLANQRVSGASGPGQVFPGFKTEGISLDKSGPSKRYRVTPVLAFWNVSWNICLGGVIQPANKGYTRVDHHNLRCIRRNTLVRIPKRRGGDRSSGTLRQLPSVHCKLIAEIRRTVAIQQDFALTPRCAAAIIEITRHQIRSASVAHSPIGSIAAALTCATQANTINDNTPPGRNTDQRVCNTLRGSATHSSTAWNNIRSTGVSKCEATS

SEQ ID NO: 31521 - protein, 135 aa, Homo sapiens
MAEGSAASGPGTKPRGVRPAPFADRAPPDRHHESSAGDKARDSGSESPAQRKARAFPPARRRAPPGSRGLRTPRLWPALPRPQPPGTSSASSRSSPRALRPPPPAPPTSPRRWRRPAQKYFQQIHSAIGLHNADH

SEQ ID NO: 31522 - protein, 92 aa, Homo sapiens
MAKQPSDVSSECDREGRQLQPAERPPQLRPGAPTSLQTEPQGNPEGNHGGEGDSCPHGSPQGPLAPPASPGPFATRSPLFIFMRRSSLLSRS

SEQ ID NO: 31523 - protein, 601 aa, Homo sapiens
  DOMAIN (540)..(555): RIBOSOMAL PROTEIN P2 SIGNATURE domain identified by eMATRIX, accession number PR00456E, p-value=5.146e-11, raw score of 3.06
  misc_feature (1)...(601): Xaa = X or * as defined in Table 2
XLSAASGPGTKPRGVRPAPFADRAPPDRHHESSAGDKARDSGSESPAQRKARAFPPARRRAPPGSRGLRTPRLWPALPRPQPPGTSSASSRSSPRALRPPPPAPPTSPRRWRRVPAFPIGPRAVAPRRSQSAAAVGAAPTGQAAKGEAIVDKLASERCSGRGRGGCRFVGGFEGRLARPPCPSLCSFRTQALAAPAVLDSQSPGDKAGLAPRPDPQGHPQAQSSPLVLVLARRGQTLTAVTALAVATILLQQLPLSPGAPQTRVKAEEPPLAADAHVRDHRVNSHPPPWRPSGPPPAAPTLGQQVPEGTAPPACTANRVGWSGEDLDFSLPGNRADGTGRRTPAEQAGAPGRRSRRRDFPAGRTARYYEQVLSSRAGAERHALPLLLPGPTTLHQARAQHPVPSRTSAKSLQVPRERLFFKENLPEREPDPHGSPPPAGDKRRRCKRLRSHVHGKRAVGGAVRAPALVFLRCQARAPGFGGIYLAFLSPRVRVRHLGEQGPRKGAEAVAAGTQRTEYRDDAIAVWQGSQGGCKNQVVVVAAAAAAAAAAAAAAAAAALDAELQQTADQAAARSEVKPARPCSPALAGGPAPTPNHCGPRPR

SEQ ID NO: 31524 - protein, 138 aa, Homo sapiens
  DOMAIN (121)..(134): DIACYLGLYCEROL/PHORBOL-ESTER BINDING SIGNATURE domain identified by eMATRIX, accession number PR00008D, p-value=7.070e- 09, raw score of 13.49
MLLPLFLLIHTGIGPSYSASDRAEPRPSPGGRLTARIWIKGVKEDGGTMQGAVDWGEGVERCAGRITASHKVADKWHSSRNSLGGSPEPGTPAPGPWVGFCHPCLPASPLSWTATGTAATHAQCAERVHNLCRRAKPS

SEQ ID NO: 31525 - protein, 65 aa, Homo sapiens
MQAGLARAMVLAAGWSRVASAGAAGDTSPVPRALSDLRITQKCGLLVPKAVSWKSLFLFPITVEL

SEQ ID NO: 31526 - protein, 74 aa, Homo sapiens
  DOMAIN (7)..(71): Mitochondrial carrier proteins domain identified by PFam, accession name mito_carr, E-value=3.4e-12, PFam score of 44.7
MATLLHDAVMNPAEVVKQRLQMYNSQHRSAISCIRTVWRTEGLGAFYRSYTTQLTMNIPFQSIHFITYEFLQEQ

SEQ ID NO: 31527 - protein, 36 aa, Homo sapiens
MATLLHDAVMNPAEVVKQRLQMYNSQHRSAISCIRT

SEQ ID NO: 31528 - protein, 31 aa, Homo sapiens
  misc_feature (1)...(31): Xaa = X or * as defined in Table 2
XDCCTGAAELYICKRCFTTSAGFIYRIVESG

SEQ ID NO: 31529 - protein, 113 aa, Homo sapiens
  misc_feature (1)...(113): Xaa = X or * as defined in Table 2
MNIPFQSIHFITYEFLQEQVNPPRTLQPAVPHHLRRAGRGLSRAPRPPWTSSKTLLNTQENVALSVAQHQRPAVRVWPMPSGRCTSSTAWPAYFKGIQARVIYQMPFHRPFLX

SEQ ID NO: 31530 - protein, 179 aa, Homo sapiens
MARLGSAPRPIRSGGSGAGSRRAQSELESGAGVGAAAGRDRGESSAAGDSLTNPNGTSALAEATAMESQQPELWADVSMCFRCLERDAHERTLLTQSTPPRALSGVPPRKTEQNESQFKEEGIKYIIVQMIHGNARYPDCTRSMAAASAFDQSESSSGENHVVDGGSQEPFHSEQDDSS

SEQ ID NO: 31531 - protein, 40 aa, Homo sapiens
MLTLLPGERKANIYFTQRRAPSTGIHQRSIASFFTLQPDV

SEQ ID NO: 31532 - protein, 311 aa, Homo sapiens
MRRTGPEEEACGVWLDAAALKRRKVQTHLIKPGTKMLTLLPGERKANIYFTQRRAPSTGIHQRSIASFFTLQPGKTNGSDQKSVSSHTESQINKESKKNATQLDHLIPGLAHDCMASPLATSTTADIQEAGLSPQSLQTSGHHRMKTPFSTELSLLQPDTPDCAGDSHTPLAFSFTEDLESSCLLDRKEEKGDSARKWEWLHESKKNYQSMEKHTKLPGDKCCQPLCKTKLERKVSAKENRQAPVLLQTYRESWNGENIESVKQSRSPVFVFSWANEKNDKDSWSQLFTEDSQGQGVIAPHHRGSFSRCNQ

SEQ ID NO: 31533 - protein, 442 aa, Homo sapiens
  DOMAIN (196)..(214): ALPHA G-PROTEIN (TRANSDUCIN) SIGNATURE domain identified by eMATRIX, accession number PR00318C, p-value=7.000e-23, raw score of 12.09
  DOMAIN (165)..(340): G-protein alpha subunit domain identified by PFam, accession name G-alpha, E-value=8.9e-81, PFam score of 281.8
  misc_feature (1)...(442): Xaa = X or * as defined in Table 2
MAPSPNSWIPSMREGLPLEQKLSSPGPVHKTTSRDPPPFLAEHHFLAVQLRGTTTVLPFPPEQDKKQETAKRQTKNGKEKEKREQRRKTSSPSTRTQDTAGPPAAEHRAQRNTHDQEQRARSRDQTRQPKKAHGKNEKSDRGAQRCPRLAVFKQLPGQPGSDWGRDYQPTEQDISEPGSKPLASVETHFTFKNLHFRLFDVGGQRSERKKWIHCFEDVTAIIFCVALSGYDQVLHEDETTMVTMVEWTTGLKAVKVPVHRNHHSVNSSCGYNIQMPWLENRMHESLKLFDSICNNKWFTDTSIILFLNKKDIFEEKIKKSPLTICFPEYTGPVSCHEDMCCWRLVTSVLGKQHPGDNQYNSPCVNICTDGAKVAAADTIVVSLARSQAPALDSAPGCRAAIALPTTMHAKKANAGWTEECRCSQRAWLVPTQGNRHYRVDAX

SEQ ID NO: 31534 - protein, 354 aa, Homo sapiens
  DOMAIN (219)..(248): ALPHA G-PROTEIN (TRANSDUCIN) SIGNATURE domain identified by eMATRIX, accession number PR00318D, p-value=1.900e-34, raw score of 16.28
  DOMAIN (6)..(353): G-protein alpha subunit domain identified by PFam, accession name G-alpha, E-value=3.5e-255, PFam score of 861.1
MGCTLSAEERAALERSKAIEKNLKEDGISAAKDVKLLLLGAGESGKSTIVKQMKIIHEDGFSGEDVKQYKPVVYSNTIQSLAAIVRAMDTLGIEYGDKERKADAKMVCDVVSRMEDTEPFSAELLSAMMRLWGDSGIQECFNRSREYQLNDSAKYYLDSLDRIGAADYQPTEQDILRTRVKTTGIVETHFTFKNLHFRLFDVGGQRSERKKWIHCFEDVTAIIFCVALSGYDQVLHEDETTNRMHESLMLFDSICNNKFFIDTSIILFLNKKDLFGEKIKKSPLTICFPEYTGPNTYEDAAAYIQAQFESKNRSPNKEIYCHMTCATDTNNIQVVFDAVTDIIIANNLRGCGLY

SEQ ID NO: 31535 - protein, 420 aa, Homo sapiens
  DOMAIN (128)..(151): ALPHA G-PROTEIN (TRANSDUCIN) SIGNATURE domain identified by eMATRIX, accession number PR00318B, p-value=3.455e-27, raw score of 14.79
  DOMAIN (53)..(419): G-protein alpha subunit domain identified by PFam, accession name G-alpha, E-value=6.9e-177, PFam score of 601.0
MGRGRRAARGSTCSALTYSALDIKGCGCLRRSTYLPGQGHFSCGLDPSTRPCQPSRELSAQADAKMVCDVVSRMEDTEPFSAELLSAMMRLWGDSGIQECFNRSREYQLNDSAKYYLDSLDRIGAADYQPTEQDILRTRVKTTGIVETHFTFKNLHFRLFDVGGQRSERKKWIHCFEDVTAIIFCVALSGYDQVLHEDETTAVMSVTSPVLMLSGARVDALPGPCLDPDSLTTQSPAALSAASREPESLVLASYLLSAPPSRACGCHSFSTTTVASTACRALSCQTKAKTSSERPSKPGRPRMAMAPNRMHESLKLFDSICNNKWFTDTSIILFLNKKDIFEEKIKKSPLTICFPEYTGPSAFTEAVAYIQAQYESKNKSAHKEIYTHVTCATDTNNIQFVFDAVTDVIIAKNLRGCGLY

SEQ ID NO: 31536 - protein, 602 aa, Homo sapiens
  DOMAIN (378)..(560): G-protein alpha subunit domain identified by PFam, accession name G-alpha, E-value=6.8e-08, PFam score of 32.3
MAAGPGLQCLVSGSAGPAHAPSPLACALLPPGTSWLLERAFWKQHPYLLRTMAVILIVTRVLLPQHTRDSRQQHMSSWQDTGPNQGRFSSTQTTRLGWRRVLHFWELGLCCVKQEKKATKAERAAAQRTGLGREERAGLHCHLERSLLSLLQNCLGGSTHEFSKEVSSSRLPRVKYHRPDLVSSSIQATIAESISWVAYTQQKFISHSSEAGKFKMKVLADHYQVLHRSTETMKEGPKKEELENSCQVHHPIPQMGKYPKIARDGAHIFLGKATQLWSRPLYQALSAVQGVSAQADAKMVCDVDGPTTKSYVAPNIHSAKIKNPDLRNANGQRLRPMFILDISTGHMAANRLGTWQGRERLPISAHLDCPEANAEVLYLDSLDRIGAADYHPPSRTSSEPGSKPLASRNPLHIQEPPLQRPNIILPQGTCGWGRQLDTRRNLSVFLQGCLTSEASDLNARRDPLLRGRHGHHFLCRASGYDQVLHEDETTALSCQTKAKTSSERPSSPEGPSPSQKPWLTSRPSTRARKVSPQRDLHPRHLRHGHNNIQFVFDAVTDVIIAKTCGAVDSTEPSRPARPLALPGLPPPLPWNQAPHSQTTLCT

SEQ ID NO: 31537 - protein, 133 aa, Homo sapiens
  misc_feature (1)...(133): Xaa = X or * as defined in Table 2
MTRNLHSSSGPLSREAESFSSQSEVSRASRVTRHRTLWVPSDTSSVAPTSDVSGAWDGPATAASASCSTSSSCPARGLEGVSDPRISSRIQGRRTSLPEPAIPTATPSGCNGPGPKSPNTRPPTRPTTRPRTX

SEQ ID NO: 31538 - protein, 75 aa, Homo sapiens
  misc_feature (1)...(75): Xaa = X or * as defined in Table 2
EAWALERLLREARVLEAVCEFSRRWEIPASSAQEVVQFSASRPGFLTFWDQCTERLSCFLCPVERVLLTFCNQYX

SEQ ID NO: 31539 - protein, 79 aa, Homo sapiens
MYPLGVAVGMAGSGRLVLRPWIRELILGAETPSSPRAGQLLEVLQDAEAAVAGPSHAPDTYDVGATLLVSDGTHSVRCL

SEQ ID NO: 31540 - protein, 213 aa, Homo sapiens
  DOMAIN (52)..(72): Glutaredoxin proteins domain identified by eMATRIX, accession number BL00195B, p-value=7.158e-09, raw score of 15.31
  DOMAIN (24)..(116): PDZ domain (Also known as DHR or GLGF) domain identified by PFam, accession name PDZ, E-value=8.3e-09, PFam score of 42.7
  misc_feature (1)...(213): Xaa = X or * as defined in Table 2
XLPQDFRQVSSVIDVDLLPETHRRVRLHKHGSDRPLGFYIRDGMSVRVAPQGLERVPGIFISRLVRGGLAESTGLLAVSDEILEVNGIEVAGKTLDQVTDMMVANSHNLIVTVKPANQRNNVVRGASGRLTGPPSAGPGPAEPDSDDDSSDLVIENRQPPSSNGLSQGPPCWDLHPGCRHPGTRSSLPSLDDQEQASSGWGSRIRGDGSGFSL

SEQ ID NO: 31541 - protein, 66 aa, Homo sapiens
MLCWPCCQAQRCGARPSRDSSSRRWADCPSSPHCCRLCRAASLTASVSVWQRYTRGSMPSGALMQP

SEQ ID NO: 31542 - protein, 355 aa, Homo sapiens
  DOMAIN (264)..(278): C2H2-TYPE ZINC FINGER SIGNATURE domain identified by eMATRIX, accession number PR00048A, p-value=2.565e-10, raw score of 10.52
  DOMAIN (265)..(288): Zinc finger, C2H2 type domain identified by PFam, accession name zf-C2H2, E-value=5.5e-05, PFam score of 30.0
MEGDAVEAIVEESETFIKGKERKTYQRRREGGQEEDACHLPQNQTDGGEVVQDVNSSVQMVMMEQLDPTLLQMKTEVMEGTVAPEAEAAVDDTQIITLQVVNMEEQPINIGELQLVQVPVPVTVPVATTSVEELQGAYENEVSKEGLAESEPMICHTLPLPEGFQVVKVGANGEVETLEQGELPPQEDPSWQKDPDYQPPAKKTKKTKKSKLRYTEEGKDVDVSVYDFEEEQQEGLLSEVNAEKVVGNMKPPKPTKIKKKGTRPHKCPDCDMAFVTSGELVRHRRYKHTHEKPFKCSMCDYASVEVSVQLFVESQNLPKQPPLMLALGQASECLRLMARAGLGSCSFARVDDYLH

SEQ ID NO: 31543 - protein, 87 aa, Homo sapiens
  misc_feature (1)...(87): Xaa = X or * as defined in Table 2
MVSSYLVHHGYCATATAFARMTETPIQEEQASIKNRQKIQKLVLEGRVGEAIETTQRFYPGLLEHNPNLLFMLKCRQFVEMVNGTDX

SEQ ID NO: 31544 - protein, 37 aa, Homo sapiens
  misc_feature (1)...(37): Xaa = X or * as defined in Table 2
XSLRAQSHRAELDRKLVQVEEAIKIFSRPKVFVKMDD

SEQ ID NO: 31545 - protein, 307 aa, Homo sapiens
  misc_feature (1)...(307): Xaa = X or * as defined in Table 2
MPVSLGSRASGPSLRLLRVRRLRVWGDAFVVPPALPQEGNGLSARVDEGVEEFFSKRLIQQDRLWAPEEDPATEGGATPVPRTLRKKLGTLFAFKKPRSTRGPRTDLETSPGAAPRTRKTTFGDLLRPPTRPSRGEELGGAEGDTSSPDPAGRSRPRYTRDSKAYSMILLPAEEEATLGARPDKRRPLERGETELAPSFEQRVQVMLQRIGVSRGSGGAEGKRKQSKDGEIKKAGSDGDIMDSSTEAPPISIKSRTHSVSADPSCRPGPGSQGPESATWKTLGQQLNAELRSRGWGQQDGPGPPSPX

SEQ ID NO: 31546 - protein, 109 aa, Homo sapiens
  misc_feature (1)...(109): Xaa = X or * as defined in Table 2
XLSITVEHALESFSFLNEDEDEDNDVPGDRPPSSPEAGAEDSIDSPSARPLSTGCPALDAALVRHLYHCSRLLLKLGTFGPLRCQEAWAPGAAAAGSPSTGGSMRVQQA

SEQ ID NO: 31547 - protein, 1056 aa, Homo sapiens
  DOMAIN (762)..(928): SPRY domain identified by PFam, accession name SPRY, E-value= 1.3e-11, PFam score of 52.0
MPSIQTFAWPWLSNPSPNGSRRVWGQEPGGALGALMAALDDYRGQFLSCRAWSRSRDKVDSQPGLQSQHHCGACLESFSFLNEDEDEDNDVPGTETGHIWPLRCQEAWALERLLREPEYWRQYASSAGGGRSRQLCPGSARETQLLPLPGGAGASHLCNQYGARLSLRQPGLARLVSGLLPPSTLAQIPMTGSSGKPVCVKFLEDALGQSCPEGPSQGLESSSQSPVLEFCGNLGQPHHGGHVTETAEEGPPVFLDQLEDEDAPEGIEPLVYLCQTDTEAVREAAGKAYSSVVPPACRRKGMGSVPAWTRAWGILLQKADPAGSPEPTSYTRDSKAYSMILLPAERRQRWVPDPTRPFLQTWPREPGAESATWKTLGQQLNAELGAVVGANRMVQALPPLAKPKSLQNQPLPRQPGPPEDPCLGPRNEVPDGGERVNPTTPGLRLGLRALKGAHLKQLPGSWTGGCLDPRISSRIQGRRTSLPDLPSPRLHPADATGPGFRGRPGPAFPRKRKLLRGRGRRRRPRPRTPRACDEGVLLGGLCADSRWSTRCLTRVPTLRAASRFGERLPEFSRLLRAVHQIPGLDVLLGYTDAHGDLLPLTNDDSLHRALASGPPPLRLLVQKRAEADSSGLAFVSNSLQRRKKGLLLRPVAPLRTRPPLLISLPQDFRHVSSVIDVDLLPETHRRVRLHKHGLERVPGIFISRLPVAILSMELLATVPQRGQSSIFTKTLGREKILMAPLPAPASGPAQHGGSGSQSLRSNKLWYTGSELMTRGQRTQIRVQLPVGQQMDNTSGSLKQVPGAGPYPGLHLVVLGKSSLTSPTTLDPTHTSLITVFPSSCSWDKHSYGYHGDDGHSFCSSGTGQPYGPTFTTGDVIGCCVNLINGTCFYTKNGHSLGIAFTDLPANLYPTVGLQTPGEIVDANFGQQPFLFDIEDYMREWRARDPEAGAGGPVGEAIETTQRFYPGLLSTTPTSSSCSRADSPSCSNGVRVHQEQTEPHDSEMEMEAEHYPNGVPEPAKAAPSDARLGQASECLRLMARAGLVLAPLPELMTTCTS

SEQ ID NO: 31548 - protein, 148 aa, Homo sapiens
  misc_feature (1)...(148): Xaa = X or * as defined in Table 2
MKSGAGLEAESVPMAVIIGVAVGAGVAFLVLMATIVAFCCARSQRNLKGVVSAKNDIRVEIVHKEPASGREGEEHSTIKQLMMDRGEFQQDSVLKQLEVLKEEEKEFQNLKDPTNGYYSVNTFKEHHSTPTISLSSCQPDLRPAGKQX

SEQ ID NO: 31549 - protein, 219 aa, Homo sapiens
MELMDRGEFQQDSVLKQLEVLKEEEKEFQNLKLFTPEFAPYQVAPFLLFSLFPPRIRGRAQPGNPSHAQWRLHQVTLLFLSPIQDPTNGYYSVNTFKEHHSTPTISLSSCQPDLRPAGKQRVPTGMSFTNIYSTLSGQGRLYDYGQRFVLGMGKLVHRAFSSFLDTQCDSSVSSSGKQDGYVQFDKASKASASSSHHSQSSSQNSDPSRPLQRRMQTHV

SEQ ID NO: 31550 - protein, 48 aa, Homo sapiens
MRLFLMKMNVFPMERIMVKMRTWIKDEALSDEDECVSHGKIIGEDEDM

SEQ ID NO: 31551 - protein, 119 aa, Homo sapiens
MVKMTRSKTFQAYLPSCHRTYSCIHCRAHLANHDELISKSFQGSQGRAYLFNSVVNVGCGPAEERVLLTGLHAVADIYCENCKTTLGWKYEHAFESSQKYKEGKYIIELAHMIKDNGWD

SEQ ID NO: 31552 - protein, 349 aa, Homo sapiens
MKELDWECERLERVRCTLYYGGVVRGVRSVRKWRARQYEDKVLIDTLEGRYAWKVFDLVIFTIGAAECGVNSGAAHEALPQDGSHGKHRKTQGCGIVGSKKVLGEVLEPRHRKVVNPLSEILNLGSLGHSRIQPTNTYPVSTPHQAFSAASKTEKLSSFRVGKQLRLKAEVAIFRTRSPEEQVSPTPARPQDRRKAHHSGKDTRGGRRPSRVNWKWRKNSDIPILFSLQRVLLILGLFFTGLLPFVPIREQFFEIPMPSIILNLLMRKALFDHLTARGIQAVIRLYNDEQIPKSLVWSCFCVENPWQLGAENSSLSYLLELRTRCLEFQNLLQVQEVIHMTISGRKVIP

SEQ ID NO: 31553 - protein, 110 aa, Homo sapiens
  misc_feature (1)...(110): Xaa = X or * as defined in Table 2
MKESKLTNIQQRHIMDIMKRDLEKEKQRLQNIFATGKDMEERKRKAPPARQKAPAPELDRFEELVKEIQERKEFLADMEALGQGKQYRGIILAEISQKLREMEDIDHRRX

SEQ ID NO: 31554 - protein, 52 aa, Homo sapiens
EASVDCPVTFHDVHDVALLDVRQFGFLHHHCTTKHSMRPLGLQAECLHLTPY

SEQ ID NO: 31555 - protein, 217 aa, Homo sapiens
MASQKQMEVVTKGTGFRRRPKTITYTPGTCELLRGQSVKAAIPAFLAPGTGFVEDNFSTDGVMMKESKLTNIQQRHIMDIMKRGDALPLQCSPTSSQRVLPSKQIASPIYLPPILAARPHLRPANMCQANGAYSREQFKPQATRDLEKEKQRLQNIFATGKDMEERKRKAPPARQKAPAPELDRFEELVKEIQERKEFLADMEALGQGRTVPRNHPC

SEQ ID NO: 31556 - protein, 61 aa, Homo sapiens
MERRLQMGALEHLNVRGHEEKELNTDMMGNHPPYQVLREHHGFHLDAARRYRSGEASYYQA

SEQ ID NO: 31557 - protein, 350 aa, Homo sapiens
MSTLAQLCLLGTCWEGLAFLGIFTSWSCPELYTCPELDYRLTPCHARLQTYPHPHLHKLVSKPCFRNKPEEFWALRCTPPPEAAAKTGIPHQRDEWQKAAETQTAEPGGAHAVCSRHPVRVKGLEGSEMESARENIDLQINIATVANLQPSLNFISSLALEPRGVRNKLKGLLIKGTSAAGETCSSVLNTATALRKSLVLRWFRAKASNGLSELSESPVQVQKNWSRVFSMGPHKQQIIRKDVAKMLGAADSLPEERGLHILGFLDFGRPDQQKTACTQVEYCKGRHQLKASFSGQLVQGRLLIEISEYIRRGNIHTQFSLVERCDTEACQRLMAPSPPRAASQLNLGIQ

SEQ ID NO: 31558 - protein, 87 aa, Homo sapiens
MATSSQYRQLLSDYGPPSLGYTQGTGNSQVPQSKYAELLAIIEELGKEIRPTYAGSKSAMERLKRGIIHARGLVRECLAETERNARS

SEQ ID NO: 31559 - protein, 131 aa, Homo sapiens
MPAAALNAAGSVHSPSTSMATSSQYRQLLSDYGPPSLGYTQGTGNSQVPQSKYAELLAIIEELGKEIRPTYAGSKSSIGEALSAASFTLEDWFGSAWQKRNGMPDPSCLVGFEGFPSFYKMRSYSSSPLFR

SEQ ID NO: 31560 - protein, 82 aa, Homo sapiens
MTDSSRFLTPVQSCDYWSMFMKTLQDDGEQGVGILVPLPQTHKFKCLERLPNQVSGYISVKFVTPQFLAQCLSQIKRPTDVH

SEQ ID NO: 31561 - protein, 140 aa, Homo sapiens
MPEEVICHVAAQFHTGRDPVQRSSGLLWVPVNTKVRTGTLRITDSLTTSWIHRSSFVTLIQANKSNVEQREGCICSGNCKSVPFDHNPVERKKPYEDSVFATMLSRDSCSSGSWSTGLLAWAHHPHSHLSGGLYSDVFVQ

SEQ ID NO: 31562 - protein, 73 aa, Homo sapiens
TGLSNFLRDEDTSPLDLERLKPPGPVEDGKKHSSSSQFYNRVVLGLLVSTGRPTEQAAANQLAQGSDRKSSWL

SEQ ID NO: 31563 - protein, 554 aa, Homo sapiens
MAEGEGEASTSYQGGAGEREREQRGMPYTFEETDLMRIQSCASGSMAWDGDPALPVLPQRLKQDGDALVCPRPGSLDPLGSADTGPGLATSLLPDRAQTPLGPALGVRIGRGLETSPPLQPLWPPVNCLAVPKPWSLENPSSSSAPTSRQVAGSGPQASKLREQTEQAAGRAESPGNSGACMEGTGKGMESGAAVRDPEDERPGDTCSPGRRPGSQGSGKAIDRGDTPAWERDGADEEDNTGLSAEHLPRARLCVHKHGGCSHMTELVWQLQDCLVPEPQLSASPRPLCEALSEEGAVALTAGCTGSGFSEESVHNEQNSFLENPPHRRARKTRLKPREYHQRGNKPLSSRLKDTVKNMNKDSVCNGFHGRKDLTATGKTDRASEVALKWGATQTPECQLEGMRPRSGTSPGGGTSGVTCPGLAHWCPGQFVVHTCVYAEPVCPQVLQPLILPWSCVFVVPRKRGAPCDTWGSPSSLSPAGPWAPATVSSFLDSILSHTTGQVNIPEVQKTGKFIYKGHELRRQEVSVPGTGESRTRERSYGRTEAGGPGSRGA

SEQ ID NO: 31564 - protein, 213 aa, Homo sapiens
MEWLFLGSLLQEVPAHLALLKAVPNLPLSQSVVASGGGQIFESSQEDQELLLAMQILDLLLFAHFCLFSEALVRELRTGCCSLPGDGFSNSQSKVIFSNEKPDRLPSLALTHRCQSWNLARAPGLQSSGARRGSKHSGVWHVRCRHQKRSYPYRRQHGLFSGWAAGHKPSTPRWSPPRRRPITPALSPGARTLYICGEPGASEILCTPPRRKK

SEQ ID NO: 31565 - protein, 219 aa, Homo sapiens
MEPNALRSPSTVPRPHRILVLTAARAFPLLHQGGQADALPRRATATARKAPGTPPTARPALAKRDPSRPAPPSAQRQRRGRALVYFWASGWRLREIEFSCWGERTVRPLGRGESPTADVWVCECQLSGASRTRHTQRGFEEGSAFQVERFLGSENGKFSKAAQDLIVKKIPAPPFSLSFLVFPSEACYPSSPSVMGGSNLSPSPEEDAGAMLLVQPAEP

SEQ ID NO: 31566 - protein, 124 aa, Homo sapiens
MATAGNRVLMLGRKVCLQEPNPNEQSRTVRPLGRGESPTADVWVCEFHLSGASRTRHTQRGFEEGSAFQSFREEAEVCKQEQVQDLHGQKQFLILLARFEDLATSRRYHTLGQWEIWNSFEKSK

SEQ ID NO: 31567 - protein, 188 aa, Homo sapiens
MAFVKRQRVLLEALVSFLDFSDKEANTAMGLFTDLALEESETPGMPLCDMKLSGWFVGLLKTDPKVSSSSALCQCIAIMGNLSAEPTTRRHMAACEEFGDGCLSLLGNFINRSIGGYDLSVSRGHMSGSRPEVELGQKDADGQLNLRGGEQSMGPGGYTTAGQSTTAGLHHTNAGLYIAPYGDFMTGF

SEQ ID NO: 31568 - protein, 266 aa, Homo sapiens
MAFVKRQRVLLEALVSFLDFSDKEANTAMGLFTDLALEESETPGMPLCDMKLSGWFVGLLKTDPKVSSSSALCQCIAIMGNLSAEPTTRRHMAASASASSSTPVPLSPPDSYLNQVDLQEKADLQEKEAHELLDSGKNTAVTTKNLLETLSKPDQIPLFYAGGIEILTEMINECTEQTLFRMHNGFSIISDNEVIRRCFSTAGNDAVEEMVCVSVLKLWQAVCSRNGKSLTLDRNTENGDNDSYVSFSQGYCGEPAIELVNAVCIL

SEQ ID NO: 31569 - protein, 40 aa, Homo sapiens
MADAGETLASGGPRVEHTKSWLILASVCGVEKAIHAAASI

SEQ ID NO: 31570 - protein, 80 aa, Homo sapiens
RMEKAIEAMGVEVTALRSCVYGREGGRKEPQRHVATEEGSMGCKVANGESGEEPKAKKCRQTPECGKGEKKDPLEPLEMK

SEQ ID NO: 31571 - protein, 74 aa, Homo sapiens
MGRVSGLVPSRFLTLLAHLVVVITLFWSRDSNIQACLPLTFTPEEYDKQDIHALPAVTEMALFVTVFGLKKKPF

SEQ ID NO: 31572 - protein, 65 aa, Homo sapiens
  misc_feature (1)...(65): Xaa = X or * as defined in Table 2
XSETAALVPEGHGPGLRACALLLADSSLRIWWSSSPYSGPRDNNIQACLPLTFTPEEYDKQDIQL

SEQ ID NO: 31573 - protein, 83 aa, Homo sapiens
SAFSYIPPRRLDPTEHSYYYRPAREQERPAGVLTSSVYGKRINQPIEPLNRDFGRANHVQADFYRKNDIPSLKEPGFGHIAPS

SEQ ID NO: 31574 - protein, 147 aa, Homo sapiens
MEDDEEETTASTLRGKPRPPPVSAQSAFSYIPPRRLDPKEHSYYYRPARTGIISLYDCIFKRRLDYDQKLHRDDREHAKSLGLHVNEEEQERPVGVLTSSVYGKRINQPIEPLNRDFGRANHVQADFYRKNDIPSLKEPGFGHIAPS

SEQ ID NO: 31575 - protein, 195 aa, Homo sapiens
MTLIKTSEDTVEVEISEEFMKPRQVGFPLVQHTPFTKGQPKSFIKLVLLPVSPNWKATKSASKKVPTKTSLKGQIETRQTHEDEKESTKSTETPKGQSASSSPNHCNTFPARVQNGMEDEMDELTEIGFRRWVIANSTEVKEHVLTQCKEAKNLDKRLQELLTRITSLERNINDLMSCKTQHKNFMKHAQLSIAE

SEQ ID NO: 31576 - protein, 53 aa, Homo sapiens
MRTRLPDDEPAPGTEYGDIRPHSELSLTANLCRDASTACTASRHGAVLLVLCE

SEQ ID NO: 31577 - protein, 53 aa, Homo sapiens
  misc_feature (1)...(53): Xaa = X or * as defined in Table 2
XWRDSRDEPRPPARHPSRGQRPPPPGKVADHSRKPLRARQAEWKDGAGKRTPX

SEQ ID NO: 31578 - protein, 406 aa, Homo sapiens
MAVRVLWGGLSLLRVLWCLLPQTGYVHPDEFFQSPELPCRSVLFPLTNPQNPTSSSNCTRLLWEELGPWPGLVSGYALLVGPRLLLTALSFALDGAVYHLAPPMGADRWNALALLSGSYVTLVFYTRTFSNTIEGLLFTWLLVLVSSHVTWGPTRKEPAPGPRWRSWLLGGIVAAGFFNRPTFLAFAVVPLYLWGTRGATNPGLKSLTREALVLLPGAALTAAVFVATDSCPQTQPVPWKGTVVLFNALGALLFGCLHQGGLVPGLEYLEQVVHAPVLPSTPTHYTLLFTHTYMPPRHLLHLPGLGAPVEVVDMGGTEDWALCQTLKSFTRQPACQVAGGPWLCRLFVVTPGTTRRAVEKCSFPFKNETLLFPHLTLEDPPALSSLLSGAWRDHLSLHIVELGEET

SEQ ID NO: 31579 - protein, 117 aa, Homo sapiens
MLLPPHKVSRQLLKQTLLPACPPAHTCGSFTLPITLRGLEELIWVQHSPVCGRRHPQHSEQAETTPKHPDCPSSDPVVANTPGPKPGMMSQLLQMLRWIHRSASVEDNSCWLSRCKL

SEQ ID NO: 31580 - protein, 982 aa, Homo sapiens
  DOMAIN (735)..(747): Sushi domain proteins (SCR repeat proteins domain identified by eMATRIX, accession number PF00084B, p-value=7.188e-10, raw score of 9.45
  DOMAIN (362)..(899): Sushi domain (SCR repeat) domain identified by PFam, accession name sushi, E-value=1.3e-58, PFam score of 208.2
  misc_feature (1)...(982): Xaa = X or * as defined in Table 2
XALPEGDASPLGPYLLPSGAPERGSPGKEHPEERVVTAPPSSSQSAEVLGELVLDGTAPSAHHDIPALSPLLPEEARPKHALPPKKKLPSLKQVNSARKQLRPKATSAATVQRAGSQPASQGLDLLSSSTEKPGPPGDPDPIVASEEASEVPLWLDRKESAVPTTPAPLQISPFTSQPYVAHTLPQRPEPGEPGPDMAQEAPQEDTSPMALMDKGENELTGSASEESQETTTSTIITTTVITTEQAPALCSVSFSNPEGYIDSSDYPLLPLNNFLECTYNVTVYTGYGVELQVKSVNLSDGELLSIRGVDGPTLTVLANQTLLVEGQVIRSPTNTISVYFRTFQDDGLGTFQLHYQAFMLSCNFPRRPDSGDVTVMDLHSGGVAHFHCHLGYELQGAKMLTCINASKPHWSSQEPICSAPCGGAVHNATIGRVLSPSYPENTNGSQFCIWTIEAPEGQKLHLHFERLLLHDKDRMTVHSGQTNKSALLYDSLQTESVPFEGLLSEGNTIRIEFTSDQARAASTFNIRFEAFEKGHCYEPYIQNGNFTTSDPTYNIGTIVEFTCDPGHSLEQGPAIIECINVRDPYWNDTEPLCRAMCGGELSAVAGVVLSPNWPEPYVEGEDCIWKIHVGEEKRIFLDIQFLNLSNSDILTIYDGDEVMPHILGQYLGNSGPQKLYSSTPDLTIQFHSDPAGLIFGKGQGFIMNYIEVSRNDSCSDLPEIQNGWKTTSHTELVRGARITYQCDPGYDIVGSDTLTCQWDLSWSSDPPFCEKIMYCTDPGEVDHSTRLISDPVLLVGTTIQYTCNPGFVLEGSSLLTCYSRETGTPIWTSRLPHCVSEESLACDNPGLPENGYQILYKRLYLPGESLTFMCYEGFELMGEVTIRCILGQPSHWNGPLPVCKVAEAAAETSLEGGNMALAIFIPVLIISLLLGGAYIYITRCRYYSNLRLPLMYSHPYSQITVETEFDNPIYETGETREYEVSI

SEQ ID NO: 31581 - protein, 269 aa, Homo sapiens
SQEASVKSAVQQFIEINHSDKGQSGRSLQKIPAGWHPVLPDSMHEVSCGQWPHGLNPRRPDLEERSSSSPSGKSLIGGDDGDKGQHEATCLFLQNRVSVQRQEEVEGAVNTYGCEVVDLKTSLSFILAPGKLTSYCRKHAECRGTETATYSHGWDSATVLSHIYPNDTLWDDAAHNRQLPHYFHPNARMLILMKSQTLLSSLLMCVTCACFSQKKRISKHLVNNHRKKLRFVNPLRKVSRGPRIKASADLGASLKIKTKNDINIIKRDE

SEQ ID NO: 31582 - protein, 110 aa, Homo sapiens
MPMVQVLGRGSCEGRPCHNNLLGASPPPTRLPDAIDLRPHSHISLSRGSRRLCHISRRWILPWDSRQLLRCVTPREGLALKAPESSWMATEVALSGLWVYTFRTCCSIQL

SEQ ID NO: 31583 - protein, 82 aa, Homo sapiens
MWQRENECSKAEQGRKEQQASVAGTQRARANVIREEPGNLELQGLLPPNHLGSLWLHRQVSMKKSYVNGSKLSWLKESLVSQ

SEQ ID NO: 31584 - protein, 82 aa, Homo sapiens; identical to SEQ ID NO: 31583

SEQ ID NO: 31585 - protein, 51 aa, Homo sapiens
  misc_feature (1)...(51): Xaa = X or * as defined in Table 2
MVKLSIVLTPQFLSHDQSQLTKELQQHVKSVTCPCEYLRKVINSLAVYRHX

SEQ ID NO: 31586 - protein, 237 aa, Homo sapiens
MVKLSIVLTPRFLSHDQGQLTKELQQHVKSVTCPCEYLRKVINTLADHRHRGTDFGGSPWLLIITVFLRSYKFAISLCTSYLCVSFLKTIFPSQNGHDGSTDVQQRARRSNRRRQEGIKIVLEDIFTLWRQVETKVRAKICKMKVTTKVNRHDKINGKRKTAKEHLRKLSMKEREHGEKERQVSEAEENGKLDMKEIHTYISPLLQESLFATGSEWRQRSIVILQDCPTGPTSQLKL

SEQ ID NO: 31587 - protein, 528 aa, Homo sapiens
MVKLSIVLTPQFLSHDQGQLTKELQQHVKSVTCPCEYLRKVINTLADHHHRGTDFGGSPWLHVIIAFPTSYKVVITLWIVYLWVSLLKTIFWSRNGHDGSTDVQQRAWRSNRRRQEGLRSICMHTKKRVSSFRGNKIVLKDVITLRRHVETKVRAKIRKRKVTTKINHHDKINGKRKTARKQLSQHSISHVLAFSDPPFCKKGSLQLAPPSADDNIKIPAERLRIPLPPSADDNLKTPSERQLTPLPPSAPPSADDNIKTPAERLRGPLPPSADDNLKTPSERQLTPLPPSAPPSADDNIKTPAERLRGPLPPSADDNLKTPSERQLTPLPPSAPPSADDNIKTPAERLRGPLPPSADDNLKTPSERQLTALPPSAPPSADDNIKTPAERLRGPLPPSADDNLKTPPLATQEAEAEKPRKPKRQRAAEMEPPPEPKRRRVGDVEPSRKPKRRRAADVEPSSPEPKRRRVGDVEPSRKPKRRRAADVEPSSPEPKRRRVGDVEPSRKPKRRRAADVEPSLPEPKRRRLS

SEQ ID NO: 31588 - protein, 46 aa, Homo sapiens
  misc_feature (1)...(46): Xaa = X or * as defined in Table 2
MRDVAGGEAVPVGAGSTWQLYXXXXXXXXXXXXXXXXXXLLVLVTY

SEQ ID NO: 31589 - protein, 125 aa, Homo sapiens
  DOMAIN (56)..(84): !!!! PROTEIN ALU SUBFAMILY WARNING ENTRY NUCLEAR PHOSPHO domain identified by eMATRIX, accession number PD02454B, p-value= 4.784e-11, raw score of 11.61
MVKLSIVLTPQFLSHDQSQFTKELQQHVKSVTCPCEYLRKVINSLAVYRHRETDFGVGVRDHPGQHGKTPSPQKLDNLIIIIIGFLRRYTFNILFCTSCLCVSILTFCRGILVITNKNKLYKTKK

SEQ ID NO: 31590 - protein, 532 aa, Homo sapiens
  DOMAIN (480)..(515): PROTEIN BOLA TRANSCRIPTION REGULATION AC domain identified by eMATRIX, accession number PD02462A, p-value=1.170e-18, raw score of 22.48
  misc_feature (1)...(532): Xaa = X or * as defined in Table 2
MVLASTVKPLSVEEALAPADEVARTNQCLPAHAPPKLGTDSPAPPKPLPPASAARSARALGSLCSPWAAPRVGPLPPAPAMVRISKPKTFQAYLDDCHRRYSCAHCRAHLANHDDLISKSFQGSQGRAYLFNSVVNVGCGPAEERVLLTGLHAVADIHCENCKTTLGWKYASVAAGSGPRSFLFTRASRSLGNSGGDDDDDGDGHGDGNSTYPVPGISPSQGPCQMQKLKHTLPSALEGLMSTHRTRALVKDLKTRLLKVASLTALERARCRQTVLLSEAKWAAAGEGVGSLGAATKFLSHDQGQLTKELQQHVKSVTCPCEYLRKVNCTGESAQIRAGRCNHCSQLTVPVSACFGHFWAKLFQNRGRIPRAQAGEKGAKNEPKALKSLQNQEGTIYTDSKYFGVVHTFGKIWTERGLINIAIPIFSDADQEKLKRIGAKESSEGSWTAAMELSAEYLREKLQRDLEAEHVEVEDTTLNRCSCSFRVLVVSAKFEGKPLLQRHRLVNACLAEELPHIHAFEQKTLTPDQWAX

SEQ ID NO: 31591 - protein, 210 aa, Homo sapiens
  misc_feature (1)...(210): Xaa = X or * as defined in Table 2
MKPEVVPKPKDVEPRNMQSHTHRGSAEAQQWPALPGEAESREACLSTYLKIHTSVVLKKPWVMPVLVSETVASTAWGLGNAISSVLSHESRNQISKGTVHERISEMLWKNNGQAKFSRRTESVAVFLGDQGHWLQCSVTCPRCLGLQEGPEADDVDNDDVTKRIIYAPVFRGGSLVVSPRDTGSNFQPPAQDRWDQGPDDVDNDDVTKRX

SEQ ID NO: 31592 - protein, 315 aa, Homo sapiens
MAYAYTTCDHRDCRLFTAQFMQTSATTRDQHVDVFIHTQHFTDQRTVRIINRLHGTRRVSATRFFATAQDHRITGFQAQRSDINRHVRARFINHANNPQRYATTLKTQAAVQYAAIDYLPHRDRRDPGISTANYPLRLHIRASGKPFRYDIGRPKTGNNELGQNGPAHQGAAAACKVSDMPMRVPEEGSAAAAPTCEMLRAHGHDDLYFKWEPCASSQAITVLPKHSGTGGSRQGPAVAHPAAPFPKVRGGEGTYYLHLSVFSDLVDLHLLHVGQRVVQGLRLRLWLQELSGRRWGAHHRLCGGNRCERGEREVS

SEQ ID NO: 31593 - protein, 212 aa, Homo sapiens
MVKLSIVLTPQFLSHDQGQLTKELQQHVKSVTCPCEYLRKVWNQTEPEPAATSLLSLCFLRTAGVWVPPMYLWVLGPIYLLFIHHHGRGYLQMSPLFKAKMVAAIPGSLEPGNGDNGKPSTLVLTDFNKVQFTEIEGRKRKRPQKDTCGDLLVTLQSLSRQGEKRSLQLSGKVNAMTFTFDNVLLENTKLNFPQAFCPITQSVPKLSQASGS

SEQ ID NO: 31594 - protein, 1374 aa, Homo sapiens
ACSSLHALSSSLPDDLLQRCVDVCRVQLVHRGTCIRQAFGKLLKSIPLGVFLSDNNHTEIQEISLALRSHMSKAPSNTFHPQDFSDVISFILYGNSHRTGKDNWLERLFYSCQRLDKRDQSTIPRNLLKTDAILWQWAIWEAAQFTVLSKLRTPLGRAQDTFQTIEGIIRSLAGHTLNPDQDVSQWTTADSDEGHGNNQLRLVLLLQYLENLEKLMYNAYEGCANALTSPPKVIRTFLYTNRQTCQDWLTRIRLSIMRVGLLAGQPAVTVRHGFDLLTEMKTTSLSQGNELEVSIMMVVEALCELHCPEAIQGIAVWSSSIVGKHLLWINSVAQQAEGRFEKASVEYQEHLCAMTGVDCCISSFDKSVLTLASAGCKSASLKHCLNGESRKSVLSKPTDSSPEVINYLGNKACECYISTADWAAVQEWQNAIHDLKKSTSSTSLNLKADFNYIKSLSSFESGKFVECTEQLELLPGENINLLAGGSKEKIDMKKLLLSQSLPVLSTLQLYCSSALETTVSNRLSTEDCLIPLFGEALRSCKQHDFLSHDQGQLTKELQQHVKSVTCPCEYLRKVINTLADHHHRGTDFGGSPWLHVIIAFPTSYKVVITLWIVYLWVSLLKTIFWSRNGHDGSTDVQQRAWRSNRRRQEGLRSICMHTKKRVSSFRGNKIGLKDVITLRRHVETKVRAKIRKRKVTTKINHHDKINGKRKTARKQKMFQPPPSADDNIKTPAERLRGPLPPSADDNLKTPSERQLTPLPPSAPPSADDNIKTPAERLRGPLPPSADDNLKTPSERQLTPLPPSAPPSADDNIKTPAERLRGPLPPSADDNLKTPSERQLTPLPPSAPPSADDNIKTPAERLRGPLPPSADDNLKTPSERQLTPLPPSAPPSADDNIKTPAFHPQRMIISRHLPSVSSLPFHPQLHPQQMIISRYLLSVCGFRFHHQPMIISRHLPSVSSLPFHPQLHPQQMIISRHLPSVCGGRFHPQRMIISRHLPSISSLPFHPQLHPQQMIISRHLPSVCGGRFHPQRMIISRHLPSVSSLPFHPQLHPQQMIISRHLPSVCGGRFHPQRMIISRHLPSVSSLPFHTQLHPQQMIISRHLPSVCGERLRGPLPPSADDNLKTPSERQLTPLPPSAPPSADDNIKTPAERLRGPLPPSADDNLKTPSERQLTPLPPSAPPSADDNIKTPAERLRGPLPPSADDNLKTPSERQLTPLPPSAPPSADDNIKTPAERLRGPLPPSADDNLKTPPLATQEAEAEKPRKPKRQRAAEMEPPPEPKRRRVGDVEPSRKPKRRRAADVEPSSPEPKRRRVGDVEPSRKPKRRRAADVEPSSPEPKRRRVGDVEPSRKPKRRRAADVEPSLPEPKRRRLS

SEQ ID NO: 31595 - protein, 461 aa, Homo sapiens
MGLCYSLRPLLFGGPGDDPCAASEPPVEDAQPAPAPALAPVRAAARDTARTLLPRGGEGSPACARPKADKPKEKRQRTEQLSAEEREAAKEREAVKEARKVSRGIDRMLRDQKRDLQQTHRLLLLGSQEEELVEKKRTDTTVAIAEGSRVLLMSPFRGHKLMALLLKSPGARSVPGASLGDVEIPQGREHSLSPGKVHCVVEEKGQEPKRKIPVRACTCSEINGNSFLSHDQGQLTKELQQHIKSVTCPCEYLRKEKGENDLMVPVNYSRIKAWSRCGGQTQKAVCGVGSSAGWGPSVCCALAVQGSGRETWATGTPESSFGATVLHKAVYETASAPLSPGMLDFGTQPDSGWEPSSCVEGPWGWVFQPTAAVSLQTERISEMLWKNNGQAKFSRRTESVAVFLGDQLSALPVIYAPVFRGGSLVVSPRDTGSNFQPPAQDRWDQGPDDVDNDDVTKRSKK

SEQ ID NO: 31596 - protein, 100 aa, Homo sapiens
  DOMAIN (10)..(28): CADHERIN SIGNATURE domain identified by eMATRIX, accession number PR00205B, p-value=1.000e-08, raw score of 11.39
  misc_feature (1)...(100): Xaa = X or * as defined in Table 2
XPLDRESVSAMSWCVSVEVADVNDNAPHSRSPSTQVFVKENNPRAATSSRCLRGTRTRRRRPGVLLAGGTAGGGARLSSYVSVHAESGKVYARSRWTTRS

SEQ ID NO: 31597 - protein, 131 aa, Homo sapiens
MFGFQRRGLGTPRLQLWLLLLEFWEVGSGQLHYSVSEEAKHGTFVGRIAQDLGLELAELVQRLFRVASKTHGDLLEVNLQNGILFVNSRIDREELCGQSAECSIHLEVIVDRPLQVFHVNVEVKDINDNPP

SEQ ID NO: 31598 - protein, 131 aa, Homo sapiens
MVYSRRGSLGSRLLLLWLLLAYWKAGSGQLHYSIPEEAKHGTFVGRIAQDLGLELAELVPRLFRVASKGRGDLLEVNLQNGILFVNSRIDREELCRRRAECSIHLEVIVDRPLQVFHVEVAVKDINDNPPS

SEQ ID NO: 31599 - protein, 650 aa, Homo sapiens
  DOMAIN (178)..(196): CADHERIN SIGNATURE domain identified by eMATRIX, accession number PR00205B, p-value=1.706e-11, raw score of 11.39
  misc_feature (1)...(650): Xaa = X or * as defined in Table 2
XWKAGSGQLHYSIPEEAKHGTFVGRIAQDLGLELAELVPRLFRVASKGRGDLLEVNLQNGILFVNSRIDREELCRRRAECSIHLEVIVDRPLQVFHVESQAMPDSRFPLEGASDLDIGANAQLRYRLNPNEYFDLDVKTNEEETNFLELVLRKSLDREETQEHRLLVIATDGGKPELTGTVQLLINVLDANDNAPEFDKSIYNVRLLENAPSGTLVIKLNASDADEGINKEIVYFFSNLVLDDVKSKFIINSNTGEIKVNGELDYEDYNSYEINIDAMDKSTFPLSGHCKVVVKLLDVNDNTPEMAITTLFLPVKEDAPLSTVIALISVSDRDSGANGQVTCSLMPHVPFKLVSTFKNYYSLVLDSALDRESVSVYELVVTARDGGSPSLWATASVSVEVADVNDNAPAFAQPQYTVFVKENNPPGCHIFTVSARDADAQENALVSYSLVERRVGERPLSSYVSVHAESGKVYALQPLDHEEVELLQFQVSARDAGVPPLGSNVTLQVFVLDENDNAPALLVPRVGGTAAGAVSELMPRSVGAGHVVAKVRAVDADSGYNAWLSLAAVGARIPFRVGLYTGEISTTRPLDEVDAPHHRLLVLVKDHGEPALTATATVLLSLVESGQAPQASSRASAGAVGPEAALELQQL

SEQ ID NO: 31600 - protein, 214 aa, Homo sapiens
MLNITNHQGNANRNHNAIPPYSCKNGHNQKTVDVGRDVVSRKHFYTAGSHSHVEELLRYSQGEAVSASPFVKGTDRNYPTRVIGSSEDSNGRDMDGAGSCYPQQTNTETENQALNVITYKWELNYENTWTHGGHWGLLGRLPMMGGAFMDSPNEDFSTEYSLFNSSANVHAAANGQGQPEDPPRSSNDAVLLWIAIIATLGNIVVVGVVYAFTF

SEQ ID NO: 31601 - protein, 199 aa, Homo sapiens
MEDLGSSIHYLPVMEPASLPVTKSGSPRLPLTEARDDHECKVPGRDITQRDQSYSLRLLRVQLVPSQDLEPEAQRQPSAPCGLRTLAAQPDPRQLCRRLTRSGSGSSEDSSAGCSDTMDLSFMAAQLQEMMGPAKTQRGMAKGLGWVEEGAQHVVGPQVFIRGLDEDKMYVHEKTLTGEDGEFKVSNANATEQLSSSGL

SEQ ID NO: 31602 - protein, 104 aa, Homo sapiens
  misc_feature (1)...(104): Xaa = X or * as defined in Table 2
XRLTRSGSGSSEDSSAGCSDTMDLSFMAAQLPMMGGAFMDSPNEDFSTEYSLFNSSANVHAAANGQGQPEDPPRSSNDAVLLWIAIITTLGNIVVVGVVYAFTF

SEQ ID NO: 31603 - protein, 82 aa, Homo sapiens
MQRVSGLLSWTLSRVLWLSGLSEPGAARQPRIMEEKALEVYDLIRTIRDPEKPNTLEELEVVSESCVEVQEINEEEYLVIIS

SEQ ID NO: 31604 - protein, 135 aa, Homo sapiens
MQRVSGLLSWTLSRVLWLSGLSEPGAARQPRIMEEKALEVYDLIRTIRDPEKPNTLEELEVVSESCVEVQEINEEEYLGYYQVHASSTSLLFGDSYWAALKRTHSTEEDINKQINDKERVAAAMENPNLREIVEH

SEQ ID NO: 31605 - protein, 177 aa, Homo sapiens
MAELRLLSWTLSRILWLSGLFEWGAARQPRIMEEKVLEVYDLIRTIWDPEKPNTLEELELVTESYMEVQEINEEDYLTRGSPSTSPARPGPPGAYIFVSHRPLLPLPAMEHVIPRDAAPASDVVGCSAAAPNAAYARTFTPRACLVKARMAPTIHIPLQGSHWRMLAMPHRSGHPVS

SEQ ID NO: 31606 - protein, 114 aa, Homo sapiens
  DOMAIN (67)..(100): PROLINE-RICH PROTEIN 3 domain identified by eMATRIX, accession number DM00215, p-value=2.929e-10, raw score of 19.43
MPPGPCSPGPLAQLQSRQRDYKLAALHAKQQGDTTAAARHFRVAKSFDAVLEALSRGEPVDLSCLPPPPDQLPPDPPSPPSQPPTPATAPSTTEVPPPPRTLLEALEQRMERYQ

SEQ ID NO: 31607 - protein, 471 aa, Homo sapiens
MHKRKGPPGPPGRGAAAARQLGLLVDLSPDGLMIPEDGANDEELEAEFLALVGGQPPALEKLKGKGPLPMEAIEKMASLCMRDPDEDEEEGTDEDDLEADDDLLAELNEVLGEEQKASETPPPVAQPKPEAPHPGLETTLQERLALYQTAIESARQAGDSAKMRRYDRGLKTLENLLASIRKGNAIDEADIPPPVAIGKGPASTPTYSPAPTQPAPRIASAPEPRVTLEGPSATAPASSPGLAKPQMPPASPPKTPRPHPPLMWVVASLSLIWAPIPSLARGLSDPGQGGGPCPSPQGPPGPSRVGGRPPPPPQARPGNAILVCSCSEGHVNFAEPSFKVIDLNSLHKQLLALKRSRGCPAGPEERDAGAGAARGRGRPEALLDLSAKRVAESWAFEQVEERFSRVPEPVQKRIVFWSFPRSEREICMYSSLGYPPPEGEHDARVPFTRGLHLLQSGAVDRVLQVVLGLQA

SEQ ID NO: 31608 - protein, 112 aa, Homo sapiens
  misc_feature (1)...(112): Xaa = X or * as defined in Table 2
MLRDGLTSTFWWQFENIQTNPSSRINVWMXNWSEKSDLRRFKWVRARRSSIWSLSCQHVMPGGGSVANMCSSLFRTRSSLHDPQVEGTTHSSLLHTKSCLGCTELTPLTTQQ

SEQ ID NO: 31609 - protein, 53 aa, Homo sapiens
MITSSLKNTFSHKLCGLNLIFELRRSSIWSLSCQHVMPGGGSVANMCSSLVQT

SEQ ID NO: 31610 - protein, 187 aa, Homo sapiens
  misc_feature (1)...(187): Xaa = X or * as defined in Table 2
MAERAAGGQLPSQGPVQLPSTRKEKDEQTENQQLFFIRQRTESPGKARPPNLETQTSGFQEPQLTGAEPLRGQCHGLELPLMNFWRCHLDKTNLRLKEELKAEKKSGFWDNLVLKQNIQSKKPDEIEGWEPPKLALEDISADPEDTVGGHPSWSGWEDDAKGSTKYTSLASSANSSRWSLRAAGKAX

SEQ ID NO: 31611 - protein, 328 aa, Homo sapiens
MMFAGGGLIDRLLSQIYEFEKEMLWMQRTFGEFAEALDSNLPPLRTVNARKFLEKGISLLNDPSNLLIPQVSRIYNDDDDGKDNDRYLFKTYYMPSTVLIHMFPTAMLSGPASGREEEDRDNNQQGPCKHTLLMDDSSDNHTGRLVWSLFVIQSIRPSASGPRHLSSALWHRGADCFGGQLPGSSRDPGQAATATDFLGSLSPCLQLSCFLCAAVDAYLPPMAHFFVTDRTLTGSRRTSAKHGAIEITPILAVPETGSSEHFKTCLEGPPMSAEKGLLMSSQKPSYPHATKSITYQNMMERQPAEVRWFPEHYRIKRTLKYRRQSTGS

SEQ ID NO: 31612 - protein, 89 aa, Homo sapiens
  misc_feature (1)...(89): Xaa = X or * as defined in Table 2
MARRAAELANARGLGLQGAYKTAVFKIPARISACSTKDLMFVLLIHYHELPIHPQSMTKARPNAEFPEAEKLSRSGKQEELAEVSATQX

SEQ ID NO: 31613 - protein, 1573 aa, Homo sapiens
  DOMAIN (28)..(71): 1 kw MIND INHIBITOR DIVISION CONTROL domain identified by eMATRIX, accession number DM01756B, p-value=4.822e-15, raw score of 22.91
MGKFDEGKLPTDPHLMLRLAIETVAHDYDVIVIDSAPNLGIGTINVVCAADVLIVPTPAELFDYTSALQFFDMLRDLLKNVDLKGFEPDVRILLTKYSNSNGSQSPWMEEQIRDAWGSMVLKNVVRETDEVGKAAPMVDSLIARVGVMARGNAITLPVCGRDVKFTLEVLRGDSVEKTSRVWSGNERDQELLTEDALDDLIPSFLLTGQQTPAFGRRVSGVIEIADGSRRRKAAALTESDYRVLVGELDDEQMAALSRLGNDYRPTSAYERGQRYASRLQNEFAGNISALADAENISRKIITRCINTAKLPKSVVALFSHPGELSARSGDALQKAFTDKEELLKQQASNLHEQKKAGVIFEAEEVITLLTSVLKTSSASRTSLSSRHQFAPGATVLYKGDKMANYRQSIDKLKYSSVTDTPQIVQAKINAQQLSHVNYRADYEKNKLNYTLPQDVPQLVKAKTNAKLFSEVKYKEGWEKTKGKGFEMKLDAMSLLAAKASGELASNIKYKEEYEKTKGKAMGTADSRLLHSLQIAKMSSEVEYKKGFEESKTRFHLPMDMVNIRHAKKAQTLASDLDYRKKLHEYTVLPEDMKTQWAKKAYGLQSELQYKADLAWMKGVGWLTEGSLNLEQAKKAGQLVSEKNYRQRVDELKFTSVTDSSQMEHAKKSQELQSGVAYKAGNEQSVHQYTISKDEPLFLQARANAANLSEKLYKSSWENQKAKGFELRLDSLTFLAAKAKRDLASEVKYKEDYERSRGKLIGAKDVQGDSQMSHSLQMSKLQSELEYKKGFEDTKSQCHVSLDMVHLVHARKAQHLATDVGYKTAEHHFTALPTDMKVEWAKKAYGLQSDNQYRADVKWMKGMGWVATGSLNVEQAKKAGELISEKKYRQHPDALKFTSIKDTPEMVQARISYTQAVDRLYREQGENIKHHYTPTADLPEVLLAKLNAMNISEYKYKEAFEKMKGQMLGSRSLEDDISLAHSVYATSLQSDVNYKKGFEHSKAQFHLPLDMAALVHAKKAQTLASNQDYKHPLPQYTSLAEDLRLSCAKKAHKLQSENLYRSDLNFMRGVACVIPGTLEIEGRKKASELISESKYRQHPHSFKYTAVTDTPNLLHAKFSNQITNEVKSPDGFGMVFLKTARLLKIHVNVFGRLYKAAGEDARHEYTMTLGLPEFIRAKTNAANLSDARYKESWRNLRAQGYKLTIEALPFQAARASGDIASDFLYRHDFVKERGKLIGPQSVRDDPRIQHCRRMGQLQSELQYRRGATSSQAQFHLPMDMVHLVHAKNAQALASDHDYRTQYHKFTALPEDLKMAWAKKAHALQSELRYKSDLIGMKGIGWLALRSPQMESAKKAGELISETKYRKKPDSIKFTTVVDSPDLVHAKNSYMHCNERMYRSGDAESLHRYTLIPDHPDFTRARLNALHLSDKVYRNSWEQTRAGSYDFRPDAIPFQTARASREIASDFRYKEAFLRDRGLQIGYCSVDDDPRMKHFLNVGRLQSDNEYKKDFAKSRSQFHSSTRPSPAFFQAKEEFSSWPVMCTTGSPCPSPPATRSSWASGMLRRPTQLQSDVQV

SEQ ID NO: 31614 - protein, 248 aa, Homo sapiens
  misc_feature (1)...(248): Xaa = X or * as defined in Table 2
MSTKKLCIVGGILLVFQIIAFLVGGLIAPGPTTAVSYMSVKCVDAPGTLPFKLNNQIRGKCRKSPWDVSLAYRDDAFAEWTEMAHERVPRKLKCTFTSPKTPEHGGPVTMNVMSFLSWKFGSVGHKFYLLNIRLPVNEKKKIQCGEFGEDKDIRVGGDPPKWRLHQVLLEKVIFALGISMTFINIPVEWFSIGFDWTWMLLFGDIRQGIFYAMLLSFWIIFCGEHMMEYRLTIRECGPGSFQLAMCPX

SEQ ID NO: 31615 - protein, 97 aa, Homo sapiens
MPQNEYIELHRKRYGYRLDYHEKKRKKESREAHERSKKAKKMISLQTNQKNDEKTPQGAVPAYLLDREGQSRAKVLSNMIKQKRKEKAGKWEVPLPK

SEQ ID NO: 31616 - protein, 91 aa, Homo sapiens
  misc_feature (1)...(91): Xaa = X or * as defined in Table 2
XAAPGGSAAVTMPQNEYIELHRKRYGYRLDYHEKKRKKESREAHERSKKAKKMIGLKAKLYHKQRHAEENTNEKDYQDALKRGNTQTKRIG

SEQ ID NO: 31617 - protein, 61 aa, Homo sapiens
MSMTGDNGPHGDICQSSINKTFGRELRSPNRRGLMFMETFRGSAQELHTYTLTVQWRVDFN

SEQ ID NO: 31618 - protein, 78 aa, Homo sapiens
MARVRLALVAAWELAVKRRTTTPEVERRPPPGGCGKLGQAAADPHNIREPATTSSCYGYELQPPERIRGFTRENSSPD

SEQ ID NO: 31619 - protein, 109 aa, Homo sapiens [sequence omitted]

SEQ ID NO: 31620 - protein, 112 aa, Homo sapiens
MGSTEILEKETPENLSNGTSSNVEAAKRLAKRLYQLDRFKRSDVAKHLGKNNEFSKLVAEEYLKFFDFTGMTLDQSLRVSLCHPGWSAVAPSWLTATSTFQVQAVLLNQPPE

SEQ ID NO: 31621 - protein, 48 aa, Homo sapiens
MLLNTDLHGHNIGKKMTCQEFIANLQGVNEGVDFSKDLLKVLWDWRRC

SEQ ID NO: 31622 - protein, 364 aa, Homo sapiens
  DOMAIN (126)..(148): SPECTRIN PLECKSTRIN HOMOLOGY DOMAIN SIGNATURE domain identified by eMATRIX, accession number PR00683B, p-value=5.558e- 09, raw score of 16.62
MLLNTDLHGHVNIGKKMTCQEFIANLQGVNEGVDFSKDLLKALYNSIKNEKLEWAVDDEEKKKSPSESTEEKANGTHPKTISRIGSTTNPFLDIPHDPNAAVYKSGFLARKIHADMDGKKTPRGKRGWKTFYAVLKGTVLYLQKDEYKPEKALSEEDLKNAVSVHHALASKATDYEKKPNVFKLKTADWRVLLFQTQSPEEMQGWINKINCVAAVFSAPPFPAAIGSQKKFSRPLLPATTTKLSQEEQLKSHESKLKQITTELAEHRSYPPDKKVKAKDVDEYKLKDHYLEFEKTRYEMYVSILKEGGKELLSNDESEAAGLKKSHSSPSLNPDTSPITAKVKRNVSERKDHRPETPSIKQKVT

SEQ ID NO: 31623 - protein, 415 aa, Homo sapiens
MGSTEILEKETPENLSNGTSSNVEAAKRLAKRLYQLDRFKRSDVAKHLGKNVRSVIRCFTVQLEGDHRWEGIHEGFMKEVATQVGFEGQKILQQKETTLHIGVTGWKNIKWKHWGMKEFWLDRPNLFLAKERPRCLDVIYGIVDEEPDQISRAKGSRYNDLAGSLLKLDNAETNTETQKLEPRCIARHSEDSSASTIKCFIKKDMNSLNVTCSQLLEGSKVAFSCSWAAPQRLHQAAYISSVNVFRALGVISQEDTEHRHNATCLKEQQKLSSVIQSRGADIRISEQEEHVKGEDEDILGPGYTEDSTDVYSSQFETILDNTSLYYSAESLETLYSEPDSYFSFEMPLTPMIQQRIKEGGQFLERTSGGGHQDILSVSADGGIVMGYSSGVTNGLNDASDSIYTKGTPEIAFWGS

SEQ ID NO: 31624 - protein, 66 aa, Homo sapiens
MGSTEILEKETPENLSNGTSSNVEAAKRLAKRLYQLDRFKRSDVAKPPLAEQGNLQTSCRRISEVF

SEQ ID NO: 31625 - protein, 99 aa, Homo sapiens
MFRSTYVEMFNTLPFTLQHYGFAIARAFRYEIVRNKIEEAMMRILYIANKLELCSEISGWRVGARTWDERQRLCSRKTDSDSVIDTEVRDMYGKLKYED

SEQ ID NO: 31626 - protein, 218 aa, Homo sapiens
MRTKRKPRLTPSSRAGAEDFSKERVRLALSQAVLLYRRVHSLIRAPHSPTAFHHVKSGLHFELGNLPTRRQWQCQQATGHGPVRNQATQQEMDHLVARIPAQGPTDSTLRKAYPLTQISLTPIFQSCFFHIPDHPAKSLSMARKLVYHCGLAVSPSKQNAQPGNFKIHAFVDVAICSKWSVSSLPDDHTPHKSELCTGAREVAVEQRELLLAVNDHVG

SEQ ID NO: 31627 - protein, 64 aa, Homo sapiens
  misc_feature (1)...(64): Xaa = X or * as defined in Table 2
LIALIVEQLKSRGLFDSFRRDCLADVDTKPAYQNLRQKVDNFVSTHLDKQEWNPTMNKNQLRNX

SEQ ID NO: 31628 - protein, 33 aa, Homo sapiens
MVKVEILRSVTTLAYLQSEVALLCNRIHFFTKN

SEQ ID NO: 31629 - protein, 175 aa, Homo sapiens
MADAAAAGELARWAAAELASLCRGSDWRYWGQRGRCPINPASLPPGDPQLIASSWSSSRAGAFLTASAGLPGRRGHQGLPRPLSAHFPFINTSQQCPIITVICGADKSIDYQNYFLKIFIQYYGSRPSNLCFSMHSHVLLNNMFREIPETVEQSNSIVQKFRSGRKEALVTKSQT

SEQ ID NO: 31630 - protein, 172 aa, Homo sapiens
RGPSPPPPPTTAPAAIATSAAAALGPSSFTAPFNPPPLHVLGLLSWRRSYSRSPLWARGAAMADGGGGGGTGAWSMLKSRGLFDSFRRDCLADVDTKPAYQNLRQKVDNFVSTHLDKQEWNPTMNKNQLRNGLRQSVVQSGMLEAGVDRIISQVVDPKLNHIFRPQIERSNS

SEQ ID NO: 31631 - protein, 72 aa, Homo sapiens
MSAPAQSKELETYQAGGLCCASLAHIFPKHSQEPGNRLRERNERMEELQDQALLSVCSTDVTTAHAWLTVLV

SEQ ID NO: 31632 - protein, 59 aa, Homo sapiens
MSAPAQSKELETYQAGGLCCASLAHIFPKHSQEPGNSVPLWPSLEHHICTLQSVDQLRD

SEQ ID NO: 31633 - protein, 165 aa, Homo sapiens
MSGLEIYSTDSSRLFWGEQIFQKALAALLIKRNIVLSKEEEWKELQPNNAQAIHSSCPCKCQRQPSQKSLKPTKPEDCAVPLSPTFSPSTLRNLATGHRQDPFNKSSSETPIVQNLQLATGYHHSLWLCKIKDLEEGWGGGSYEKRQEKSSFDPMLSESVHEEES

SEQ ID NO: 31634 - protein, 250 aa, Homo sapiens
MGEPPHGIETSVVVSTRTVHWGLTANNTKFQPQSTEIQSSSALSNPPTTVHAQGSTNKTTYWHFEMHIASAVGHRIYKKEEAHLLLKAFQIKGQADIFVSKFENDNWGLDGYVSSGLERGGFTFQGDIHGKDFGKFKLERQGWVTIFLSLFLHLKSQYRSSQGCYEIERPQIVNGILKKDEGIKAEELHRRKLSPPGAGSDAACCLPIVDVLLPTWMQREQSESQTSRNDRGAKTATPPPVRRSKRTPAV

SEQ ID NO: 31635 - protein, 21 aa, Homo sapiens
MFQFQSKGQQAQDRGRASVSL

SEQ ID NO: 31636 - protein, 55 aa, Homo sapiens
MYPKLRTTSKRNTGSSSVLSLLAFGLELKHQLSWFSGLQAWTGATPLALLGLQLS

SEQ ID NO: 31637 - protein, 262 aa, Homo sapiens
MASFGWKRKIGEKVSKVTSQQFEAEAADEKDVVDNDEGNWLHAIKRRKEILLEGCAEKSKQLKDEGASLAENKRYREAIQKWDEALQLTPNDATLYEMKSQVLMSLHEMFPAVHAAEMAVQQNPHSWESWQTLGRAQLGLGEIILAIRSFQVALHIYPMNPEIWKEDLSWARTLQEQQKVAQRIKKSEAPAEVTHFSPKSIPDYDFESDEIVAVCAAIAEKEKTVSANKTMVIVSASGAIETVTEKEDGATPPDGSVFIKAR

SEQ ID NO: 31638 - protein, 296 aa, Homo sapiens
MFTIWTFTMPPLALETKDLQPLPQKLSKTPETSNIQVLKVPLLNVEFRGSSPYTTSRRESQRRPKASGIGMRRLLEKLLSPKRDYPRRTRSLHAGDAQSEVLPWAEASERDIAEVPSLPVFLVSAAERREVLKHENTVPPQSMGASSNSEDAFSPGIKQPEAPEITVFFSEKEHLDLETSEFFRDKKTSYRETALSARKNEKEYDTPEVTLSYSVEKVGCEVPATITYIKDGQRYEELDDSLYLGKEEYLGSVDTPEDAETTVEEEVYDDPEHVGYDGEEDFENSKTQSSLVKNQL

SEQ ID NO: 31639 - protein, 440 aa, Homo sapiens
  DOMAIN (311)..(358): Ribosomal protein L37e proteins domain identified by eMATRIX, accession number BL01077, p-value=9.483e-14, raw score of 16.34
MTSEKRHLRLSGGLKLEENLARLKKLPPPTGQPQLPDNAPKAPCLHSFPLEAEIIRPNSYLPSLDSWFPKKGFGPPLGVRTVHRSGQRKTTQSFPSANLFSGTTIPESGPRGWARPLAAALVTAAHERGKMRLRGLKTHREEPPPRYRAASRPVVGNKGCRNNVTDSMTYSKENYSLPVLEIGSRCNSTPETMRNLALNLGFYYHSPIKASGLLGEMADSKTRAGDNKMGLEHLVVAERKVASAKSLRDRNEEAAGELLSPKRDYPRRTRSLHAGTLSRCGPDEDSPIRSPENWESARLSGTETRSALPDEGNVIFGKRRNKTHTLCRRCGLRPTTFRSRPVANVATLQAQEKVHGFREGTTPKPRGQLLQHPVHLKNVNDCHAINVLVLKNTYLVLPQSTAVNAQVKHVTFQDALVQSQGWSLSTGNTFLPSSTFCHQG

SEQ ID NO: 31640 - protein, 39 aa, Homo sapiens
MHEGNVIVLESVATEDRTRCCRRCGSKAYHPSESRPVAN

SEQ ID NO: 31641 - protein, 53 aa, Homo sapiens
  misc_feature (1)...(53): Xaa = X or * as defined in Table 2
MKFGCLSFRQPYAGFVLNGIKTVETRWRPLLSSQRNCTIAVHIAHRDWEGDAX

SEQ ID NO: 31642 - protein, 24 aa, Homo sapiens
MLRHLLAALPSTLRSKYLRHCLCA

SEQ ID NO: 31643 - protein, 96 aa, Homo sapiens
MTPAQIQALLRKGEKFGRGVIAGLVDIGETLQCPEDLTPDEVVELENQAVLTNLKQKYLTVISNPRWLLEPIPRKGGKDVFQVDIPEHLIPLGHEV

SEQ ID NO: 31644 - protein, 71 aa, Homo sapiens
MWAQQPWSRSWEGQCLGGGRARALRVLAGHSRGKGREAEGGTLPLCWKRANTSPDSPLWLGQGGPLSSVLP

SEQ ID NO: 31645 - protein, 37 aa, Homo sapiens
MSTWNTSLPPFLGMGSSNHLGFEITVRYFCFRLVSAA

SEQ ID NO: 31646 - protein, 175 aa, Homo sapiens
MLREPVCSAFLRTVKKLSGRVFPPLAVKQTEAGDHQGYGRPGALAKMKFGCLSFRQPYAGFVLNGIKTVETRWRPLLSSQRNCTIAVHIAHRDCEGDAWRELLVERLGMTPAQIQALLRKGEKFGRGVIAGLVDIGETLQCPEDLTPDEVVVLDISDRRKQETIKATGGPGRLRR

SEQ ID NO: 31647 - protein, 48 aa, Homo sapiens
TEAADHQGYGRPGALAKMKFGCLSFRQPYAGFVLNGIKTVETRWVLLA

SEQ ID NO: 31648 - protein, 268 aa, Homo sapiens
MGLKPPQRFHWGTVMVNTECQLDWIEGCKVLILGISSGRSTDSSDPAPGKATDTQHQPMRAVVGAEPCKATGMELPKALGAHPSHQCALDVGHEVQEDQFGALRAIKKKKPAFLVPIVPLSFILTYQYDLGYGTLLERMKEFITVFPLGSILLLLRKMFKCEIGDMAHTVLEPVKEYSNQALSQIADDPFVTLCISVLYLRNHFINVETEAQISSLNKGRSTQAKSKKLLQVIQFGWAKAILGQGLDLNKCGSSGCALKGLDKALTDA

SEQ ID NO: 31649 - protein, 33 aa, Homo sapiens
MFKGRKHSAWEKDVGWEARPVSSFSHFSACFIF

SEQ ID NO: 31650 - protein, 73 aa, Homo sapiens
MGFIFSKSMNESMKNQKEFMLMNARLQLERQLIMQSEMRERQMAMQIAWSREFLKYFGTFFCLAAISLNSWSD

SEQ ID NO: 31651 - protein, 193 aa, Homo sapiens
MLEAARFVGRILICSSKNEGSHSWILTMHSAGLCLNSHGPPPSCPDPGQQVLLSSSFTNEQLRLSDFAKIIFQMRGFKPRLSASAVQAFFTSIITHGDNSQGSQLVCSLCIVLRGFHALPPFPLTTVSSGYRYGPVEARPLLTTTSKWQWPMEAQQLVSVHPQSSTSVPLEWALIVFLEDCQLSRQTLDLSIH

SEQ ID NO: 31652 - protein, 25 aa, Homo sapiens
MTPADESLLVGYSLNACGSLSTGPK

SEQ ID NO: 31653 - protein, 243 aa, Homo sapiens
MTPADESLLVGYSLNACGSLSTGPKSQWAEVQGEKLQTALLPYDGVTVCIFVLGSLEASGGPPFSYINSQCTHLPSPALPPRFSAQFPHMSKLYRLPGSQAGAAGKAPQNGAWTTQLELRVEHGNDLENKHNVKSALTEYTKCMELSSLTVSTPLLLSRDRTRRLQKAVLCQVSEKCRGLSYIADYELPGIWEITFILLLEDARRWEYDGKEHMITIPDSEPLEQVWSPPQSQLQWTVKKHLV

SEQ ID NO: 31654 - protein, 49 aa, Homo sapiens
  DOMAIN (3)..(16): C2 DOMAIN SIGNATURE domain identified by eMATRIX, accession number PR00360A, p-value=6.806e-10, raw score of 14.59
MDSNGLSDPYVKFRLGHQKYKSKSSHVLDGHKVAQLRLTFISHPCKGYS

SEQ ID NO: 31655 - protein, 139 aa, Homo sapiens
MLAELRALPLKEGSSPTWALALTGCGQDILVTSTETHPNTFKTEYTKTLTQLGGQWFIDQEKLFLAISHFREFTNMTTADEDKESTRESGTSSTPLLVQNPLTNPRNNGADNIRDKHPLQAFILSLAALTPHQTTSRTP

SEQ ID NO: 31656 - protein, 45 aa, Homo sapiens
MVFRVFLFPHFYLSFISPITVPTSRKLSLICPGVGKLCNCILYVE

SEQ ID NO: 31657 - protein, 197 aa, Homo sapiens [sequence omitted]

SEQ ID NO: 31658 - protein, 1307 aa, Homo sapiens
  DOMAIN (1227)..(1244): Serine proteases V8 family, histidine proteins. domain identified by eMATRIX, accession number BL00672B, p-value=3.554e- 09, raw score of 9.84
MNVKLKSKVIPSTLGKIEPLRCQRQKYLPAEKRKSTTLTLPRDAFKKSKIPSAMGMGLHQSSQSTAAKGKAKLELYSGPITLDSFSVRGSFIHISGGRINSILVSPSYRVVEVSYILFELIMNSMKTEENKSFSAMEDDQRTRPEVSKDTVMKQTHADTPVDHCLSGIRKCSSTFKLKSEVNKHETALEMQNPNLNNKECCFTFTLNGNSRKLDRSVFTAYGKPSESIYSALSANDYFSERIKNQFNKNIIVYEEKTIDGHINLGMPLKCLPSDSHFKITFGQRKSSKEDGHILRQCENPNMECILFHVVAIGRTRKKIVKINELHEKGSKLCIYALKGETIEGALCKDGRFRSDIGEFEWKLKEGHKKIYGKQSMVDEVSGKVLEMDISKKKALQQKDIHKKIKQNESATDEINHQSLIQSKKKVHKPKKDGETKDVEHSREQILPPQDLSHYIKDKTRQTIPRIRNYYFCSLPRKYRQINSQVRRRPHLGRRYAINLDVQKEAINLLKNYQTLNEAIMHQYPNFKEEAQWVRKYFREEQKRMNLSPAKQFNIYKKDFGKMTANSVSVATCEQLTYYSKSVGFMQWDNNGNTGNATCFVFNGGYIFTCRHVVHLMVGKNTHPSLWPDIISKCAKVTFTYTEFCPTPDNWFSIEPWLKVSNENLDYAILKLKENGNAFPPGLWRQISPQPSTGLIYLIGHPEGQIKKIDGCTVIPLNERLKKYPNDCQDGLVDLYDTTSNVYCMFTQRSFLSEVWNTHTLSYDTCFSDGSSGSPVFNASGKLVALHTFGLFYQRGFNVHALIEFGYSMDSILCDIKKTNESLYKSLNDEKLETYDEEKARPRPAYRRLGCFRFRSRFPILGTGETGRIEAGKDRRGHGVSETGSCSRRQGGALWVSPAQPIGFRSSWSSGAFASSNTSGNCVERWIPGRVLARRAAVRKEIETHQGQEMLVRGTEGIKEYINLGMPLSCFPEGGQVVITFSQSKSKQKEDNHIFGRQDKASTECVKFYIHAIGIGKCKRRIVKCGKLHKKGRKLCVYAFKGETIKDALCKDGRFLSFLENDDWKLIENNDTILESTQPVDELKRQILSGLFILTCRHVIDSIVGDGIEPSKWATIIGQCVRVTFGYEELKDKETNYFFVEPWFEIHNEELDYAVLKLKENGQQVPMELYNGITPVPLSGLIHIIGHPYGEKKQIDACAVIPQESPEYVPMYTQRSFQKIVHNPDVITYDTEFFFGASGSPVFDSKGSLVAMHAAGFAYTYQNETRSIIEFGSTMESILLDIKQRHKPWYEEVFVNQQDVEMMSDEDL

SEQ ID NO: 31659 - protein, 176 aa, Homo sapiens
MARNECVDGQPGHLVDFTCLVTYRVSGESRAPHPMAELFLVIYHMEEKLETHIPRKQERVEEKGPCICKALSPNSVNQRDAREKEMLQQLQNRDTKQVLPSKASAHTPLDKAHHTAKPDGSGGEKDFLHTRTTPPPLLQGRAGNIFNNKTVYRSNTIITIGRWVLRAIELRPKDNN

SEQ ID NO: 31660 - protein, 259 aa, Homo sapiens
MSNKRKIDKLDIKIKNFCASKYAIKKVLKEVTILKCSSSLRNADVWIKYGGAKNTGPEVGEVALAPPLCLTVKFIYRPGSCLFTSFPVSNLSSGKGVKFILKNSYQLDVGPARTGVSKFFGKGPESKRFRLVNTKAVKTLTGNIHSSAPMLKSHESHRKINFDNILEAMRLTGLQKCTSVCGNVPEGHTVYRAIASLQIRCPPRTFQGTNCLNSSGKKISKYFRLETKFSVNNLEHQQCLSFFVKDGFGSENIYILPKA

SEQ ID NO: 31661 - protein, 82 aa, Homo sapiens
MARNRGFLSAVFCFTAPSGTDERGATVWLPPHLTHLSAQDGSKAQETHWTREEVLICEGQPATTLTVGNLAEDSPRYSPDRL

SEQ ID NO: 31662 - protein, 47 aa, Homo sapiens
  misc_feature (1)...(47): Xaa = X or * as defined in Table 2
MDTLLRLSSGAGLGDFGRAGEVVFKGWRGQLMEPTAGSPGSPEESVX

SEQ ID NO: 31663 - protein, 51 aa, Homo sapiens
MSGGWMAQVGAWRTGALGLALLLLLGLGLGLLSQRLGSQVEYTPVDVFALA

SEQ ID NO: 31664 - protein, 122 aa, Homo sapiens
MSGGWMARVGAWRTGALGLALLLLLGLGLGLEAAASPLSTPTSAQAAGTNEILPEGDATTMGPPVTLESVTSLRNATTMGPPVTLESVPSVGNATSSSARDQSGSPTAYGVIAAAAVLSASL

SEQ ID NO: 31665 - protein, 320 aa, Homo sapiens
  DOMAIN (131)..(153): LOW DENSITY LIPOPROTEIN (LDL) RECEPTOR SIGNATURE domain identified by eMATRIX, accession number PR00261A, p-value=3.676e- 11, raw score of 11.02
  misc_feature (1)...(320): Xaa = X or * as defined in Table 2
XALGLALLLLLGLGLGLEAAASPLSTPTSAQAAENARSLPPMLLQALAELGSQVEYTPVDVFALAKRGSVQAAASVVPISRDFACLCGSQPVTTVLLEKGPASASQASFASISQAPAQAVPTHQVPVPHQWLMRALTWRCDRDLDCSDGSDGRSARCSVQPGHRHPPPFVLAPSPGRLRPLGLLVAMKESLLCQNRRPRCPEDKHLPPRHSALGVAGQEESSDAEGPRVPEKAVAKGSSPASRPGAELRPRTRGRPAAGVLRPYLQARAYLIRGGPGGRTGPSVRLGPGPARPGPSAPLAPLRPAPGPGTARRADSAADQ

SEQ ID NO: 31666 - protein, 55 aa, Homo sapiens
MEYWNKKLPVLRQQLLIPQTLVCCFCGLAEPRKHVKAQSPRKTVCLQETLPTGIG

SEQ ID NO: 31667 - protein, 127 aa, Homo sapiens
METETKESGKNKKIPPKHQIENVGVGGLGAQDGLNQIGKIPPVLSCSQSRFGTMPAAFPCVFPPQSLQVSPQMSSKAWEKQSLPLPGLRGSPVERKNRNYDLCLPYCLRNIFNCRGKPVLFWRKANR

SEQ ID NO: 31668 - protein, 228 aa, Homo sapiens
  DOMAIN (64)..(84): PROSTANOID EP1 RECEPTOR SIGNATURE domain identified by eMATRIX, accession number PR00580G, p-value=8.440e-09, raw score of 8.45
MLAVHTEDKLRRESRHELLICPEMCCVWNLWVLGLTDFKNEAAWTLVVSATVLKGGASEVCSFLGLTDIKYEAADPRSERYSSLRRRIQSLSGVVYSYRWVRGVAGFRSEAADLRDLKAVRTQTPLGGRWDRAPAALLRDARAAQEPTEAGELRHGGLQCWDYRHEPPHLAKEDTLDGARVEDLACDLLQLPHCSFHTVALEESYPDLKSQCLGNIRTGQKDIYMSPQ

SEQ ID NO: 31669 - protein, 112 aa, Homo sapiens
MDTNLDVIECGMCWKRACVSEASGSQAVSVRSEVLSVVSNCHANVQGALSKGDESSICKPLNGAAGFPAEMPCPVLCRPSKEEKTRRVCMSLQIEEAKVLQQHRNKFENRST

SEQ ID NO: 31670 - protein, 79 aa, Homo sapiens
MNLIPFVETAMGLLNFKAVCEETLKVGPQVGLFLDAVVFGGEDFRASIGVKDISLSLFLCVCVYVCIYFFFAPQGWTFT

SEQ ID NO: 31671 - protein, 159 aa, Homo sapiens
  misc_feature (1)...(159): Xaa = X or * as defined in Table 2
MAPCAGSHDWAASLETCCMPSAFNFEGHRLGLHGSGGEPERALRIGFYFLLPINHGIMPDKDANDPGNAVCEETLKVGPQVGLFLDAVVFGGEDFRASIGATSSKETLGYSLRPAKDCCHSESLWSPSRRSGCTLTFEMGAGACLGQFTEEGSRHGLHX

SEQ ID NO: 31672 - protein, 22 aa, Homo sapiens
MAFVRDGMNVKLRFNSRFGTQE

SEQ ID NO: 31673 - protein, 76 aa, Homo sapiens
  misc_feature (1)...(76): Xaa = X or * as defined in Table 2
MDRILVQRGRLREMEEGETNKKCPDTLAGFQHTELTRCGGEIHIQAGENGGMGKDDSLLEQANNAIGDYFADRQKX

SEQ ID NO: 31674 - protein, 121 aa, Homo sapiens
MAIWKHIVAHSYVRTVRTRAIRMDTGNDFAKTTTGRRIECLIHCHDMPYSIASDKEIHFTAKKEKKRWKETVASFSVHGRGERISEFGGSRHRQQKSSSVPQYQLTEQRYPGSPIPLAIAD

SEQ ID NO: 31675 - protein, 152 aa, Homo sapiens
MHNIWQDPALLSPVAGCPVFPLRKKSQFLSSWCFRLEVHLLVPDPLCLVMHMSLLIPPPLPAPTFLRIRGDRQFGGPAGLSLASTVFGRNRSGDSLPASDRHKISSPLATSGTIFSAISCFWDLPAPFLWLALSCQPNHESPGFVRIISTRR

SEQ ID NO: 31676 - protein, 28 aa, Homo sapiens
MPGSSLLSSSPVALPRHRAAPLAQDPLA

SEQ ID NO: 31677 - protein, 140 aa, Homo sapiens
MGELAVTAVISKKQPENGVRLAKDTEVARNPGPGHFLVLWASPTNVLEPLFPSLAPENIHLLYDAQKVALPQTTQSPSGSKLCVHQKVHKTFIGLSKFKYAKHRIRAGTHKVLKRELLSYRTHAKTRPTVSLPGELWVEP

SEQ ID NO: 31678 - protein, 145 aa, Homo sapiens
MEQELKEIKECISKNSIVCRENPNSVHEGTEKRGGSRLLKDSTCRGIFASWASQVSSWGHSCKVLVRWVACGRHAFRLIVRLPVAVAPERSQEILITQLKPHWLTSTHAFHSFRVPERQESTSTFKAQHGIRGHVPKSDPLLHGD

SEQ ID NO: 31679 - protein, 63 aa, Homo sapiens
MLRKHPLAYIGSVEHGHIGNCQLNGQEHEDSVNYRGSNNSTHYRTVDGINQISATASRRSSAL

SEQ ID NO: 31680 - protein, 70 aa, Homo sapiens
  misc_feature (1)...(70): Xaa = X or * as defined in Table 2
XNNEFFGEGKTRQAAKHNAAMKALQALQNEPIPERSPQNGESGKDMDDDKDANKSEISLMFEIALKRNMP

SEQ ID NO: 31681 - protein, 108 aa, Homo sapiens
  DOMAIN (52)..(66): PROTEIN RNA-BINDING RNA REPEAT HYD domain identified by eMATRIX, accession number PD00567B, p-value=2.853e-09, raw score of 18.23
MNLFQKDLLRNGESGKDMDDDKDANKSEISLVFEIALKRNMPVSFEVIKESGPPHMKSFVTRVSVGEFSAEGEGNSKKLSKKRAATTVLQELKKLPPLPVVEKPKLFF

SEQ ID NO: 31682 - protein, 495 aa, Homo sapiens
MPPKLCEQKTLIASETLKTQSTMKYVQTCAESSFSITVLHSSSKGRPKPPLWGGIRSCLHTDEKIVFNAQGTVAVLESMIGELISHSECFFSLSLNVTSSMLLSNVSETFHTTTTAAEAITLLRNQKGDSVLGAGACGGVPIIFSRNSGLVSITSRENVSILAEDLEGSLASSVAGPNSEGGSFILSSSGSQLIRLIPESSGKIHQHILPQGQGMLSGIGRKVSSLFGILSPSSDLTLSSVLWDRERSSFYSLTSSNISKWELDDSSEKHAYSWDINRALKENITDAIWGSESNYEAIKEGVNIRYLDLKQNCDGLVILAAAWHSADNPCLIYYSLITIEDNGCQMSDAVTVEVTQYNPPFQELGNFLFPREKIVFNAQGNSGTGVLFTSRGKCVYIGQKDLGRGLLASSVAGPNSESMIFETTTKNETIAQEDKIKLLKAAFLQYCRKDLGHAQMVVDELFSSHSDLDSDSEVDRAVTQISVDLMDDYTASDPR

SEQ ID NO: 31683 - protein, 61 aa, Homo sapiens
  misc_feature (1)...(61): Xaa = X or * as defined in Table 2
XSSALKIEEYSETETRRLENLALEDFLVSSLESSLAVTQGSNHWGQGKAPKAVKDPGPFHR

SEQ ID NO: 31684 - protein, 188 aa, Homo sapiens
MNVKHTLECEEHPGVVVLAGDPSTVVSGSGWGKEPFKCSSQQATDEETEVRRSCDLLKVTKPGPGALSDGAATRRFPGPAGSPSADRKTKPKRIINTQQTKLLISPKREMHPFHTFIQHLPNLPCAGQYTRALESKDNEMVSVFEELQSGVTLAQKASHWGSGKLEPCVPLATNQLYNFEQIWNKLLL

SEQ ID NO: 31685 - protein, 49 aa, Homo sapiens
MTRFKGQSFLETSASVGDDLFETLQKLTDVPVSPSLLSLCAPGVRSDLW

SEQ ID NO: 31686 - protein, 42 aa, Homo sapiens
  misc_feature (1)...(42): Xaa = X or * as defined in Table 2
MALLERRLSGYPLALLDSRLEEMGKSIDQFASLGSFTHCPSX

SEQ ID NO: 31687 - protein, 183 aa, Homo sapiens
MDRFGKSLYQRRYTDGKLSTEKAAQYHQRGNLDTQRDTRNAHTEEKTTRGHSKKATICKRRREASEEMKLANTLILDFKPPELCPAAKPFCSVLRWQGLAASIAQDAGSLQQVSDLTIWNLSQNSSTARTPRGRKEKCKQNRKNGKFLGRIFAVFLAKRNANTHTGECRIFPSNRSKRRNHWL

SEQ ID NO: 31688 - protein, 78 aa, Homo sapiens
  misc_feature (1)...(78): Xaa = X or * as defined in Table 2
XTTGKILEKIYLAPYCKFRYLSWDTPQEVIAVKSAQNRGSAVARQICYEKSNDLLFLKHAVKDRIHGNLDGIGDHYSK

SEQ ID NO: 31689 - protein, 63 aa, Homo sapiens
  misc_feature (1)...(63): Xaa = X or * as defined in Table 2
SVSPILSTGLGTELCSVKIYEMQLNCMAHWSQAHRLWGHLFEIPKALDANPKASLSKKVEAEX

SEQ ID NO: 31690 - protein, 75 aa, Homo sapiens
MHYKEIISILTSRQKEQTVKQRCTKIGKLKADLGDMPAAAERFMGTDTQLSLSDKHNKETQKKSKPLINFPTLNP

SEQ ID NO: 31691 - protein, 74 aa, Homo sapiens
  misc_feature (1)...(74): Xaa = X or * as defined in Table 2
MGSGLPLVLLLTLLGSSHGTGPGMTLQLKLKEGQEKDTGFNGWHFKEVTSLLTTSSQKEQTVKHRQDSWDTEGX

SEQ ID NO: 31692 - protein, 75 aa, Homo sapiens
MSESELQMLASLRWQQNEELEDAGTSHGLSASQVDNCNVSISTSSDDTTHLELLPATPCQPGSPLSERNEPTFSF

SEQ ID NO: 31693 - protein, 263 aa, Homo sapiens
  DOMAIN (188)..(235): kw TRANSCRIPTASE REVERSE II ORF2 domain identified by eMATRIX, accession number DM01354V, p-value=1.000e-40, raw score of 12.97
MNPLKALYLQQRPEDETELHPTLNADDQECKRNLSDIDQSFNKVAERVLMRLQEKLKGVEEGTVLSVGGQVNLLIQQAIDPKNLSRLFPGWKAWCKASWTSGLHRHFKDEKDKNTENNCDKTSRGTIRQQHSRFMKIRGSADTAADTQLISNFSKVSGSKINVQNSEAFLYTNTRQTESQIMSELPFTIASKRIKYLGIQLTRDVKDLFKENYKPLLNEIKEDTNKWKNIPCSWIGRINIVKMAILPKRASTTEETLNNQMYK

SEQ ID NO: 31694 - protein, 520 aa, Homo sapiens
  DOMAIN (105)..(132): Mrp family proteins domain identified by eMATRIX, accession number BL01215A, p-value=4.964e-11, raw score of 9.75
MKLMDTLNQCINAGHEMTKAIAIAQFNDDSPKARKITRRWRIGEAADLVGVSSQAIRDAEKAGRLPHPDMEIRGRVEQRVGYTIEQINHMRDVFGTRLRRAEDVFPPVIGVAAHKGGVYKTSVSVHLAQDLALKGLRVLLVEDTSLSTPAAPMVDSLIARVGVMARGNAITLPVCGRDVKFTLEVLRGDSVEKTSRVWSGNERDQELLTEDALDDLIPSFLLTGQQTPAFGRRVSGVIEIADGSRRRKAAALTESDYRVLVGELDDEQMAALSRLGNDYRPTSAYERGQRYASRLQNEFAGNISALADAENISRKIITRCINTAKLPKGYPLDQTADRTLSCRSVGVCWRSTPDPVCLGTSRGGCRTADFHEPRMLLSDRSSGSFVSEEYLAVQAPCMKSNNALIVILGTVTLDAVGIGLVMPVLPGLLRDIVHSDSIASHYGVLLALYALMQFLCAPVLGALSDRFGRRPVCWGSSRLNGILPRKEKVHQSIQPVYRSVQRTYPENLSRMAIYVRQKIG

SEQ ID NO: 31695 - protein, 318 aa, Homo sapiens
  DOMAIN (165)..(208): 1 kw MIND INHIBITOR DIVISION CONTROL domain identified by eMATRIX, accession number DM01756B, p-value=4.822e-15, raw score of 22.91
MKPQTFMMSVTVLKDGVKLQTFAVSVTALKGSASGVVRSFRWVRGLAGFRSEAADLYGPSAAGLLEFARGPIQTLFAWVPAAVAAEQRIFVNRECCCLMVPLEVLSQRSTRPCEPTCWPGLDIIPSCLALHRIETELMGKFDEGKLPTDPHLMLRLAIETVAHDYDVIVIDSAPNLGIGTINVVCAADVLIVPTPAELFDYTSALQFFDMLRDLLKNVDLKGFEPDVRILLTKYSNSNGSQSPWMEEQIRDAWGSMVLKNVVRETDEVGKGQIRMRTVFEQAIDQRSSTGAWRNALSIWEPVCNEIFDRLIKPRWEIR

SEQ ID NO: 31696 - protein, 253 aa, Homo sapiens
  misc_feature (1)...(253): Xaa = X or * as defined in Table 2
XCFLENWTYENREGKGREGKIGPSAAVLLEFARGPLQTLFAWVPAVVAAEQRIFVNRECCCRIVPLEVLSQRSTRPYKGHKYLVFEANTGTENGYQGEESLFNKAYYGGGTNFFRKESQKLQQSAKKRDAELANGALGIIELNNDYTLKKVMKPLITSNTVTDEIERANVFKMNGKWYLFTDSRGSKMTIDGINSNDIYMLGYVSNSLTGPYKPLNKTGLVLQMGLDPNDVTFTYSHFAVPQPKATMWLSQAT

SEQ ID NO: 31697 - protein, 1984 aa, Homo sapiens
  DOMAIN (822)..(833): AT-HOOK-LIKE DOMAIN SIGNATURE domain identified by eMATRIX, accession number PR00929A, p-value=1.714e-09, raw score of 3.25
MEKRKSALNKVLESLCIHHQQQVLAMLKFLVQEQNAASLCCCNTSCVVSSESQKPLIEDDLCGLFCSCEYRLAERGCLQNEKQSPGLEPLPVCIKDLHCLSCQTVTVEHVKPVVNRGIADSYNSHRCCSGLLPNIHSTKSAFRSPLLSKEVCDLSVTLKDACRSRSPSPPPLSPIETEGFEKLKDVISEISALENNKLEANINQPPSLTPAEISSNKSDHQDKILKTKKSSNSYSLLSNDSNNSTTNHEKGETAVIFQDLMDRINEKLKSIETTDMTSLVKLSSSDYNTYNDLKLGDFITSLLHNAKASDYSFMELLSQHDKKVENKIIQTRFRKRQETLFAMRNSSDSPMFRRQSLQIKRELASLDENFTRKKYTEKSSRKLTQNNEISSSDKGEFYHDQGPSLQNSKRLQGKNHAETSFSPNYALQSLQLPLHSSETNLSFNEFSESFKTTSPEKMSIRKPQEKSADGKQFLQNDRKNPKLGNTQTLLRNDVSGLLSRTKRNIVPPGWYSVYVTNNYVFKKSPKAKKVSESTTKNDPVKNIHIESSHNIDLNKIAMNSNLQVVVKRLEDTISIAKKSWNNQPLSEGYKASKKLIEIDGKDQHADRNMTLTLNRMTCKEQSLSKSVVASGNIINSHCMPTVDLNNKRLENLKKSSILDMGRLISSVENVPAKYEGTESSSVSNYSSPIKLMFLSEVKSSEGVKYTLTSVGTSHSNVVLPSEKPTTHHVTEEKTETNEDISNANSENYHSSHYDTDTFQRELNKFSHAKETAGSSTMFIGDINSDKPQEEPKDNSSSATDPSFKRKPGRPKKIGPQVVKQIKRPIGRPPKPKIDQTNITVCQNEPFSAGRKSPECLISEVKEGIYKKSITVTVIYGRSRRTKRHVSEGRVNISNLMSLNNNAGDFPTEYNSPRNISEDKIDLGERISAVASLTTESEILGSGFEYVRPIKNKSVIPQPSKNIIRPNQKPLAISRKPGRPAKVKISGISVTINRTSPQEREVSISSCLPPLEQDNTSGKNLPEEKYDQQCTQMDKIRHTEADIFKNGSKRMIATVPLRHSIRDRKPSLHFLHSLASSSSLIYRNALLHKSYKLHLQKNKSQKEKHRHSKMKIAYKDTPRNRLSRNAKKCLEDNKLVPISEVSLDPIISSNPLLRWWATSASNDSLLEELNNRFEQITNAWVQVSGDEAENCIHKKREHIENDHFKVASPLETCLLELEVSPVKMLFQKKYDLNELCTWFMQTTETQSLSLVRKANARNPLEVINTRGIKLGTKYSDFNASPFRKHFKKFALSSPSKSAEKLHILHKVANSPLLNVKSNLAIARLKRTEFKRLHHERWKREGKLHNHGTVDWNSKRRNLRFFCQNQFLNKTEGETNADIPLQGKSIVDNQCVLPPEIRGDLQQRVVMPDFKIHASFENKFKSEAKENGTNCSQKDFQKGPRLENVCPNSWRSKTLKDCRIFLRKLNCLEHRNTFKLNTIIYSPESTDSGNTHQTHMEESKRFTLRSHSARQNSFKKQSKEIENANTNNPSADEFADHLGNSKLSKCVNFDKNPDSFEVLSNLNKRKRPPWKITEMSTKRHKRQSCNSGQMANYFSKSLDLWNFELEKDDLGYMAEEISKQQSIQEETWVLLKAFSFIKEAEHKSSENLQPDNLIEKKDPFSEEKFKLATEICITNEEPHVNLQANRENVSKAWLLIQRVEAPVPWRLPHAVEPVGAQKSRIEDWEPLPRFQKMCGNAWMPRQKIAAGAGPSWRTSARAVQKGNVESQPPHRVPTGALPSGTVRRGPSSSRPQNGRSTKSLHHTPGKASDTQSHPMKAARTGPSAAGLLEFARGPLQTLFAWVTAAVAAEQQIFVNRECCCLIVPLEVLSQRSTRPCEKKQPEYPVDAACSSDELAISLIPDVFPASSESLVDKHKEKRKGCIPVPGSMLQVKTDEKLNVSDENTASCPLSPIKMCLNRPIEWNLNLTTASLTSCTVHNQNLKSEEK

SEQ ID NO: 31698 - protein, 217 aa, Homo sapiens
MGHQRGHSKSHSKALSSSRRKRMSVLVEEMEGSGHGWDMERSGEDQFINRGTSITRNSKNQDVCHIAFGSKVLGPPPLSGRRNNMKISSEEYDWRNYQPSQMSESELQMLASLRWQQNEELEDAGTSHGLSASQVDNCNVSISTSSDDTTTWNSCLPPLKHFSMAHCPHYGPAEELEQVLVFLFFSGGCRTADFHEPRMLLSDRSSGSFISEEYPPV

SEQ ID NO: 31699 - protein, 432 aa, Homo sapiens
  DOMAIN (135)..(176): kw TRANSCRIPTASE REVERSE II ORF2 domain identified by eMATRIX, accession number DM01354I, p-value=1.000e-40, raw score of 15.55
MAEQEQLRSTAPSVTEAEDRGRLTPHTAGYSSETKLPEERSDSSIRGSRKSAGLQPPLLQANRVWSGPLANSNRPAAEAPHHTYSKIDHILGSKALLSKCKRTEITTNCLSEHSAIKLELRIKKLTQNHSTTWKLNNLLLNDYWVHNEMKAEIKMFFETNENKDTTYQNLWDTFKAVCRGKFIALNAHKRKQERSKIDTLTSQLKELEKLEQTHSKASRRQEITKIRAELKKIETQKTLQKINESRSWFFERINKIDRPLARLIKKKREKNQIDAIKNDKGDITTDPTEIQTTMREYYKHLYANKLENLEEMDKFLDTYTLPRLNQEEVETPNRPITGSEIVAIINSLPTKKSPGPDGFTAEFYQRYKEELVPFLLKLFQSTEKEGILPNSFYEASIILIPKTGRDTTKKENFRPISLMNIDAKILNKILAN

SEQ ID NO: 31700 - protein, 309 aa, Homo sapiens
MEQSWTENDFDELREAGFRRSNYSELQEEIQIKGKEVKNFEKNLDECITRITNTEKCLKELMELKAKARELREECRSLRSRCDQLKERVSVMEDEMNEMKREGKFREKRIKRNEQSLQEIWDYVKRPNLHLIGVPESDGENGTKLENTPQDIIQQNFPNLARQANIQIQEIQRMPQRYSSRRATPRHITVRFTKVEMKEKMLRAAREKGRVTHKGKPIRLTVDLLAETLQARREWGPIFNILKEKNYQPRTSYPAKLNFISEGEIKSFTDKQMLRDFVTTRPALKELLKEALNMERNNWYQPLQNHAKL

SEQ ID NO: 31701 - protein, 313 aa, Homo sapiens
MRSIGKDVEKREPVYTVGENGDWYSHFGKQLFRWRNVGYLGDSSTAMATAPGPTDAQGRAPACGCRSLATLPTREVPGRKERCQPKRGDSVLSGMGLRGSAYCSMQLNVGSMAGHAREALGTGQQFVLWRNDDSSLPEYVHYDKSSHGNRPQIAKNRCPQVTKMGLETYQSAKVYGRRNSGRVQIKLVIKQPTQSSGWLLPFLHEELLKDFCTHEYNTTHSIASLRPRWVTITSVRSYQTFIHSKFASYVKYAPIKPSYSQNSPPMSIFSEVKYHRSKLLLPCTELLKTNHRASNARFGKLWLQKTTNLVMAF

SEQ ID NO: 31702 - protein, 39 aa, Homo sapiens
LELRYANRILWRTSYKDKVAKAQKSWFAFKVELKSLVEN

SEQ ID NO: 31703 - protein, 534 aa, Homo sapiens
MCRDLSGVLMSNLKPMSEVEQFHPKTSPNLRGKHVSTNLVPQCKKIFAVQDDKLVALLTKTSIFSDATKSRRQVDKVEGAERKAVAYTKARNIRLNGVPQSCISLVRGAPQEGGWLEASEWKKKGTKTTKKRRPQGLSTDSNSAGRGGRLSTSGNGPRTGFHLFLAPISVAHIIGLNKQCTSTLKTKSRPGRQSFSTEAPEGRHFATTEYWVHVSFRGGQELSAHWQWRDDGHPAVQWASNASRLGGLPGVPRLPLGLGPKRRSAPAAAPRAPLSLSVLGELGGGSGGGGGARVRAAPEPRYSALEPRILGPPSGRELERGYRKNPAGPGTPPSGANCTAGSEPLLVGLPYTVVIHYAAIFRRLSTDFTKAPTEPGRGTEAPPPTLGIQFDMRVGGDAHPNHITANTVFSIHAQEDLCPSAMMFKGQLYSLGWGPRSEPALFCPEFPPPVPIINNISKCLGCRRVTKAANVQVPVQPELQLGTSEVEQIPEMDQEYIDTVHRAPHDHFPAILPVSFPPSLPAQREGATDTLDFC

SEQ ID NO: 31704 - protein, 276 aa, Homo sapiens
MELVFCFPYGITGSNSLMSIAPAPRRDPEDSVKVAGSSIPREDLEIPTRYELTERLMCCGRGWYRDLGSEALQGWVHEGSKEKQLCLNEDAVHEWGLSPTRGSSALYLGFWGRPHPCAAATTTAAGLAPPGPKVKVEPGERQAGAERRFGPSPSGRRGSPWLRRELGKGVARVRGMQERAGAQVGDRSQAGADKSTKPRRVRRPLDSLGVRHLATAKQLKLNKMAKKTIFKQLRLNEVTSQENTNIKTPNATSLLPKMGPDPDPKRGFLDFAQERI

SEQ ID NO: 31705 - protein, 111 aa, Homo sapiens
MGFSGVWLCPFSSSAGRLGLWELVAGLRCTCPVSSTLQVRKAGLELRDLARVTGQRAVLQLRVPSPHAFLSTRLKIVPGEPQCSRATEGAGWDLLYSRRPPWTREAGAWGA

SEQ ID NO: 31706 - protein, 105 aa, Homo sapiens
MHTEECSLTEQEHRHLGQAPHSKVHLNKKPSKSKEHQLSGQCLTLSPRLEYSSIIIALCSLKLLALSDSPIAVPRVARPSEGFPDGLKSPLKELHKEYGEGGVTI

SEQ ID NO: 31707 - protein, 95 aa, Homo sapiens
MKEERERIGAKHQELREKQARGLLDYATGAIGSVYDMDDDEMDPNYARVNHFREPCTSANVFRSPSPPRAGPFGYPRDGHPLSPERDHLEGLYAK

SEQ ID NO: 31708 - protein, 106 aa, Homo sapiens
MPSLFGKKKEDKGGKAEQKGTLKHGGLREEELEKMKEERERLEPSLQDQSSPLNLSLKHRNFSESALHLAVVGTLQMGPPLEAGLLREPPVEAFIVSHPLCVHLKI

SEQ ID NO: 31709 - protein, 239 aa, Homo sapiens
MPSLFGKKKEDKGGKAEQKGTLKHGGLREEELEKMKEERERFTSPIISKDGQRSKALPRKVEVYVAYNTPDIQQKGLILILFQIMISTEGLSFSFQKCPLHSVLNKAVREPFTMIGAKHQELREKQARGLLDYATGAIGSVYDMDDDEMDPNYARVNHFREPCTSANVFRSPSPPRAGPFGYPRDGHPLSPERDHLEGLYAKVNKPYHPLVPADREKGERGKWPMECASQVHPFEKIPQ

SEQ ID NO: 31710 - protein, 312 aa, Homo sapiens
MALRLVIPALWEAELVGALMLAALSHLHRFLLSMWVLPPGTFTDAFPGLLFHFPRRSQKDCLLGLSKSDQRAMACYFGILLIVSATLCFGMNYYLDEFANLLDELLMKINGLSDSLQLPLLEKTSNNTGEARTEESPLVDISSYQAAEMVMMARTLATCLQHAQGLGFEACLPILSAPHALSHWTLTTCLWQLGFMSAVLILKYTRALLAQGQFSGPFVIDKGVRLELIGLISRVWEVSEQENSKEEVYRHEEGITVISDLLLGRQWQQGHKGICLQLMLPFSRGKHRTSGAFLMFSLELFTVAQLVPISGS

SEQ ID NO: 31711 - protein, 191 aa, Homo sapiens
MEPASASCEGFRLPPLMVEEEEEPPLGSLAPPTDSKATEKEKKPPMATTKGGRGKGKGKKKGKVKEEVEEETDPRKIELLNWVNALEQAMLDALVLDRVDFVKLLIENGVNMQHFLTIPRLEELYNTSNLPPDYHISLIDIGLVLEYLMGGAYRCNYTRKNFRTLYNNLFGPKRAYDNLPDVRVISLGCCD

SEQ ID NO: 31712 - protein, 38 aa, Homo sapiens
MEPASASCEGFRLPPLMVEEEEEPEAHIGYGGITEHWT

SEQ ID NO: 31713 - protein, 154 aa, Homo sapiens
  misc_feature (1)...(154): Xaa = X or * as defined in Table 2
MAVVKTPSRGLKNAKEPFNNASPHLLKNLVEEPKKRKVVPNHLLESKVYAKLVNNKVIQARPGIIHFGGYQVEKQHQQILHLVNVSNEDTRVHILPPQTKYFEINYVRKSGACPNKMPPVFQEHHLVPGLSLTVTVTFSPDEWRYYYDCIRVHX

SEQ ID NO: 31714 - protein, 233 aa, Homo sapiens
  misc_feature (1)...(233): Xaa = X or * as defined in Table 2
MNVYSLSVDPNTWQTLLHERHLRQPEHKVLQQLRSRGDNVYVVTEVLQTQKEVEVTRTHKREGSGRFSLPGATCLQGEGQGHLSQKKTVTIPSGSTLAFRVAQLVIDSDLDVLLFPDKKQRTFQPPATGHKRSTSRRRXWPQLPSGLSMMRCLHNFLTDGVPAEGAFTEDFQGLRAVETISKELELLDRELCQLLLEGLEGVLRDQLALRALEEALEQGQSLGPVEPLDGPAX

SEQ ID NO: 31715 - protein, 567 aa, Homo sapiens
MAKDRVAMAKDCALAKDCALAKDCAMAKDDAAVTTDRALWRRTGRCDDGLAAMMKDAAVNFGAQASVCVFAFNSSLGTSSSCSPDGSQGEQTRQTRHPRGADGHGELRPAPSPGLAGAPEWGRPLAPGSMGSAFERVVRRVVQELDHGGEFIPVTSLQSSTGFQPYCLVVRKPSSSWFWKPRYKTSWEPDAAEPGLDPKDRTEPQAAVRTRGGVNTGAQTSGGPLCTTSPGGVGLSGEGRRLQGLRPASFAAPRTQAPAAPEHKVLQQLRTVGDNVYVVTEVLQTQKEVEVTRTHKREGSGRFSLPGATCLQVCSQPRATPGPHVGTRRRVTEAAGWAPQGPSEQLPALRLAAERSHLAAGCPGTRPAPAPHGPVPGPSPRPISMPQGEGQGHLSQKKTVTIPSGSTLAFRVAQLVIDSDLDVLLFPDKKQRTFQPPATGHKRSTSEGAWPQLPSGLSMMRCLHNFLTVIASCSDFVKLSVIRNFKKKCNPRKVGGPKHFGKQLVKILQWIIHLNLQDVESEKPIKYQRELWNKSMDAMKRVEEIKQKSQAKFIMNRWKKNKELQKV

SEQ ID NO: 31716 - protein, 194 aa, Homo sapiens
  misc_feature (1)...(194): Xaa = X or * as defined in Table 2
XRQTSKDGSNGRGFGTGKGKGVPLAGEGAVRGRWDIGSVEGGTFSQRKTTQQWEARPCFLKKEPPHDDRYIESDTAPVPGVLRIKFANSEQISCVSRRFETICNVTLSPKELNLCSLFSPSRNCCHQFMVYQPHQRERKYRRIWSPEATTAELIRKRELRRERFTHEVDFDDFMMPFQKNITEKARALEAALKT

SEQ ID NO: 31717 - protein, 1063 aa, Homo sapiens
  DOMAIN (503)..(528): 7 kw REVERSE TRANSCRIPTASE RNA POLYMERASE domain identified by eMATRIX, accession number DM00895E, p-value=4.444e-11, raw score of 15.72
  misc_feature (1)...(1063): Xaa = X or * as defined in Table 2
MAKKLKTLKKKIDEWITRIINAEKSLKDLMELKTMARGLHDECTSLSNRCNQLEERVSAMEDEMNEMKREEKFREKRIKRNKQSLQEMWDYVKRPNLRLIGVPESDGEAGTKLENILQDIIQEKFSNLGRQANIQIQEIQRTPQRYSSRRATPRHIIVRFTKVEMKEKMLRAAREKGGVTHKGKPIRLTADLLAETLQARREWGPIFNILKEKNFQYRISYPAKLSFISEGEIKYFTDKQMLRDFVTTRPALKELLKEALNMERNNCAIKLELRIKKLTQRRSTTWKLNNLLLNDYWVHNEMKAEIKTFFETNENKDTTYQNLWDTFKAVCRGMAILPKDWFFEKINKIDRPLASLIKKKREKNQIDAIRNDKGDITTDPTEIQTTIRECYKHLYTNKLENLEEMDKFLDTYTLPSLNQEEVESLNRPITGSEIEAIINSLPTRKSPEPDGFTAEFYQRYNEELVPFLLKLFQSTEKEGILPNSFYEASIILTPKPGRDITKKGNFRPISLMNIDAKILNKILTNRIQQHIKKLIHHDQVGFIPGMQGWFNVQKSINIIQHINRTKDKNHMIISIDAEKAFDKIQQPFMLKTLNQLGIDGTYLKIIRAICDKPTANIILNGQKLEAFLFKTGIRQGCPLSPLLFNIVLEVLARAIRQKKGIKGIQLGKEEVKLSLFADDMIVCLENPKVSAQNLLKLISNFSKVSGYKINVQKSQAFFYTNNRQTESQIMSELPFTIASKRIKYLGIQLTRDVKDLFKENYKPLLNEIKEDTNKWKNIPCSWVGRINIVKMAILPKVIYRFNAIPIKLPMTFFTELEKTTLKFIWNQKRAHIAKSILSQKNKAGGITLPDFKLYYQATVTKTARDMDEAGNHHSQQTITRTENQTPHVLTHRKGIGDICLSEHLVTAPEHTGTERDHILLNPFGLKSLPLKALGVRISLEDFYEVSASLGWSFQRKEQAAIFAVLQASLTIPPEVGFERWVVMNLAELKEHVVTQCKETKNHDKTIQELIARIARLEKNITNLMVLKNTAKELHNGITDIGIQRENKVTSDRIHGRQLCHEWX

SEQ ID NO: 31718 - protein, 86 aa, Homo sapiens
MGDLSRPMLNVDDIKDIPPEEISTADPYYAPIQQKEVSTVVANLPNSTWVFLLRGVSLDSRYLQGGVGLVSPTSGTQRGAPHNLYK

SEQ ID NO: 31719 - protein, 257 aa, Homo sapiens
MEYYAAIKNDEFMSFVGTWMKLETIILSKLSQGQKTKHHMFSLIGLAVLKHVLTPRIKATHVAFDCMKNYLDAIYDVTVVYEGKDDGGQRRESPTMTVDWIVADILAIRQNALGHVRYVLKEGLKWLPLYGCYFAQHGGIYVKRSAKFNEKEMRNKLQSYVDAGTPCYRQPRNKKLEPASKSILTSLKGPANAYHHQPHPNGSPVTMVTAASPPDCELHRGPKGNLVWLNEGTSPDLAQKLGNSPRRLKIPKLCLVA

SEQ ID NO: 31720 - protein, 145 aa, Homo sapiens
MDEDGNPHSQQTSQGQKTKHHKFSLIECAPQALDLRNSDECCDGKEKVRSQIVRTAAVSPLPSCVILKAHKHSKDPEKSCDLRQTPGLPPSPCSNVDDIKDIPLRKSQLHDPYYAPIQQKNYKVTHQEITTIIATIRLLVVSGLF

SEQ ID NO: 31721 - protein, 73 aa, Homo sapiens
  misc_feature (1)...(73): Xaa = X or * as defined in Table 2
MGQARLSAKGHRELFGVGKIYILIKPLISHQDLMVVETMQKAKGREPADAVHTGKLGIVISVCPRRKQAAIAX

SEQ ID NO: 31722 - protein, 54 aa, Homo sapiens
  misc_feature (1)...(54): Xaa = X or * as defined in Table 2
MGQARLSAKGHRELFGVGKIYILIKPLISHQDLMVVEPMQKAKGREPADAVHTX

SEQ ID NO: 31723 - protein, 61 aa, Homo sapiens
MERLHFSTFLVDVMSPVGIGQKNVSLQSKAIKWSNRKRLAAFILLDACFGMPPSQNLATMF

SEQ ID NO: 31724 - protein, 252 aa, Homo sapiens
MAIFSVYDTPNEIGSACLLELPTSRGFAALVTSGYEFGADKCKNLDCGAFISLRQQRMQILWEHIPGGGEQSRLRGVSHGAQALNLEGAERGSLPPGSLWRYLLTQNTRDSRQGAVVGRSPQIAVPMEAEPAAGLFQNSPDPPQFFGSGAHLNTAGSSSIRPSGCGRSVTTAPGASVGSTLVETSPQPNNGGDLRRGRRKYGALGIVLLTGDSSISVIASPSPTCRFWHPSWQTGDRGEFHRNGARIATWEL

SEQ ID NO: 31725 - protein, 81 aa, Homo sapiens
MGSVGRPMALVLVRLSWVLRGGSDNVDAAADADATFLGPEKQGLYSSSNTLLFLQNSPDPPQLLGSGAHLNTAGSSSIRPS

SEQ ID NO: 31726 - protein, 192 aa, Homo sapiens
MVCLGATSLHLAGEWLLDLSSMRITSPSHQPGQPRILQILLSFLALVLISTQQGLPPSGQGAPTCRSRDSRLAQALFGVYSGREAPRLRVRFPPGTAQSGCGRSVTTAPGASVGSTLVETSPQPNNGGDLRRGRRKYGALGIVLLTGDSSISVIASPSPRDYGKTTFLNLPSRCDVTSRNWAEECITSVQGN

SEQ ID NO: 31727 - protein, 153 aa, Homo sapiens
MKKKGRAFFGNHGIPYLHQQEDPMINEIGQFQSFAEKNIFQSRKMWIVLFGSALAHGCVALITRLVSDRSKVPSLELIFIRFCFSGLICVSCVLLSGGPLWTQWIQITTLLLWCMQCHFYHLCLYIIFNSSSQQWDHYVEEPQLQSSVPFWLF

SEQ ID NO: 31728 - protein, 71 aa, Homo sapiens
MKKEYFIVKLYNEATVFDYTMWELASECRSTAGPCVRALVDTPMQVISSAVAATETGHHHSSGHSKPPAPP

SEQ ID NO: 31729 - protein, 63 aa, Homo sapiens
MVGHACHKLLLLRSSFYDLDQWVKFGCTFGILHSQTYRNQIREHVGGGSVSANAKIENIVMTW

SEQ ID NO: 31730 - protein, 186 aa, Homo sapiens
MEKCVTFTGGKTEDTCEQAPPESLHAAFAELIKAMVGHACHKLLLLRSSFYDLDQWVKFGCTFGILHSQTYRNQIREHVGGGSVSDNAKIENIVMTCFGADHNAEQEAAAAGPVTGSSVTSSPVTGSQVLTWVLSVKPGWPPQQTVLQSQLLTGGLFSAEKLGSHGAALLHACMPFLSALEQSPQQ

SEQ ID NO: 31731 - protein, 614 aa, Homo sapiens
MAQRILKCEKKSPSGFWHEAREENVPFVPLDTVIRGTDAWNCICIVILTLPGQALGKAMALRMTWTEILDKAGQRGNAWALLPPPMLTSKEQRHAGDSRQHPSPGRQHPPVCRLRRRGPPSTLAGTVPSTDKWQPTKEATGVWNSTGHLGNQDIGKGPEGHKGIQRLLRRDRSSPQNAWSSWLNTAILGAPDPFVQSVPPRLMGKDAHTGHSDDAESPPCLPATPHSQTGGGHRGRGKLEMPPARATFHLQGRPVLLFQDHSRLTLLPKMSEQEPGRERLFLEATGITLLNNEDKTYTRACNDGSKTERLEIFTAVYKATVSSKQIFYSPLAENMLAGPVITRSMDKSLQKTKVQESSFLRDQFRSGPAVLIGVTSFGCVPNLILNCSSHNFHMLWEGPGGRKLRCAFATECKGQGHIVSYYLEDNFGFTTPGGLAIGCLLSQCDVSCVGCPGIYDRFYPQVTFTGGKTEDTCEQAPPESLHAAFAELIKAMVGHACHKLLLLRSSFYDLDQWVKFGCTFGILHSQTYRNQIREHVGGGSVSDNAKIENIVMTCDQSPKTHCEAPSPNGWRGLERSRVGAPYEDIVIETIQNGTQREKEDGKDYDKLPPNDEAR

SEQ ID NO: 31732 - protein, 723 aa, Homo sapiens
  DOMAIN (643)..(654): SH2 DOMAIN SIGNATURE domain identified by eMATRIX, accession number PR00401B, p-value=2.000e-09, raw score of 12.94
MHTQLPLPSGALAQRRPLRHGKWVSRGCVLSLPCAQYFQNLENGTEGTLNNSTKFWVPGTVLDSYTHSHLNPVSNGYCCYLIFTDEEKGGQQLAQRITSRKRGFGADHNAEQEAAAAGPVTGSSVTSSPVTGSQVLTWVLSVKPGKDKVEQTPRSQQDPAGPGLPAQSDRLANHQEDDVDLEALVNDMNASLESLYSACSMQSDTVPLLQNGQHARSQPRASGPPRSIQPQVSPRQRVQRSQPVHILAVRRLQEEDQQFRTSSLPAIPNPFPELCGPGSPAVLTPGSLPPSQAAAKQDVKVFSEDGTSKVVEILADMTARDLCQLLVYKSHCVDDNSWTLVEHHPHLGLERCLEDHELVVQVESTMASESKFLFRKNYAKYEFFKNPMNFFPEQMVTWCQQSNGSQTQLLQNFLNSSSCPEIQGFLHVKELGKKSWKKLYVCLRRSGLYCSTKGTSKEPRHLQLLADLEDSNIFSLIAGRKQYNAPTDHGLCIKPNKVRNETKELRLLCAEDEQTRTCWMTAFRLLKYGMLLYQNYRIPQQRKALLSPFSTPVRSVSENSLVAMDFSGQTGRVIENPAEAQSAALEEGHAWRKRSTRMNILGSQSPLHPSTLSTVIHRTQHWFHGRISREESHRIIKQQGLVDGLFLLRDSQSNPKAFVLTLCHHQKIKNFQILPCEDDGQTFFSLDDGNTKFSDLIQLVDFYQLNKGVLPCKLKHHCIRVAL

SEQ ID NO: 31733 - protein, 26 aa, Homo sapiens
  misc_feature (1)...(26): Xaa = X or * as defined in Table 2
MAPKLSLGPSAEKDRAQEHKLPITCX

SEQ ID NO: 31734 - protein, 82 aa, Homo sapiens
MTDQTSTSQMMTQKVNLLKRAKGKDKSLEGRMKGNANISKDPGRKISSTRCCLSWGLSVCYLLGPRFHIGPTFLSALWRSGV

SEQ ID NO: 31735 - protein, 335 aa, Homo sapiens
MKGVQLEGYCDHSRKRAERDLKDDRPNINFTDDDTEGESTEKRACDLAVLSSWYDVPSPLHRAGSFSSFGSRISLRELLCDITSVGYHEHTGLENFKLSEEPLAYSKVWTKYCCRTFSLVQLKAGFLSHSHERLGLQTLGRSKSYAPQDPRESSVLGESSSNEHGEIIYYTTHPDPKAVLTCFSKGWHGEKALSPDASPSALDFLTTRTEKQNSASQVTRSDYDFPVLTDLVDHGRVSKISAEHSDQMNLDNLRRHGSCNRWKPSDIPSIFGDYDAIKLRNSGGTAGVMYWYKNPKSLWGEPNLTRQTHLAQEQSLSPGQEVTYNRLTENIKSQS

SEQ ID NO: 31736 - protein, 90 aa, Homo sapiens
MEESPREDEAGPKRKLVLTRRPRDLVEEAHVSDKREATVEGLDDGFIEKMEAIRKAGFGLTHRSKSPYLHSANNARTTSATPNLLPKRND

SEQ ID NO: 31737 - protein, 787 aa, Homo sapiens
  misc_feature (1)...(787): Xaa = X or * as defined in Table 2
HIKSTSRCIVCLLPPKCEVHEGGMFVQGLGTLFAPQRNLSPSSLSARVITTCRDPVRPKGGHSPETQGETQPLSSNAGPPTPQASSTPAVPVHRKEALMGGAVGLTERSFHVIGRTGLGIPDQLNLRNSSVDEKRDEKGCVSSQVKIGGKRKPPIQKMIVIVYLLNCVLLTNLFVIKKGFWSQEGARHCADLYGKGFWSREGAQHCADLYGKGFWPREGAQHCADLYGKGFWSREGARHCADLYQKRILVPGRGTALHGPLWKRILVPGRGTALRGPLSKKDSGPGKGHSTARTSMEKDSGPGKGHSTARTSMEKDSGPGKGHGTARTSIKKGFWSREGAQHCADLYGKGFWSQEGARHCADLYGKGFWSREGAQHCADLYGKGFWSREGAQHCADLYQKRILVPGRGTALRGLLWKRILAPGRGTALRGPLWKRILVPGRGTALRGPLSKKDSGPGKGHSTARTSMEKDSGPGKGHSTARTSMEKDSGPGKGHGTARTSIKKGFWSREGAQHCADLYGKGFWPREGAQHCADLYGKGFWSREGARHCADLYQKRILVPGRGTALRGPLWKRILVPGRGTALRGPLWKRILVPGRGTALRGPLSKKDSGPGKGHGTARTSMEKDSGPGKGHGTARTSIKKGFWSREGARHCADLYGKGFWSREGAQHCADLYRKGFWSREGAQHCADLYRKGFWSREGAQHYTDLWWVSSLSLALPSGMVEAASPKKRSKHTRQRIAQRSPSVHLLFCRRDVSSHNRWGSIRNACRRLCRNTDGMRSRDYFIINMKX

SEQ ID NO: 31738 - protein, 364 aa, Homo sapiens
  misc_feature (1)...(364): Xaa = X or * as defined in Table 2
XSASDAAPLQRSQSLPHSATVTLGGTSDPSTLSSSALSEREASRLDKFKQLLAGPNTDLEELRRLSWSGIPKPVRPMTWKLLSGYLPANVDRRPATLQRKQKEYFAFIEHYYDSRNDEVHQDTYRQIHIDIPRMSPEALILQPKVTEIFERILFIWAIRHPASGYVQGINDLVTPFFVVFICEYIEAEEVDTVDVSGVPAEVLCNIEADTYWCMSKLLDGIQDNYTFAQPGIQMKVKMLEELVSRIDEQVHRHLDQHEVRYLQFAFRWMNNLLMREVPLRCTIRLWDTYQSEPDGFSHFHLYVCAAFLVRWRKEILEEKDFQELLLFLQNLPTAHWDDEDISLLLAEAYRLKFAFADAPNHYKK

SEQ ID NO: 31739 - protein, 110 aa, Homo sapiens
MTGIVAKQNSASVPLPARLVRPTVNRKLLGAGTGSLPRKEARRERFLDGDQDGDEGPRQPSMGLPHKQVQNRAMAKVVITFAPTNAMQLARSPKTLNFMKIIGEMESVLE

SEQ ID NO: 31740 - protein, 154 aa, Homo sapiens
MLWLGTQRKRCDSELTLKAHSGESGKELLKMKSIRQNQKLKDNKPGKEKGYEDTPGLTSEFESHEFPRRKEAIKRTARWIKETLGCGREKDNLTRKKYIPTEMAKKNHGRTALRILKGLAKQNSSLEEIAVLFKISAKAGQKTRYEITKTDPKS

SEQ ID NO: 31741 - protein, 65 aa, Homo sapiens
MKEFWFSCGVCRVGGVVVDQRTKTVILEQNTEWEDLPLPLVQGNESGHGVKTPKRVNFWSNAVDE

SEQ ID NO: 31742 - protein, 44 aa, Homo sapiens
AAKHQRILPPDGTRPTCGGSGGAISVGLEATKQEANTFWIFFPR

SEQ ID NO: 31743 - protein, 437 aa, Homo sapiens
MILTRKLDLRLAVGLVAGAGCGGDPPRESVTPPCQVGACSVLFKRFLQSLRIFLEVLDDILYHVKGMQRIVNQWSEKFSDEADSDSALDSVSPCPSSPKQIHLDVDNDRTTPSDLDSTGNSLNEPEEPSEIPERRDSGVGASLTRSNREPLLISKQRVMPAINHVLKDNAENDQTVDCEHVHAQDSFEGIVATKLILFTAPSSFSQRDFADFGTTIKQDFRLLGQTSVDRLLQLSQGQAVKGNQLLPVSLRNQYYAPSTGNDTRWLCCLTAGEHNTRGGRRTACSDVLPAHPRRFDDCTGRALKCIHGFCRLRNHHQTRLSPAGTNQRGTHMLQLSQGQAVKANHMLPVSLVQRESTLARNTQTASRRALADSLMQLARQVSRLEERDSERNAINAAKHQRILPPDGTRPTCGGSGGAISVGLEADEKREVSFPGSI

SEQ ID NO: 31744 - protein, 154 aa, Homo sapiens; identical to SEQ ID NO: 31740

SEQ ID NO: 31745 - protein, 522 aa, Homo sapiens
  DOMAIN (291)..(334): kw TRANSCRIPTASE REVERSE II ORF2 domain identified by eMATRIX, accession number DM01354T, p-value=1.000e-40, raw score of 9.48
MNSLLTGQIPESQQIHRDSSAATWWKKIYRQKMGNDIEKSEVRGGLTPHTAGYSSETKLPEKRSGSSICGSPISAVLQPPLLIPRQTGSGVDLQQTPTDLKLRVLTVRRKSNKQKGHPHQKPICTSPLSKTKDRSTRQKVNKDIQDLNSALHQADLIDIYRTLHPKSTEYTFFSAPHHTCSKIDHIVGSKALLSKCKRTEIIRNYLSDHSAIKLELRIKKLTQNHSTTWKLNNLLLNDYWMQKRPLKIQQCFMLKTLNKLGIDGTYLKIIRAIYDKPTANIILNGQKLEAFLLKTGTRQGCPLSPLLLNVVLEVLARAIRQEKEIKGIQLGKEEVKLSLFADDMIVYLENPIVSAQNLPKLISNFSKVSGYKINVQKSQTFLYTNNRQTESQIMSELPFTIASKRIKYLGIQLTRDVKDLFKENYKPLLKEIKEDTNKWKNIPCSWVGRINIVKMAILPKVIYRFNAIPIKLPMTFFTELEKTTLKFIWNQKRACIAKSILSQKNKAGGITLPEFRLYTRLQ

SEQ ID NO: 31746 - protein, 164 aa, Homo sapiens
  misc_feature (1)...(164): Xaa = X or * as defined in Table 2
MCTADPDFLGISSSGCRTAVAVEQRILVNRKCCCLIVPFEVVSQRSTRPCASPPALLLPFSLISDCCASNERGSMGLGPSEPVYIVEKLKALLRMDKEKWILEWHLTNIQEKTPSSKPEDEETEAQSSLESTQGPASIHHLLTEEPLSPELPAAVPRYYIEGFX

SEQ ID NO: 31747 - protein, 57 aa, Homo sapiens
  misc_feature (1)...(57): Xaa = X or * as defined in Table 2
SGPSASGLLEFAGGPLQTLFASVSAAVAAEQRILVNRKCCCLIVSLEVLSQRSIQLX

SEQ ID NO: 31748 - protein, 701 aa, Homo sapiens
  DOMAIN (175)..(188): bZIP transcription factors basic domain proteins domain identified by eMATRIX, accession number BL00036, p-value=6.143e-13, raw score of 9.02
MHVAVGRSHRAKTCFSNISRSRLLAFSDSSAPFEECFECREPGRGMSSTGPNSQWLLLISRQDVLGLELITQETTWMWSSSHPPRPGACLRTPQRPPHQSEQGQADSGVMGPTAILLSWTKILQVSWDRAHQVKLPFPVDQITDLPRNDFQMMIKMHKLTSEQLEFIHDVRRRSKNRIAAQRCRKRKLDCIQNLECEIRKLVCEKEKLLSERNQLKACMGELLDNFSCLSQEVCRDIQSPEQIQALHRYCPVLRPMDLPTASSINPAPLGAEQNIAASQCAVGENHVVQAGTHESESFRKETTSTDVHNTFQINKGGGKITNTTSVTLYVQLVISIEETGSQVPFRLLVRIQCQLELYWHVHGPGKALERLRQANASPQMPYPTSFILLDVSALLLTEPILHAPFPRITSFLYSYSILDEAEHLRVSAVFESRGCLIITHPDVPRSIYILRGTDKQKDSSNLCRLKCPSLTALKRVVVLPAHSLRSENGHTASLSGSLTPEEPNWEAPPSRGGLTPHTAGYSSETKLPEEPSGSSICGSPISAVLQPPLLIPRQTRIINAEKSVKDPMELKTKARELHVECRSLSSRFDQLEERVSVMEDKMNEMKQEEKFREKRIKRNEQSLQEIWDYVKRPNVHLTGIPESDGENGTKLENTLQDIIQENFPNVARQANIQIQEIQRTPQRHSSRRATPRHVIVKIHQS

SEQ ID NO: 31749 - protein, 530 aa, Homo sapiens
MWKRLWNRVTGGGWNSLEGSEEDRKMWESLELHRDLLNGFAQNSDSVMDNNVQAEVFSDRNEKLVGKWSKGDPCYVLAKRLVAFCSCPTDLWNFELERGDLGYQAEEISKQQSIQEPRDLVHCDPATPAMAEWGQHRAWAVASEGGRPKPWQLPSGVEPAYELFSQLVMNDARLGSLLSGKWAPIWPRAGPEILSSNQGLKPGTPGACLVLYPTIDKFYSSLSFSEAKEKMIVHYLSDLRCWHLLQSGSLRTMVVPAINANNHQLLFLSLAISWHLRDGLTPHTAGYSSETKLPEEQSGSSICGSPISTVLQPPLLIPRQTGSGVDLQQTPTDLLLRVLTVRRKTNKQKGHQYQKPICTSPSSKTKDGGKNRAEKPETKNQSTSPPPKEHSSSPAMEQSWMENDFDELREEGFRRSNYSELKEEVRTNAKEVKNFEKKLDEWITRITNAEKSLKDLMELKTTARELRDECTSPSSQCNQLEERISAMEDKMNEMKREEKFREKRIKRKETKPPRNMGLCEKTKSMSDWCT

SEQ ID NO: 31750 - protein, 221 aa, Homo sapiens
  DOMAIN (39)..(79): Chloramphenicol acetyltransferase proteins domain identified by eMATRIX, accession number BL00100B, p-value=4.333e-30, raw score of 25.01
MEKKITGYTTVDISQWHRKEHFEAFQSVAQCTYNQTVQLDITAFLKTVKKNKHKFYPAFIHILARLMNAHPEFRMAMKDVRTLSCRSVGVCRRSTPDPVCLGISSGGCRTVDIGELQMLLPDHSSGSFVSEEYPVCDNLKTCHTSHGSVMAETAVINHKKRKNSPRIVQSNDLTEAAYSLSRDQKRMLYQFVDQIRKSDGTLQEHDGICEIHVAKYAKYSD

SEQ ID NO: 31751 - protein, 218 aa, Homo sapiens
  misc_feature (1)...(218): Xaa = X or * as defined in Table 2
MHVFRELVLNLWNSGKISVAKRLTTVYAVYLILVNGIAFSYVCNVTRPGAEALARLPCSKTGPSAAGLLEFTGGPLQTLGISSSGCRTADIGELQMLLPDRSSGSFVSEEYPVVLISDCCASNERGSVGLGPSKPVYKERQTAQHEHHDTQRLTMTPVLETTRGGVWGPVVSDRCLRVFHSSASREYWCEWQTGVSGQSALYGLARLSNEEKEAIKSX

SEQ ID NO: 31752 - protein, 295 aa, Homo sapiens
MDHRCLLPEMLKGTWWTTPARASGPAVPLLCEFRQWTVDTTSVVPESTHMPGQMTQPIPAPDSHNMDEAGGHYPKQTNTRPENQILHVFTDKWELNTEYKDPKKRTTDTRAYLRVEATLAADWMVPTQIEGRSSFVLATLAADWMVPTQIEGRSSFVLATLAADWMVPTQTEGRSSFVLATLAADWMVPTQIEGRGRMTPHMAGYSSETKLPEERSGSSICGSPISAVLQPPLLIPRQTGSGVDLQQTPTDLQLRVLMERSSSPATEQSWMENDFDEMRDEGFRRSNYSELKEEV

SEQ ID NO: 31753 - protein, 1062 aa, Homo sapiens
  DOMAIN (667)..(692): 7 kw REVERSE TRANSCRIPTASE RNA POLYMERASE domain identified by eMATRIX, accession number DM00895E, p-value=3.333e-11, raw score of 15.72
  misc_feature (1)...(1062): Xaa = X or * as defined in Table 2
MNLSRHLNEVKGELLWSLEWRDPDGGSIRMEVGLGGWTQRLEEEKKGNVCSHGNLEKDFPYIPHLFGLQQKKMDLKGVFKSCFKIYCSSKHLLKTGFISEAVLCYGEGGEGDTVLTMKERWPHECIVLIQCNKGRLTPHTARYSSETKLPEERSGSSICGSPISAVLQPPLLIPRQTGSGVDLQQTPTNLQLRVLTVRRKTNKQKGHPHQKPICMSPSSKTKDFKPTKIKRDKEGHYIMVKGSIQQEELTILNIYAPNTEAPRFIKQVLSDLQRDLDSHIIIMGDFNTPISTLDRSMRQKVNKDIQELKSALQQADLIDIYRTLHPKSTEYTFFSAPHHTYSKIDHIVGSKALLSKCKRMEIITNCLSDHSAIKLELRIKKLTQNRSTTWKLNNVLLNDYWVHNKMKAEIKMFFETNGNKDTTYQNLWDTFKGVCRGKFIALNAHKRKQEGSKIDTLTSQLKELEKQEQTHSKVSRRQEITKIRAELKEIETQKTLQKINESRSWFFEKFNKIDRRLARLIKKKREKNQIDAIKNDKRDITTDPTEIQTTIREHYKHLYANKLENLEEMDKFLDTYTLPRLNQEEVESLNRPITGSEIEAIINSLPTKKSPGPDGLTAKFYQRYKEELVPFLLKLFQSIEKEGILPNSFYEVCIILIPKPGRGTTKKENFRPISLMNIDAKILNKILANRIQQLIKKLIHHDQHINRTKYKNHMIISINAEKAFDKIQQRFMLKTLNKLGIDGTYLKIIRAIYDKPTANIILNGQKLEAFPLETGTRQGCPLSPPLFNIVLEVLARAIRQEKEIKGIQLGKEEVKLSLFADDMIVDLENPIVSAQNLLKLISNFSNVSGYKINVQKSQAFLYTNNRQTESQIMSELPFTIASKSIKYLGIQLTRDVKDLFKENYKPLLNEIKEDTNKWKNILCSWVGRINIVKMAILPKTGPPAAGLLEFARGPLQTLFAWVSAAEAAEQRILVNRKCCSLIVPLEVLSQRSTWLCEFSVSTHKATTSFQEVTTHHQEDQLLRKAGPDKDTASCILAALAEAAMSPVAPSVTQASTLEQSGX

SEQ ID NO: 31754 - protein, 323 aa, Homo sapiens
  DOMAIN (185)..(197): Fungal Zn(2)-Cys(6) binuclear cluster domain proteins domain identified by eMATRIX, accession number BL00463, p-value=7.469e-10, raw score of 8.22
  misc_feature (1)...(323): Xaa = X or * as defined in Table 2
XRGGLTPHTAGYSSETKLPEEPSGSNICCSAIFTVLQHLLLTPRQTGSGVVFQQTPTDLQLRVLTVGRKTNKQKGHPHQNPNCTSPSSKTKDKTSRGMIRQQHLQVTNIRCSTATAADTQANRVWSGPLANSNRPAAEGPEEIQINGKEVKKFEKKLDEWITRITNAEKSLKELMELKAKARELCEECRSLRSRCDQLEERVSVMEDEMNEMKREGKFREKRIKRNEQSLQEIWDYVKRPNLRLIGVPESDRENGTKLENTLQDIIQENFPNLARQANIQIQEIQRTPQRYSSRRATPRHIIVRFTKVEMKEKMLRAARKKGQ

SEQ ID NO: 31755 - protein, 87 aa, Homo sapiens
  misc_feature (1)...(87): Xaa = X or * as defined in Table 2
XTVQVPLSKRAKFVGPGGYNLKKLQAETGVTISQVDEETFSVFAPTPSAMHEARDFITEICKDDQEQQLEFGAVYTATITGNQRYWL

SEQ ID NO: 31756 - protein, 14 aa, Homo sapiens
MFLGLVGLRTRGRK

SEQ ID NO: 31757 - protein, 131 aa, Homo sapiens
MTSPPQPDQQFTLKKVARAKGIVKDLINLAFKVYNNRKKLQFLASTVRRTPATSPAHKNFQMPELQRPGLPPEPPPPGACYKCQKSGHQAREFLQPRIPPKPRPICAGPHWKSDCSAHLAATPRAPGTLAQ

SEQ ID NO: 31758 - protein, 30 aa, Homo sapiens
MCKRMPGRQAPQTICPFYNKNYLDLAGWKN

SEQ ID NO: 31759 - protein, 131 aa, Homo sapiens
MDTYRGTTDTGAYLKTRMKFGAVTQIGGPPLGDQPLSSCSLLREKDPPTTSGPQTHQPKEHLTNFKSGACYKCQKSGHQAKECLQPRIPPKPRPICAGPHWKSDFSTHLAATPRAPGILAQGSLTPSQILA

SEQ ID NO: 31760 - protein, 220 aa, Homo sapiens; identical to SEQ ID NO: 31012

SEQ ID NO: 31761 - protein, 287 aa, Homo sapiens
  DOMAIN (200)..(243): 1 kw MIND INHIBITOR DIVISION CONTROL domain identified by eMATRIX, accession number DM01756B, p-value=4.822e-15, raw score of 22.91
MKLMETLNQCINAGHEMTKAIAIAQFNDDSPEARKITRRWRIGEAADLVGVSLRLSEMPRKQGDYRTRIWKFEDGLSNVLVIQLNKLIICVMCLDLALKGLRVLLVEGNDPQGTASMYHGWVPDLHIHAEDTLLPFYLGEKDDVTYAIYFTCWPGLDIIPSCLALHRIETELMGKFDEGKLPTDPHLMLRLAIETVAHDYDVIVIDSAPNLGIGTINVVCAADVLIVPTPAELFDYTSALQFFDMLRDLLKNVDLKGFEPDDPTGNRTVQLTWQPLPEPLELWLKAL

SEQ ID NO: 31762 - protein, 156 aa, Homo sapiens
MSSQRLFLTIDLPKTQCAQEKLRVIRGCRDQAMEALQMTKPCFFKSTWSQNHVEKCVPHFSPPLYVALNHLMALKGSQKSPKNYNTVFTKIRNGACYKCQKSDHQAKECLQPRIPPKPCPICAGPHWKSDCSAHLAATPRAPGTLAQGSLTDSFWA

SEQ ID NO: 31763 - protein, 213 aa, Homo sapiens
MWESLELNRYLLNDFDQKPDSDMDNKVQAEVVSDGDEELVGNRSKETKETRFIRGPKTPALVTDWEGSLPLVFNHCREACLGPSPLAASPAFLGQGQDLINLAFKVYNNRKKLQFLASTVRQTPATSPAHKNFQTPEPQRPGVPPEPPPTGACYKYQKSDHQAKECLQPRIPPKPCPICAGPHWKLDCSTHLAATPRAPGTLAQGSLTDSFSA

SEQ ID NO: 31764 - protein, 390 aa, Homo sapiens
  misc_feature (1)...(390): Xaa = X or * as defined in Table 2
XQGAGYSRYNSGESRRRLGRQQDLVARSDEQRDPAPATRREDKMIEELQPFGEHRPRRSPSQGCDTLFQALWFLASPSFQRGGQLQVLALCKAAAGPGAPQAASTAGTREHGYAWKLGDTRNHRALKRKSQTWLRRFPAGCPDVCSALADLRAFMGLRGEEVCADWSMGGHGSGECRRGTGGQRAVVPKSPVQEKGKEPLSLLQYFMVDEKERFLRITSEHEDNDNSNNSSNHSSINETKETCFIHEPKTPAPVTDWEGSLPLVFNHCRDASLIIHSCFKGVRPHRDACLGPSPLVASPAFLGQGQVPLNPFSFTLSGKSHFPGTGARTCYKCQKSDHQAKECLRPRIPPKPCPICAGPHWKSDCSTHLAATPRAPGTLAQGSLTDSFSA

SEQ ID NO: 31765 - protein, 256 aa, Homo sapiens; identical to SEQ ID NO: 30966

SEQ ID NO: 31766 - protein, 1681 aa, Homo sapiens
  DOMAIN (769)..(814): kw TRANSCRIPTASE REVERSE II ORF2 domain identified by eMATRIX, accession number DM01354N, p-value=1.000e-40, raw score of 13.17
MLFWAFDKIQQPFMLKTLNKLGIDGTYLKIIRAVYDKPTANIILNGQKLEAFPLKTGTRQGCPLSPLLFNIVLEVLARAIRQEKEIKGIQLGKEEVKLSLFADDMIVYLENPIISTQNLHKLISNFSKVSGYKNNVQKLQAFLYTNNRQTESQIMSELPFTIASKRIKYLGIQLTRDVKDLFKENYKPLLKEIKEDTNKWKNIPCSWIRRINIVKMAILPKRTPLLSLPSTLYEELWRLRSYFPLCPQLYNMEQNTTDWVIYKEQCIWLTALETGESKSTAPAFGKGYPMAEYIIWGRLTPHMAGYSSETKLPEERSGSNICCSPISAVLQPLLLIPRQTGSGVDLQQTPTDLQLRVLTVRRKTNKQKGHPHQNPICTSPSSKTKGSNSHITILTLNVNGLNAPIKRHRLANWIKSQDPSVCCIQETHLTCRDTHRIKIKGWREIYQANGKQKKAGVAILVSDKTDFKPTKIKRDKEGHYMMVKGSIQQEELTTLNIYAPNTGAPRFIKQVLRDLQRDLDSHTLIMGDFNTPLSTLDRSTRQKVNKDIQDLNSALHQVDLIDIYRTLHPKSTEYTFFSALHHIYSKIDHIVGRLRNSLKNRTTTWKLNNLLLNDYWINSEKKAEIKIFFETNENKDTTYQNLWDTFKAVCRGKFIALNAHKRKQERSKIDTLTSQLKELEKQEQTHLKVSRRQEITKIRAELKDLETHKNIQKINESRSWFFEKINKIDRMLARLTKKKREKNQIDAIKNDKRDITTDPTEIRTNIREYYKHLYANKLENLEEMDKFLDAYILPRLNQEEVESLNRPITGSEIEAIINSLPIKKSPGPDGFIAKFHQRYKEELEASIILIPKPGRDTTKKENFRPIPLMNIDAKILNKILANRIQQHIKKLIHHDQVGFIPGMQGSFNICKSINVIQDINRTNDKNHMIISIDAEKAFDKIQQPFILKTLNKLGIDGTYLKIIRAIYDKPTANIILNGQKLEAFPLKTGTRQGCPLSPLLFNIVLEVLARAIRQEKEIKGIQLGQEEVKLSLFADDMIVYRENPIVSTQNLHKLISNFSKVSGYKINVQKSQAFLYTNNRQTESQIMSELPFTIASKRIKYLGIQLTRDVKDLFKENYKPLLKEIKEDTNKWKNIPCSWVGRINIVKMAILPKVIYRFNAIPIKLPMTFFTELEKTTLKFIWNQKRARIAKSILSQRNKAGGITLPDFKLYYKATVTKTAWYWYQNRDIDQWNRTEPSEIMPHIYNHLIFDKPDKNKKWGNDSLFNKWCWENWLAICRRKLKLDPFLTPYTKINSRWIKDLNVRPKTIKTLEENLGNTIQDIGMGKDFMSTTPKAMATKAKIDKWDLIKLKSFCTAKETTITVNRQPTEWEKIFTIYPSDKGLISRIYKELKQIYKKRTNNPINKWVKDMNRHFSKEDIYTAKRHMKKCSSSLAIREMQIKTTLRYHLIPVRMAIIKKSGNNRPSSNVFSVKLSEIQSLALIETRCLMNADEQGVPLIQEMLESWASICKVPKYPNAEAVRPEEQTPHLHPGEINSHVAHTKLVWWSLHTDTHEIWCRDSDRGTSLGRSIPCPPALCSVRKIHLRPQVLRPTSPRNISPISNPHTRTSKRLNRSGQAFLQNLLPQELATSARNLTTRPRNACSPGFLLSRVPSVRDPTGNWTVQLTWQPLSEPLELWPKAL

SEQ ID NO: 31767 - protein, 104 aa, Homo sapiens
MVARQCIVAYDNGDAVQVCAHKNFQTPEPQQPGVPPEPPPPGACYKCQKSDHQAKECLQPRIPPKPCPICAGPHWKLDCSTHLAATPRAPGTLAQGSLTDSFSA

SEQ ID NO: 31768 - protein, 114 aa, Homo sapiens
  misc_feature (1)...(114): Xaa = X or * as defined in Table 2
XPYKTITDAELRVTLTVEDSARLHPGCQTTQGRLPWSFTLSGKSRFSGEGARACYKCQKSDHQGKERLQPRIPLKPYPICAGPHWKSDCSTHLAATPRAPGTLAQGSLTDSFLA

SEQ ID NO: 31769 - protein, 100 aa, Homo sapiens
MSRHSFTHRSLCPVSVPSATHPKSSFFPSCLFPQSQPQASLSLSNLPFLQAHLNSSPPPQACSLPGRARSQFFHQPLLLHPIIFLSPPLLTPGLAYRFVP

SEQ ID NO: 31770 - protein, 56 aa, Homo sapiens
MCISYTKGHFVVVWWVFPGFSKILFRYISCPAPCRSSRMQSQCAHSSQSEVPGHRA

SEQ ID NO: 31771 - protein, 455 aa, Homo sapiens
  misc_feature (1)...(455): Xaa = X or * as defined in Table 2
MWESLELPRDLLNGFAQNADSNMDNKVQAEVVLDGDGELVGNWSKGLPGCKASVLTLLKVRCQATERRVLQQCTGCGLWLLQVPWTTALGSTAPAAGLHGWLLNFDCSIVSIFMGVQGWDLAACNKKEAKVLLHEAQFMGLGSSVMLQPFDYDPNEKSKHKFMVQTIFAPPNTSDMEAVRCPSQSPAKLHGWSHRARARRSLTPSKHCTFINTATARILGSHNTPVLNINFILNQTLTRFTPAPAKSQGHTSDICSSFSEPKSWAFCLPALWSTTGGRDKCRGHGTHGGGSQTEAKYICDLLTPPNASVSSLPVRAPPTPTTDSTSQECPHRHWLLSPQEVLSFLLFPLDFESLYTAMVGSEKETGEGTPSVGKHAYERAHADGPPGLGEGINSPLPTCTGVRGLTQDIQDTGQESDTLSTLGSEDDEKTAKPQGDTSEVLPAVKNSPRTFQEDX

SEQ ID NO: 31772 - protein, 370 aa, Homo sapiens
MWESLELPRDLLNGFAQNADSNMDNKVQAEVVLDGDGELVGNWSKGDSCYVLAKRLAAFCPCPRDFWNFQLERDDLGYLAEEISKQRSIQEVTWVLLKAFGFIREAEHKSLENLQSGNVIEKKIPFSEEKSKLAAEICISNVEPNVHTPTQYLPGLPGCKASVLTLLKVRCQATERRVLQQCTGCGLWLLQVPWTTALGSTAPAAGLHGWLLNFDCSIVSIFMGVQGWDLAACNKKEAKVLLHEAQFMGLGSSETHPGLMSGFHGTVTSTVTPGISHTHANLKHREKEMLPRREREKPDHNNEAGTFKRRREPAPGNQNAKQESKRRTQTPILGPKVFRIYRKVQGTYTKAWFWKMAMAFCTKVITLELC

SEQ ID NO: 31773 - protein, 366 aa, Homo sapiens
MEPIAGHEYVSDIDYTNDYTMKHYLAHSVYGVGSFQWVRGLAAFENEAVDLRVSLGRQEAFHAKALDIGEVPITQMSHQIPGLRILAVGNLQGGRTILFRLTCLVTVPKAPAKDAWNGEDTGVGKSSIVCRFVQDHFDHNISPTIGHHTLSLVTPNSTSPHLLNIWQLSIWRYPTGMSGVYGYKFPSEHCSEVLECCAFVFIHLKAWVPVKSQRPLRGLLEQQDSLAVASTPAHSPEIQPRAAMDILRKSRKLQGHTSHGHGHITECGSTVEAVVMQVVCTTTGSTLTNVTQAQGLRTTGGQCPCFRRDVRNNCFTARFTMSLGSCYTRSEKWGKARSWMTKEALLKHYRNLLEKFQYHIGSRVKE

SEQ ID NO: 31774 - protein, 77 aa, Homo sapiens
MPINIERALSRKSAAQIPTLGPPHEKWETMGTIKVEKPTHASQSAGAVDPKGPWSHGYFEEARAPHPCGTAEGPYAS

SEQ ID NO: 31775 - protein, 49 aa, Homo sapiens
MQLQTFFETFLRASSPQQAFDIMKEAIGKLLLAAEVFSETSTLGPKTFH

SEQ ID NO: 31776 - protein, 97 aa, Homo sapiens
MAELTIMAEGKGEARHLLHRAAERRSAKQKGEEPLIKTSDLAGLRVRHTFMELSYLEMIGYQTSQGQVAAPNYQSQDECNSCNGQHCEKSLTHANKQ

SEQ ID NO: 31777 - protein, 80 aa, Homo sapiens
MDPLGAPSQFVDVDTLPSWGDSCQDELNSSDTTAEIFQEDTVRSPFLYNKDVNGKVVLWKGDVALLNCTAIVNTSNESLT

SEQ ID NO: 31778 - protein, 112 aa, Homo sapiens
  misc_feature (1)...(112): Xaa = X or * as defined in Table 2
XVYPPLTRETASPYNASWKEPKQHARKWRQARSSREHSGGPIRAAGGTDQAPGRRRPSDISGDPQQERAEYGESKSQETGVTSCKCSGLRNTGFRSWPELTNQRPAFSVISS

SEQ ID NO: 31779 - protein, 70 aa, Homo sapiens
MGCASAKHVATVQNEEEAQKGKNYQNGDVFGDEYRIKPVEEVKYMKNGAEEEQKIAARNQENLEKSASSN

SEQ ID NO: 31780 - protein, 145 aa, Homo sapiens
MGCASAKHVATVQNEEEAQKGKNYQNGNVFGAIMALDYVVTRHSDTLASDAPLLTCRLRLGNQGSQLFPALPTSYPYCAFMCLLSNYTMSDKSRGSLLFTVVDNLPPTPSTEVHYGTSQEEQGKCLRFGDLAVVGLESGRCTCKG

SEQ ID NO: 31781 - protein, 88 aa, Homo sapiens
MLGAARRAQLLESWPRAAASRTLARGPGFGVLGSYSKRRGGGGAPDTLWGGGGRRGGGRKKKDEEDRGGGREACHLQPPRERPRCTHL

SEQ ID NO: 31782 - protein, 42 aa, Homo sapiens
MARDTNKSTRFHSADSNHSGSNSTSPPSVSKVTTQHVVRSFA

SEQ ID NO: 31783 - protein, 83 aa, Homo sapiens
KYGLTLLVTTDLELIKYLNNVVEQLKGSFDLLIYTDKDLVVPEKWEESGPQFITNSEEVRLRSFTTTIHKVNSMVAYKIPVND

SEQ ID NO: 31784 - protein, 141 aa, Homo sapiens
MALQLSREQGITLRGSAEIVDEFFSFGINSILYQRGIYPSEIFTRVQKYGLTLLVTTDLELIKYLNNVVEQLKDWLYKCSVQKLVVVISNIESDKDLVVPEKWEESGPQFITNSEEVCLCSFTTTIHKVNSMVAYKIPVND

SEQ ID NO: 31785 - protein, 48 aa, Homo sapiens
  misc_feature (1)...(48): Xaa = X or * as defined in Table 2
XKDLVVPEKWEESGPQFITNSEEVRLRSFTTTIHKVNSMVAYKIPVND

SEQ ID NO: 31786 - protein, 34 aa, Homo sapiens
MRTSGCFHLWRKVKGNQYVQRSHGKSGSKRGVGR

SEQ ID NO: 31787 - protein, 20 aa, Homo sapiens
  misc_feature (1)...(20): Xaa = X or * as defined in Table 2
MEPASSSDENFRMLPLMEEX

SEQ ID NO: 31788 - protein, 70 aa, Homo sapiens
MALAAPQFGMSIFRNSGNKCLLLWSLTAFEPHHLLGLPLCVSPVLDTYSADLSCDIYIRIKMLQTAQQHQ

SEQ ID NO: 31789 - protein, 994 aa, Homo sapiens
  DOMAIN (374)..(389): PHD-finger domain identified by eMATRIX, accession number PF00628, p-value=4.536e-10, raw score of 15.84
MLLVMYWAPAPPPVHMSQFLTTGPKCLELSLDHGRDSQEITASGLLWLQHAACGLAQWNQKPHPPFLTLLQAEEPFERARSCDIYIRIKMLQTAQQHQVGLAPTERKEALRGSQSPQKSASGQRPGSLDRELLMLIKISKCLRVPSGPSSVLGTESTGPVPGELVLCQQDAGATQEGVCYGRELMICRCDSFPRLMEPWGVKGTPEVFRTDLITAMKIPDSYQLSPDDYYILADPWRQEWEKGVQVPAGAEAIPEPVVRILPPLEGPPAQASPSSTMLGEGSQPDWPGGSRYDLDEIDAYWLELINSELKEMERPELDELTLERVLEELETLCHQNMARAIETQEGLGIEYDEDVVCDVCRSPEGEDGNEMVFCDKCNVCVHQACYGILKVPTGSWLCRTCALGVQPKCLLCPKRGGALKPTRSGTKWVHVSCALWIPEVSIGCPEKMEPITKISHIPASRWALSCSLCKECTGTCIQCSMPSCVTAFHVTCAFDHGLEMRTILADNDEVKFKSFCQEHSDGGPRNEPTSEPTEPSQAGEDLEKVTLRKQRLQQLEEDFYELVEPAEVAERLDLAEALVDFIYQYWKLKRKANANQPLLTPKTDEVDNLAQQEQDVLYRRLKLFTHLRQDLERGSPNPLVPLPHPSPVTTSSCSQVRNLCYMVTRRERTKHAICKLQEQIFHLQMKLIEQDLCRERSGRRAKGKKSDSKRKGCEGSKGSTEKKEKVKAGPDSVLGQLAGLSTSFPIDGTFFNSWLAQSVQITAENMAMSEWPLNNGHREDPAPGLLSEELLQDEETLLSFMRDPSLRPGDPARKARGRTRLPAKKKPPPPPPQDGPGSRTTPDKAPKKTWGQDAGSGKGGQGPPTRKPPRRTSSHLPSSPAAGDCPILATPESPPPLAPETPDEAASVAADSDVQVPGPAASPKPLGRLRPPRESKLQQLSCEWEELSVLNCGISMGCWQEISPGAEGVSGWPAHLAMNTIVAADSSVTRTLST

SEQ ID NO: 31790 - protein, 47 aa, Homo sapiens
  misc_feature (1)...(47): Xaa = X or * as defined in Table 2
MEETSCLALLPLLECXGVISARCNLRLPSSGDSSASASQVAGIASVC

SEQ ID NO: 31791 - protein, 207 aa, Homo sapiens
IQVLSASSSDSVSKSSFVFDALNTRICMCASTDICTLFGRVILENKIKLHRTTNRPKTHFSYFIASSPLRIRRTGGYFSVNLNEEILRRGLGKTVLVKGLKYDSKIYWTVHRNLLKAELTALKKGEGIWKEDSEKESYLEKFKDSWREIWKKDSFLKTTGSDFSLKKESYYEKLKRTYEIWKDNMNNCSLILKFRELISRINFRRKG

SEQ ID NO: 31792 - protein, 33 aa, Homo sapiens
MFFFLETGSHSSLGDRARPCLKKKKAGRGGSCL

SEQ ID NO: 31793 - protein, 101 aa, Homo sapiens
MESCSVSQTTVQWHDLSSLQPPPPRFKRFSCLSLPSSWYYRHRPARQANFCIFSTDGVLPCWPGWFQTPDLRSSTHLSLPRCWDDRCEPPCPAKTGEVLIF

SEQ ID NO: 31794 - protein, 76 aa, Homo sapiens
MSLNCTLKKMAGLCHIYFTTIFFFSLRQNLAVAQAGMQWAQSWLIVTSASWVPAIFPLSLPSSWDHRGMPPHLANF

SEQ ID NO: 31795 - protein, 105 aa, Homo sapiens
MMTVYPLLGYLARVQLLGHIFGDIYPSIFHVLILNLIIVGAGVIMACFYPNIGGIIRYSGAACGLAFVFIYPSLIYIISLHQEERLTWPKLIFHVFIIILGVANL

SEQ ID NO: 31796 - protein, 294 aa, Homo sapiens
MAAPDNFWLGSSPSKKSGPRLKTRRQTGMNTGKLQLSVHLEPWASPTIWGPANEGVSRLPLVSQTTPFTGPLSLPPPRYWVHVVYQYGDEYSEGHAFVAQNFLTTSLAVTPCPSLQGYSAVPDDDCIPTLRLPGSFQLLGHIFGDIYPSRTPSTTSSGALRRRLLPTRRLQIGRLLKVFRVFSGLCPPVFWGIGIQVGGVFRPWVCTPCKRTTSARNLANIRAARTRVRTSERLQVPFSWPHTHRENTKDKNLHRCRFFQGRVTSVLVVTIVAWSVGNNVVSIDGTTYRTIFII

SEQ ID NO: 31797 - protein, 772 aa, Homo sapiens
  DOMAIN (127)..(146): TYROSINE KINASE CATALYTIC DOMAIN SIGNATURE domain identified by eMATRIX, accession number PR00109B, p-value=8.085e-13, raw score of 12.27
MDVVDPDIFNRDPRDHYDLLQRLGGGTYGEVFKARDKVSGDLVALKMVKMEPDDDVSTLQKEILILKTCRHANIVAYHGSYLWLQKLWICMEFCGAGSLQDIYQVTGSLSELQISYVCREVLQGLAYLHSQKKIHRDIKGANILINDAGEVRLADFGISAQIGATLARRLSFIGTPYWMAPEVAAVALKGGYNELCDIWSLGITAIELAELQPPLFDVHPLRVLFLMTKSGYQPPRLKEKGKWSAAFHNFIKVTLTKSPKKRPSATKMLSHQLVSQPGLNRGLILDLLDKLKNPGKGPSIGDIEDEEPELPPAIPRRIRSTHRSSSLGIPDADCCRRHMEFRKLRGMETRPPANTARLQPPRDLRSSSPRKQLSESSDDDYDDVDIPTPAEDTPPPLPPKPKFRSPSDEGPGSMGDDGQLSPGVLVRCASGPPPNSPRPGPPPSTSSPHLTAHSEPSLWNPPSRELDKPPLLPPKKEKMKRKGCALLVKLFNGCPLRIHSTAAWTHPSTKDQHLLLGAEEGIFILNRNDQEATLEMLFPSRTTWVYSINNVLMSLSGKTPHLYSHSILGLLERKETRAGNPIAHISPHRLLARKNMVSTKIQDTKGCRACCVAEGASSGGPFLCGALETSVVLLQWYQPMNKFLLVRQVLFPLPTPLSVFALLTGPGSELPAVCIGVSPGRPGKSVLFHTVRFGALSCWLGEMSTEHRGPVQVTQVEEDMVMVLMDGSVKLVTPEGSPVRGLRTPEIPMTEAVEAVAMVGGQLQAFWKHGVQ

SEQ ID NO: 31798 - protein, 568 aa, Homo sapiens
MMLTEVAWTTRQIAQGGTVPLLPATRTHQHLLQGITVPHEKWSKLFSPTLPPTSDPKDWDEKEKALEEPNPRNWLYAFSLHLVTKIQLLKFTPMDGVLPAYKPRKTIGSLDFEKHPCLNNAVRLYVKLPPCVMSLPKHTRAMDVTRKARHSETPTLHRAISALIPDCSIMSMANEPLDARGIVARTAYVDSRGSPSKKDKEMREEQGPTTEAQEGLGLLGSCNHRAHSCSRVDRSIQACGQPSPSRRAQQLKPSESSPNRNNHRCQLRARGKRRCAPADCRFPGREPGSRWSVPVRNHGENPALLREKGSRFPRASYRHGAKTARVADQSNRQADQWAARVREDPDGGAGPCLKRDILPLMAVSCAARGIAAKEDLHSVYLVRVTRLIEDCTAARLDQCRLDYINCIDVEVTSFAQTCTDLTRIRCSLSRRCDYDGMRVLHVIDIISSMCALERAAQSLAVEIASVDCICTQTIHPLARDNEGGEPEKADRYSTTEPTHRHNKIAICITQTTNKWLTDEIYLYTDNISKSEPRIGRDADKDFYIAVDDVNLLTSQTRHTHSNRILASD

SEQ ID NO: 31799 - protein, 125 aa, Homo sapiens
  DOMAIN (11)..(25): F-ACTIN CAPPING PROTEIN ALPHA SUBUNIT SIGNATURE domain identified by eMATRIX, accession number PR00191B, p-value=3.793e- 14, raw score of 12.62
  misc_feature (1)...(125): Xaa = X or * as defined in Table 2
XQGGWRALRFRFHYYEDGNVQLVSHKDVQDSLTVSNEAQTAKEFIKIIENAENEYQTAISENYQTMSDTTFKGLAPAASSYPHQNRLEQDTQLQDWQRNAECLKAECRILQYVERQGFNVWSYDK

SEQ ID NO: 31800 - protein, 62 aa, Homo sapiens
  misc_feature (1)...(62): Xaa = X or * as defined in Table 2
ELRADGLGAGDVAAVLGPLGLQEVASFVTKRSAWKLVLLGADEEEPQLRVDLDTADFGYAVX

SEQ ID NO: 31801 - protein, 43 aa, Homo sapiens
ETAPAKLIVYLQRFRPQDYQRLLEVNSSRERPQETEDPDHCLG

SEQ ID NO: 31802 - protein, 46 aa, Homo sapiens
  misc_feature (1)...(46): Xaa = X or * as defined in Table 2
XHTSKPESLLAGPTEGEGSPTPYTREECREQFRIPDLGPTLRAPGS

SEQ ID NO: 31803 - protein, 200 aa, Homo sapiens
MAQGLIEVERKFLPGPGTEERLQELGGTLEYRVTFRDTYYDTPELSLMQADHWLRRREDSGWELKCPGSSRCCGLTAWGAWRCGLLCWAHWGCQEVASFVTKRRAWKLVLLGADEEEPQLRVDLDTDDFGYTVEKIHRLSSMLVTTPPQGVKSVPAQETAPAKLIVYLQRFRPQDYQRLLEVNSSRERPQETEDPDHCLG

SEQ ID NO: 31804 - protein, 545 aa, Homo sapiens
MRAEYTKRSIHIFGLQENHIVSGIGGFLVSPTSRMKPRTLALDLKVLQVPTRVRSPAGFTQWIRHLAAGGAACQSRAPLGGRWDWALSSRGRRSSGRLGRTGAHGGGGDAHAWWAVGSEPCPAGRLLRLGEKLSTAAAGPGGDDSNNNSCCRGRDSWLVVFIMKVHLPATSPRAKKIMVITVSGHFSLGSFTKTVIGKESDRVNSLQSLKLKKSNLPNLTNPRFTRREEKGEKGAQERIDSLRRTGVIHEKQTAVSVENFIAELLPDKITNTEKCLKELMKLKAKARELHEECRSLRSRRDQLEERVSVMEDEMNEMKREGKFREKRIKRNEQSLQEIWDYVKRPNLRLTGVPESDGENGTKLENTLQDIIQENFPNLARQANIQIQEIQRMPQRYSSRRATPRHIIIRFTKVEMKEKMLRAAREKGRVTHKGKPMRLTADLSAETLQARREWGPIFNILKEKNFQPRISYPAKLSFVSEGEIKYFTDKQMLRDFVTTRPALKAAEGSTKHGKEQLVPAAAKSCQNVKTIETRKKLHQLMRKITS

SEQ ID NO: 31805 - protein, 65 aa, Homo sapiens
MITTLDPGMAPYIKSGGELDIVVTSNKEVKVAAVRDAFQEVFGLAVVVGEAGQSNICPTTISLCS

SEQ ID NO: 31806 - protein, 183 aa, Homo sapiens
MAVARQKKGKGLRFKRLESFLHDSWRQKRDKVRLRRLEVKPHALELPDKHSLAFVVRIERIDGNLKMLHIVEPYVTWGFPNLKSVRELILKRGQAKVKNKTIPLTDNTVIEEHLGKFGFICLEDLIHEIAFPGKHFQEISWFLRPFHLSVAHHATKNRVGFLKEMGTPGYRGERINQLIRQLN

SEQ ID NO: 31807 - protein, 796 aa, Homo sapiens
  DOMAIN (725)..(776): Ribosomal protein L30 proteins domain identified by eMATRIX, accession number BL00634, p-value=7.667e-18, raw score of 34.38
MFGRSRSWVGGGHGKTSRNIHSLDHLKYLYHVLTKNTTVTEQNRNLLVETIRSITEILIWGDQNDSSVFDFFLEKNMFVFFLNILRQKSGRYVCVQLLQTLNILFENISHETSLYYLLSNNYVNSIIVHKFDFSDEEIMAYYISFLKTLSLKLNNHTVHFFYNEHTNDFALYTEAIKFFNHPESMVRIAVRTITLNVYKVDNQAMLHYIRDKTAVPYFSNLVWFIGSHVIELDDCVQTDEEHRNRGKLSDLVAEHLDHLHYLNDILIINCEFLNDVLTDHLLNRLFLPLYVYSLENQDKVFLIIHHAPLVNSLAEVILNGDLSEMYAKTEQDIQRSSVLPTLSSLWQGSHLSLNQLQSGLHKCSSHLCGAQAAADSVTGEIPAIRSLEWLISAGSKARTFFFLKMLIGFWEKVDCEYQRRQVLSTRLQEALPSNRLTDVAAVHSSCMLGFGSTAPRGSWIGDPAAVHLPLPGELAEHLGSKGTTTVTKHQPQAKPSIRCFIKPTETLERSLEMNKHKGKRRVQKRPNYKNVGEEEDEEKGPTEDAQEDAEKAKGTEGGSKGIKTSGESEEIEMVIMERSKLSELAASTSVQEQNTTDEEKSAAATCSESTQWSRPFLDMVYHALDSPDDDYHALFVLCLLYAMSHNKENLLKKRKAYQALKATQAKQELLAKKEQKKGKGLRFKLLESFLHDYWQQKPDKVHLRRLEVKPHAVELPDKHSLAFVVRIERIDGVSLLVQRTIARLCLKKIFSGVFVKVTPQNLQMLRIVETYVTWGFPNLKSVRELILKPWTSQGQE

SEQ ID NO: 31808 - protein, 61 aa, Homo sapiens [sequence omitted]

SEQ ID NO: 31809 - protein, 78 aa, Homo sapiens
MKPSSQPRSWISTPHPKACSSLSFPLSLDNWMNINLREVICTSRDGDKFWRMPECYIRGSTIKYLRIPDEIIDMVKEE

SEQ ID NO: 31810 - protein, 124 aa, Homo sapiens
  DOMAIN (8)..(32): PYROGLUTAMYL PEPTIDASE I (C15) FAMILY SIGNATURE domain identified by eMATRIX, accession number PR00706A, p-value=9.239e- 15, raw score of 12.85
MEHPRKAVVVTGFGPFGEHTVNASWIAVQELEKLGLGDSVDLHVYEIPVEYQTVQRLIPALWEKHSPQLVVHVGVSGMATTVTLEKCGHNKGYKGLDNCRFCPGSQCCVEDGPESIDSIIDMDA

SEQ ID NO: 31811 - protein, 93 aa, Homo sapiens
  DOMAIN (27)..(48): JUN TRANSCRIPTION FACTOR SIGNATURE domain identified by eMATRIX, accession number PR00043A, p-value=1.600e-25, raw score of 9.07
  misc_feature (1)...(93): Xaa = X or * as defined in Table 2
XALGPPRLAALKDEPQTVPDVPSFGESPPLSPIDMDTQERIKAERKRLRNRIAASKCRKRKLERISCLEEKVKTLKSQNTELGVHGEPAARAX

SEQ ID NO: 31812 - protein, 43 aa, Homo sapiens
  misc_feature (1)...(43): Xaa = X or * as defined in Table 2
XYPQKCLPLQRSQNTQKGTGIGHWVVAVAPDDPDQRLAQAIQS

SEQ ID NO: 31813 - protein, 769 aa, Homo sapiens
  DOMAIN (603)..(658): 3'5'-cyclic nucleotide phosphodiesterases proteins domain identified by eMATRIX, accession number BL00126E, p-value=1.000e- 40, raw score of 35.22
  misc_feature (1)...(769): Xaa = X or * as defined in Table 2
XTSGADSSSLSPPLPALGRTREQTLLGARSRGRVLLPAIPDPFLWRMENLGVGEGAEACSRLSRSRGRHSMTRAPKHLWRQPRRPIRIQQRFYSDPDKSAGCRERDLSPRPELRKSRLSWPVSSCRRFDLENGLSCGRRALDPQSSPGLGRIMQAPVPHSQRRESFLYRSDSDYELSPKAMSRNSSVASDLHGEDMIVTPFAQVLASLRTVRSNVAALARQQCLGAAKQGPVGNPSSSNQLPPAEDTGQKLALETLDELDWCLDQLETLQTRHSVGEMASNKFKRILNRELTHLSETSRSGNQVSEYISRTFLVAMGFHRIAQTDQQTEVELPKVTAEEAPQPMSRISGLHGLCHSASLSSATVPRFGVQTDQEEQLAKELEDTNKWGLDVFKVAELSGNQPLTAIIFSIFQERDLLKTFQIPADTLATYLLMLEGHYHANVAYHNSLHAADVAQSTHVLLATPALEAVFTDLEILAALFASAIHDVDHPGVSNQFLINTNSELALMYNDASVLENHHLAVGFKLLQAENCDIFQNLSAKQRLSLRRMVIDMVLATDMSKHMNLLADLKTMVETKKVTSLGVLLLDNYSDRIQVLQNLVHCADLSNPTKPLPLYRQWTDRIMAEFFQQGDRERESGLDISPMCDKHTASVEKSQVGFIDYIAHPLWETWADLVHPDAQDLLDTLEDNREWYQSKIPRSPSDLTNPERDGPDRFQFELTLEEAEEEDEEEEEEGEETALAKEALELPDTELLSPEAGPDPGDLPLDNQRT

SEQ ID NO: 31814 - protein, 907 aa, Homo sapiens
  DOMAIN (114)..(135): JUN TRANSCRIPTION FACTOR SIGNATURE domain identified by eMATRIX, accession number PR00043A, p-value=8.953e-23, raw score of 9.07
MAGARVGPAAGARTAVPAAGEVPASPALTDTQKGTGIGHWVVAVAPTIQTSVWPKPFRGNRISVLGFEPHSLVSADPQQSQYPYFLFPEPPSPKPLSMLEDSYASLKIQASARAPPLSPIDMDKQERIKAERKRLRNRIAASQVPQAQAGAHLAPGKKVKTLKSQNTELASTAACCASSSSLVGGSRERVSESGPHICAQRAPPRRALARGRLMPGDTGPRELHRNPSVVVVVCLLVSLLLIGSVVMAVRFCHRNESKFENLDEVSMGSVNDRLSFAHHLQEHQFLFPRVAGCRARGTPATPAALGRCWPWPLRPPCPASQRQKVAVGPKRMGPSPFRLAATVRQPERPQAPMAVPSCPSTPDYENMFVASQQPSTSGMNKGKALPAGILQMVTDTSRPNVGGDESLDCLVLNRISYTCRSTLSPRPSFSAPGREESGSVMAPDDSMGIMRSLGGLSRLTVAAIVRDVTKFCDPGPPHPALQETPQMAPSPGAPQPLNPPAPPRKRNTASAPVHLRAARDDSEAALYPFLQVSYSLSGHKNNYTYYAWVVGGFRALGYKHSTDVCSGVTIQEEMWIRHRFLRAAPISQRTRHYHRFLGCSMAGSGCASDLLCCDWRDSCCRCSLSAAQATPLSSPRPRPRSAARLSARGAATTAGSVCSGGGEVAGEPGPRRHHVGGAEKWGDVQWTPGDCDNWMNINLREVICTSGTGQVLADARVLHPRQHHQYLRIPDEIIDMVKEEVGPRAAAAEACSSRSSRKPRHGRRWPRCFGALSCCGGRESDSTCCKPLPFADPQVLHAPEKGVWEAGSRTRPRERAPRSVCPGSGPGPGVEATARSCRAGGAEAVEGGTGAQASMVNTTGYWARPLQATQGGSAAWQQWGTREASPDDTTTRGLTGAKPESTNSQNH

SEQ ID NO: 31815 - protein, 65 aa, Homo sapiens
  misc_feature (1)...(65): Xaa = X or * as defined in Table 2
XTGTSSGGCPESYIRGSTIKYLRISHQIIDMVKEEGGGQGPLAAKALPASRKPAERPRHGRRWPS

SEQ ID NO: 31816 - protein, 132 aa, Homo sapiens
MRGAAVTGGNGELNPHACPLEGDTFDNFISVFFSLETLSSGRRQATFSGSCGSAPAKDVQAIGTPKCEPCDCSSLNTLAASMLTMMSCALQVRGSDSPGSRRSSGGSMVHFPHLQLFSYQPLSSKSLRIPPR

SEQ ID NO: 31817 - protein, 326 aa, Homo sapiens
MGKYYGSWQLETQVRKGKSGKFRESEESPKLCNDSGQAATSKSMPGFLCGMCPLSTCISLELKSKHCLFGEGSEIKIKEHFHLLLIAYTCCGLRGAIAFMGHPEVGYKKTALNPSREGEYSGEWVQEPGQINTGTSQLLLSGPAVRYSKFKMSEARPPPLLGQHTTHILKEVLRYDDRAIGELLSAGVTLEPNSLGLAVVVTEEVPLGQEQGEHDSVIGDCSAPASGWVLDFASYSFLAKENLLGLQGKPKEELDKLKAAGIVEKRLQEPSADCLPVQICININALLMIEKHVQASRLKYVSFAHNPLVREQMVLDPWRDGMSLYD

SEQ ID NO: 31818 - protein, 44 aa, Homo sapiens
MSEARPPPLLGHDRTHILKEVLRYDDRAIGELLSAGVVDQHETH

SEQ ID NO: 31819 - protein, 89 aa, Homo sapiens
  DOMAIN (14)..(31): Zinc finger C2H2 type, domain proteins. domain identified by eMATRIX, accession number BL00028, p-value=8.269e-11, raw score of 16.07
AADTSGQQMKKHPCRQCDKSFSSSHSLCRHNRIKHKGIRKVYACSHCPDSRRTFTKRLMLEKHVQLMHGIKDPDLKEMTDATNEGGKQK

SEQ ID NO: 31820 - protein, 122 aa, Homo sapiens
MILPYTDLVDDLELMGKDCLFLEPAIPEMFVQHSPGLCLVLSNEWFLPKYKTHPKSMRQSSVGFREVCDGPGESAQRMVPPRMSTRDFKLMGFQSGLPGVCMPALPFSRPLGPADVGYKAHP

SEQ ID NO: 31821 - protein, 41 aa, Homo sapiens
MKPNTSSTSTWAKWPFFCSNLVKSMDCATHPVIHPKTRTAA

SEQ ID NO: 31822 - protein, 23 aa, Homo sapiens
  misc_feature (1)...(23): Xaa = X or * as defined in Table 2
MFRIFDTRPIGRYMVNLVGKAWX

SEQ ID NO: 31823 - protein, 178 aa, Homo sapiens
MLRADGIDPDFAAMKSPQESPTSGVLSLQTVIRDILVWETAALHPDFTAGETGPGEETHLVRKLKLKKATAHTGSEGSRKIGNQLCSQCLCPLCSNTAFQSSYAVKFSAHHIGQRALARVEASADHFPDNLAGRDGTVCSTGKSSLGQGMSRMFEKMVQKGAFGNPQGFCTQDGLEGS

SEQ ID NO: 31824 - protein, 61 aa, Homo sapiens
MHARAHARSLLSLLTKDRMTWLCDPIPQRLWCDCGDPWHRAPLRLPPHLKTFQTMTFIAGL

SEQ ID NO: 31825 - protein, 477 aa, Homo sapiens
MTGKCGKFGNFLESWRAQKTGICGKVWNFLENLLNGFGQNAYSDTDNEVQAEVVSDKDKELVGNWSKGHSCYAKRLAAFCPCLRDLWNFELERDDLGYLVEEISKQQTIQEEADHKNLESLQTEDAIEKKTPFSGEKFKLAAEICISNKDPNINSQDDGENVPRVAVHPNGCFAWKLPVLSRKFERKPIYWILSEVAKRLGPDVYQKFTEGRTQEQWLQHLYAKMLAKDPALPSYDELKKMGIYKRKDPNGHFVAYKAFRDDPEANPLKTPSGKIEIYSSRLAEIARTWELEKDEVISPLPVYASTFEGWNSPERRTFPLQLFGFHDKSRTHSTYGNIDLLKAACRQEVWINPIDAQKRGIANGDMPYVFSSQMAKFTPRTVIVFPNLEGPQVWRSTGDPPEAVVLAVRGYSPCRAPCKGLATLSQVVSNGFGLCGSSRKCAESDVVSFRAFFLKESRSFSSPRSRASQGYVLRFRM

SEQ ID NO: 31826 - protein, 48 aa, Homo sapiens
MCTTCRFVTYVYICHVGVLHPLTRHLTLGISPNAIPSPSPHPTTDPGV

SEQ ID NO: 31827 - protein, 69 aa, Homo sapiens
MPPWSAICVQQPKWQNSPPRTVIVFPKSGRAHKCGEALGGPSRSSSASSQGLLSLPGPVQGPGHPIPGM

SEQ ID NO: 31828 - protein, 70 aa, Homo sapiens
MDEAGNHHSQQTIARTRKPNTCMFSLIGGNWNNENTPDTGWGTSHNHTLGPVVGWGEWRGIALGDIPNAK

SEQ ID NO: 31829 - protein, 136 aa, Homo sapiens
MTTCEQIVRKDFALDSEESRMRIAAHHMMRNLTAGMAMITCREPLLMSISTNLKNSFASALRLMEVVRSNYEAMIDRAHGGPNFMMHSGISQASEYDDPPGLREKAEYLLREWVNLYHSAAAGRDSTKAFSAFVGQ

SEQ ID NO: 31830 - protein, 52 aa, Homo sapiens
MPEQIRLIVGGVDPKQLAVYEELARNVPGFLPTKDLGQPTGFLAQPMKGNAV

SEQ ID NO: 31831 - protein, 881 aa, Homo sapiens
  misc_feature (1)...(881): Xaa = X or * as defined in Table 2
MQGSITTPGSIALAQAQAQAQVPAKAPLAGQVSTMVTTSTTTTVAKTVTVTRPTGVSFKKDVPPSINTTNIDTLLVATDQTERIVEPPENIQEKIAFIFNNLSQSNMTQKVEELKETVKEEFMPWVSQYLVMKRVSIEPNFHSLYSNFLDTLKNPEFNKMVLNETYRNIKVLLTSDKAAANFSDRSLLKNLGHWLGMITLAKNKPILHTDLDVKSLLLEAYVKGQQELLYVVAFGGQVLESSIRSVVFRPPNPWTMAIMNVLAELHQEHDLKLNLKFEIEVLCKNLALDINELKPGNLLKDKDRLEEFSMQQLSGSKRKMSTQPRTELHSQSTHHNNFYYTSYQHHLYSHGSTTATAHPQLKQCVRQAIERAVQELVHPVVDRSIKIAMTTSLRTASPQQREMMDQAAAQLAQDNCELACCFIQKTAVEKAGPEMDKRLATEFELRKHARQEGRRYCDPVVLTYQAERMPEQIRLKVGGVDPKQLAVYEEFARNVPGFLPTNDLSQPTGFLAQPMKQAWATDDVAQIYDKCITELEQHLHAIPPTLAMNPQAQALRSLLEVVVLSRNSRDAIAALGLLQKAVEGLLDATSGADADLLLRYRECHLLVLKALQDGRAYGSPWCNKQITRCLIECRDEYKYNVEAVELLIRNHLVNMQQYDLHLAQSMENGLNYMAVAFAMQLVKILLVDERSVAHVTEADLFHTIETLMRINAHSRGNAPEGLPQLDWKYYRAQAEQQDNPAGNPNMIRAKCYHNLDAFVRLIALLVKHSGEATNTVTKINLLNKVLGIVVGVLLQDHDVRQSEFQQLPYHRIFIMLLLELNAPEHVLETINFQTLTAFCNTLPHVEALPKLPGFVYAWLELISHPDIYCKNAGHIPPQAEX

SEQ ID NO: 31832 - protein, 343 aa, Homo sapiens
MNEGTSDRSTFYSDRAQALPHQQPPTPPPPEAQTGRVPSVCPRPPPHRSRPGSPRCRDPPGTLGPAHTSTSHDCVPQADARPTLALQTGKLRPEAAGWGRPPGEPEPPPPASPPWPVRSTRGARRRRTAGARLGPAARWQLSGWATRAEQAAVSIAGPRARGSPGGLQKRHARVTVKYTGGSCSGGWTWRSGSTAPGGAVPRHGGRMPDEINIDELLELESEGREAGKSSPSKQGPLCRLLQESGSRGMLMTKVTDIDSVQNISSSPTLKSAVSCVERRRAHSRRLPKNLLPGGHVVSKHRSPLRVTCWPEWSSLVNAAKAYEARASVVISLMPANHVDQQRK

SEQ ID NO: 31833 - protein, 84 aa, Homo sapiens
EADMPDEINIDELLELESEEERSRKIQGVLGTPEVMWETCRGLHPGAAGKASRPPQAARPPPAKPLPRRQPQPPPGTGPGLLHP

SEQ ID NO: 31834 - protein, 62 aa, Homo sapiens
  misc_feature (1)...(62): Xaa = X or * as defined in Table 2
XSRGAAESGHARVTVKYDRPGSLQRRLDVEKWIDGRLEELYRAMEADMPDEINIDELLEFRE

SEQ ID NO: 31835 - protein, 82 aa, Homo sapiens
  misc_feature (1)...(82): Xaa = X or * as defined in Table 2
XEAGKDGEGKNGTIELMEPLDEEISGIVEVVGRVTAKATILCTSYVQFKEDSHPFDLGLYNEAVKIIHDFPQFYPLGIVQHD

SEQ ID NO: 31836 - protein, 369 aa, Homo sapiens
  DOMAIN (63)..(85): w INTEGRASE CP4-57 SYT P4 domain identified by eMATRIX, accession number DM01282A, p-value=4.316e-17, raw score of 17.37
MSAPNTYGVNHSMLEYGALDERGSPKCWTIIMVDMMELPRLRINAGTLAQFIDKPVCFVGRLEKIHPTGKMFVLLDGEGKNGTIKLMEPLDEEISGIMEVVGRVTAKATIMCKLMSSLKRNNKLNNYPHKNTFIRTKNQETKAPYPWEGFFVGLLPVRTSALYRITFAGFFPFGEGVRAFFIARRCRVSHPRGLARSFQAWAITSGMVISTFVSAPIMYVSAWLLTFPTMDPKPLAYAIQNVSFDISIVSLISLMITTAVTLFCSILIAGISLMCMNQTAQAGSYEGFDQSQSHKVVEPGNTAFEESPAPVNEPELFTSSIPETSSCFRGCKGLAVPVMPKALHVVPKPFHCQPYSLSEPILPPLPAAA

SEQ ID NO: 31837 - protein, 187 aa, Homo sapiens
  DOMAIN (128)..(150): w INTEGRASE CP4-57 SYT P4 domain identified by eMATRIX, accession number DM01282A, p-value=8.560e-14, raw score of 17.37
MGILLVPEYNKSDYTLTKISVKVIIKCWGGTALKVKNWQEGRRDSSEQLVRSTHSTAAAASADSRLALLTLFAGRMGKHFSRPWVSRQPQSWTIIMVDMMDLPRSRINAGMLAQFIDKHCLLRREAGKDFIPTGKMFILSDGEGKNGTIELMEPLDEEISGIVEVVGRVTAKATILCYILCPVLKEG

SEQ ID NO: 31838 - protein, 68 aa, Homo sapiens
MGHWPRGVRRIWTLLGSRCDTAFNYSCLPFLGLHHFPEPASWKPRPSWSLPGPLVAHGENAHSRTPEP

SEQ ID NO: 31839 - protein, 247 aa, Homo sapiens
MPGQLLDAGEHCQPVRKPQSMSTGTTEPTPHVAFALLHLILTEAPGIDDGTLPTSQTRKLRPEEEGYLLQLEKTIGRLLRGKSSLTFERRDGITDNSRASQPAPWKAQERKKETFAPPRTCDVAIRLEQHKHEFKGSISQRPGALRGAKEPWLSFQEIWESLLPLSASVSPKAQDSLDTYEVTNKYAIDESRSSHEKAIHQDPVYTPFVKTNPLLLKELEHKSWSVLSMVVCPSAENKAYYAAGSRK

SEQ ID NO: 31840 - protein, 310 aa, Homo sapiens
MGEQSRAHTAKSKSVQSVLGEIGLRKGEKSGNKSFHPEIRGCKCSPAHGIMGRKRLHGPQGGTAALPTVGQLGMGGGVKKTASVRARVGRQMHPHTPSRFLMTDTASAPDLSENFSLCLIGGDSHGHREGSCSDERPGTATNPPRLQASYSAFLSPSVQKQKVLEVGNSKTKPPDDSVPGEGALPCWQAANFLLCVHVVEIECSGPLSPLTSPKPNIAKEMAEGISSSEAKDLFAVRKQNITIQSFPASVCGNEQPRNRSVEVITQTLPCGSERPKHCSVEVINQTLLCGSESPTYHSVEVSTPDTALWK

SEQ ID NO: 31841 - protein, 72 aa, Homo sapiens
MGTEKGAVLMRGSRHLKKMTEEYPALPQGAEASLPLTGSASCGVPGILRKMWTRHKKKSEYVGATNSAFEAD

SEQ ID NO: 31842 - protein, 545 aa, Homo sapiens
KWHAPRFRRAETSELVNRHKRRLQCEVPTLNIYIEKIKSNPQIFTSIEKWSVPTLGLRCWDVNIAGTCTGIQQAAVYLDHFNKAEDRAPDTQRRGYYRRSCGTPATEIRLYLELRHVFHQPPTLISLRVTQGRNDALVVEQPLIECLLNSWLALSMKQNAGSWDLPGLVSQQTASEDRFGTGTCHFLHIPLATFQDSGMASGKEPLCFCFQSTCVSLCQETNGNCTPKLHDVLGRENPQTTEEWYLQKIEREEAAQRQEQGDMATPDKRKPSLPCQSPLSGISLCLLFSLRSAALWAFFSCLNTDAPVASGYLQTPFILPGKKINFLFHQENSLKRNRTAVQSPQGVVVNGREALGGVFKVAGIDGLATWKRYGKLGARREREHMLSRRFMEGLMDVQEVVFLSKMKKLHSAPVGLPGRRSAVLLLGPPRSRNAKKLCDCLLLYSISLPEDARRKAQLPERLQDLREGWRANQRGCHLADLKGKAIRRGRVHLSEMPKHRPCGNRPHRGAGPPPLEHRRSIGGALALASWLDVTVSGRADKSRRH

SEQ ID NO: 31843 - protein, 52 aa, Homo sapiens
MAYEGHVVALDERPPATAQMIQSPHVPYTTSTQATLPGNTHGSELPSTLSWQ

SEQ ID NO: 31844 - protein, 376 aa, Homo sapiens
  misc_feature (1)...(376): Xaa = X or * as defined in Table 2
MLGGGDLADKTVKVKGVFYGSSPTGNLTNQQVILLHLYGRKHSPSVQGESRQEKQSHPHVVMGEQLSIRLCDPEYYGRRTDHLEKNGIGTQATSWGTQTFVGLIEEGKLANEPKKEGPVRGVKLVDELSCADSLRCMVTQDGRLENVAVILGEVMNKGKAGRAKWLTVPDDCATCLEEEQYEQSENKIKKMEAKMVAKLEYESVLCVKPNISVYWIPPWASNCDYRASDWKLDQPDWTVHLRIISKGKTAYIKLEDKVSGELFTQIPVEQYPGIAVETVTDSSCYFLIWIQDGPGQSAVIDTAGFTDRGDAFEFNVSLQDHFKWVKQESEISKESQEMDACPNLDLGFKERQTIKLSTGNITTKNGCASKPRTAMX

SEQ ID NO: 31845 - protein, 215 aa, Homo sapiens
MPDWTGRLRITSKGKTAYIKLEDKVSGELFAQAPVEQYPGIAVETVTDSSRYFVIRIQDGTGRSAFIGIGFTDRGDAFDFNVSLQDHFKWVKQESEISQESQEMDARPKLDLGFKEGQTIKLCIGNITNKKGGASKPRTARGGGLSLLPPPPGGKVTIPPPSSSVAISNHVTPPPIPKSNHGGSDADILLDLDSPAPVTTPAPLYCGRSGGSTLT

SEQ ID NO: 31846 - protein, 69 aa, Homo sapiens [sequence omitted]

SEQ ID NO: 31847 - protein, 52 aa, Homo sapiens
MAESWDSFPLAADRIHIRFARRTGERGAAMVRFKHSLDDRVLSSLVRDTIAR

SEQ ID NO: 31848 - protein, 53 aa, Homo sapiens
MSAGWQLSSLENCGRCCCYPDCSVQQVGLKPEQCSQLTPPPPLVSSFLSQTSG

SEQ ID NO: 31849 - protein, 80 aa, Homo sapiens
MVRFKHRYLLCELVSDDPRCRLSLDDRVLSSLVRDTIARVHGTFGAAACLHRLRGYNKNMSEVPNSVQQETAVDLVAELH

SEQ ID NO: 31850 - protein, 93 aa, Homo sapiens
  misc_feature (1)...(93): Xaa = X or * as defined in Table 2
MVRFMHRYLLCEQVCDDLRCRLSLDDRVLSSLVRDTIARVHGTFCAIACSIALALARALNEEGNPEGWRDVAGASAGGRKKGHECPSPCTVFX

SEQ ID NO: 31851 - protein, 78 aa, Homo sapiens
MVRFKHRYLLCELVSDDPRCRLSLDDRVLSSLVRDTIARVHGTFGAAACSIGFAVRYLNAYTGIVLLRCRKEFYPACV

SEQ ID NO: 31852 - protein, 118 aa, Homo sapiens
MSENKMVPSEFSTGPVEKAAKPLPFKDPNFVVSIEDFSIDAPPSFKPAKKYSDVSGLLLLNMDHLEEEQDLRQGSPPAERGPESIVSVTSPVAKSRDGSCSVHMCLIRYWATSWLKPE

SEQ ID NO: 31853 - protein, 133 aa, Homo sapiens
  DOMAIN (42)..(53): Nuclesosome assembly protein (NAP) domain identified by eMATRIX, accession number PF00956D, p-value=7.300e-12, raw score of 7.51
MRSGDPSSKSTEIKWKSGKDLTKRSSQTQNKASRKRQHEEPESFFTWFTDHSDAGADELGEVIKDDIWPNPLQYYLVQDKDDEEGEGEEDDDDDEEEEEGLEDIDEEGDEDEGEEDEDDDEGEEGEEDEGEDD

SEQ ID NO: 31854 - protein, 91 aa, Homo sapiens
MEVWMVEAQMVEARMVEARTVEARMAQLLPDALHTHAQSSNQRRELGWKSTEAKQEEPTGPQIQAAKARALFVHFVQFFVQSTKNLDTLHR

SEQ ID NO: 31855 - protein, 139 aa, Homo sapiens
MPLQHKTASSGFVGPHCVLKTGKSKIKVLADLVSGEGSLPGVQKDISHIVTSGGCPGSWHFEQIIGQNAQTKRGKNEATKQRFIENESTLHRVGAGQVEGLKSPVTEFSGVQISSRGFPLAIWYTPLANEVVALNQTLK

SEQ ID NO: 31856 - protein, 43 aa, Homo sapiens
VSKVMLVLKALESSDLTEVVGYGFYLYKCQTKLHTGEKPYKCK

SEQ ID NO: 31857 - protein, 26 aa, Homo sapiens
GRWDLNFILIEGIFVDIIYNKFCSAQ

SEQ ID NO: 31858 - protein, 46 aa, Homo sapiens
MKRLIHSYSKYYWYIFHMPGPAKCWGDTMVFLELVFLGWREPTLNK

SEQ ID NO: 31859 - protein, 167 aa, Homo sapiens
MAPSEDPRDWRANLKGTIRETGLETSSGGKLAGHQKTVPTAHLTFVIDCTHGKQLSLAATASPPQAPSPNRGLVTPPMKTYIVFCGENWPHLTRAPRTRLQREFETLKEKGDLWLHIRLFTSRCRPLIRLEDTGSRPGQGRVTLAGLAAKGSFRPDVPQRPSGRLVP

SEQ ID NO: 31860 - protein, 99 aa, Homo sapiens
  misc_feature (1)...(99): Xaa = X or * as defined in Table 2
MAPSEDPRDWRANLKGTIRETGLETSSGGKLAGHQKTVPTAHLTFVIDCTHGKQLSLAATASPPQAPSPNRGLVTPPMKTYIVFCGENWPHLTRVTPMX

SEQ ID NO: 31861 - protein, 173 aa, Homo sapiens
  DOMAIN (73)..(85): RNase H domain identified by eMATRIX, accession number PF00075C, p-value=4.857e-13, raw score of 11.58
  misc_feature (1)...(173): Xaa = X or * as defined in Table 2
MTVGGKDIEFLVDTGAEHPVVTTLVAPLSKKTIDIILDLKNAFFSIRLSPESQKLFAFQWEDLESAVTTQYTWTRLPQGFKNSPTIFREALARDLQKIPTRDLGFVLLQYVDNFLLGHHKKRALAKTVAQQCVTFWQHNARQGLTIPASIQAYGAAPFEDLQVDFTKMPKCGX

SEQ ID NO: 31862 - protein, 51 aa, Homo sapiens
  misc_feature (1)...(51): Xaa = X or * as defined in Table 2
XLAKTVAQQCVTFWQHNARQGLTIPASIQAYGAAPFEDLQVDFTKMPKCGX

SEQ ID NO: 31863 - protein, 50 aa, Homo sapiens
VEAYPTRTEKAHEVTRVLLRDLIPRFGLPLRIGSNNGLVFVADLVQKTAK

SEQ ID NO: 31864 - protein, 893 aa, Homo sapiens
  DOMAIN (499)..(516): RNase H domain identified by eMATRIX, accession number PF00075A, p-value=2.620e-12, raw score of 14.44
MDKNPPTKYPICCLQETQLTHKDSNKLQQCAADPRGELTQRLNTGKESAIGVWTSGTWEVSSYGSVRPHIRGCMAEMAPMVPLLTKKRGSPHRSPQPLSLCKDPNETEGMQRLMRYREALLEGLRRGAQKATNVNKVSEVIQGKQESPVQFYERLCEAYRMYTPFDPDSPENQRMINMALVSQSAEDIRRKLKKRAGFAAAAIRGVPLKGQGNGGSRKNTQSDRPRLQRNQCAYCKEIGHWKDKCPQLKEKQGGSEQKTPDKDEGALFNLAEGLLDRRGPGSRAPKEPMVRMTVGGKDIKFLVNTGAEHSVVTTPVAPLSKKAIDIIGATGVLTKQAFCLPRTCSVGGHEVIHQFLYIPDCPLPLLGRDLLSKLRAIFLYQARLFTTEVAWNRSYHGPDSSPRGRVATLPNQTRQRDRASSGPVVAKICAEDNPPGLAVNQAPVLREVKPEAQPVRQNQYPVPREALEGIQVHLKHLRTFGIIVPCQSPWNTPLLPVPKPGTKDYRPVQDLRLVNQATVTFHPTVPNPYTLLGLLPAKDSWFTCLDLKDAFFSIRLAPESQKLFAFQWEDPGGSRTSPTIFGEALARDLQKFPARDLGCVLFQYIDNLLLGRPMAVGCVKGTDALLQHLEDYGYKVSKKKAQICRQQQNARQGPTIPLSIQAYGAAPFEDLQVDFTEMPKCGGNKYLLVLVCTYSGWVEAYPTRTEKAREVTRVLLRDLIPRFGLPLRIGSDNGPAFVADLVQKTAKDPHWKTGENVNLGIDGTGLDPRVNLLIQGEIHKRSPKPVFQTFYDELNVPIPELPGKTKDLFLQLAENIAHSLNITSCYVCRGTTMGDQWPWEARELVPMDPVPDIIPVQKAHTGNFWVLKTSIIGQYCLAREGKDFTIPVGSSIA

SEQ ID NO: 31865 - protein, 261 aa, Homo sapiens
  misc_feature (1)...(261): Xaa = X or * as defined in Table 2
MTTGDCCHLPGSLCDCSGSPAFSKVVEATGLGPPQYVAQVTSRDGRLLSTVIRALDTPSDGPFCRICHEGANGECLLSPCGCTGTLGAVHKSCLEKWLSSSNTSYCELCHTEFAVEKRPRPLTEWLKDPGPRTEKRTLCCDMVCFLFITPLAAISGWLCLRGAQDHLRLHSQLEAVGLIALTIALFTIYVLWTLVSFRYHCQLYSEWRKTNQKVRLKIREADSPQGPQHSPLGRWTPEEGGRGDTSMNAGLSGPCSREARX

SEQ ID NO: 31866 - protein, 52 aa, Homo sapiens
  misc_feature (1)...(52): Xaa = X or * as defined in Table 2
XGSWCLVTFISSPTAHQLLQANSVIAMHLEPRAKVPVGPKSKLPPAVLSVQT

SEQ ID NO: 31867 - protein, 96 aa, Homo sapiens
  misc_feature (1)...(96): Xaa = X or * as defined in Table 2
MCSQQQTGRCLLKREPASLLPELLFFKDPRLHSQLENCKFGPTHIPDYYRIVFSILSFPPFPIPLLYHKVTGYMCTRPYGIFFFFLTKXAQWVGLD

SEQ ID NO: 31868 - protein, 85 aa, Homo sapiens
  misc_feature (1)...(85): Xaa = X or * as defined in Table 2
XPGHPQQSFALLLHLAQTESGRSLIINHLDLTRLLEALVSFLDFSDKEANTCYGTVHRLGSGRKIPSLVPGPTFQGVLPGTSQAF

SEQ ID NO: 31869 - protein, 320 aa, Homo sapiens
MVLAIRRQSFALLLHLAQTESGRSLIINHLDLTRLPADTTATVEDMLPSVTSVTTNSDTITETFATAQYILTSETTTLTSSIAPPATATPDSNSVPAGQATPSKGPSASAPSPAPASAPKVAPLVDLSDTPTSTPAASNLSSSVLANQGAVLSPSAPAGVGEASKAPPASKPTPAPVPTPTGAASPLAAAAAPATEAPQAKQEAPSTKGPDPEPTQPGAAKSPAEAATALASPKSEAASVSTTNPSQGEDFKMDEGNFKTPDIDLAKDVFAALGSPAPAAGASGQAPELAPSTADSSVSPAPAKTEYGLSLSAVIGLCPV

SEQ ID NO: 31870 - protein, 185 aa, Homo sapiens
MVLMMSSTLVNRSQTPGLAYEPSSFPKRRYWVLAIRQQSFALLLHLAQTESGRSLIINHLDLTSCQEEQNIRGPFVLYCIRGVPKQDDSSVSPAPAKTEYGLSLSAVIGLCPVVSGWEDSGLPSIKWLLGLKVQEKGLNLSGLKGPVEAKPECQRTENESSASESQDGPQCTPHRQRRTRAKHDG

SEQ ID NO: 31871 - protein, 283 aa, Homo sapiens
  DOMAIN (151)..(173): P53 TUMOUR SUPRESSOR SIGNATURE domain identified by eMATRIX, accession number PR00386B, p-value=5.950e-30, raw score of 12.28
  DOMAIN (7)..(281): P53 domain identified by PFam, accession name P53, E-value= 1.4e-165, PFam score of 563.4
MEEPQSDPSVEPPLSQETFSDLWKLLPENNVLSPLPSQAMDDLMLSPDDIEQWFTEDPGPDEAPRMPEAAPPVAPAPAAPTPAAPAPAPSWPLSSSVPSQKTYQGSYGFRLGFLHSGTAKSVTCTCFANWPTTCPVQLWVDSTPPPGTRVRAMAIYKQSQHMTEVVRRCPHHDRCSDSDGLAPPQHLIRVEGNLRVEYLDDRNTFRHSVVVPYEPPEVGSDCTTIHYNYMCNSSCMGGMNRRPIPHHHHTGRLQCLKKKPLDGEYFTLQIRGRERFEMFREPE

SEQ ID NO: 31872 - protein, 28 aa, Homo sapiens
MADSVTLTDGDQGLCGSRAPSWCWCCCV

SEQ ID NO: 31873 - protein, 94 aa, Homo sapiens [sequence omitted]

SEQ ID NO: 31874 - protein, 51 aa, Homo sapiens
MTSCLTQESQVLMMVYKQDMIWTFFHLKPLSLPARCHYNSSHSDLQHSGDL

SEQ ID NO: 31875 - protein, 159 aa, Homo sapiens
MLPALEHRTPSSSAFGLLDLTPVIYQGLSGLWLQTEGCTVSFPTFEVLRLRLTSLILSLQTAYCGISPCDRVTHGHIEVGIQTGEAAEGQWNTLDGLNLVVLQAAQAICQVGIGPTSKFMTQKNKKYRKPDTLGQLEALEREAALGIVGAGKCVVHTNP

SEQ ID NO: 31876 - protein, 37 aa, Homo sapiens
MDLLNGFDKNADSDKNNKVQVEVVSDGDEELAGDWSK

SEQ ID NO: 31877 - protein, 44 aa, Homo sapiens [sequence omitted]

SEQ ID NO: 31878 - protein, 132 aa, Homo sapiens
  DOMAIN (9)..(24): RIBOSOMAL PROTEIN P2 SIGNATURE domain identified by eMATRIX, accession number PR00456E, p-value=9.063e-10, raw score of 3.06
  misc_feature (1)...(132): Xaa = X or * as defined in Table 2
MDKGRERMAAAAAAAAAAAAAAQCRSPRCAAERRGFRRELDSWRHRLMHCVEWGTAEKIPENVEVTLELGKRQRLNSLEGLEEDRKMWENLELLRDLLNGFDKNADSVMNNKIQAEVVSDGDEELVGNWSKX

SEQ ID NO: 31879 - protein, 231 aa, Homo sapiens
METDALRNKQIAQSHVAGENPFNSFIRIIPYFPFYLSVTASAAPLDFLASDTTCGFLSLADASDSLNSKLHLLYLARPPGSVLWFANPAGARIVRTQFLPHFLVASSTDLLVASFPPLMTLAPVFILDTPAGCITYRKESNMSSTPEVNQRGSHDLHMNLSVLDKGGSGSFVLFWFVFETGDRKACFCADRKDLGEREKLMLPERGDSYRSEDLEKEMMRPRMQHRRLGLR

SEQ ID NO: 31880 - protein, 59 aa, Homo sapiens
MFAGNSDNDNEHHIEVEEEDWLVATAPLEQSLSGNHGETAFLVRLDSPNQTEGAEEPGW

SEQ ID NO: 31881 - protein, 52 aa, Homo sapiens
MKTGAKVISGGKEATRRSVDDATRKWGRNCVLTIRAPAGFANHRTEPGGLAK

SEQ ID NO: 31882 - protein, 111 aa, Homo sapiens
  misc_feature (1)...(111): Xaa = X or * as defined in Table 2
XLDFSYAGAVSTGPPVYSAGLEGALDGESVEQISQTEKPEDRAHNLIISGATEKAEFSTLASLLVQDQYLQSSYNRIQLYHENKGMTERLQDPANVHWQTSEEDGWDWITR

SEQ ID NO: 31883 - protein, 120 aa, Homo sapiens
MVSTAQDKSRQRNVEEPDWLSFPGFIFLPCWMLPALEHWTTSSSAFGLLDLYQWFDRDSRAIGHRQKATLSASLLLRFGDSDWPPCSSACRRPIVELRLRPPATAAMEAMEMRLFGVELF

SEQ ID NO: 31884 - protein, 91 aa, Homo sapiens
MVVCFISLCQDKAVTDQARNLEVIRLLEKSYREIKTFNIQVMFRHGHGSSGNKTADWLVLREAIYCPPRRDDLILEMQLNNTTWMSANLSP

SEQ ID NO: 31885 - protein, 220 aa, Homo sapiens
  misc_feature (1)...(220): Xaa = X or * as defined in Table 2
MWKTPHGKELRETLPQPITIKEQNPDNNLTHSNLGTRLAEGAMWRSIEEESGDVPGFEVQETLGPFLGYICCSVLVTVLLIEETEAQTSSYSQTEAGPRPANKAQMASWPNATAFTPAPTPMLPNVLHIMAHRECDKIRKIHWDPKQRKGVLAAQTRGSSAACRPPCATPTRKSRRLCLRWGRAGHPVPGIPVGVRPCFGRRERGSAGRAAAEGIGKLRX

SEQ ID NO: 31886 - protein, 208 aa, Homo sapiens
MEDVSGVTSRESSKQPGAGVALTTVETLPDVINAVSWRTGVMRLMTLIAVICEMGYQVRCLALEKYLQDKASFICPCTGMADGLAQIESLHALMLVGNQNISQGPYWYGDSRTDRVRRSHLKIPQKDQLDKGSGMVIEFRNLQNTSKQRSLETPLKWQDPQVQLTDHKTKQHKQKAKSVLPTPLSPPGGKVEQQAKACYSKHKYSPKS

SEQ ID NO: 31887 - protein, 92 aa, Homo sapiens
MLTLQDNSFLSIDKVPSKDAEEMRLFLDAVHQNRLPAAMKPSQGSGSFGAILGSRTSQKETSRQLSYSDNQASAKRGSLETKDDIPISKSSW

SEQ ID NO: 31888 - protein, 68 aa, Homo sapiens
MTAGSASEAQRFYSIWDIPHRKRIGNAGGSPRQAVLQEWLSISKGFPDCCPATSTGTSNRRPLLPPLV

SEQ ID NO: 31889 - protein, 162 aa, Homo sapiens
  misc_feature (1)...(162): Xaa = X or * as defined in Table 2
MAKNELPAVSEFLGXLWEDSCHVERCLVERLMWRGTETGFYPTTMLKTQNLFRQEWKQEDAYHSLELTVILTDALTIEKDGRKGGVRGYILRSLEHHLPSRDFPRVTWVPLISSKSIKEKKDSKICVHHFISAPDEQLIDGVRAVEGECHKKTILFMLNGED

SEQ ID NO: 31890 - protein, 33 aa, Homo sapiens
MAWLLLLRCLYSLYLTGQQVLGLVENQSELCCV

SEQ ID NO: 31891 - protein, 227 aa, Homo sapiens
MKAGLGGELCPVSKDPRQAAEGIVDHKPPDACPLMIQGLCLKSAQKPAEDAGARWSLHHQASPLDVTVVLREQEVECQFANLSELNSNLWTTGVRWTPSYSKASYGFSPQLHLVESSTSEFFNASSALSPKTLSSKVDVVPRKDTPQNKAGQLEPDLGKHPPPLLWRPAHAMSRGPYAFHSTFFQDTDSPCRKQSLCIWFLHGSSEIAEAQSHMTIQILGSPEKWAG

SEQ ID NO: 31892 - protein, 165 aa, Homo sapiens
MADDLGGETYFLHDIGALLPEEAKPYEGISRAQGVACVTAAVGGAGNSFRLTALLCPGLSGQPRAAVEFLRKLASFTGGRYHCPVESHLGLKVLWTNPMNNSKTRYGGLGGTGSGLVNTWGSPTLMPTSHISYADRVGIYESDDINSIMSEMEKALNYSQKRLEV

SEQ ID NO: 31893 - protein, 33 aa, Homo sapiens
MAWLLLLRCLYSLYLTGQQVLGLVENQSDWCCV

SEQ ID NO: 31894 - protein, 96 aa, Homo sapiens
  DOMAIN (1)..(21): Interleukin-1 proteins domain identified by eMATRIX, accession number BL00253A, p-value=3.219e-09, raw score of 12.29
MAEVSEAFKGLMPFDSSNLFLRINPKEVIREAERDAAEHLCVSSAQDKGLAKGDTFQGKGRHRNKQAQRKDDVKIQREDCHLQAKEQRTLLANITN

SEQ ID NO: 31895 - protein, 167 aa, Homo sapiens
MQNDRGDLTHLHFAFTERVSTETGDKNTESQKLPKVPKTLSGKGNTSCMDRNDAGVALTEYKPDGSDDAGLPAGLLRPNLLQQPRGALRHQYVHPPISVSLAKWTEAETVSLSRKRKPPPVRCPVGLGAGASAASWRDPVDTARRTRGDFGQERGRNSGTFGRGERN

SEQ ID NO: 31896 - protein, 118 aa, Homo sapiens
  misc_feature (1)...(118): Xaa = X or * as defined in Table 2
XREEEIKSLTAEIDRLKNCGCLGASPNLEQLQEENLKLKYRLNILRKSLQAERNKPTKNMINIISRLQEVFGHAIKAAYPDLENPPLLVTPSQQAKFGDYQCNSAMGISQMLKTKEQK

SEQ ID NO: 31897 - protein, 93 aa, Homo sapiens
MVICGRSSSQHGSILAHRSHDYCALGPVSSSVPFVLVGKPEERDSKCGLGRLPVHGKMATKVWPNSNALLKELQLYPSQPYELIHSLSQLPVE

SEQ ID NO: 31898 - protein, 57 aa, Homo sapiens
  misc_feature (1)...(57): Xaa = X or * as defined in Table 2
MFAIPYLSEASRLLHPTLKGRGLXXXXXXXXXXXXXXXQKLPAILPSTCTCPFLCVP

SEQ ID NO: 31899 - protein, 59 aa, Homo sapiens
  misc_feature (1)...(59): Xaa = X or * as defined in Table 2
MFAIPYLSEASRLLHPTLKGRGLXXXXXXXXXXXXXXXQKLPAILPSTCTCPFLCVPIV

SEQ ID NO: 31900 - protein, 243 aa, Homo sapiens
  DOMAIN (40)..(87): 1 CELLULOSE-BINDING DOMAIN BACTERIAL TYPE. domain identified by eMATRIX, accession number DM01842, p-value=4.647e-09, raw score of 11.31
MERTFEKGEEGGVLKAEEFKIKTLTELVSEVGPLAGYQLANSHLLVYPHVVDTKRGGKCCHASSCQTETHSCGQRTPSGRVTSHQSRESLASIHIAQVIRDIGSVCNKLLQNPEGSWPCGSWWTGCMHSIPGGIWITVVFFLSVAYGSQVVQKPAKITLAKEKPCLILGLNAKVGLTIPSCSKEHTFIISELPWVRNSDTAYLDPLAHGLSQATVKVALSSLPCGPLRGAALRMAAEFIRAGK

SEQ ID NO: 31901 - protein, 123 aa, Homo sapiens
MPVDNLIVFSFFVIYGKVYQAIFNSLAALHSQLEEPKSELALPPADENDLGTGINLNGSQVTKNAILSQALVLHSSQRQWTLVVTQCNTSCGSQWSNCVAYPPIPHSVTLGETPSAGGKKREE

SEQ ID NO: 31902 - protein, 361 aa, Homo sapiens
  DOMAIN (188)..(316): RNase H domain identified by PFam, accession name rnaseH, E- value=1e-07, PFam score of 32.8
MDLASSAAKLATGPRTAHSPGFLLSHVPSEQDPTGNQTVQLILQPLLRPLELWLKALWLTPSQISLARLMLLNRLRSPPDHHGCQASVPLLGQDILTKLSTTLTIPGIQPHLIAALLPNPKPVLHPPLVTLHLNPQVWDTSTPSLATDHAPLTIPLKPNHPYPTQCQYLIPQQALKGLKPVITRLLQHGLLKPTNSPYNSPILLVQKPDESYSSQRAELIALTWALTLAKVLYVNIYTGSKYAFHILHHHAVMWAERGFLTTQGSYIINASLIKALLKAALLPAKAGVIHCKGHQKPTHLIAKGNAYADRTAKEIANASTPTNIPALTPKGQYFSFYSITPTYSSSENLLYQSFQLRASGS

SEQ ID NO: 31903 - protein, 118 aa, Homo sapiens
MTDDLSLSPITPQMGPSSCRKTSSGLSLILHYGELYNYFLIYYNVIIIEIKCTINVMHLNHPETIPWPPVCGKNCLPQNQSLLLKRLGTAALVCSPSDLSDVTSWDYLTYFSRACDSY

SEQ ID NO: 31904 - protein, 82 aa, Homo sapiens
MPKNAVVILRYGPYSAAGLPVEHHTFRLQGLQAVLAIDGHEVILEKIEDWNVVELMVNEEVIFHCNIKDLEFGGDGKLEPTV

SEQ ID NO: 31905 - protein, 149 aa, Homo sapiens
MEPQEPETSSTPSNGLRNLEWEISGPKIDNSLYGRAHPPTAGNLCEALLKTPPDSSLTAAPRRAMGLVELSKCPEGESCQAPHDADTSMGPNNYSGDLPLNSRKDAPYTVGLHRRQTPCTQERQPTFFLGMAVAEWWLLFIGPMEGVQY

SEQ ID NO: 31906 - protein, 59 aa, Homo sapiens
MPKKLCFGLQCPTILYPYNLEPQAPGEDKEMRRQAGEWQNGVAGKERREGMSEHQEEYS

SEQ ID NO: 31907 - protein, 146 aa, Homo sapiens
MVSQEGKDTTGAWSPLKTRSQIRGHTILAVEQDQLGQGPSVTPAASPGWVNGHNCQNSQNRSISTETSQEKCVDRNAREAVLHAFQHPDGHGLKQKDFPSFAKTISLAQSLPANLISVVIYQELKLSHVLDAYTVCEEGPLPPKGS

SEQ ID NO: 31908 - protein, 42 aa, Homo sapiens
MRRSEHVDGLIRVEEAHNTSLSKEEAKVETCNKVYKGYFEQN

SEQ ID NO: 31909 - protein, 130 aa, Homo sapiens
  DOMAIN (75)..(96): MAJOR INTRINSIC PROTEIN FAMILY SIGNATURE domain identified by eMATRIX, accession number PR00783F, p-value=7.750e-20, raw score of 12.33
  DOMAIN (75)..(92): Major intrinsic protein domain identified by PFam, accession name MIP, E-value=0.00019, PFam score of 16.1
MKNPRWDDNDIILFRGKECKETKTMVAMGQGGHPGGDTKNIPKDEQSGFVDVLNRTHYFLAEHSASSTPGQLSVWIYWVGPIIGAVLAGGLYEYVFCPDVEFKRRFKEAFSKAAQQTKGSYMEVEDNRSQ

SEQ ID NO: 31910 - protein, 458 aa, Homo sapiens
MLAVKTWVTVKSGQRIANQEITLNWKNPKFHMPEDVREKKENLLLNSERSTRLLTKTSHSQGGDQALSKSTGSPTEKLIEKRQGAKTVFNKFSNMNWPVDIHPLNKSLVKDNKWKKTEETQEKRRSFLQEFCKKYGGVSHHQSHLFHTVSRIYVEDKHKILYCEVPKAGCSNWKRILMVLNGLASSAYNISHNAVHYGKHLKKLDSFDLKGIYTRLNTYTKAVFVRDPMERLVSAFRDKFEHPNSYYHPVFGKAIIKKYRPNACEEALINGSGVKFKEFIHYLLDSHRPVGMDIHWEKVSKLCYPCLINYDFVGKFETLEEDANYFLQMIGAPKELKFPNFKDRHSSDERTNAQVSLEMINTIRFASFAPEQSGFVDVLNRTHYFLAEHSASSTPGQLSVWENPFHVSPKGILHTISGPYAASMMRNDTVFEKGGKKTRIQEEMPYIKMEMKICVHLI

SEQ ID NO: 31911 - protein, 82 aa, Homo sapiens [sequence omitted]

SEQ ID NO: 31912 - protein, 72 aa, Homo sapiens
  misc_feature (1)...(72): Xaa = X or * as defined in Table 2
MEGSXXXXXXXXXXXXXXXXXXXXXXXXXXXXXXGTWNPSETKTVHTPGKGAEARDPSGLAQRVPLPGSPAS

SEQ ID NO: 31913 - protein, 76 aa, Homo sapiens
  misc_feature (1)...(76): Xaa = X or * as defined in Table 2
MLPGPWVSNAKIGGCLGRPLANCRXXXXXPSGTWNLSETEPFTLLEKGLMPESQVVSLSRSHSHGAQQAKNHWLEI

SEQ ID NO: 31914 - protein, 21 aa, Homo sapiens
  misc_feature (1)...(21): Xaa = X or * as defined in Table 2
MRPKNPRAKFGHEFTVWLCPX

SEQ ID NO: 31915 - protein, 51 aa, Homo sapiens
MRVTNKLEGKRSKALRPRDAANGRDVRACALGLRSAYAAGGEQPPSLVGVK

SEQ ID NO: 31916 - protein, 126 aa, Homo sapiens
MWFLLPVLIRQGRQPQETTPLALSLMSDAVLGAGVPCRPLPTSRSHTANLLCTRHCGAAGTLKELSEGVPRPPFSFRVGGSADVSILAERSRASAAPSASVRVPSIYTQSHCCTAKLRGSFRCSGR

SEQ ID NO: 31917 - protein, 53 aa, Homo sapiens
MIGKVHVGTRVHWTGGPLPCPGQLRQRERERRQRERQLTPLFLHMQGLFSIFT

SEQ ID NO: 31918 - protein, 27 aa, Homo sapiens
MKLSVSVEPGISGVSDREGRATKRAAG

SEQ ID NO: 31919 - protein, 72 aa, Homo sapiens
MRACFTQQKIWPFLNDTRRVILSHTFPSFRWWTFVETGTQWSNRLCPPVADSPAGRWTRGPVLTVTRLSLLE

SEQ ID NO: 31920 - protein, 93 aa, Homo sapiens
MRERTKKDEELGAWNVPKDSLGKQLNIVDFGNRPTRLQILVLPPNGYKTLKDGLTSEFISYFKTLRDSAKRHIALEESAPGQSNKQHQSPAES

SEQ ID NO: 31921 - protein, 173 aa, Homo sapiens
MAFNPDLQKLVELGQVGLRKSSFLTKWPDANQSTKVAMKMDCTRGFGDVLSLVMAGEGQKELLSKLITKIKTPNQRVCERGGGLRASEDFPPQAAMCLPQSMVLHQQFGNGLTQCWSWSLSCKKQARTLPYGFSMALQGISVEENRLTDDFFGTANSLDTHLYQGPTWHSAVW

SEQ ID NO: 31922 - protein, 136 aa, Homo sapiens
MAEPPANRANRRILSGSPVLKNAYQQLSWDNWENWSKKPKNSLFLSPCQQNLVTPLPLKITHLIQLAPVPAPFLSLVLDPWFPSGTGKREITIKGKSTHTRHVDKSVSLYSHKIPLTKQAADQICPVGHSLLTPDY

SEQ ID NO: 31923 - protein, 283 aa, Homo sapiens
  misc_feature (1)...(283): Xaa = X or * as defined in Table 2
MGERSARGHGTVGSTDECENWQQVTKMLTTSDTGETWQKLSKQGNRRILSGSQSEKRYQQLSWDNWENWRIYFPTDHGAWYTADSLINAVTAAVDLVMFQYKAVCFLTTLVSLGTRKLEHLSLESFWQSRKAKPHWGKNEMRNASGNRPLSGKEREVSQQPHLPVTQKLHSPEPETLSWNSEAAEMSLRYFVTMFRNCTFCGAAGYATAGKALNCQLTQPYGEDEIKCPWSAWHMLGVQHISDSIMKLVMLVVKVWCRKPFTPVSKGADEEAKMPLPSDPLRX

SEQ ID NO: 31924 - protein, 56 aa, Homo sapiens
  misc_feature (1)...(56): Xaa = X or * as defined in Table 2
XRHWITVTADVSTPVVIKNMPSASCDTLLDDIEDIVSQEDSKPQDRHFVRKDVVPK

SEQ ID NO: 31925 - protein, 151 aa, Homo sapiens
  misc_feature (1)...(151): Xaa = X or * as defined in Table 2
MLEGECKLNPNKREEDNNKGVLNQAEIAEMTEIEFRIWIGTKIIELPKYVETRSKEAKNHGKTNDLIEVGVIPSTLNCPVEFRKFSSALCLTSSIFHAMAEDWRPEDMFMVACSQCITIWRGLRQNYRQIISSFIWKKKIYGKYQVPLALX

SEQ ID NO: 31926 - protein, 85 aa, Homo sapiens
MFCRRPLQIVMHWEQATMNISSGLHVFCHRMKNGACQTQSRAELSEFHRTVQSAWNDTHLQFKQKRRMSNLLLHLCGKCCLPIGK

SEQ ID NO: 31927 - protein, 289 aa, Homo sapiens
  DOMAIN (122)..(174): Serum albumin family proteins domain identified by eMATRIX, accession number BL00212, p-value=7.039e-09, raw score of 30.19
MEVNGLSLEALAYVKLFLGFLVDGFGSRTKAKWGCSQTLGETGPFLGLQPKSQSVSLLPGPAVHRARTLLCCLLSALAAQYQSPPYLRGNLYLANLGIPPPTTAGPKPVLGLASDPRTTELVVGASDSELGKQRCRYPGAHGDCCSGPGVQCARTAQVLLQQWCSEANPPSPRQTPSQSLSGSVGAQQEAQRQQLRKLVQDIHQCQAKRSKAVLGLGPRAQGEISECRAVNSHLHLCEELEVGVISAKCSLYDGTEKCWLPSRRHRAPVTLPVASYISSGITSYQLHYW

SEQ ID NO: 31928 - protein, 235 aa, Homo sapiens
MNSNDSFDPTVTKSLAIAAQESVASAQTQQQTLKVPQLVAISSLHSHHKVPSEGELSGTFHWLPTWQAYADVSGGSQVPSHMGSEARPQTCFQSPCSPLAPALLPLLPNVLAFTTTVMGCIPSLCLMFYFKRNESELASHIPSEGLTVLPGNPPFYAACLLTLSLEDPGPGTEHSGTVGLCHTCRYSSVKYLSSSHSVPADRMPAALLKRKQSRGLREGAQTCDWCMFAIRHTGW

SEQ ID NO: 31929 - protein, 139 aa, Homo sapiens
MTETLWPAEPKRLLSDPSEEKFADRVLKDVHQAVILAGMASLKAFFRTIKRHSLIPYGCEHPTPTTQLAHGEVGEMNKPICQIIAPRSIELETETSAVLDQRGSSAAPPTSQPSLTGGGEDKQQIKNEKIKCSAYDKVE

SEQ ID NO: 31930 - protein, 336 aa, Homo sapiens
MKILSPGHSSWDLAPGSPVLSKAEACTERDPSSLAGPPGFPKVPKTEKSFEERLIFKAFLLKFVNSYTPIFYVAFFKGRFVGRPGDYVYIFRSFRMEELLYEEWARYGVFYKYQPIDLVRKYFGEKIGLYFAWLGVYTQMLILPPSWESLSSCTDAPPWMKTSPAGSEEPGRKQEVETRARDLEQIPTHGWVPAVTRWTTGCTCWNGMALFSLLPWDRELQNFRGLQGEPGEQTQGPLLGSSVYRPGQLGRVLLPRLTNTVSHSYPSGDPGQRPPALSMGAGNGIWYNILRGIGKLAVIINEQKCEQLEAGKERTQAEKKHQRKNNPLEGKEQIIE

SEQ ID NO: 31931 - protein, 30 aa, Homo sapiens
MSELWFLVYPFFLSWTVLYGCLYPYSKVNK

SEQ ID NO: 31932 - protein, 49 aa, Homo sapiens
MLVTWEGDLEPSSFLLVPAGFLFQGQASLTCLPGKCSFSKNLVVHTRKN

SEQ ID NO: 31933 - protein, 33 aa, Homo sapiens
MECQLAGSRMNSAMICAEKRSRAFSIVLQGIRK

SEQ ID NO: 31934 - protein, 130 aa, Homo sapiens
MSISRRHEAAPNRSIEKQFSVLFSSPPLLLTIPSPRVVCGSTLCIRNHAHLALESGNSDAKACRISFSTLAALPSFTPLLAPFSPTVSSPTPTHIKDNHVHSSGTVQALLILPQHNASQHISPIGGGKRG

SEQ ID NO: 31935 - protein, 100 aa, Homo sapiens
MGSGLHKECRGLSLSCDNVKSKSAKRGWQRSHPPNLLVPKRWGVGCSSRLTKASASPPDGRREEPGVPVVALGRMGSGGVSLPDRLSPKLEVPGASSRTP

SEQ ID NO: 31936 - protein, 166 aa, Homo sapiens
MLHSPQAQKSCVGLINSHVWSDCSSKQMSVDIAESRQKVDSPRCNNSKRKQAKSPEEGDGPLANAALDPSLCVLLLPASATTGTPGSSRRPSGGDAEALVSLEEQPTSVLTTWAQTRNRISALVLRKYQQLDFCSVHEETFNSSSCAVKCGGRAPPGNQQVNPCFA

SEQ ID NO: 31937 - protein, 31 aa, Homo sapiens
LTSGTYPKSGKAVEEAQPNSPPAEGRNVRDR

SEQ ID NO: 31938 - protein, 67 aa, Homo sapiens
  misc_feature (1)...(67): Xaa = X or * as defined in Table 2
MAAEEEDEVEWVVESIAGFLRGPDWSIPILDFVEQKCEVFDDEEESKLTYTEIHQEYKELVEKLLEX

SEQ ID NO: 31939 - protein, 41 aa, Homo sapiens
MYDGPGAYSVDFVSLLPAPCPGLLTGVLQETPEYMEAEKWT

SEQ ID NO: 31940 - protein, 757 aa, Homo sapiens
  DOMAIN (37)..(76): PROTEIN ZINC FINGER ZINC-FINGER METAL-BINDING NU domain identified by eMATRIX, accession number PD01066, p-value=6.553e-29, raw score of 19.43
  DOMAIN (203)..(645): Zinc finger, C2H2 type domain identified by PFam, accession name zf-C2H2, E-value=2.4e-75, PFam score of 263.8
MFGVHGNFLGIESRPPLLSLSPSLLYTCEMFQDPVACEDVAVNFTQEEWALLDISQRKLYREVMLETFRNLTSIGKKWKDQNIEYEYQNPRRNFRSLIEGNVNEIKEDSHCGETFTQVPDDRLNFQEKKASPEAKSCDNFVCGEVGIGNSSFNMNIRGDIGHKAYEYQDYAPKPYKCQQPKKAFRYHPSFRTQERNHTGEKPYACKECGKTFISHSGIRRRMVMHSGDGPYKCKFCGKAVHCLRLYLIHERTHTGEKPYECKQCVKSFSYSATHRIHERTHTGEKPYECQQCGKAFHSSSSFQAHKRTHTGGKPYECKQCGKSFSWCHSFQIHERTHTGEKPCECSKCNKAFRSYRSYLRHKRSHTGEKPYQCKECRKAFTYPSSLRRHERTHSAKKPYEFPFNIMKGLTLERNPMSVSNVGKPSDVPHTFEGMVGLTGEKPYECKECGKAFRSASHLQIHERTQTHIRIHSGERPYKCKTCGKGFYSPKSFQRHEKTHTAEKPYECKQCGKAFSSSSSFPYHERTHTGEKPYECKQCGKAFRSASILQMHAGTHPEEKPYECKQCGKAFRSAPHLRIHGRTHTGEKPYECKECGKAFRSAKNLRIHERTQTHVRMHSVERPYKCKICGKGFYSAKSFQIHEKSYTGGKPYECGLQLPRTAAESVDSEKLQGPGKQETHVQLLSLYCLRRVLDCSREFCRRRRNIWKLKNGSSSPSLLVADFGLVLGLLGDICRLEVDNINIPILIMPVTTMILRGV

SEQ ID NO: 31941 - protein, 161 aa, Homo sapiens
MVAHACGSSTLRGQGGLQLPRTAAESVDSEKLQGPGKQETHVQLLSLYCLRRVLDCSREFCRRRRNIWKLKNGECAEPETPRSLHAATDAHSCKNRHYLTGKTDSLWQEDTKLQTRPKATQDKGEKVDTGGPTDRCSSQARTPHPSRDHPHDPPVAPAQSG

SEQ ID NO: 31942 - protein, 118 aa, Homo sapiens
MVCLLRPDTHLTAEVVQFCSGSSPPQSVTRFFDGSTSTRYSIGRDCLPNTYFQKSVFCWRRERRRGPAPEVSAAPRRSGAQPPAPELEMATIPARTGRGLRTGTPARSGESHWAHGAW

SEQ ID NO: 31943 - protein, 66 aa, Homo sapiens
MKQLAGHEKRAGTKEGPHQGGRDEESCKVRLLSTCFCLPSPLCSGLGCGPVLIFRWQHQHKVFNRT

SEQ ID NO: 31944 - protein, 66 aa, Homo sapiens; identical to SEQ ID NO: 31943

SEQ ID NO: 31945 - protein, 109 aa, Homo sapiens
MLSRRSSFGVKMSLCNACLIAVIFSQRDKRGKEGQKERCPTPGVETAAGLRSRLRPWCLSARLSAAAGTTGQPRQKAYRKAGLSLAVPRRVFQNGDRMGATRIRPSIKR

SEQ ID NO: 31946 - protein, 42 aa, Homo sapiens
  misc_feature (1)...(42): Xaa = X or * as defined in Table 2
MSPCLRALPDSLSLPRALLPVAGATEGLLACPPRPFPSGSNX

SEQ ID NO: 31947 - protein, 441 aa, Homo sapiens
MPRLRLSGREWQCFEAVIWLTYGWNKKQDRVTNTVIAELTGLSDTHVSDALKSLAERKIIFSQKQGMMKIVGVNTDLSAWILDKPETGRKFPKTGKSFPKSGITFPKTVDTQYKNKNSINRPPSETSDESSDARLKTFSSTHPEAAVYTPSGAKWGSAEDLETAKWISSRVKLINPTCKAPDMTSWSNTVRLMRQIDNRSHQDICALYDWASKHHFWQNNILSPESLHPSKSHIAQWSPHTPSRHNFNAKDQMYSDGNFTDVGVVEIEANDKKPFAEDLKSLDLFKKEKINTEGHGSGQAFLAVMKMNLHTTLRTLSSILLWYTVATDTKFHQSSVADLIIIDHCGRIHGTIDTGDYKRGNGRREARAEKQLGAILTTWRNYRELFMADFAPGFVHPEKLVGIVSPEKLRRFFFRQKVEAQDLSYRGPGRSKGESIFFSWQ

SEQ ID NO: 31948 - protein, 634 aa, Homo sapiens
  DOMAIN (592)..(633): Initiator RepB protein domain identified by PFam, accession name RepB_protein, E-value=0.042, PFam score of 9.9
  misc_feature (1)...(634): Xaa = X or * as defined in Table 2
MGGNTQSTGLEHIEDGGLLRLLDTSFLVPELKEFFLDKANNGLDTRHVTLKNPLANMKVSFDPACDLLISVGDLVDRGAENVECLELITMPWFRAVRGNHEQMMIDGLSEYGNVNHWLENGGVWFFSLDYEKEVLAKALVHKSASLPFVIELVTAERKIVICHADYPHNEYAFDKPVPKDMVIWNRERVSDAQDGIVSPIAGADLFIFGHTPARQPLKYANQMYIDTGAVFCGNLTLCKVCGEYFVPKFHDIRIRWCSPEHGAILAMGERKKEKKNPRESAWVGTPSQLGLEHIEDGGERENSLLTSSRPGQWDHPQQLLGTFLRSEQGGNHSREPLGKYSLWRLTFKWRAKKRIGHGKEHSRKRNGRGKDPKVATRISPGKWLKALVDMQNQNLHVAPGDPRSKSSLGDIETHSCLRTRQLGASSWRRCLCQGRDWQILEVWPWDATGKDTLALMPEERVRNWLLPGAVINHKKRKNSPRIVQSNDLTEAAYSLSRDQKRMLYLFVDQIRKSDGTLQEHDGICEIHVAKYAEIFGLTSAEASKDIRQALKSFAGKEVVFYRPEEDAGDEKGYESFPWFIKRAHSPSRGLYSVHINPYLIPFFIGLQNRFTQFRLSETKEITNPYAMRLYESLX

SEQ ID NO: 31949 - protein, 515 aa, Homo sapiens
  DOMAIN (25)..(62): Serine/threonine specific protein phosphatases proteins domain identified by eMATRIX, accession number BL00125A, p-value= 5.091e-10, raw score of 14.83
MAATRGEEKICMSMYQRINGADWRNIFVVGDLHGCYTLLMNELEKVSFDPACDLLISVGDLVDRGAENVECLELITMPWFRAVRGNHEQMMIDGLSEYGNVNHWLENGGVWFFSLDYEKEVLAKALVHKSASLPFVIELVTAERKIVICHADYPHNEYAFDKPVPKDMVIWNRERVSDAQDGIVSPIAGGATQAFAKENNQKAYKETYGVSHITRHDMLQIPKQQQNEKYQVPQFDQSTIKNIESAKGLDVWDSWPLQNADGTVAEYNGYHVVFALAGSPKDADDTSIYMFYQKVGDNSIDSWKNAGRVFKDSDKFDANDPILKDQTQEWSGSATFTSDGKIRLFYTDYSGKHYGKQSLTTAQVSSFESALKILHMCEFENNRSGSGRGRGLNYPAPTDIKSRQVPLCGRNICTVQTDGCETAMAWSWHRLVMPVLPGFLRDIVHSDSIASHYGVLLALYALMQFLCAPVLGALSDRFGRRPVLLASLLGATIDYAIMATTPVLWIYPLVNSPSC

SEQ ID NO: 31950 - protein, 479 aa, Homo sapiens
  DOMAIN (437)..(467): PEPTIDE REDUCTASE PROTEIN METHI domain identified by eMATRIX, accession number PD01888C, p-value=6.000e-24, raw score of 21.56
  DOMAIN (350)..(471): Peptide methionine sulfoxide reductase domain identified by PFam, accession name PMSR, E-value=0.00013, PFam score of -43.1
MAATRGEEKICMSMYQRINGADWRNIFVVGDLHGCYTLLMNELEKVSFDPACDLLISVGDLVDRGAENVECLELITMPWFRAVRGNHEQMMIDGLSEYGNVNHWLENGGVWFFSLDYEKEVLAKAGIDVTIVISGPTCSGMRRNNDAMPSLTGDPLESTRHEHSPKRASRQAYFLSLQQISKMMELAREKQAAELKALKETSEKYDCLPPTPASPPSKGSGYNVAGKWWGAVFVDSAEAGKRYSPQRLLKQVRGSACAGNRRSGKSNSILPYRSRIKTNTGYSFTSVWGQNYEFMEKNQPRRGYRYLTVAGIGGVSGLDIGKVTGGWRDLTLSDVRYEQPGVAVKAGNLHLAVGLECLWNSSVCINDLALKDIQVNIDSKKMPPSEQVEEEEDSGPLDLSTPYPITLTRVALDNVNIKIDDTSVSATMLAEDDDRHITTEIANATQFYNDEDDHQQYLHKNPYGYCRIGGIGVCMPPEE

SEQ ID NO: 31951 - protein, 625 aa, Homo sapiens
MGVSLLAALTVIRCIRTDCGVIQVTVKTRIGIDDQDSYEFLCDFINTVSGKGECEMFIIHARKAWLSGLSPKENREIPPLDYPRVYQLKRDFPHLTMSINGGIKSLEEAKAHLQHMDGVMVGREAYQNPGILAAVDREIFGSSDTDADPVAVVRAMYPYIERELSQGTYLGHITRHMLGLFQGIPGARQWRRYLSENAHKAVHRTAILTSGSSLPMIPPIRWRRPLPAAGDRFRNQTSGTWFGIFDPLIGLMSPLVSFYLDCGYAAKRKPRNRSLSMNIELLQQLCEASAVSGDEQEVRDILINTLEPCVNEITFDGLGSFVARKGNKGPKVAVVGHMDEVGFMVTHIDESGFLRFTTIGGWWNQSMLNHRVTIRTHKGVKIPGVIGSVAPHALTEKQKQQPLSFDEMFIDIGANSREEVEKRGVEIGNFISPEANFACWGEDKVVGKALDNRIGCAMMAELLQTVNNPEITLYGVGSVEEEVGLRGAQTSAEHIKPDVVIVLDTAVAGDVPGIDNIKYPLKLGQGPGLMLFDKRYFPNQKLVAALKSCAAHNDLPLQFSTMKTGATDGGRYNVMGGGRPVVALCLPTRYLHANSGQATFVTMEDGHQAAAMSAWMSKCLSGPAW

SEQ ID NO: 31952 - protein, 53 aa, Homo sapiens
MALSNFCEELFYSKQTHYKWLPCYLTHLSLLFPVLFPFVICKMFSYDHHVFCK

SEQ ID NO: 31953 - protein, 987 aa, Homo sapiens
  DOMAIN (210)..(265): COMPONENT PHOSPHOTRANSFERASE SYST domain identified by eMATRIX, accession number PD02963D, p-value=2.272e-13, raw score of 24.36
MAATRGEEKICMSMYQRINGADWRNIFVVGDLHGCYTLLMNELEKVSFDPACDLLISVGDLVDRGAENVECLELITMPWFRAVRGNHEQMMIDGLSEYGNVNHWLENGGVWFFSLDYEKEVLAKAGYQDDFAFCERLKRVRYMRIAQARKLGNNRICHAVLFLVPSRSIDVTIVISGPTCSGMRRNNDAMPSLTGDPLESTTVNPDCPRRVFTTFMAPNCFTDKKKKPASSALVVGAQVAPNRLILYALQVPLQMFPANTLQASITGVLVIALEIKRLALGLGIFDPLIGLMSPDCGYAAKRKPRNRSLSMNIELLQQLCEASAVSGDEQEVRDILINTLEPCVNEITFDGLGSFVARKGNKGPKVAVVGHMDEVGFMVTHIDESGFLRFTTIGGWWNQSMLNHRVTIRTHKGVKIPGVIGSVAPHALTEKQKQQPLSFDEMFIDIGANSREELATHRAVIRVSGHNIGHIFPPTLANISAGNRIPAFFRFNLYHGKQQITRFVEIDGVVMRTDLYSPKAAEGKNIQLHPKVNTVGKVHYLQSLIVLVTIIGIVDSEPRFKRGLKDGELWNKFFVRILNANDEAQVSVLGELQQEMNGVFDTTFQSHLNKALWKKKRVVSRNWARGTCGPRVTNEMLEDEDAEDHGGTFCLGELVELAVTMENKAEGKRIVSEKPTRARNQGIEGSPGGRVTRSPPTQVAISSDSARKGSWEPWSRPVGEPPEAGWDYAQWKQEREQIDLARLARHRDAQGDWRRPWDLDKAKSTWVAGLGRLPVVPGATRNYSPHHCSLMEKVNEMLGEAISRGCSESLVPGEAGGNYSSSLPLGNEAGGHGSGVKWGGACHELCFYRWDMKEDKEELEGQEGSQSTRETPSEEEQAQKQSGMEQGRLGSAPAASPALASPEGPKGDHKNMALECDTGLGIHDSQRTGLGVEEVQAKPLDFGDIRQMSPKMIVIKNLNYKIHSLLPNPVLPTVQLRLHEGAYARLV

SEQ ID NO: 31954 - protein, 427 aa, Homo sapiens
MNMNIKKIVKQATVLTFTTALLAGGATQAFAKENNQKAYKETYGVSHITRHDMLQIPKQQQNEKYQVPQFDQSTIKNIESAKGLDVWDSWPLQNADGTVAEYNGYHVVFALAGSPKDADDTSIYMFYQKVGDNSIDSWKNAGRVFKDSDKTPLNRRWKNAGRVFKDSDKFDANDPILKDQTQEWSGSATFTSDGKIRLFYTDYSGKHYGKQSLTTAQVNVSKSDDTLKINGVEDHKTIFDGDGKTYQNVQQFIDEGNYTSGDNHTLRDPHYVEDKGHKYLVFEANTGTENGYQGEESLFNKAYYGGGTNFFRKESQKLQQSAKKRDAELANGALGIIELNNDYTLKKVMKPLITSNTLHATDKDKRAPATAITHGFRDPCHSQTVPRRPPSSPHFIQSDRGEGHANLPRARGLRAAAAASVLGSDRH

SEQ ID NO: 31955 - protein, 101 aa, Homo sapiens
MTIIICTKFAQDRCPLISKEVKYLPLQHTNQLHATDKDKRAPATAITHGFRDPCHSQTVPRRPPSSPHFIQSDRGEGHANLPRARGLRAAAAASVLGSDRH

SEQ ID NO: 31956 - protein, 349 aa, Homo sapiens
MFIDVSVQMEDNWLPNTIIRAVNELHYSQHNCNLVGTGEPCLKEATQLRKSNTTCSHLQVEAKQLVNVDIQSGIIEIGDSKRWQQRAPKPVSAGSSRFTAFRPVLSGGWCIPTRNPHPAGTAVKLKTLAAAAARSPRALGRFACPSPRSDWIKWGLDGGRRGTVWLWQGSRKPWVIAVAGARLSLSVACNCEISTFSISPSDSLFKLMALRFIIRTNRDQLLQDTADLLKQDNGSGQTPALQRMESLRRKGQQRRWPLLTKNQIDRKISKRMFDNVKLNCQPDRVMEKPLTAQLRCQLGDYTLQGWGIILQDVVCTPNQQPFYGLCPNYSGCHVEDVLEGEDIGGKKTN

SEQ ID NO: 31957 - protein, 186 aa, Homo sapiens
  DOMAIN (116)..(163): Acylphosphatase proteins domain identified by eMATRIX, accession number BL00150, p-value=9.814e-09, raw score of 25.33
MNKRHHTLTSCSWFSDILHQKPIGRKHLMRDRGYRIKALDKLPAQEQRVKYSEVSLNKTNNGKDDDKEITVIHSVELIHLLCLEKGPGSEWDSRFRIARLRWPRPRTGVGIPPPLTWDAGECTQVPGEGRRMDIQSGAAFRPLSGEANQRPGGVSDGQPVGPGSRGVGAIKGTPIQIRKATDRLSE

SEQ ID NO: 31958 - protein, 67 aa, Homo sapiens
MSRTKKTDNVPTATELADEKEFGLCVSIPRPFPLTHRFSSCPGHLLAEEGLSTERQKRLPIKIRGHL

SEQ ID NO: 31959 - protein, 80 aa, Homo sapiens
MSMTLLRKTYSLSLSQRTRHWWAIPDMTALLPVATGLRKMFTGNRRQKDALLQAQTPSWCWNLTQLPKVIKGKGICLQSG

SEQ ID NO: 31960 - protein, 307 aa, Homo sapiens
MACIFVQKSVQIRTEAGPRLHIEPPVDYSDDFELCGDVTLQANNTSEDRPQDTKSPTSTKPCGFNFSLLNACGHSDPSSSVDKERILLTIQDVMKHQRPPGMTNWTAQTKRRLACGIRKGPGQELRRSLELSVNLQRKQKDCSSDEYDSIEEDILSEPEPEDPALVGHPRHDRPPSSGDWTQKDVHGEQETEGRSSPGPDTLVVLEFNPASKKSEFFFPKRPSKSPRPGSPTHTGSHAVLDWITVALMGQVQPIGLRGVVITTQPHDSAVKLSSPKETQGEPEGGRMLARRDSSVQWRKFVKKDLGK

SEQ ID NO: 31961 - protein, 119 aa, Homo sapiens
MFLVIGVPVLLQGETGGSDPCAPQTLLRRRLHSLRRSGDCAPRLTAKRRALGAGTARRVVVFCTECNLDSSSRACVAPGTVKGSIFVFLHRCAHNLFPCKPTREKYRKKAVTRWSRRIL

SEQ ID NO: 31962 - protein, 105 aa, Homo sapiens
MSYSTCASSSRKIAKYVNIFKSPPGSSPCLSLQPRLPGLCSICSSRNEHLTALPIWQTVSGFHVFVAITPSAFPSSGYFKNLPLTVPGATQAREDESRLHSVRTT

SEQ ID NO: 31963 - protein, 30 aa, Homo sapiens
MEKATHLTDSPKNDRLRGPSQKIAVIYIFV

SEQ ID NO: 31964 - protein, 159 aa, Homo sapiens
MTNETVERQTYSLGGRTHKLSGYWRGKRTDKVYVAPGEKIRGTLVKERLSGDKSLGQHTKDPQKTLLQLERLHGFLRRFFGDFLLFRFLPPPPTFYILAAPTFSCVAPPLAAVRGVRSQPEPELGLAVPRATTTSFGSGESYDQVRPARALKLLNGQCG

SEQ ID NO: 31965 - protein, 106 aa, Homo sapiens
LPLNDDHTFSTPIQLPSIHRWKDDYTHVPDRGSDASEVNGYKYKPDRNCLPQRIRKTPLLDQSTKPSQESAEMLLHRFTSNTVPALLTALPNVAFLPCYGLWTHTH

SEQ ID NO: 31966 - protein, 442 aa, Homo sapiens
MEVPGVCLLVMLSSPSPGPVCVLFGSYSCQQRPRDSLPLPAPQPAGEEGVGPPRKQPSGTVDGEVDPPWKPSLTVDGEVDPAAIVEGWQMEVAVAVAGIIRQQACGLEVWCPEEEEEEEEEAAIRTCTNEQRMLVLTPFPASPATSQTQLGVSESQAEGQAPQSCTFSTPIQLPSIHRWKDDYTHVPDRGSDASEVNGYKYKFVPTGSKGHFCKADNEAHIQGCKSSSVIVQRDNGSEVCQFDILMFECSGPDLGLTEQGEERRAPPMGVRTAVQLMGRSRRWSGGGPLEAVTVGEGGHTFQISGGSSDDDESKCKETLSHQENQEPPWMQEKSRRQRENDWFVFCNFLQSFATITKAVAGSKAKGLHQTHNAYDPGATQGMPNKGLGQDWIQFPELCSLLLTTQKQLDRSIFTIPDSAPLKVHCVLTSAKILHSKQSTATK

SEQ ID NO: 31967 - protein, 752 aa, Homo sapiens
MAVMSQHVSAAPHDDAMLAAAAMNCVYSSACSMNASGLDAAYIAVYLNSLDRFWIPCPVSSTITSPATNEKSSTLSTRARTSMNYSFDLACLRSTLEDPLIRHPRTFLSKILTSKFLRRWEPHHLTLADNSLASATILWYELGFVIIGIAVSCVKSLALNNPHNIRSGSITSVQKRFSEYLKQSLWALIQAASESLLPQCGPRAGGAPAAARRCGSGRATAFSYALRHTASDMSYTATRCQCSYSLELSHAEYLAREWACAPTHMAESCGDAPEKLRVTPSFLATRSERKRHITVVFSEACSLWRGHCRPRYCAGRYSPSLVFCTYVKTFQAWKPSDFPSVDNLIGHADDLARGNPAFTSDVSTEQLEDGIQDIHVWIDLVMCRGDVGRFRGPGDPESQIQSSSQFYKDKHCSCPSKHAVQWMEAGAPWNHRLCESNSRWCERRCVVLSEQCSSFFRHQHAYVFGADRADERLVRTASGLILVLAAVLVTLAAPMRNLERGPAEHAMTLMMYSLREDSIKKRPTVNDEDCTECPATTCTLRLAANEADYGISGAYEIVLVTGYMQIDRGATTDQVGRWGPVTENAMNTPLSIVVRGPAVCQAQQPWRKSRTTGVNNQCATCAAIFILRFYSLAENEIGMYYRLHVKSMLHLWKMTSCEFAEDMDKLINVPVRSSGLSVHGTVIRNSDEWEVSSTTETTVWGHKLRTEMWPSAEVSSVFARLFPEAVITLAFQPRCSSIGWCSGDCMQPAVVF

SEQ ID NO: 31968 - protein, 63 aa, Homo sapiens
MLSNCSLNFCVLCLPLSLYQQTPVHPSRPSSSDFSLEPLAASLSPAFLQSSLHPFALPLPMLA

SEQ ID NO: 31969 - protein, 283 aa, Homo sapiens
MTGLSNNQIWPKAHVCSPFVPGFTVHQSENLIRRKHPQPKLRGNNGPPGSALILCQDLHLWPYAVTVRWPQMPPRALPEKTQDSLLNVTGVMWQPLQQRASMSTYSSEISSSKGFSTILPEVPKLTGTDRLDNGDSTGLPAAHPRGDSNLTFMFFVSVSEIIDLGDLTGVCLPLLIGSLSSHIRKLSQKGEMTSPVGTTIVKRISPQGQDVRIRGTPTAKSGTLKCSFFETAGGAIHECHCSRANITLPPPPIPKPQVLTRSFWAVSFRKSSCQPSLSSPELL

SEQ ID NO: 31970 - protein, 67 aa, Homo sapiens
MALSRGLPGSWLRRWPGAGCWWWGRRHRLRAPQESRAHRFLHIDLVAKESVLQFYPKANIVPTMTAS

SEQ ID NO: 31971 - protein, 603 aa, Homo sapiens
  DOMAIN (328)..(367): Ubiquitin-activating enzyme proteins domain identified by eMATRIX, accession number BL00536F, p-value=4.797e-23, raw score of 13.65
  DOMAIN (308)..(454): Repeat in ubiquitin-activating (UBA) pro domain identified by PFam, accession name UBACT_repeat, E-value=2.3e-66, PFam score of 233.9
MALSRGLPRELAEAVAGGRVLVVGAGGIGCELLKNLVLTGFSHIDLIDLDTIDVSNLNRQFLFQKKHVGRSKAQVAKESVLQFYPKANIVAYHDSIMNPDYNVEFFRQFILVMNALDNRAARNHVNRMCLAADVPLIESGTSWEPIHCIVWAKYLFNQLFGEEDADQEVSPDRADPEAAWEPTEAEARARASNEDGDIKRISTKEWAKSTGYDPVKLFTKLFKDDIRYLLTMDKLWRKRKPPVPLDWAEVQSQGEETNASDQQNEPQLGLKDQQVLDVKSYARLFSKSIETLRVHLAEKGDGAELIWDKDDPSAMDFVTSAANLRMHIFSMNMKSRFDIKSMAGNIIPAIATTNAVIAGLIVLEGLKILSGKIDQCRTIFLNKQPNPRKKLLVPCALDPPNPNCYVCASKPEVTVRLNVHKVTVLTLQDKIVKEKFAMVAPDVQIEDGKGTILISSEEGETEANNHKKLSEFGIRNGSRLQADDFLQDYTLLINILHSEDLGKDVEFEVVGDAPEKVGPKQAEDAAKSITNGSDDGAQPSTSTAQEQDDVLIVDSDEEDSSNNADVSEEERSRKRKLDEKENLSAKRSRIEQKEELDDVIALD

SEQ ID NO: 31972 - protein, 479 aa, Homo sapiens
  DOMAIN (158)..(180): AAA-protein family proteins domain identified by eMATRIX, accession number BL00674B, p-value=8.740e-15, raw score of 4.46
  DOMAIN (228)..(467): tRNA synthetases class II (A) domain identified by PFam, accession name tRNA-synt_2c, E-value=1.1e-90, PFam score of 314.7
MTQPDESILVSDGKTLWFYNPFVEQATATWLKDATGNTPFMLIARNQSSDWQQYNIKQNGDDFVLTPKASNGNLKQFTINVGRDGTIHQFSAVEQDDQRSSYQLKSQQNGAVDAAKFTFTPPQGVTVDDQQNLAQYIGQQHLLAAGKPLPRAIEAGHLHSMILWGPPGTGKTTLAEVIARYANADRGTCDWNEQNEGYLVGAHQRQLCYVYACFHALPSVHLCMTLFERVLKAEEEQFSKTLEHGLKILEQDLAELKGTVVPGDVVFKLYDTYGFPMDLTADIARERELTIDEAGFEREMEAQRVRARSASSFGLDYNTLVKVDVATSFIGYEATVGSAKIVAIYKEGKSVDVLNEGDEGVVVLDQTPFYAESGGQVGDCGFLSSTSGRFEVRDTTKTGGAFLHHGVLVLGNLTVGRAVISRARFKPEQLKALEDIVNAEIRKNTPVETEETDIETAKQKGAMALFGRGSYPADRSGAY

SEQ ID NO: 31973 - protein, 578 aa, Homo sapiens
  DOMAIN (466)..(516): Cysteine synthase/cystathionine beta-synthase P-phosphate att domain identified by eMATRIX, accession number BL00901C, p-value= 2.222e-12, raw score of 20.63
  DOMAIN (111)..(346): Prephenate dehydrogenase domain identified by PFam, accession name PDH, E-value=1.5e-08, PFam score of 7.7
MAYRSALVTPCARIPQESGGTKDITGGLPRVADLFEARRPKEPAILAEISGIVSFGKETKGKRRLVITPVDGSDPYDEMIPKWRQLNVFEGERVQRGDVISDGPEAPHDILRLRGVHAVTRHIANETPPRPGTPTPTNPCTAAPPSPPRAPPRTLWSITAFTKDCILVDLASVKNGPLQAMLVAHDGPVLGLHPMFGPDSGSLAKQVVVWCDGRKPEAYQWFLEQIQVWGARLHRISAVEHDQNMAFIQALRHFATFAYGLHLAEENVQLEQLLALSSPIYRLELAMVGRLFAQDPQLYADIIMSSERNLALIKRYYKRFGEAIELLEQGDKQAFIDSFRKVEHWRMTIASNNPVPDDSHHPATFSSVGSTGTTFSLGQAKLARQFHQKIAGYRPTPLCALDDLANLFGVKKILVKDESKRFGLNAFKMLGGAYAIAQLLCEKYHLDIETLSFEHLKNAIGEKMTFATTTDGNHGRGVAWAAQQLGQNAVIYMPKGSAQERVDAILNLGAECIVTDMNYDDTVRLTMHTRSSTAGKWYRHGMGRLHQNPNLVGDPLVLSAAPVIYKNVIIVLYYVNKT

SEQ ID NO: 31974 - protein, 140 aa, Homo sapiens
  DOMAIN (93)..(114): E-CLASS P450 GROUP II SIGNATURE domain identified by eMATRIX, accession number PR00464A, p-value=5.950e-17, raw score of 20.47
  DOMAIN (78)..(128): Cytochrome P450 domain identified by PFam, accession name p450, E-value=2.2e-09, PFam score of 36.0
MPQLTLYWLGLGQLAAFPWLLLLLAGASRLLAGFLAWTYAFYDNCRRLQYFPQPPKQKWVWGQPGPPAIAPKDDLSIRFLKPWLGEGILLSGGDKWSRHRRMLTPAFHFNILKPYIKIFNRSVNIMHVVPCKHNSEKWLK

SEQ ID NO: 31975 - protein, 644 aa, Homo sapiens
  DOMAIN (336)..(369): CHORISMATE MUTASE BIOSYNTHESIS C domain identified by eMATRIX, accession number PD02478, p-value=8.500e-20, raw score of 15.76
  DOMAIN (284)..(321): Cytochrome P450 domain identified by PFam, accession name p450, E-value=7.1e-05, PFam score of 20.0
MVDLLVSTEGEVEKAEVTTIPMTKPPAQEQPPGRMPQLSLSWLASGRWQHSRGCSCCWLGLPAPGRLPGLDLCLLYNCRRLQYFPQPPKQKCFGVNQDLGLPPGARLTDAVIQERRHTLPTQVFIIQKYENIESLIPPTRDQRQGKGAGGRPWNGGSGDGEQERLDIQSGFEFLEEDRTFKIVSGPQCMDAVHPLVLSSPETQACLLPLQAMTHSQWSLLGPVQPREAPKYQEHCRQEVQELLKDRILKRLNGIICIINIIGIHHNPLCDRILRCCLSHPPPTPALFVNSKVYNPFRFNSENSKERSPLAFIPFSAGPSRCSWISLRLLMTSENPLLALREKISALDEKLLALLAERRELAVRVGRRPTALASPGAGDVNHPALDYYWRLSFAYAITRGFHSENAVRNRRPVLHLAETVNKRLLIACSSNSIASPKRLYCLFDQAVQFVTEKRKRQFLAYSVSSALVITGSAYYRTDGSAGDCQRTGHNVQRLAAVQYQTEWDDFVLTPKASNGNLKQSPLTWDVMAQSISLARNAVYTAFKAALADARERPDYDVPVHLRNAPTKLMKEMGYGQEYRYAHDEANAYAAVMLDLHTEQHGYSENYVPYLVNQDTLYGTGQLPKFAGDLFHTRPLEEEADTVTMR

SEQ ID NO: 31976 - protein, 52 aa, Homo sapiens
MLFSASPRQGLFGEVFSPARLKWDPSFQAPSSLPSAHQKRKHTASLSGSGVG

SEQ ID NO: 31977 - protein, 84 aa, Homo sapiens
MNFLQAPITVLPTCPHQVRVSSRAKQTKKNFNVNKQKAYKFEGVFKKEKSRNCPAVASNTPGCYAALKKKCSPFKCILIHVFPG

SEQ ID NO: 31978 - protein, 187 aa, Homo sapiens
MITNSSSVPDRSNLNRGFRMRQPEFPKTVAIACQGGGSHTAFTAGVLQTLLCEIDTARYQIQDKFMDRECILSPKALSVAVCFRIFRGRRPPLAYRGCFSFFAFVSAGPSGREGISLGADTRTFTTHSDFSRTQEWHWEEGDRFLQLASTLAAKKTCRLCFEVSRNGRRRRSQLKSREISEAFEGAS

SEQ ID NO: 31979 - protein, 831 aa, Homo sapiens
  DOMAIN (6)..(36): kw TRANSCRIPTASE REVERSE II ORF2 domain identified by eMATRIX, accession number DM01354R, p-value=4.000e-19, raw score of 8.50
MLLSIDAEKAFDKIQQPFMLKTLNKLGHGYEQHHLHTTNDVDEEDLSDAASKGDDFALSEQSQDAHFLQPEAYGLGEGAETATGTAHQGNHVRVEECGRSLCGCVPLVLHPLPDPSLQPHEAQQPASHSVACNQRKQPAKLPAVAHERPPGGTGSVDPGRPPGATCPESPGPATPHTLGVVEPGKSSPPTMEEEPWAPQGSPCWTAQSLSALRKEQDSSSEKDGRSPNKWDKDHIWWPMSGAHDLQQAAPGPGGAHQGHPNQDNRTVSQMLSERWYTLGPSEMQKYDLAFQVKVAHLQQGPKEVQLRGQAHKPGASSSVTRARGSGAYQRRALPLPLGRPLNSCQLQPKHSRARMPRSSFCGAERLHTHMASEDTASDEEHTVIHEEEGVMMSLLMMALAPPTPISSSRSGFWQSMVTPCPPPTHTRMLPPQPWRPPPSYWAQEPSKPRSLVNAAERAPYGPNPWGWGPRDAFQGGLFPPNGSCHLLVEKPRTGSGNRRPRRSCPLHCTCPGPVPALIMQLFQAHCFFLSTRPQPPSRPTMHTSSPPSPVGVLTAPHLAQTLDAALAAPPLPLPESHPCLTPPQPAQALAQTWLPCHCLCPRVGALTAWLEGDTPALPQHLGVSITTTGRAANRKDFVHRRCCPELSQSEAVPPSTHFLSAECLQQERGSSSRDPTLHRGQQHLEGQMCKGQVSGFAAIALHVGFRLMMLNSGQSSSPAWAPLPALPYSAGSQLSSLRHLAGSRLLNYQVSSRATVNYTLWHGFARHVLEASSHAGHALPHLGKQRMRKISIKFTQNDLQQDLENAQFHKIPVSKSFQCTALASGSCEDRP

SEQ ID NO: 31980 - protein, 362 aa, Homo sapiens
  DOMAIN (293)..(309): Calcium-binding EGF-like domain proteins pattern proteins domain identified by eMATRIX, accession number BL01187B, p-value= 7.300e-14, raw score of 12.04
  DOMAIN (281)..(317): EGF-like domain identified by PFam, accession name EGF, E- value=1.3e-08, PFam score of 42.0
MSGAHDLQQAAPGPGGAHQGHPNQDNRTVSQMLSERWYTLGPNEMQKYNLAFQHMASEVIASDEEHTVIHEEEGVMNVIADDGFSTTDTDLKFKEWEPSKPRSLVNAAERAPYGPNPWGWGPRTPSKVACFLPMDPATFWCKRPESVGDLELPGSSVIRVEKPRTGSGNRRPRRRCPLHCTYTGPVPALIMQLFQAHCFFLSTRPQPPSRPTMHTSSPPRAFHFSENSSCWGYKMECEEGLGPQGGACGLGGVHAPLLSPEGLDSDQYCHMEGPALDVNECAENPGVCTNGVCVNTDGSFRCECPFGYSLDFTGINCVASGSFDVSLKVVDLFLQVDGLLSVLMCSPSQVYYPAEVVEEKSY

SEQ ID NO: 31981 - protein, 539 aa, Homo sapiens
MFVWRNVEGHSAAVFSWYSIPFLTPPCSHTRPSNLPVTQWPPTRENNLPSWQPLLMSVHQAQSLSALRKEQDSSSEKDGRSPNKSDKDHIRWPMSGAHDLQQAAPGPGGAHQGHPNQDNRTVSQMLSERWYTLGPNEMQKYNLAFQVKVAHLQQGPKEVQLRGQAHKPGASRSVTRARGSGAYQRRALPLPLGCPLNSCQLQPKHSRARIPRSSFCGAERLHTVQGTWLSLAQAFSHSGVHSLDGREIDRQALRELTQVVSGTASYSGPKPSTQHGAPGHFAAPGEGGDPWAALLPPTSLQSPGVWSTQQSGPPTAPTPGDGGPGTPSKVACFLPMDPATFWCKRPESVGDLELPGSSVIRVEKPRTGSGNRRPRRRCPLHCTYPGPVPALIMQLFQAHCFFLSTRPQPPSRPTMHTSSPPRAFHFSENSSCWGYKMECEEGLGPQGGACGLGGVHAPLLSPEGLDSASFDSSVTCPLWHHLLIEDFYDSRDSQEHGRNQGSLEKRLTPCMVQYIDPGTSVLPESKKAIKVQQDHVKKT

SEQ ID NO: 31982 - protein, 245 aa, Homo sapiens
  DOMAIN (139)..(155): Calcium-binding EGF-like domain proteins pattern proteins domain identified by eMATRIX, accession number BL01187B, p-value= 7.300e-14, raw score of 12.04
  DOMAIN (63)..(106): TB domain identified by PFam, accession name TB, E-value=3.3e -17, PFam score of 70.6
VQSDHCIDMDECSEEPNLCLFGTCTNSPGSFQCLCPPGFVLSDNGHRCFDTRQSFCFTRFEAGKCSVPKAFNTTKTRCCCSKRPGEGWGDPCELCPQEGSAAFQELCPFGHGAVPGPDDSREDVNECAENPGVCTNGVCVNTDGSFRCECPFGYSLDFTGINCVEPSGQASPTGQPTSLQPNPLDSFKTDAPAPVGPLVALAMEQSWMENDFDEMREEGYRRSDLSELKEEVRTQCKEAKSLNKD

SEQ ID NO: 31983 - protein, 438 aa, Homo sapiens
MHTFYNQKPMDWVREQKQPQPHEAQQPASHSVACNQRKQPAKLPAVAHERPPGGTGSVDPGRPPGATCPESPGPATPHTLGVVEPGKSSPPTMEEEPWAPQGSPCWTAQSLSALRKEQDSSSEKDGRSPNKWDKDHIWWPMSGAHDLQQAAPGPGGAHQGHPNQDNRTVSQMLSERWYTLGPSEMQKYHDLAFQVKVAHLQQGPKEVQLRGQAHKPGASRSVTRARGSGAYQRRALPLPLGCPLNSCQLQPKHSRARIPRSSFCGAERLHTHMASEDIASDEAHTIIHEEEGVMMSLLMMALAPLTPISSSRTFGKVYGPTLSSSYTYSDASSSTLAPTSFLLGPGAFEAQESGQGSRVGPLRPLPLGMGAQGCLPRRPVSSQWIPPPSGARDLKVWATWSYQAPQSSGWRSRGQAQGTGDREGTVLFTARALDQCRP

SEQ ID NO: 31984 - protein, 706 aa, Homo sapiens
  DOMAIN (375)..(386): TYPE II EGF-LIKE SIGNATURE domain identified by eMATRIX, accession number PR00010C, p-value=4.214e-09, raw score of 11.16
MAGPRPQTRRIHESSRVYTNDKLTPNSSRDSRAEAVVGQQGSVKSLSQHVRVEECGRSLAAVFSWYSIPFLTPPCTTRGPATCQSLSGLQPEKQPAKLAAVAHERPPAQTLQSSDTRSSFCGAELEARIRYVIVRGNEQGFFACITSVASAPCSWGGASGAWNLPAGGVPEADTLPHIVVGTKEKNVDVDECGAGRVPASRMLTASTSPELPLQVHPRILMSVYPGGAGVPIWPLPQHSGSFHCLCQDGFELTADGRTVWAGKCSVPKAFNTTKTRAAAVRGLGRAGETPANVSPGGQRCLSGALPLWPRGSPGPDDSREEAMSATPAIRRVNECAENPGVCTNGVCATPMDPSATQTMLCRPPLWARDMHQCHRGFECACADGFEPGLMMPARGAPGKLTLQKGGSTGTVGGAQRRGELPPEAESESLQSPAQQEREREDSSPPGVSQPRPLGQGAAHSVGTSDCSARRPGRMHLRQHNCQFLCVNTVGAFTAAVRPASPSTTRPASVVTLAPHREISTSAQRSPTSPLWHLYQQPWELPVPLPPGFVLSDNGHRCFGLPASTPTVSERAFSPVSLTCTHLVELAACEQGSDCLEPPNKPYLHAPPALKPPVPCLHGEEGFPLPLLWSRCIVVAQQPEEETDGRTEDGRRTTNDDGREDEDTAADNEEEKEDRRRTSDGDDDARDPADADDTADAADTVHMTTRP

SEQ ID NO: 31985 - protein, 191 aa, Homo sapiens
VEYPIEDSMSELVVSEIFVSQTTFVGIVPLAMSSSGATSEIRVMGEIPEPKFQRFHGDSEAFWKVISHEGSALTNGWLPYKRVGGSWLRPLCLSLPPCEDMVFRPPWKTQQQGTILEAKRPDLQQTLTLLGSLSWPSSIQNLNEKRENGMDESFEVETIRPWKPFMSKISISSRAAQMVKSFKNRFLKRVV

SEQ ID NO: 31986 - protein, 112 aa, Homo sapiens
MLSSRAEAAMTAADRAIQRFLRTGAAVSGSLPEQLLLQGGSGAGAVQLPGAENRRARHPPLPCKGHEKGSSWRSADMEEDLFQLRQLPTRHETIKDSPYAPEKDEIIQTNRT

SEQ ID NO: 31987 - protein, 118 aa, Homo sapiens
MSDSAGGRAGLRRYPKLPVWVVEDHQEVLPFIYRAIGSKHLPASNVSFLHFDSHPDLLIPVNMPADTVFDKETLFGELSIENWIMPAVYAGHFSHVIWFHPTWAQQIREGRHHFLVGK

SEQ ID NO: 31988 - protein, 109 aa, Homo sapiens
  DOMAIN (70)..(89): RHODOPSIN SIGNATURE domain identified by eMATRIX, accession number PR00579E, p-value=1.000e-08, raw score of 15.50
MGLASYLQAGNMSLKAQITYANGLWFQETPLKRFSRPGVGQGVPRPRSSKPHQPFRGGGSWAIHQTLFTVACRRFLFYGPSFGAQFMARFWGACSPTPRDFPQTADDFC

SEQ ID NO: 31989 - protein, 56 aa, Homo sapiens
MKKHRGMQGKGGKMGSRDKGGVWKMRTLSESLRPRLATAGGAAMSPALSNLPTTLG

SEQ ID NO: 31990 - protein, 62 aa, Homo sapiens
MPLGYFCHSLDRRRSCFMRSRSGPWIYWVGNSILTATSAQVGRLLRRRQKPPFGRTSIETTG

SEQ ID NO: 31991 - protein, 251 aa, Homo sapiens
MGTQLKSRTQKPMFFTCANLYNENAKPDWVLGAQKPRDDLDAKFHSGGAANFPQVPPISALAMPNTSPSRFERLLVLLRMCQCQTNRMHREVPLHQSEVTLPKLCLNSAPYFRLFSQKPVQRVSMATYRLLFGKELRVYEMWAECDLVLQTGISSSAVCEGQADAYRKEENWSSGSGVVGKEILSSGHVQMCMHCCWCRGRTAVNGSSPSMQLSGSGKYMLWPLAETEFHRVPALMPTGGQCPLREISLGA

SEQ ID NO: 31992 - protein, 150 aa, Homo sapiens
MSGWLGLVSSLHRLLVSPCPGRTVGLQRRKRLKSGSSRMSFPVTRRPREQTPHPDIVAAIPSGTDDFQGHRSKEKENWKPMCLNRFILEECIAADDFRIRGLEPNPQYLQGKPTQVSESLRLLRNDTQDPNIKTRYIMNLAKTIQRSPDK

SEQ ID NO: 31993 - protein, 107 aa, Homo sapiens
MVTTQMVVSKTLLAPNVILPVPFQSNLTSPCCRPTLDLHLQKVPCGASGSEPPSQPGLWKGAMENGEITYGLPTAAMCKGMCAWESPCRGQPWSGREAAPVVGSPPR

SEQ ID NO: 31994 - protein, 79 aa, Homo sapiens
  misc_feature (1)...(79): Xaa = X or * as defined in Table 2
MVTAANHSTQLQAMLERRKFCIIWLASASEESCLFPAWSGLVRWNWKSDSWRRRLQGVCTRIPSSNGFARPARVXXQRR

SEQ ID NO: 31995 - protein, 166 aa, Homo sapiens
  DOMAIN (53)..(89): Synapsins proteins domain identified by eMATRIX, accession number BL00415Q, p-value=9.149e-09, raw score of 2.23
  misc_feature (1)...(166): Xaa = X or * as defined in Table 2
XFHVQLPGIRGSLGTPPNIAAKDQEPVPFNLTVLKASRLLSFTAPTPSSECGHVVPVRSGGDAATSTRPQPPGRRRPPPSSPSPAASSRSPGKRREMPLTTNDSSRTKQTRKLTLSTTRLRPHVFARTWYITHVPRSGAPRIPGAGHWPLTTRKANKRPAFKGPED

SEQ ID NO: 31996 - protein, 119 aa, Homo sapiens
MQRRSRGINTGLILLLSQIFHVGINNIPPVTLATLALNIWFFLNPQKPLYSSCLSVEKCYQQKDWQRLLLSPLHHADDWHLYFNMASMLWKGINLERRLGSRWFAYVITAFSVLTGVVY

SEQ ID NO: 31997 - protein, 47 aa, Homo sapiens
  misc_feature (1)...(47): Xaa = X or * as defined in Table 2
MTMETLPKVLEVDEKSPEAKDLLPSQTASSLCISSRSESVWTTTPRX

SEQ ID NO: 31998 - protein, 42 aa, Homo sapiens
MPQTDGSENDFGGERGLGHAQSTRGRFCPRPPARNRRPGKGN

SEQ ID NO: 31999 - protein, 141 aa, Homo sapiens
MQPWALPTVGELWVCGRPGAALRAGTEPSSRALGVSETALPAEIKLRVIRVGHSSPLAQLASFQKPVLFVLRLNSRRFLFLSLARSEDGILFAKSKHSSPLSLTPLRCIVLMRMYEQLMSGDLCQRVMMPSRTNLGYWNPQ

SEQ ID NO: 32000 - protein, 155 aa, Homo sapiens
SAQTPIAVIGLTCRLVKSPEGKFQKTSTGAVRMQPKSAELKFVTKNDGYVHIHPSSVNYQILRTRIALSLFLFPRKTQKEEHSSQAGPAQAQGSPFRSINIPEPVLPSEDFTNLLPSQAYEKGMLEQILKNGTEETGFPVEVRVLVINLHSTQEK

SEQ ID NO: 32001 - protein, 712 aa, Homo sapiens
  misc_feature (1)...(712): Xaa = X or * as defined in Table 2
MQELSRIQHGEYALEEKVKSCRCSMEEKVTEMKNSLNYFKEELSNAMSMIQAITSKQEEMQQKIEQLQQEKRRESRKVKAKKTQKEEHSSQAGPAQAQGSPFRSINIPEPVLPSEDFTNLLPSQAYEKAQESRSVHVGDSNVKGMMGPGVNPTTPEAEENLKSCLSADIQSKGHLPSGMWRQPKDGKEWGEEYVTKDHPDKLKEAGQGRHSSLENVLCETSLAAKRQTVALELLESERKYVINISLILKIKATFQGSDGKRNSKERRPAEGNTKQNEIVPFLYRHFSPCKDENKYINIYYRHFSPCKDESLLVGKAPQLSTSLLSFDPGEIFNLFPGSLRYLVQQHLDLLHALQERVLKWPRQGVLGDLFLKLTNDEGDEEIKSDIYTLFFHIVQRIPEYLIHLQNVLKFTEQEHPDYYLLLVCVQRLRVFISHYTLLFQCNEDLLIQKRKKLKKSSMAKLYKGLASQCANAGQDASPTAGPEAVRDTGIHSEELLQPYPSAPSSGPAITHLMPPVKKSQQQQSLMESMQPGKPSDWELEGRKHERPESLLAPTQFCAAEQDVKALAGPLQAIPEMDFESSPAEPLGNVERSLRAPAELLPDARGFVPAAYEEFEYGGEIFALPAPYDEEPFQAPALFENCSPASSESSLDICFLRPVSFAMEAERPEHPLQPLPKSATSPAGSSSAYKLEAAAQAHGKAKPLSRSLKEFPX

SEQ ID NO: 32002 - protein, 160 aa, Homo sapiens
MALKLKSPQRKLTVHEIGPMWAKGQAAEPVKTEEAAQVKYNDPRISPLWYIDHEGHIVDGNLKSIMRLVLALAAHFKPGSSRTVNQGRDSRAPLQSHRPHCATAVAQGAAAALADVCHDMSRSGRDVFRYRQRNSSMDEEIENPYWSVRALVQQYEGQQS

SEQ ID NO: 32003 - protein, 513 aa, Homo sapiens
  DOMAIN (481)..(512): Cyclophilin type peptidyl-prolyl cis-tr domain identified by PFam, accession name pro_isomerase, E-value=4.9e-09, PFam score of 34.9
MAEGKEEQVTFYMDGSRQKERQSLCRETLPHKPSDIVRHCAKVSAYRHINNGHKVIAATREKRLKKKAIYAEKEQQDGRLEESGKGQQGRRHLAGSLRMSANCREDKGRDAYTVIDVAYNPDVLHAAEKDQVKKNQLIQMAMKCIEEKFQFTLSHSYHITKFRIKGSIQRMKQNLMGIQTDSIDLREKMRRELTLGQIRSSTMSNPDHFPQLLLPKDQVSGKAVCLIEEISSTEIQVEMKMPAYELKIVHDHSEKPLKIELKVELPGINSVSLCDLSVSEQQLQAYVAWVNAQLKKRPAVKPVQDLRQDLRDGVILAYLIEIVGPSGTLLPRSAPRPRSVEKERACRAFLAWGAGGVNLREPFYDNVRLCGVADGNAAALGENEVMHSEATQMSPSDLTIFGLQKELLKCKQEARNLQGIKITTCQKNTNWGLSFNRQHLTPMIQLGCLSPPNLMLKYDPPDFRFRVRAMVVATSSPANPMVFFDVSNGSQEVGRTKIELSADVVPKTTENFG

SEQ ID NO: 32004 - protein, 282 aa, Homo sapiens
  DOMAIN (25)..(35): TYPE I ANTIFREEZE PROTEIN SIGNATURE domain identified by eMATRIX, accession number PR00308C, p-value=9.585e-10, raw score of 3.83
MAVDQASLCSWGPGAGRSPNPSGIAAAAAAQATAVDPGIAALSGARLGNACSCCLASPDSLHLLRSWSKVEAKPGHCHNLAGPSKPQTQPDLENDGTTCLRRGATHSRVSSLLNGNKKERTEERRAAERRAPFGEPRPRSSPSQGCDTLFWALWFLESPSFQAPPHSLVPAVEAACRDPLKLGVQQQLQAYVAWVNAQLKKRPAVKPVQDLRQDLRDGVILAYLIEIVDHERDTKELQQSQLLDKGPKQILGMGGGSVRPLKEDLAGIQSALKDNGVPRRGV

SEQ ID NO: 32005 - protein, 227 aa, Homo sapiens
MVAAMVAAAAIDPKGPLHAPRRAEEGVVSCRPGRRRWLLNIPLKTKGKQVGKRKKGVPGEIPQSRAIAIFQAVTKVSPCMVPMKVINAKLDGFYSFPIFVGTDLLMLQSRSFSLERLNSILKVTQVMLCFWRGWDAAWECDLLRTDCTGRLAAGMLFQFLQATAQEEGIFECADPKLAISAIWTFRDLGVLQQTPSPAGPRLHLSPTFASLDNQEKLEQFIRQFTCS

SEQ ID NO: 32006 - protein, 105 aa, Homo sapiens
MPSRGHPQLPSGWARKPQASATPDKERVRGLRTGLALTLTAAAAHLFRKEAGTQGFLFLTATIESRPTSGDVIQSEELFLPGSPMEIRIPENEPERLDWAIHASG

SEQ ID NO: 32007 - protein, 136 aa, Homo sapiens
  misc_feature (1)...(136): Xaa = X or * as defined in Table 2
MIIIPKNLNMCALQSKPESRGFGELSQRGNVKFNVETLCSHQKKISRLSAAIHQLDISDIRPLTVLLTLCITLALLMRGAQPGMNSGKIPYRMFIPNSHSDSELMSFQDSVRHRRGGFQTFDCDSQQETFWTWSIX

SEQ ID NO: 32008 - protein, 130 aa, Homo sapiens
MVTATSLAPSTQPCAVGAAVSPAAITREKGQSSDLTSKRIKTKKSTGSSSNQEGKRPGCSMNLQRAECHCQVPGATTESLPEGMAAHECRDQEPSGWPPWLLACPLESDGPIPPVFQRNEQHVLPQKDPE

SEQ ID NO: 32009 - protein, 69 aa, Homo sapiens
MTAIIMTEVYAAVGDYGDFRISGGQGSKAANHTGSRGFCIASNPQAVAGSPEEAGTGVQGEAARAGQRL

SEQ ID NO: 32010 - protein, 150 aa, Homo sapiens
MRTGTQRTQIDQVVVFAFRVGHAAFITFCDRTEGPPAVLRLHVAVQVLQILDTDSRRRVSPGRPGLRKPWSSFYTLELSWHKCHESLLKTTRVPPLGGRSQVWPKFQGEQARFTTGKFEGCPPIWISYSFTPEKGDNTALTRPWNSDYMT

SEQ ID NO: 32011 - protein, 156 aa, Homo sapiens
MTSGASLVLALPLQPHLAARPVHAYQCLCLLSMGSESSIASSLSSSKQRAWRRHHGLNYLVKSDITKEMPASNKPSILQSPVPDQCLEPICACVCVAASLGPNLSCQRSKFLSPSLTPALTPSSEWPLWLIGKIQSLPLLYIAIVLTEVWVHGEQI

SEQ ID NO: 32012 - protein, 157 aa, Homo sapiens
MGLQLGAITRWGLTVSAASVMGSADAPGEGDGSPPLMARAALGEMLLMAPPDVQAASLLAVLLLLLERGMFSSPSPPPALLEKVFQYIDLHQDEFVQTPNVMSLNFLEEQHSIFENVIPDHSAAARMVRVFQIPPIILAELGSDPTKGTVCFYGHLD

SEQ ID NO: 32013 - protein, 100 aa, Homo sapiens
  misc_feature (1)...(100): Xaa = X or * as defined in Table 2
MAASLLAVLLLLLLERGMFSSPSPPPALLEKVFQYIDLHQDEFVQTLKEWVAIEKRLCPACASLQTRALQNDGRGCGTRCTAWGGPFGLGGHGSSAAARX

SEQ ID NO: 32014 - protein, 262 aa, Homo sapiens
MGRERDPSGWTWLLRCAAAACALLLGSQRQETQLLLSEHSDPDIEHRVRGEPKRTTRWLGVECWRQGVINIETKAQEQLQPKGKKVSSLLTALPGSIDELSLKRDVKESISLPAVPFQIELLLISKINMQTRLLQLPLKFAVAAASSRFNPRPPVIGQLLRGKKSTPWQPDKPIKSPAGVTAATLQAGVGWAEEQSGHCAQVHSLGVDSSCWSPRSGYTYVHHPVHTPTLCALVGSGGERGGGEGEKHIGLEEQEPQKRVLN

SEQ ID NO: 32015 - protein, 108 aa, Homo sapiens
MKTAAGAPDITSMYQETEKQKVPLQQPLHLNPFSQPTPMAPHGKGAQWFLLQDTSPRLGKVCTILRPAHQTSLPASRSRPGFSRPPGLSAQHVDSSWLCTQLRTQLST

SEQ ID NO: 32016 - protein, 154 aa, Homo sapiens
MKAGSLTAVFTIALPRAYKSNRHIVDAQIFTYTDGALPQALAIRRLVSLSHTLRQQQEEKDAASLKPIGKCTSGIGTKNNNRKTHSFKGASLSALNASCSITVTAQGRTPDPIGIHPRSPLDVKWETKEWEVKGKINWAGKFGKAMKRLSSFEN

SEQ ID NO: 32017 - protein, 315 aa, Homo sapiens
MCWEGEPRGGLGEQQSFPEVTSELRAEQQPDLTMQGVDGSSESMEQCVQRPGGRGELCADKNQPLNQDKGLALLRISSSFGLTPDPNVVEAGTPREQAESGGSTAGRRPGHGLPGHKWSCQCVSRSNPDGSETRNSRVKFMEPSAGIESEVEREWFPGQTTGASFRIPICKNEGAPAFPAGTWDTGATVSLAKRLLDAKSMWSWGPPYRGQGRIIATSISVPHEEVHSFCVQQAGPVWELGLLAVSWSMNMGLALSHLQGDENSSVVIHRRSQTQTPSKAPGNKLGPALNELQESRGPAAGAIWGFPPPVTAAVC

SEQ ID NO: 32018 - protein, 125 aa, Homo sapiens
MSTHVLDVEDGKNKVPTFRDIIDDIQHIFLTAARVILLKSKPKHATPLLGGFHCTWTRIHTYSDVLPLQAPLLVCHACQIEHLQFLKHAVFSSSVQALQDLHLSHRKILKRPVSAKTSPPQRGLP

SEQ ID NO: 32019 - protein, 119 aa, Homo sapiens
MLKSFKGGGQRSPKRFGLRNVKITGDAASANQEAADEFPGAIKKIIEEKGYLPEQVFNVDESALFWEKNATKDISKEEKESPGFKRKLCSDVVHDFPEFTTEPIKETMKETADMAKRSS

SEQ ID NO: 32020 - protein, 264 aa, Homo sapiens
MQCSVFMAPSPLLEGGHLSTFPDIMKDHPTPSHTQTLITLKDKWSKISDDLFPFSYRKLDNEDLHPGQEQRKDLMLKTILQEMFNIPREQYPRSWMLPALKYWTPSSSVLRLRLAVLAQACRQPTVGPCDRPVSGMWKLLNQQLLTEGWPEGGGLLRPKGLAQWRAGMRIKQLKFGSSKLWQDPEVQATNGNAEKLQRRRAKIPVSNRADFPNKSSPCLTLAPSRASKNTRKLCSDVVHDFPEFTTEPIKETMKETADMAKRSS

SEQ ID NO: 32021 - protein, 58 aa, Homo sapiens
MAEEYEIANMLQQAFEMVAGTLAIENSAETLKHLQNITTLNKSIIQMTYYPQTMNGTF

SEQ ID NO: 32022 - protein, 63 aa, Homo sapiens
MGSSLTTKYLAPDVKVGSANVEALWVLYLHFQVNAGNSWIKNYAYAEQSKFNPPKVLKKSSTE

SEQ ID NO: 32023 - protein, 82 aa, Homo sapiens
MQTSLNLSQINLLAQIVKKQNYQIKGMGTSRLIRVDKTQTWRFTLNTAFYEGDYVTTSSSEADIIVSQILAPGWTGPNLWPY

SEQ ID NO: 32024 - protein, 187 aa, Homo sapiens
MGRVGENDPIEREMLVMDAGEGKIAEEKSLVDEKEWGAWPQQKASLCYNLLEEGLPPFSCPFSFPFFDKRLLNTYPWQVLIGLCAGNMAADKAGGFTSILPQACRDSTELPPNHREGKDRATEMIAGQDPIGVESLKWGHEALDTKHILKCTGLHCLEPPVPAGEELCTVTTLVHGSSHPVILKMNW

SEQ ID NO: 32025 - protein, 82 aa, Homo sapiens; identical to SEQ ID NO: 32023

SEQ ID NO: 32026 - protein, 580 aa, Homo sapiens
  DOMAIN (57)..(100): kw TRANSCRIPTASE REVERSE II ORF2 domain identified by eMATRIX, accession number DM01354T, p-value=1.000e-40, raw score of 9.48
  DOMAIN (1)..(179): Reverse transcriptase domain identified by PFam, accession name rvt, E-value=5.9e-09, PFam score of 43.2
MIISIDAEKAFDKIQQPFMLKTLNKLGIDGTYLKIIRAIYGKPTANIILNGQKLEAFPLKTGTRQGCPLSSLLFNIVLELLARAIRQEKEIKGIQLGKEEVKLSLFADGMIVYLANPIVSAQSLLKLISNFSKVSGYKINVQKSQAFLYANNRQTESQVMSELPFTIASKRIKYLGIELTRDVKDLFKENYKPLLNEIKEDTNKWKNIPCSWIGRINIVKMAILPKLGKNFLCINGKSRKEYKFLICHFQNCQAPQHFYELFRSSALSQSEDAEEELARKDGLEWTSKQTPADLQQRGLTVRRKTNKQKGIASTSTKRMSMQKPHPNVPNIKDQRIRKNYFKFHMEPKKAHIAKTILSKKNRAGGIKLPDFQLYYEATVIKTAWYWYQTRYIDQWNRTKASEITSHIYNHLIFDNPYKNKQWGKDFLFNKCCWENWLAMCRKLKLDPFFTPYTKINSRWNKDLKLRPKTIKTIEENLCNTIQDIGMGKDFMTKTPKAMATKAKIDKWVLIKLKIFCTAKETIAGSGQQPAMHWGSLFVPRWIGRSRNNRHTQDSESWVQGGNRLLVTWCRQCTGYTSIYY

SEQ ID NO: 32027 - protein, 204 aa, Homo sapiens
MCKSVELPIDLLSGFDKNVDNDMSNNVQAEVVSDGDEELGNWSKGDSYVLAKRLVAFCPCPRDLWYFELERDDLGFLVEEISKQQGFQEKSVEEEQSCNRLLTGYPSERVDMKVGDEAPGSLRPYDSTLMEKLKSYFQACFASLCIVGTAGPEGSDPLDPAFTILCVSIISQPADPPRSKESPIVLRAAGQILQYIGIFTNFLD

SEQ ID NO: 32028 - protein, 108 aa, Homo sapiens
MHKYVRYSTVHNSEDMESTQMSINDRLDKENIIHIHRGILCSHKKKQDHVLCKNIGEAGNHYPQQRNTGTEKQIQCVLTYKWKLNNKNTWTQSEEQYAVGPVGGRIGS

SEQ ID NO: 32029 - protein, 205 aa, Homo sapiens
MEAEFYMVILTCLIFRNSEGFQIVHVQKQQCLFKNEKVVVGSCNRTIQNQQWMWTENEKLLHVKSALCLAISNSSRGPSRSAILDRCSQAPRWTCYDQEGFLEVENASLFLQKQGSRVVVKKARKYLHSWMKIDVNKEGKLVNESLCLQKVAKSPNLSEKSPFQEGRSPFHETPKKQGTVADYKSIFEKNPCKTTIVDDKVLGQQ

SEQ ID NO: 32030 - protein, 192 aa, Homo sapiens
MTTEFRQARKLSEVDRVGTEEDIPHQQQMAATSVPIVANPFYYLIITPNVKLDQEAGLFTKQELIYKAENHAGMSKQFLLGYKGINKRMPPDAVDCGFPRLPSKHHVIITKIMASECPEPTPNGTPCVLSENRKEISNHIRQSQTIQNPARPYNGNCSHSIGKLKCGESIWILRCQEPSGGIRLPKDSHKKQ

SEQ ID NO: 32031 - protein, 24 aa, Homo sapiens
MPQSGKLPGPGRELVEQVTGRTSA

SEQ ID NO: 32032 - protein, 95 aa, Homo sapiens
MATGVVIRWWGEACRFFLKGRALKEDRQTHQGLRVQETRKRTGGCRQYGGRNLCRFPASRKHQRAVPEGNEGSWGWRAARSVVGISSQRRCPTFL

SEQ ID NO: 32033 - protein, 242 aa, Homo sapiens
MAAIQPQQQHITAGAAVLCRGACWLAESPRQLEEVSTAQMFRLPLITEGRKAHFILQDFKNVKMIINREQSPSPEKFRRQASPFPTLPPEGESLECYKLTGREHYKLTNRTALWCFRDAGNRQRFLPPYCLQPPVLFRVSCTLRPWARPFKKNLHASPHHRMTTPVAIGASCVYGKWPKKALKRPRRSAVGAVRSRNWAPPVAADPAPEVVGGTAFPALRRSPLGLRDAGGGWRSGVIAASA

SEQ ID NO: 32034 - protein, 63 aa, Homo sapiens
MVSYNPNTPLSITAKTDCRQRHLLWILGGSPAAVVIACTEASKFAELLSAARKNSRNKSGAIF

SEQ ID NO: 32035 - protein, 158 aa, Homo sapiens
MEGLVEEALMFPNQSAGLMKQMTWKEIFQQLGTVMMKMCIGHLQLTVPSFPLLQGLLGNPISTGAISAVLLPREPSNPEKLKGFGYAEFEDLDSLLSALSLNEESLGEFEWTLLIKHRIKTGMIILLAVIEMGIMTKQIQTEGLVLPQTALMTTHLEE

SEQ ID NO: 32036 - protein, 125 aa, Homo sapiens
MGVLVEEAPMFPNQSAGLIETDDLEGAVAEEHFGSGYRRDDDYREGGDRYEDRYDRRDDRSWSSRDDYSRDDYRRDDRGPPQRPKLNLKPRSTPKEDDSSASTSQSTRAASIFGGAKPVDTAARE

SEQ ID NO: 32037 - protein, 470 aa, Homo sapiens
MQLRWKAIVLEVYPYSRAAISCTDSTLHPDAIITLTSSALPRLASLRQRPPLLATPTSPTAQLRPLKALPLPHPQLRLPPPRDRWACGQSLGSRKHLLVFEKFYDKVPENVKATLELDNRQKLEQFGGLRRRQEDVESLELPRDLWNGFDQNADVDMDNKMWLKGANIELRSLLQRVQAPSLGGLHVVLGLRVHRSQEFRFANLCLDFKKCMEIPGGPDRGVLQGWSPHGEPLLGHEEGKCGVQAPTEFPLGYYLVELLEEGYHPAGPRMVDPLTAFTMQLKKLQTMPPRESSQEGAVPCKATGEELPKTIGTHLLHQRDLDVRHGVNEDHFGALRFDFRSGFQTCIERLAPLFCPISSIWNGIPFKLSSIKISESTNTQALPVEVGQSVLHTLMLVNMYRAYYAQHCYMNLYVLTDQVFRPLKVGLKEQVLFQTFWTDVQKNTKLIHRGATTIPEAAASTAATAASHSD

SEQ ID NO: 32038 - protein, 143 aa, Homo sapiens
MNHLEGGPAGRWKQDSSIGTNNAPAISSQNAECSLLADTVSKLIFLTDLHLQCLSSAHQHQCHGKLAMLVSFHIAALSWLRKDGASPQALSTADPIRKELKSQGQCSGGAGTKAGFPCNVFERMAWGEDALQKMSPLPFLVSI

SEQ ID NO: 32039 - protein, 68 aa, Homo sapiens
MTFRSGGGDALGKAACLVPAASRPQSPILQMTSREVTPQVGNRAGIGIRVCLFPPRDPESWQPVSKLF

SEQ ID NO: 32040 - protein, 638 aa, Homo sapiens
MADSNTKQEIYKMQPEASFGVCQRLKKSSKIPVVGRVLPECLCLHLCRTNEAAGKKMASLRFAKAFFVDHNSRTTTFIDPRLPLQSSRPTSALVHRQHLTRQRSHSAGESAYRMFTNNTCLKHMITKVRRDTHHFERYQHNRDLVGFLNMFANKQLDCRGDPLESHPTDQMLSYNLGRRLPADHVSGYLQFKVEVTSSVHEEMLFSHSDASPEAVGTILGVNSVNGDLGSPSDDEDMPGSHHDSQVCSNGPVSEDSAADGTPKHSFRTSSTLEIDTEELTSTSSRTSPPRGRQDSLNDYLDAIEHNGHSRPGTATCSERSMGASPKLRSSFPTDTRLNAMLHIDSDEEDHEFQQDLGYPSSLEEEGGLIMFSRASRADDGSLTSQTKLEDNPVENEEASTHEAASFEDKPENLPELAESSLPAGPAPEEGRSATSGADTGTSDASGGSRRAVSETESLDQGSEPSQVSSETEPSDPARTESVSEASTRPEGESDLECADSSCNESVTTQLSSVDTRCSSLESARFPETPAFFFSGRRKTEPVQAEPTQQWPCRRVAGIRVHCWFFTCGSRSPMTDQLRTMQKKGKHNFSGGPKVQMQARPSPTAVLPAGVCSTRSPKTVFTSPHLAGPHSLPAVAQIA

SEQ ID NO: 32041 - protein, 103 aa, Homo sapiens
  DOMAIN (24)..(100): Immunoglobulin domain identified by PFam, accession name ig, E-value=5.4e-08, PFam score of 30.8
ARDGPCEFAPVVVVPPRSVHNVTGAQVGLSCEVRAVPTPVITWRKVTKSPEGTQALEELPGDHVNIAVQVRGGPSDHEATAWILINPLRKEDEGVYQCHAANM

SEQ ID NO: 32042 - protein, 390 aa, Homo sapiens
  DOMAIN (107)..(130): Kazal serine protease inhibitors family proteins domain identified by eMATRIX, accession number BL00282, p-value=5.183e-10, raw score of 16.88
  DOMAIN (91)..(151): Kazal-type serine protease inhibitor domain identified by PFam, accession name kazal, E-value=7.5e-05, PFam score of 29.6
MPRLSLLLPLLLLLLLPLLPPLSPSLGIRDVGGRRPKCGPCRPEGCPAPAPCPAPGISALDECGCCARCLGAEGASCGGRAGGRCGPGLVCASQAAGAAPEGTGLCVCAQRGTVCGSDGRSYPSVCALRLRARHTPRAHPGHLHKARDGPCEFVPITRFYNCFPQPLIHRQFSLSPDRRQSETLSKKKKKKEEEEEEEEEGEEEKEEEGCKSNFQHTINFKEISEGFGKIFSFQPSMIDIIDEASTLHVAQHAVVLDARVAELLSNAAPVVVVPPRSVHNVTGAQVGLSCEVRAVPTPVITWRKVTKSPEGTQALEELPGDHVNIAVQVRGGPSDHEATAWILVSDLHHCLKALPTYSYSSTLSPSQVFLLIHLLHIGPYPGACILEAPP

SEQ ID NO: 32043 - protein, 113 aa, Homo sapiens
  DOMAIN (72)..(112): Kelch motif domain identified by PFam, accession name Kelch, E-value=0.0014, PFam score of 25.3
  misc_feature (1)...(113): Xaa = X or * as defined in Table 2
XQGEVEKLIKCRPKFRWILKSPVFEAVINWVKHAKKEREESLPNLLQNVRIAPTNPPGAHSAFGGDSMQLQDMMVIPLLSSIECYDPIIDSWEVVTSMGTQRCDAGVCVLREK

SEQ ID NO: 32044 - protein, 157 aa, Homo sapiens
MEILTTCDKGLIFTGNTRKSETSTSECTCPLDINCSLSHSPPSPSDEETQHHTDSLHVRPRKGYLLCIYHIPDIVAVMVNIQCQLDWIEGCKVLFLGVSVKVLPKEINTGISGLGKADPPSIWKSQEQDGVLKETDNCQNGVTFGLLLAKRISLLPS

SEQ ID NO: 32045 - protein, 82 aa, Homo sapiens
MVKYFLGQSVLRSSWDQSVSRLSGSGYPNPYSKHVLTEDIVHREVTPDQKLLSPATPDQRPTGMPTLGPSDLFSLPMLLTRV

SEQ ID NO: 32046 - protein, 154 aa, Homo sapiens
MHIDDSYQAQSVTKPILKCFTSKSTMGFHSVMNPMQDFGYECAIRGMIGFCTWVASALPCTTTSLLKVPGELHPEARGHRSDSVVPGAAENIEDMLEWALRGFPGGSSIGQRQNEKSSRRRPQACRHRTQLALGRGGAPGRNGDPGSHPQCAIS

SEQ ID NO: 32047 - protein, 94 aa, Homo sapiens
  misc_feature (1)...(94): Xaa = X or * as defined in Table 2
XHVFIEEDCVVNAAQIGSYVHVGKNCVIGRRCVLKDCCKILDNTVLPPETVVPPFTVFSGCPGLFSGELPECTQELMIDVTKSYYQKFLPLTQV

SEQ ID NO: 32048 - protein, 512 aa, Homo sapiens
MELGELLYNKSEYIETASGNKVSRQSVLCGSQNIVLNGKTIVMNDCIIRGDLANGKKSRHQKEDSLSWSNSAYLSLDDDAFTAPFHRDGMLSLKQLLSFLSITDFQLPDEDFGPLKLEKVKSCSEKPVEPFESKMFGERHLKEGSCIFPEELSPKRMDTEMEDLEEDLIVLPGKSHPKRPNSQSQHTKTGLSSSILLYTPLNTVAPDDNDRPTTDMCSPAFPILGTTPAFGPQGSYEKASTEVAGRTCCTPQLAHLKDSVCLASDTKQFDSSGSPAKPHTTLQVSGRQGQPTCDCDSVPPGTPPPIESFTFKENQLCRNTCQELHKHSVEQPRILSESVGQSFRDSGYFRPLLHFRSRWPTGTHRQRGSPLGGLAPLLGRLRLRVRRPNGGFNWPEFRARLARGQLGPGVGRPGVGDGCSFRSVACPMDEPPGKPLSCEEKEKVPGGRRCVLKDCCKILDNTVLPPETVVPPFTVFSGCPGLFSGELPECTQELMIDVTKSYYQKFLPLTQV

SEQ ID NO: 32049 - protein, 203 aa, Homo sapiens
MKHGKEEGQAFCSEDSACQRKPDPGEGFLQKEKVKAAGHPSFQSWHLGRPLVTEGSDDGNSSKSSFMADEGRPGRAGPSSVALGLGWDAELSTGASAVQAGTEAVDPSEVAGVGSSDDALSLASCSGRVQARTWGLMEHLSKTSVSWSLNGHLSHPGPLEQRGRIRPHDVLGECLAQENAQNTCTTRGHCQCGSNGLQPPALI

SEQ ID NO: 32050 - protein, 48 aa, Homo sapiens
MPFSCLSLPSSWDYRHPPPCPANFYFFVFLVETGFHRVSQDGLDLLTS

SEQ ID NO: 32051 - protein, 343 aa, Homo sapiens
  DOMAIN (12)..(31): THROMBOXANE RECEPTOR SIGNATURE domain identified by eMATRIX, accession number PR00429A, p-value=2.235e-24, raw score of 9.10
  DOMAIN (41)..(308): 7 transmembrane receptor (rhodopsin family) domain identified by PFam, accession name 7tm_1, E-value=1.5e-52, PFam score of 169.1
MWPNGSSLGPCFRPTNITLEERRLIASPWFAASFCVVGLASNLLALSVLAGARQGGSHTRSSFLTFLCGLVLTDFLGLLVTGTIVVSQHAALFEWHAVDPGCRLCRFMGVVMIFFGLSPLLLGAAMASERYLGITRPFSRPAVASQRRAWATVGLVWAAALALGLLPLLGVGRYTVQYPGSWCFLTLGAESGDVAFGLLFSMLGGLSVGLSFLLNTVSVATLCHVYHGQEAAQQRPRDSEVEMMAQLLGIMVVASVCWLPLLVFIAQTVLRNPPAMSPAGQLSRTTEKELLIYLRVATWNQILDPWVYILFRRAVLRRLQPRLSTRPRSLSLQPQLTQRSGLQ

SEQ ID NO: 32052 - protein, 840 aa, Homo sapiens
  DOMAIN (558)..(576): CADHERIN SIGNATURE domain identified by eMATRIX, accession number PR00205B, p-value=6.870e-17, raw score of 11.39
  DOMAIN (139)..(665): Cadherin domain identified by PFam, accession name cadherin, E-value=2.1e-124, PFam score of 426.7
MALASAAPGSIFCKQLLFSLLVLTLLCDACQKVYLRVPSHLQAETLVGKVNLEECLKSASLIRSSDPAFRILEDGSIYTTHDLILSSERKSFSIFLSDGQRREQQEIKVVLSARENKSPKKRHTKDTALKRSKRRWAPIPASLMENSLGPFPQHVQQIQSDAAQNYTIFYSISGPGVDKEPFNLFYIEKDTGDIFCTRSIDREKYEQFALYGYATTADGYAPEYPLPLIIKIEDDNDNAPYFEHRVTIFTVPENCRSGTSVGKVTATDLDEPDTLHTRLKYKILQQIPDHPKHFSIHPDTGVITTTTPFLDREKCDTYQLIMEVRDMGGQPFGLFNTGTITISLEDENDNPPSFTETSYVTEVEENRIDVEILRMKVQDQDLPNTPHSKAVYKILQGNENGNFIISTDPNTNEGVLCVVKPLNYEVNRQVILQVGVINEAQFSKAASSQTPTMCTTTVTVKIIDSDEGPECHPPVKVIQSQDGFPAGQELLGYKALDPEISSGEGLRYQKLGDEDNWFEINQHTGDLRTLKVLDRESKFVKNNQYNISVVAVDAVGRSCTGTLVVHLDDYNDHAPQIDKEVTICQNNEDFAVLKPVDPDGPENGPPFQFFLDNSASKNWNIEEKDGKTAILRQRQNLDYNYYSVPIQIKDRHGLVATHMLTVRVCDCSTPSECRMKDKSTRDVRPNVILGRWAILAMVLGSVLLLCILFTCFCVTAKRTVKKCFPEDIAQQNLIVSNTEGPGEEVTEANIRLPMQTSNICDTSMSVGTVGGQGIKTQQSFEMVKGGYTLDSNKGGGHQTLESVKGVGQGDTGRYAYTDWQSFTQPRLGEESIRGHTLIKN

SEQ ID NO: 32053 - protein, 148 aa, Homo sapiens
  DOMAIN (67)..(107): Alpha-lactalbumin / lysozyme C proteins domain identified by eMATRIX, accession number BL00128B, p-value=1.000e-40, raw score of 19.94
  DOMAIN (19)..(146): C-type lysozyme/alpha-lactalbumin family domain identified by PFam, accession name lys, E-value=4.8e-96, PFam score of 332.5
MKALIVLGLVLLSVTVQGKVFERCELARTLKRLGMDGYRGISLANWMCLAKWESGYNTRATNYNAGDRSTDYGIFQINSRYWCNDGKTPGAVNACHLSCSALLQDNIADAVACAKRVVRDPQGIRAWVAWRNRCQNRDVRQYVQGCGV

SEQ ID NO: 32054 - protein, 171 aa, Homo sapiens
MPLGGDDTQVHGCSTDCFLLSSRRSLHACSHWHSHCVEENQPRVTQLVSSNIAGLKYKVPDHASMRGRLQGRLILALGSLSWAARITSIVRDPKLCSHLPFPISAWAMITVTLAALHPPYSTLCHSQYTKMCLQPPLTWSLLLQPPQPKSRAFFFFFFFLRQSLIPAWVTE

SEQ ID NO: 32055 - protein, 2353 aa, Homo sapiens
  DOMAIN (2261)..(2285): BREAST CANCER TYPE I SUSCEPTIBILITY PROTEIN SIGNATURE domain identified by eMATRIX, accession number PR00493H, p-value=9.182e- 31, raw score of 16.79
  DOMAIN (2132)..(2345): BRCA1 C Terminus (BRCT) domain identified by PFam, accession name BRCT, E-value=1.4e-33, PFam score of 125.0
MIPGDHSSIIIDSVPEVSFSPSSKVPEVTCIPTTATLATHPSAKRQSWHQTPDFTPTKYKERAPEQLRALESSFAQNPLPLDEELDRLRSETKMTRREIDSWFSERRKKVNAEETKKAEENASQEEEEAAEDEGGEEDLASELRVSGENGSLEMPSSHILAERKVSPIKINLKNLRVTEANGRNEIPGLGACDPEDDESNKLAEQLPGKVSCKKTAQQRHLLRQLFVQTQWPSNQDYDSIMAQTGLPRPEVVRWFGDSRYALKNGQLKWYEDYKRGNFPPGLLVIAPGNRELLQDYYMTHKMLYEEDLQNLCDKTQMSSQQVKQWFAEKMGEETRAVADTGSEDQGPGTGELTAVHKGMGDTYSEVSENSESWEPRVPEASSEPFDTSSPQAGRQLETDMGTSSSFRWKSTVLPALMLALPNSQGYTTKGKNAHDFEDDKEHIGTSLLLLVQSFHSPENLAFVAALAAERREEGSRSGGDSRHLPCCPLGMDLSALRVEEVQNVINAMQKILECPICLELIKEPVSTKCDHIFCKFCMLKLLNQKKGPSQCPLCKNDITKRSLQESTRFSQLVEELLKIICAFQLDTGLEYANSYNFAKKENNSPEHLKDEVSIIQSMGYRNRAKRLLQSEPENPSLQETSLSVQLSNLGTVRTLRTKQRIQPQKTSVYIELGSDSSEDTVNKATYCSVGDQELLQITPQGTRDEISLDSAKKAACEFSETDVTNTEHHQPSNNDLNTTEKRAAERHPEKYQGSSVSNLHVEPCGTNTHASSLQHENSSLLLTKDRMNVEKAEFCNKSKQPGLARSQHNRWAGSKETCNDRRTPSTEKKVDLNADPLCERKEWNKQKLPCSENPRDTEDVPWITLNSSIQKVNEWFSRSDELLGSDDSHDGESESNAKVADVLDVLNEVDEYSGSSEKIDLLASDPHEALICKSERVHSKSVESNIEDKIFGKTYRKKASLPNLSHVTENLIIGAFVTEPQIIQERPLTNKLKRKRRPTSGLHPEDFIKKADLAVQKTPEMINQGTNQTEQNGQVMNITNSGHENKTKGDSIQNEKNPNPIESLEKESAFKTKAEPISSSISNMELELNIHNSKAPKKNRLRRKSSTRHIHALELVVSRNLSPPNCTELQIDSCSSSEEIKKKKYNQMPVRHSRNLQLMEGKEPATGAKKSNKPNEQTSKRHDSDTFPELKLTNAPGSFTKCSNTSELKEFVNPSLPREEKEEKLETVKVSNNAEDPKDLMLSGERVLQTERSVESSSISLVPGTDYGTQESISLLEVSTLGKAKTEPNKCVSQCAAFENPKGLIHGCSKDNRNDTEGFKYPLGHEVNHSRETSIEMEESELDAQYLQNTFKVSKRQSFAPFSNPGNAEEECATFSAHSGSLKKQSPKVTFECEQKEENQGKNESNIKPVQTVNITAGFPVVGQKDKPVDNAKCSIKGGSRFCLSSQFRGNETGLITPNKHGLLQNPYRIPPLFPIKSFVKTKCKKNLLEENFEEHSMSPEREMGNENIPSTVSTISRNNIRENVFKEASSSNINEVGSSTNEVGSSINEIGSSDENIQAELGRNRGPKLNAMLRLGVLQPEVYKQSLPGSNCKHPEIKKQEYEEVVQTVNTDFSPYLISDNLEQPMGSSHASQVCSETPDDLLDDGEIKEDTSFAENDIKESSAVFSKSVQKGELSRSPSPFTHTHLAQGYRRGAKKLESSEENLSSEDEELPCFQHLLFGKVNNIPSQSTRHSTVATECLSKNTEENLLSLKNSLNDCSNQVILAKASQEHHLSEETKCSASLFSSQCSELEDLTANTNTQDPFLIGSSKQMRHQSESQGVGLSDKELVSDDEERGTGLEENNQEEQSMDSNLGEAASGCESETSVSEDCSGLSSQSDILTTQQRDTMQHNLIKLQQEMAELEAVLEQHGSQPSNSYPSIISDSSALEDLRNPEQSTSEKAVLTSQKSSEYPISQNPEGLSADKFEVSADSSTSKNKEPGVERSSPSKCPSLDDRWYMHSCSGSLQNRNYPSQEELIKVVDVEEQQLEESGPHDLTETSYLPRQDLEGTPYLESGISLFSDDPESDPSEDRAPESARVGNIPSSTSALKVPQLKVAESAQSPAAAHTTDTAGYNAMEESVSREKPELTASTERVNKRMSMVVSGLTPEEFMLVYKFARKHHITLTNLITEETTHVVMKTDAEFVCERTLKYFLGIAGGKWVVSYFWVTQSIKERKMLNEHDFEVRGDVVNGRNHQGPKRARESQDRKIFRGLEICCYGPFTNMPTDQLEWMVQLCGASVVKELSSFTLGTGVHPIVVVQPDAWTEDNGFHAIGQMCEAPVVTREWVLDSVALYQCQELDTYLIPQIPHSHY

SEQ ID NO: 32056 - protein, 137 aa, Homo sapiens [sequence omitted]

SEQ ID NO: 32057 - protein, 177 aa, Homo sapiens
MPTSWEDQPLKSPIVKAGSDRGTKREEEHEIILEPVPLLAQTLEMVSQLVRMQLASLPSNLSTPCTMSPHLDPNQLGILLKVLRKEKEDGDYPDMMATHPSSRYEACSSGITLEKPEKLRSGKVKEEVDSLIGSAFPVTPQGGWQRQSWFGKDRDQKRDEQVSATDSFEEYFNGLMP

SEQ ID NO: 32058 - protein, 44 aa, Homo sapiens
  misc_feature (1)...(44): Xaa = X or * as defined in Table 2
MGRQLXHRAAPSWWGGTRRQASRRNRRTPPTTAIFDLDCRKRPX

SEQ ID NO: 32059 - protein, 150 aa, Homo sapiens
MNESQRRSSILCPVNTCLKAAGPAPAADAKSASQRSQKLSGERGSHNAASQTINQRVYQRKFQKHKVSKLLLPKYLFSKQLLEDMLHQSEEVKRERGRNKLQKTGDATQERSRGNFQDDGKGKSQDDNCEAGQEINKFRLEQEDKGLQPR

SEQ ID NO: 32060 - protein, 99 aa, Homo sapiens
MAPLGMLLGLLMAACFTFCLSHQPGQAVPAGSHVRLNLQTGEREAKLQYEDKFRNNLKGKRLDINTNTYTSQDLKSALAKFKEGAEMESSKEDKARQAE

SEQ ID NO: 32061 - protein, 175 aa, Homo sapiens
MAPLGMLLGLLMAACFTFCLSHQNLKEFALTNPEKSSTKETERKETKAEEELDAEVLEVFHPTHEWQALQPGQAVPAGSHVRLNLQTGEREAKLQYEDKFRNNLKGKRLDINTNTYTSQDLKSALAKFKEGAEMESSKEDKARQAEVKRLFRPIEELKKDFDELNVVIETDMQIM

SEQ ID NO: 32062 - protein, 122 aa, Homo sapiens
MRPDPERPATRGRHSAATAVPGSARIRVTTPYFKCHAKALSVKGIFTEIFTVLPGWPAKTATLAATSIAAHKGAECSSGYGRIQQELKTLVISGNKGISALPASDNLLKSVGPSLKQLAQKT

SEQ ID NO: 32063 - protein, 52 aa, Homo sapiens
  misc_feature (1)...(52): Xaa = X or * as defined in Table 2
MGLEQNWMKGETLGLLNSHADGAGPGVGEASGGSIQGKVEQLQAQLLSHARX

SEQ ID NO: 32064 - protein, 178 aa, Homo sapiens
  misc_feature (1)...(178): Xaa = X or * as defined in Table 2
MQAPPPVVAPCQYVASQVEGRGGGTFAHELLAVEYAGWISPAFRLKVNQPFIDYRTGRLQPAIPQSLPEALRLAADLAEQKQRLEQKMLMDAPKVEFAERVATASGVLIGNYAKVLGLGQNYLFTWLRDNGILIATGERRNVPKQEYISRGYFTLKETVIDTSNGSRISFTTRITGKX

SEQ ID NO: 32065 - protein, 198 aa, Homo sapiens
MVQRDQGAFKTHHKANPSVWPGEHQTHTGLNVIPRISGLGNKDHNAQSLSGHISLRLPVVLFLDILVSVGILEPISVRFFLMIIKLGFLHHLGTYSSTQCARRFNRHQPKCENQIVHLPLLNQLQASSLLATAKQQQQNPLLEEMGSLRPCEEGACFVFAFCHDNMNIVGNMLLSRQTYPPVHLLLLPPHKCHYDLQS

SEQ ID NO: 32066 - protein, 109 aa, Homo sapiens
  misc_feature (1)...(109): Xaa = X or * as defined in Table 2
MEVTRVNKCREFSMVLFGLGGKDTILFSDPTLPSGQRSRSPLLKFVEQPTENKADPKDGKSWHIAWYMGSLRSSRIERKAPALPDRQFWRQGVLEGIKDPYRDPDKPTX

SEQ ID NO: 32067 - protein, 224 aa, Homo sapiens
MDDIPQEARQYRHNQAYAYSIQGDGAEDDDERIVRFHTRVTVDSDTLASDAARLTCRHGLGNQCGCSTPNIKANERFRLLLLDPKHPVSGDWPVHRVKYVVSNSAKTVMTVYMQANSVSKVSCKTNYRIFQPPPVQASRMHKGQDLFPTGSNWKTGKKYTKQQFSRHCVPATKDSDAGEMRNKQVWDHGPTRIVGLIISLGPRSHSYRRSDNQTGTTVPLVSSV

SEQ ID NO: 32068 - protein, 211 aa, Homo sapiens
  misc_feature (1)...(211): Xaa = X or * as defined in Table 2
MAKAGNHHPQQTNTGTENQTLHVLTYKREMNNENTCTQGGGHHTGTCAQHAEVIDCVPALGDSTEHCSLRYLSCLYCSGAACLLNLALFYLYGTDLPLERFTAENGQWGGIGERQHRNKLRILLYGEFLCGNQNSCPLVGLASTINSAVAQEQASEMRSVEGFSRSLEFWCYILSLYWVSALLKNLCFLHTEPLKTTEESKGFPGTSGSGX

SEQ ID NO: 32069 - protein, 338 aa, Homo sapiens
MDPSPKPHAIKPRRGGLGAGAGADFQGRGCAPATPDRANLAAAPKPVGNPSPATHSSWRTQTGSALQEPRPADPRPGHKVALREPKSPADKTHLWEQSTRLQALFPGWKAGVRKRTHPPVGPASSYRGTTGYRARDPAPPVLRSGWGAPADSQYSRSRHRRTLAPRPSDAFSSDAARRAGVPLAGCAGAARAKPNLAGKDAAKARSVHASRRPGKGFRRTAWGGENHGRGKWKTEGTEARGSSMSSADVRLQTSKPTRGSGYSSLTPNIQVKYVVSNSAKTVMTVYMQANSVSKVSCKTNYRIFQPPPVQASRMHKLRTPKKQQPTLRCIPQTHMSLD

SEQ ID NO: 32070 - protein, 189 aa, Homo sapiens
MDSDSPLSKIIGVPSPSSLLLSSESARRAGVPLAGCAGAARAKPNLAGKDAAKARSVHAFRRPGKGFRRTAWGGENHGRGKWKTEGTEARGSSMSSADVRLQTSKPTRGSGYSSLTPNIQVKYVVSNSAKTVMTVYMQANSVSKVSCKTNYRIFQPPPVQASRMHKKKGERVTLEIDGAEMDLQVNIVV

SEQ ID NO: 32071 - protein, 167 aa, Homo sapiens
  misc_feature (1)...(167): Xaa = X or * as defined in Table 2
XLPSSENGIAISPVRQTRSSGVILNAALFQPLFIPSSTKTNQNMQIMSKSCPLQQSFRTSLPVYPCCSNDFSTEQPESQADYSNIPGQNVINGAICSCQYKMEPYGVHKNGSEGGKKNWILFGQSPPESQSFQAYIGSPLRPSLLAADTVHGCVSLALSAQCCALSH

SEQ ID NO: 32072 - protein, 375 aa, Homo sapiens
MKGNWNSHRLLVEVPKWTPLWAFINILSGLVFLHPVPMSGEVQDSAPGLFSLAFPQGPHINTSGWAGFKSELCHLLVVGKFLNLCVRRPHKVNFELWPLPLPNPLASPSPSEIVIRQISACGSYLLKTLPRHPIAYKIKSKMLSIFFVSLFPPLVTLNYRCFLTYDGATSKLTHWLPSSENGIAISPVRQTRSSGVILNAALFQPLFIPSSTKTNQNMQIMSKSCPLQQSFRTSLPVYPCCSNDFSTEQPESQADYSNIPGQETVLDEGLVAPNYYIQWALGPCLAGLSLLSVGSLLEVLHIPSSCQYKMEPYGVHKNGSEGGKKNWILFGQSPPESQSFQAYIGSPLRPSLLAADTVHGCVSLALSAQCCALSH

SEQ ID NO: 32073 - protein, 39 aa, Homo sapiens
MGKGLVPSLTARALEGPAALPGDLVSTLGLGPRVGYLHR

SEQ ID NO: 32074 - protein, 42 aa, Homo sapiens
MFTSCSRFDLSSCWAAVESSVSSNSVFRASSSSPRSRFCFSA

SEQ ID NO: 32075 - protein, 2143 aa, Homo sapiens
  DOMAIN (445)..(474): MYOSIN HEAVY CHAIN SIGNATURE domain identified by eMATRIX, accession number PR00193D, p-value=3.143e-34, raw score of 14.36
  DOMAIN (49)..(795): Myosin head (motor domain) domain identified by PFam, accession name myosin_head, E-value=0, PFam score of 1149.0
MVRFVVHPAGGFRILSSAPGVRVDCEIPTKTASVTLCSLSGKRAALWEQDREDQSILCTGESGAGKTENTKKVIQYLAYVASSHKSKKDQRTIAVMSHAEPDPGTVDGDSALTEPSTLCGPDQMQMAGCPHLPPPCQSEAVPGSSHVGVFQRQGRLGSPGRCPAFTASLGSLQGELERQLLQANPILEAFGNAKTVKNDNSSRFGKFIRINFDVNGYIVGANIETCILVLVLLLNICKDLLEKSRAIRQAKEERTFHIFYYLLSGAGEHLKTDLLLEPYNKYRFLSNGHVTIPGQQDKDMFQETMEAMRIMGIPEEEQMGTGLALLWSSVGQRKAGLLRVISGVLQLGNIVFKKERNTDQASMPDNTAAQKVSHLLGINVTDFTRGILTPRIKVGRDYVQKAQTKEQADFAIEALAKATYERMFRWLVLRINKALDKTKRQGASFIGILDIAGFEIFDLNSFEQLCINYTNEKLQQLFNHTMFILEQEEYQREGIEWNFIDFGLDLQPCIDLIEKPAGPPGILALLDEECWFPKATDKSFVEKVMQEQGTHPKFQKPKQLKDKADFCIIHYAGKVDYKADEWLMKNMDPLNDNIATLLHQSSDKFVSELWKDVDRIIGLDQVAGMSETALPGAFKTRKGMFRTVGQLYKEQLAKLMATLRNTNPNFVRCIIPNHEKKAGKLDPHLVLDQLRCNGVLEGIRICRQGFPNRVVFQEFRQRYEILTPNSIPKGFMDGKQACVLMHPVVSGVSRLAAATFGLVLLHVLSKESESFGCRIKALELDSNLYRIGQSKVFFRAGVLAHLEEERDLKITDVIIGFQACCRGYLARKTPYRVTLVGTAPRACLSLKNPVIPGEQAILESRLIFDSLGNDGSPAAGQRLAFAKRQQQLTAMKVLQRNCAAYLKLRNWQWWRLFTKVKPLLQVSRQEEEMMAKEEELVKVREKQLAAENRLTEMETLQSQLMAEKLQLQEQLQAETELCAEAEELRARLTAKKQELEEICHDLEARVEEEEERCQHLQAEKKKMQQNIQELEEQLEEEESARQKLQLEKVTTEAKLKKLEEEQIILEDQNCKLAKEKKLLEDRIAEFTTNLTEEEEKSKSLAKLKNKHEAMITDLEERLRREEKQRQELEKTRRKLEGDSTDLSDQIAELQAQIAELKMQLAKKEEELQAALARVEEEAAQKNMALKKIRELESQISELQEDLESERASRNKAEKQKRDLGEELEALKTELEDTLDSTAAQQELRSKREQEVNILKKTLEEEAKTHEAQIQEMRQKHSQAVEELAEQLEQTKRVKANLEKAKQTLENERGELANEVKVLLQGKGDSEHKRKKVEAQLQELQVKFNEGERVRTELADKVTKLQVELDNVTGLLSQSDSKSSKLTKDFSALESQLQDTQELLQEENRQKLSLSTKLKQVEDEKNSFREQLEEEEEAKHNLEKQIATLHAQVADMKKKMEDSVGCLETAEEVKRKLQKDLEGLSQRHEEKVAAYDKLEKTKTRLQQELDDLLVDLDHQRQSACNLEKKQKKFDQLLAEEKTISAKYAEERDRAEAEAREKETKALSLARALEEAMEQKAELERLNKQFRTEMEDLMSSKDDVGKSVHELEKSKRALEQQVEEMKTQLEELEDELQATEDAKLRLEVNLQAMKAQFERDLQGRDEQSEEKKKQLVRQVREMEAELEDERKQRSMAVAARKKLEMDLKDLEAHIDSANKNRDEAIKQLRKLQAQMKDCMRELDDTRASREEILAQAKENEKKLKSMEAEMIQLQEELAAAERAKRQAQQERDELADEIANSSGKGALALEEKRRLEARIAQLEEELEEEQGNTELINDRLKKANLQIDQINTDLNLERSHAQKNENARQQLERQNKELKVKLQEMEGTVKSKYKASITALEAKIAQLEEQLDNETKERQAACKQVRRTEKKLKDVLLQVDDERRNAEQYKDQADKASTRLKQLKRQLEEAEEEAQRANASRRKLQRELEDATETADAMNREVSSLKNKLRRGDLPFVVPRRMARKGAGDGSDEEPIRRSSSSKIKDKFMKIRKNQHKNAENSKDQNVSSPNDCNSSPARAQNWMENEFDELTEVGFRRWVMRNSSELKEHVVTQCKEAKNLDERLQELLTRITSLEKNVNDLMELKNTA

SEQ ID NO: 32076 - protein, 92 aa, Homo sapiens
MAQQAADKYLYVDKNFINNPLAQTDWAAKKLVWVPSDKSGFEPASLKEEVGEEAIVELEHNGKNVEVNKDDSSKRNLPQIFKVEEMGQLTRL

SEQ ID NO: 32077 - protein, 128 aa, Homo sapiens
MARKGAGDGSDEEPIRRSSSSKIKDKFMKIRKNQHKNAENSKDQNVSSPNDCNSSPARAQNWMENEFDELTEVGFRRWVMRNSSELKEHVVTQCKEAKNLDERLQELLTRITSLEKNVNDLMELKNTA

SEQ ID NO: 32078 - protein, 61 aa, Homo sapiens
MALRAMWAPPALQSASAGRRSSDRSWRRPAGSWRETPQTSATRSASSRPRSGSLRCSWPRK

SEQ ID NO: 32079 - protein, 131 aa, Homo sapiens
  DOMAIN (90)..(118): MYOSIN HEAVY CHAIN SIGNATURE domain identified by eMATRIX, accession number PR00193C, p-value=7.632e-32, raw score of 12.60
  DOMAIN (79)..(130): Myosin head (motor domain) domain identified by PFam, accession name myosin_head, E-value=4e-32, PFam score of 112.8
  misc_feature (1)...(131): Xaa = X or * as defined in Table 2
MSHAEPDPGTVDGDSALTEPSTLCGPDQMQMAGCPHLPPPCQSEAVPGSSHVGVFQRQGRLGSPGRCPAFTASLGSLQGELERQLLQANPILEAFGNAKTVKNDNSSRFGKFIRINFDVNGYIVGANIETX

SEQ ID NO: 32080 - protein, 51 aa, Homo sapiens
MNRKVSSLKNKLRRGDLPFVVPRRMARKGAGDGSDEEVDGKADGAEAKPAE

SEQ ID NO: 32081 - protein, 86 aa, Homo sapiens
  DOMAIN (26)..(46): Myosin head (motor domain) domain identified by PFam, accession name myosin_head, E-value=8.1e-07, PFam score of 25.2
  misc_feature (1)...(86): Xaa = X or * as defined in Table 2
XLAAATFGLVLLHVLSKESESFGCRIKALELDSNLYRIGQSKVFFRAGVLAHLEEERDLKITDVIIGFQACCRGYLARKTPYRVTL

SEQ ID NO: 32082 - protein, 1851 aa, Homo sapiens
  DOMAIN (494)..(523): MYOSIN HEAVY CHAIN SIGNATURE domain identified by eMATRIX, accession number PR00193D, p-value=3.143e-34, raw score of 14.36
  DOMAIN (135)..(794): Myosin head (motor domain) domain identified by PFam, accession name myosin_head, E-value=0, PFam score of 1299.7
GTEGYARLTCCSSRLVRSPHPAAARALEKVLSGEAAPVPGADPGSGPGYKSPWHSKLPISISMWIKTSSTIRWPRPTGLPRSCYGLPPTRVALSQPASRRRWAREAIVELVENGKKVKVNKDDIQKMNPPKFSKVEDMAELTCLNEASVLHNLKERYYSGLIYTYSGLFCVVINPYKNLPIYSEEIVEMYKGKKRHEMPPHIYAITDTAYRSMMQDREDQSILCTGESGAGKTENTKKVIQYLAYVASSHKSKKDQGELERQLLQANPILEAFGNAKTVKNDNSSRFGKFIRINFDVNGYIVGANIETYLVEKISEERTFHIFYNLLTSGWRAPEDRSPVGAVPTNTASCLMDTSPSPGSRTKDMSQETLDAMRIMGIPEEEQMGLLRVISGVLQLGNIVFKKERNTDQASMPDNTAAQKVSHLLGINVTDFTRGILTPRIKVGRDYVQKAQTKEQADFAIEALAKATYERMFRWLVLRINKALDKTKRQGASFIGILDIAGFEIFDLNSFEQLCINYTNEKLQQLFNHTMFILEQEEYQREGIEWNFIDFGLDLQPCIDLIEKPAGPPGILALLDEECWFPQSHRQEASWRRTKLISCIIHYAGKVDYKADEWLMKNMDPLNDNIATLLHQSSDKFVSELWKDVDRIIGLDQVAGMSETALPGAFKTRKGMFRTVGQLYKEQLAKLMATLRNTNPNFVRCIIPNHEKKAGKLDPHLVLDQLRCNGVLEGIRICRQGFPNRVVFQEFRQRYEILTPNSISKGFMDGKQACVLMIKALELDSNLYRIGQSKVFFRAGVLAHLEEERDLKITDVIIRKQTCCMCYQAMNAFPKPDAAAYRHEGPPAELRCLPEAAELAVVSRQEEEMMAKEEELVKVREKQLAAENRLTEMETLQSQLMAEKIAAAGAAPGRNRARPGWRRRRSAASTCRRRRRRCSRTSRSLRSSWRRRRAPRQKLQLEKVTTEAKLKKLEEEQIILEDQNCKLAKEKKLLEDRIAEFTTNLTEEEEKSKSLAKLKNKHEAMIPDLEERLRREEKQRQELEKTRRKLEGDSTDLSDQIAELQAQHRGAQDAAGQERGGAPGPPWPENKAEKQKRDLGEELEALKTELEDTLDSTAAQQELRSKREQEVNILKKTLEEEAKTHEAQIQEMRQKHSQAVEELAEQLEQTKRVKANLEKAKQTLENERGELANEVKRKKVEAQLQELQVKFNEGERVRTELADKVTKLQVELDNVPGLLSQSDSKSSKLTKDFSALESQLQDTQELLQEENRQKLSLSTKLKQLEEEEEEAKHNLEKQIATLHAQVADMKKKMEDSVGCLETAEEVKRKLQKDLEGLSQRHEEKVAAYDKLEKTKTRLQQELDDLLVDLDHQRQSACNLEKKQKKFDQLLAEEKTISAKYAEERDRAEAEAREKETKALSLARALEEAMEQKAELERLNKQFRTEMEDLMSSKDDVGKSVHELEKSKRALEQQVEEMKTQLEELEDELQATEDAKLRLEVNLQAMKAQFERDLQGRDEPERGEEEAAGQTAIKQLRKLQAQTNDCMRELDDTRASREEILAQGKENEKKLKSVEAEMIQLQEELAAAERAKRQAQQERDELADEIANSSGKGALALEEKRRLEARIAQLEEELEEEQGNTELINDRLKKANLQIDQINTDLNLERSHAQKNENARQQLERQNKELKVKLQEMEGTVKSKYKASITALEAKIAQLEEQLDNETKERQAACKQVRRTEKKLKDVLLQVDDERSNAVHIKDQADKSSTRLKQLERQLQQAEEEAQRANASRRKLQRELEDATETADAMNREVSSLENKLRRGDLPFVVPRRIARKGAVDGSDEEVDGKADGAEAKPAE

SEQ ID NO: 32083 - protein, 214 aa, Homo sapiens
MEEFLQDAEPSRKVEGEAHMYEKGDQTQEAALLCNNSWELIQSCKSENSLIHGRGCSSIPELNLDIKKKDNGYPVPKKVQNQDVSRAVHLLNALVANPSLSLPDSGGCRLSLLYILNFVPCIREVNRMRRYSSYKLCLNSTVSGVAGLKRATFLDGEPAMAARTSTLVDKSKDPQAWGSGLVPVSCLSGAAGEQALPPELHLLSDQLRQSLIGA

SEQ ID NO: 32084 - protein, 56 aa, Homo sapiens
MEEFLQDAEAYQRGAAPKCRILPAGGKVLTSEDEYNLLSDRHFPDPLAHGKCAVSQ

SEQ ID NO: 32085 - protein, 1342 aa, Homo sapiens
  DOMAIN (700)..(739): PROTEIN ZINC FINGER ZINC-FINGER METAL-BINDING NU domain identified by eMATRIX, accession number PD01066, p-value=5.941e-27, raw score of 19.43
  DOMAIN (451)..(1340): Zinc finger, C2H2 type domain identified by PFam, accession name zf-C2H2, E-value=3e-153, PFam score of 522.5
MKDTAPVLEGLKEEEMTKEEISILSNACSKLQEQKKSLTRKKEELELLKEDMQDYSEDLQELKKELSKTGEEKYMEGSKASKRLTKRVQQIIGQINGLISQLEMDQWASKLAPAKGVPMGENVISVAELINAMKQVKHIPKSKLTSLAAALNENKDGKVNVDHLIKVIELVDKEDVHVSTSQVAEIVATLEKEEKGEENEDHMDSAHTELAATPTLRGVRRHSLAPSGLKMPPFTCGPCFLDFSINRPVFLHAFSWIWVTVETERSPGISGMHYLTAPLLPLISHRRQAQQSLYSSFAQLLGILDSFLRPLCIQASELILDAVAAAPALPEESEWLETTQLQQSLHTRAEAEAPRAPGLLGSRARLPLKPSIWDEPEDLLAGPSSDLRAEGTVISSPKGPSAQRISPRRRNRNTDQSGRHQPSLKHTKGGTQEAVAGISVVPRGPRGGRPFQCADCGMVFTWVTHFIEHQKTHREEGPFPCPECGKVFLHNSVLTEHGKIHLLEPPRKKAPRSKGPRESVPPRDGAQGPVAPRSPKRPFQCSVCGKAFPWMVHLIDHQKLHTAHGHMTQAVSRKTLDTCSEAKHGMGLPRVSAEKQQFHSTACPHWGLLALSYALIAEQSPLPYLTTPSIQQVLQSEGMSDSMSEGKSLWRHRDTIVGCSFQPGKPPSTSEGRAGPAVPARSQGMTPGVRVSTDPEQVTFEDVVVGFSQEEWGQLKPAQRTLYRDVMLDTFRLLVSVGHWLPKPNVISLLEQEAELWAVESRLPQGVYPDLETRPKVKLSVLKQGISEEISNSVILVERFLWDGLWYCRGEDTEGHWEWSCESLESLAVPVAFTPVKTPVLEQWQRNGFGENISLNPDLPHQPMTPERQSPHTWGTRGKREKPDLNVLQKTCVKEKPYKCQECGKAFSHSSALIEHHRTHTGERPYECHECLKGFRNSSALTKHQRIHTGEKPYKCTQCGRTFNQIAPLIQHQRTHTGEKPYECSECGKSFSFRSSFSQHERTHTGEKPYECSECGKAFRQSIHLTQHLRIHTGEKPYQCGECGKAFSHSSSLTKHQRIHTGEKPYECHECGKAFTQITPLIQHQRTHTGEKPYECGECGKAFSQSTLLTEHRRIHTGEKPYGCNECGKTFSHSSSLSQHERTHTGEKPYECSQCGKAFRQSTHLTQHQRIHTGEKPYECNDCGKAFSHSSSLTKHQRIHTGEKPYECNQCGRAFSQLAPLIQHQRIHTGEKPYECNQCGRAFSQSSLLIEHQRIHTKEKPYGCNECGKSFSHSSSLSQHERTHTGEKPYECHDCGKSFRQSTHLTQHRRIHTGEKPYACRDCGKAFTHSSSLTKHQRTHTG

SEQ ID NO: 32086 - protein, 120 aa, Homo sapiens
  DOMAIN (62)..(101): PROTEIN ZINC FINGER ZINC-FINGER METAL-BINDING NU domain identified by eMATRIX, accession number PD01066, p-value=5.941e-27, raw score of 19.43
  DOMAIN (60)..(120): KRAB box domain identified by PFam, accession name KRAB, E- value=1.6e-27, PFam score of 104.9
MSDSMSEGKSLWRHRDTIVGCSFQPGKPPSTSEGRAGPAVPARSQGMTPGVRVSTDPEQVTFEDVVVGFSQEEWGQLKPAQRTLYRDVMLDTFRLLVSVGHWLPKPNVISLLEQEAELWA

SEQ ID NO: 32087 - protein, 37 aa, Homo sapiens
MPWLLAGTAGPALAGPLGNPVSNTLRLSALAAVQVRS

SEQ ID NO: 32088 - protein, 408 aa, Homo sapiens
  DOMAIN (232)..(252): GELSOLIN FAMILY SIGNATURE domain identified by eMATRIX, accession number PR00597F, p-value=6.055e-09, raw score of 16.29
  DOMAIN (330)..(384): Zinc finger, CCHC class domain identified by PFam, accession name zf-CCHC, E-value=5.9e-08, PFam score of 39.9
MATGGGAEEERKRGRPQLLPPARPAARGEEADGGREKMGWAQVVKNLAEKKGEFREPRPPRREEESGGGGGSAGLGGPAGLAAPDLGDFPPAGRGDPKGRRRDPAGEAVDPRKKKGAAEAGRRKKAEAAAAAMATPARPGEAEDAAERPLQDEPAAAAAGPGKGRFLVRICFQGDEGACPTRDFVVGALILRSIGMDPSDIYAVIQIPGSREFDVSFRSAEKLALFLRVYEEKREQEDCWETFGGKSSLKTLFILFRNETVDVEDIVTWLKRHCDVLAVPVKVTDRFWIWTGEYKCEIELRQGEGGVRHLPGAFFLGAERGYSWYKGQPKTCFKCGSRTHMSGSCTQDRCFRCGEEGHLSPYCRKGIVCNLCGKRGHAFAQCPKAVHNSVAAQLTGVAGHLNTRLPAR

SEQ ID NO: 32089 - protein, 678 aa, Homo sapiens
MEPLGVSAVGRGIPGLAHSGVAERLAYRPSANQRGAAASPRLTPASWGRGEGAQVHRALSAHFRARSGRDVGRRAGSSRGLVDSQHPQKVSLVVVIRPLPVTKYKPREAQSLTKTRRFLDASYAWRESCLSWHHHTAHDIFAGKPVDPLPGSTRGQDSAGERKGVNKYYPPDFNPEKHGSLNRYHNSHPLRERARKLSQGILIIRFEMPYNIWCDGCKNHIGMGVRYNAEKKKVGNYYTTPIYRFRMKCHLCVNYIEMQTDPANCDYVIVSGAQRKEERWDMADNEQVLTTEHEKKQKLETDAMFRLEHGEADRSTLKKALAHTEPHPGGPERLEGRLRPQQHAAEKKKAIQEEEERDQALQAKASLTIPLVPETEDDRKLAALLKFHTLDSYEDKQKLKRTEIISPFWVPFCPGIRLQQQVSAPPSWRDYSDSERVVEWVRPRGIRVLGTRGIRVLGTRGIRLLGTRGIRLLGTRGIRLLGTRGIRLLGTRGIRLLGTRGIGLDAHLPLSCAGLGCCTMTLEAIRYSRGSLQILDQLLLPKQSRYEAVGSVHQAWEAIRAMKFPEAFLEAEQMPASCSLYGLWNHGCTAGGKAGLNSKQKTPVLALGKQSGLQTVKSMQLDGTADVSEHKEHPHIHYAPADTIKGESPSFDPILETSRLSISVKGLNGFFAKHDFNW

SEQ ID NO: 32090 - protein, 56 aa, Homo sapiens
  misc_feature (1)...(56): Xaa = X or * as defined in Table 2
XSKVSGVLKKLAQSRRTALATSPITVGDLGIVRRRSRDVPESPQHAADTPKSGEPR

SEQ ID NO: 32091 - protein, 84 aa, Homo sapiens
MSSGKEGEAQFPKKKINIYKAAVTTKTPLNALPQNLSPHTRKYQLKLLRDGSEQSRGLPCGWLRWKGLLLFEETQGRPEGNSSC

SEQ ID NO: 32092 - protein, 157 aa, Homo sapiens
  misc_feature (1)...(157): Xaa = X or * as defined in Table 2
MRDCCDGLDDQCWWEDRGPERGETCQGPKFPCGFIELAIPALPTVKGGRRMEDEVVLLEIRDAKSKPRCLPASEEPPLMSWSPRRCAVATSKTGGTKGPPSGPRSCCSHLGPACPSQTPADVGPFLGTQITCQALRWVPGQGNTISWQPCEDQKAPX

SEQ ID NO: 32093 - protein, 31 aa, Homo sapiens
DSKHAVEKNVETNSRGQITDRLVQSEVAVTG

SEQ ID NO: 32094 - protein, 213 aa, Homo sapiens
  misc_feature (1)...(213): Xaa = X or * as defined in Table 2
MDPRTVCCLLLTDSICWGREGETQSGEAMMYIPFIPLLIPKGTQQKGILHNLLCEGATPAITEGYLMDMSPCLKPGEVDATGVAQPLCLTACGASHPSADVEADFPSLCRAVHLQASKQKALENPRDSKHAVEKNVETNSRGQITDRLVQSEVAVTGKKREKTNSDKAQEKDALCLLSLACQTRPLGTQSNSLRKTQDVGNSIPLAGVCYSWX

SEQ ID NO: 32095 - protein, 365 aa, Homo sapiens
MLAPEVGKTGGGKWDPRGKSGGCGKSPATLEQTRIPYHFMQIPQYVFQKDQEFAEALPVLPHPSLPGERPLQEAVAFLCWLLVDVLLKATVSKVGGGSALASVARVMKAQAFSPLLRILHKASTSSFRARKDSAHTPSCLLTPSGPERAGPLTQDSCQPSPHDSFRAPALLEPSSALSTAVASLRRREERLEPEQRVGELGSLGERQHEPSDNHDFQPKSKQEQLQKTLQPSGGPHCSSLLLMVFWWKQWRKTEPLKAERTGYKEKEISTKCSSSPSGQLSQSSAAGPAWPEDARPEATWSATLLSFDPRCKNDSIEEPCSGLLQYAGGPLQFPVTLDFPAPEGVNREAYKIAKMAACPSLWELH

SEQ ID NO: 32096 - protein, 161 aa, Homo sapiens
MPPDVCQPGRDAASEPCMARLSSPLLCDRQIRPSMDVTRLSTFSRASCMKIICQVQKLHHEQTVFGTSCGMDRGMNAGSHSASKISTERTPSSLHLVSETLNSNRHRTWNDTQALSQISLSIPNASRKPEEPPTQPTEGREMSPSCGPDIIPWSQHTLWSN

SEQ ID NO: 32097 - protein, 116 aa, Homo sapiens
MGGQWLGGRQIRTNWATRKPPAPKSTQERSTGSEKMERVTVEKGRTWACPEREGRYRRAAREGCRSEPQPSVAGRNGSLSLLLPLLLHFTPGDEGFGDVSDTWMLSQCTAVTGVAE

SEQ ID NO: 32098 - protein, 81 aa, Homo sapiens [sequence omitted]

SEQ ID NO: 32099 - protein, 219 aa, Homo sapiens
MGPTFSSLWFSESHRMSAALQVLSTARRLPGRRTSSRMTTLPRSLLFTSQRGTTIPRDFGFTTFLFLPDLSRSWLGFGRPEAHSDDVIRRSTGSEKMERVTVEKGRTWACPEREGRYRRAAREGCRPQGDVSRNHSQCGWAPCSARSLSAEQASSPEQRPSLLESSQPSAAGRRWLVARARAVALGPTGLCACGSTPGAESTREKKTRSHLLDDIYAGQ

SEQ ID NO: 32100 - protein, 122 aa, Homo sapiens
  DOMAIN (11)..(106): Cyclic nucleotide-binding domain identified by PFam, accession name cNMP_binding, E-value=2e-21, PFam score of 84.6
MRIEDPSLLNSRVLLHHAKAGTIIARQGDQDVSLHFVLWGCLHVYQRMIDKAEDVCLFVAQPGELVGQLAVLTGEPLIFTLRAQRDCTFLRISKSDFYEIMRAQPSVVLSAAHTVAARMSPF

SEQ ID NO: 32101 - protein, 46 aa, Homo sapiens
VLGVMIGAGVAVVVTAVLILLVVRRLRVPKTPAPDGPRYRFRKRDK

SEQ ID NO: 32102 - protein, 196 aa, Homo sapiens
  misc_feature (1)...(196): Xaa = X or * as defined in Table 2
XCFHTGSQLCPEVEEDRPPRNFPSNDSESPGFLSPGPRISINILAMSETSSASQKNPRLRATRSAVQLESTDGGSAANWNARITWSGDNALRPLGRNYVSRHALRAAGPQGRVAPPGREQHWPILQMGTSSHGLATNSSGAKVAERDGFQDVLAPGEGSAGRICGAQPVPFVPQVLGVMIGAGVAVVVTAVLILLV

SEQ ID NO: 32103 - protein, 191 aa, Homo sapiens
  misc_feature (1)...(191): Xaa = X or * as defined in Table 2
MTAPAGPRGSETERFLTPNPGYGTQAGPSPAPPTPPEEEDLRRRLKYFFMSPCDKFRAKGRKPCKLMLQVVKILVVTVQLILFGLSNQLAVTFREENTIAFRHLFLLGYSDGADDTFAAYTREQLYQAIFHAVDQYLALPDVSLGRYAYVRGGGDPWTNGSGLALCQRDYHRGHVDPGNDTFDIDPDGGYX

SEQ ID NO: 32104 - protein, 164 aa, Homo sapiens
  misc_feature (1)...(164): Xaa = X or * as defined in Table 2
XPDGKECVVKEVVPGDSVNSLLSILDVITGHQHPQRTVSARAARDSTVLRLPVEAFSAVFTKYPESLVRVVQIIMVRLQRVTFLALHNYLGLTNELFSHEIQPLRLFPSPGLPTRTSPVRGSKRMVSTSATDEPRETPGRPPDPTGAPQHGPTGDPVKPWTHHQ

SEQ ID NO: 32105 - protein, 600 aa, Homo sapiens
  DOMAIN (438)..(462): Cyclic nucleotide-binding domain proteins domain identified by eMATRIX, accession number BL00888B, p-value=4.692e-10, raw score of 14.79
  DOMAIN (429)..(528): Cyclic nucleotide-binding domain identified by PFam, accession name cNMP_binding, E-value=6.7e-06, PFam score of 33.0
  misc_feature (1)...(600): Xaa = X or * as defined in Table 2
XCWWAAVPGLPDVSLGRYAYVRGGGALGPMAQACSLPAVLPPGHVDPANDTFDIDPMVLLAGNVTIHFRLKTINLQSLINNEIPDCYTFSASCCRTVCGVHVAAAGTGHQPVERLEFVNGWYILLRVLTISGTIMKIGIEAKCVLPTPWAPGPIPAVSAIRGHILPQAPQRKGWADRLTQLPPAELGELRRCSILLGTSTLLILIATLRVALPASCASAAAWLSSNWATLLWLDRAGALSCEASSSTCLFIALITGAYDTIKHPGGAGAEESELQAYIAQCQGQPHLRQVPPRERLGLQPSLLLRKDSGHQIGRPAGINRWRLRCNWNGAWRDDRGGVAVVVTAVLILLVVRSCECQGTSLRILRIQKETPTLQRKEPPPAVLEADLTEGDLANSHLPSEVLYMLKNAVLGCRVLGHFEKPLFLELCRHMVFQRLGQGDYVFRPGQPDASIYVVQDGLLELCLPGPDGKECVVKEVVPGDSVNSLLSILDVSPVTSIPSGPCLPGGPGLHGAAPAGGSILAVFTKYPESLPRPPNSHQPCAGLQENGLQGGPRSDFDMAYERGRISVSLQEEASGGSLAAPARGRQTSSIFEAAKQEWPS

SEQ ID NO: 32106 - protein, 142 aa, Homo sapiens
MALQLCGRNFQGRIVTLRPRFSTLVRLCLSYGNTVCSGDRALMDGSCPMLRLCLVYLDATHKRLYCAIYLCPNYKHNDESFTGSQDMCRMVKLITGPFHSVIVTYTFVQHPIDEKRCKEDTFAFYAHITSSHYVEQSQCEDN

SEQ ID NO: 32107 - protein, 213 aa, Homo sapiens
MWASLSLDHPSAKENQALRLIEMREENGDVPKTEQAGSLKPLRDTGKSNLKEKKPLASIIYFLYVFDALGQGSPAPGLQTRTCLWPVRNQAAQQELQGTWISHMLAQYSMAHVLGQKARWNSYHLLDLALDFKWCHFCHIHLVKALVKVFPHSRDESSLTPPLDGASTLYREKSVWEEEYIDAAIFGKYNPATQIKHLAEYNELGITMSPRIR

SEQ ID NO: 32108 - protein, 66 aa, Homo sapiens
MAIRLRGRCGAGRASQRGARRNLAKPNFPPGSPGPPDTSTESIFRRAWKAPGFPGRGRTADPETAR

SEQ ID NO: 32109 - protein, 170 aa, Homo sapiens
  misc_feature (1)...(170): Xaa = X or * as defined in Table 2
CFLQFPNQLSALESLSQDMLLGEPTTLVIASPKSASLPRDLYLSDHAPPASSHPLVYIVKAGRRTQTHTRQDTGAHTLTHNQQRRRRQRLGDSGDGGSHRGAPPSGGRRRGQTGEFQHTRPPRCPGPENPAPSRPFERWILLTYLAALASLVESWVLPDCAGLLFVTCPX

SEQ ID NO: 32110 - protein, 119 aa, Homo sapiens
MAEWAAVKAVGSWKLTAGQRHVLDKGRVFSMNDQRIYQIETILNVKLCCLMNKPCSSLASPKSEQPPCLWRLLPFPPPSITETALPDTVISRLKALQCFSTALRRSMAPMEQDRQCPSH

SEQ ID NO: 32111 - protein, 67 aa, Homo sapiens
  DOMAIN (19)..(40): DNAJ PROTEIN FAMILY SIGNATURE domain identified by eMATRIX, accession number PR00625B, p-value=2.853e-10, raw score of 13.48
  misc_feature (1)...(67): Xaa = X or * as defined in Table 2
XKQSTDVPAGTVEECVQKFIEIDQAWKILGNEETKREYDLQRCEDDLRNVGPVDAQVYLEEMSWNEX

SEQ ID NO: 32112 - protein, 134 aa, Homo sapiens
  DOMAIN (83)..(104): DNAJ PROTEIN FAMILY SIGNATURE domain identified by eMATRIX, accession number PR00625B, p-value=2.853e-10, raw score of 13.48
  DOMAIN (42)..(106): DnaJ domain identified by PFam, accession name DnaJ, E-value= 0.014, PFam score of 2.5
MTLFGKRVFADVIKVTLMQEVGTHGLGQLGLYGFAGYSSPPGCFHGLALSVCSFSRCTVQAYHPDKQSTDVPAGTVEECVQKFIEIDQAWKILGNEETKREYDLQRCVYCLAQTQRKFIDDDYCQNGKADNRLS

SEQ ID NO: 32113 - protein, 31 aa, Homo sapiens
MHYFLHFIIFTGGTAKPDDLLVIAGENTEIL

SEQ ID NO: 32114 - protein, 90 aa, Homo sapiens
MRLLRDAPGLVARQPPEEQPSHPRARRTNRFDTAPGGGSVGRRGEEAGPPRSLNQKLSGGIQRFVFEQAPGGTAKPDDLLVIAGENTEIL

SEQ ID NO: 32115 - protein, 465 aa, Homo sapiens
  DOMAIN (273)..(327): TRANSCRIPTION PROTEIN FACTOR REGULATION A domain identified by eMATRIX, accession number PD02910B, p-value=1.000e-40, raw score of 30.52
MRKGIQPALEQYLVTAGGGEGAAVVAAAAAASMDKRALLASPGFAAAAAAAAAPGAYIQILTTNTSTTSCSSSLQSGAVAAGPLLPSAPGAEQTAGSLLYTTPHGPSSRAGLLQQPPALGRGGSGGGGGPPAKRRLELGESGHQYLSDGLKTPKGKGRAALRSPDSPKTPKSPSEKTRYDTSLGLLTKKFIQLLSQSPDGVLDLNKAAEVLKVQKRRIYDITNVLEGIHLIKKKSKNNVQWMGCSLSEDGGMLAQCQGLSKEVTELSQEEKKLDELIQSCTLDLKLLTEDSENQRLAYVTYQDIRKISGLKDQTVIVVKAPPETRLEVPDSIESLQIHLASTQGPIEVYLCPEETETHSPMKTNNQDHNGNIPKPASKDLASTNSGHSDCSVSMGNLSPLASPANLLQQTEDQIPSNLEGPFVNLLPPLLQEDYLLSLGEEEGISDLFDAYDLEKLPLVEDFMCS

SEQ ID NO: 32116 - protein, 373 aa, Homo sapiens
  DOMAIN (156)..(183): Protamine P1 proteins domain identified by eMATRIX, accession number BL00048, p-value=8.538e-09, raw score of 6.39
MRKGIQPALEQYLVTAGGGEGAAVVAAAAAASMDKRALLASPGFAAAAAAAAAPGAYIQILTTNTSTTSCSSSLQSGAVAAGPLLPSAPGAEQTAGSLLYTTPHGPSSRAGLLQQPPALGRGGSGGGGGPPAPGAKNNRGSGERRVPAARISGPKRGWRRRGRPMQRIARRRRQPGCCGRQLKNGSRKLLLTMNEGIRFTRQGQVPAALWVIFGEDRFRWSATMIGLSLAVFGILHALAQAFVTGPATKRFGEKQAIIAGMAADALGYVLLAFATRGWMAFPIMILLASGGIGMPALQAMLSRQVDDDHQGQLQGSLAALTSLTSIIGPLIVTAIYAASASTWNGLAWIVGAALYLVCLPALRRGAWSRATST

SEQ ID NO: 32117 - protein, 394 aa, Homo sapiens
  DOMAIN (184)..(194): TYPE I ANTIFREEZE PROTEIN SIGNATURE domain identified by eMATRIX, accession number PR00308C, p-value=8.714e-09, raw score of 3.83
MQLSLDATIITSLWPQMGPLQNLAIFSDLKDVFASGEGTSCINGDLLTSYSTPSAPTSHPMAQCPPLCCRELQILKCVKRSPADPLRSEHAAGTPGRQRASKADWGLAPQQSPGFNPSEPPTPQFTTPSPTPFSIRGVTPSYARERGSFELEGKGEWGAPTTPRGASPPPAGAGDGGEGGYYRRAAAAAAAAASQRWWLLQQPGSAGGSVRRGVEEAAGGLLRAGGTGEEGAGGYGAAWREEEQEVVEVFVVPRTMSSTLQVLNKYFYCRLHSRAIYGYRYSEYAKLVSDSGAFIIAIPLPEYQPPDNPRKTETGETRLGHKRSCGHTLPHMDPSATLTQKSGSKNQSKVRKSTRHSPEAAQTLDGERHDTYVPPRLFAHAQRRWPEEIKLHHC

SEQ ID NO: 32118 - protein, 91 aa, Homo sapiens
  misc_feature (1)...(91): Xaa = X or * as defined in Table 2
XSDAHGRCFFHLVLGGHRLEPLVLVQLSEHYEQMEYLGRYIARKLNINYFDYLATFYRHVVRHWPPPGAGTVMGKSPMGHKPSSSQSSLEV

SEQ ID NO: 32119 - protein, 349 aa, Homo sapiens
MSAAVGSGRRQRTSGQADHLCLTQMPKGRAGNLPTTSIGWRFQLWFLGLTCPERHLARRLKNNSFYPFVQQEPNSAPNAGRGGAGLGLERRGGGRRRTAPRPEWGGARAGGSSRAAPPPVFVLEYYLDTLWKGMLLFIISVVLVSFSSLREVQKQETWVFLVYGVGVGLWLVISSLPRRRLVLNHTRGVYHFSIQGRTVCQGPLHLVYVRLALSSDAHGRCFFHLVLGGHRLEPLVLVQLSEHYEVFGWGRFRTQRVNTTRSSVLGAVERAPGLRAGRGMQPVERHLLPQQMEYLGRYIARKLNINYFDYLATSYRHVVRHWPPPGAGTVMGKSPMGHKPSSSQSSLEV

SEQ ID NO: 32120 - protein, 170 aa, Homo sapiens
  DOMAIN (141)..(163): Osteopontin proteins domain identified by eMATRIX, accession number BL00884E, p-value=5.500e-09, raw score of 11.04
METRPHELIGDNVSRQGPHPSHSCKHAAHLEFYNKGRHKNSERAQAGKGVHWAQLIIIECLAGYYDVRGISHRGCYPSDAYLNLPENHGILEMEGTSEIFWFSLFWLTQGFGRQLCPSDAWASRKQGELPTRVQKYMADSKEEKSYKSQASHQYSSTSSERNVLACRKLV

SEQ ID NO: 32121 - protein, 129 aa, Homo sapiens
MLDYFKGAKKYNFTLQAEVGKEQEEEKDLENNSSGSPAAPHGTPWKENLFVWLGASREDSDQDTEPIRGLSVQKSFQNTSSPAFIHVLTTVPTRAPRAVRDSLKPLSDVIMKCTLKRLLHRTPCWQHVG

SEQ ID NO: 32122 - protein, 231 aa, Homo sapiens
MSECGDETQEAQFENHRMSGMQASASSGEDSDQDTEPIRGLSVQKSFQNTSSPAFIHVLTTVPTRAPRAVRDSLKPLSDVIMKCTLKRLLHRTPCWQHVGLYDGVFKINSCQHPRGNPEALEVQLSTYSEILNQFSREGDDRNDSPYSRILMKDQWSNRNWNVHYTWVASYSCSQMSGGSEIIGSDCGGATELKAQWGGKECTDTPLPAAAALFNNHNARNRASSKGSSCD

SEQ ID NO: 32123 - protein, 52 aa, Homo sapiens
  misc_feature (1)...(52): Xaa = X or * as defined in Table 2
XKRDALTLSLHAPWREAHLKVTVVKDIGGGTPGALLQILLVLASRTTLLRHS

SEQ ID NO: 32124 - protein, 366 aa, Homo sapiens
MLAEEHTNRGTPALWLVSQPAGQGRVWLGQSEELQGKTISLLAPPSAESYFHSIKLCTHSPSPHVIRSFRYTKSSEFYRVTTEQYQKAAEEVEAKFNPYDNVSGISVACAPSPFSSVNRLRQDDLSHPKERKVHTICKDLPEFYLPDRQVISITCLSEAPRNALEPLRGKDPACPSEGSQEEGQMAMGTPPVHGPLTIKNVAMGFSRKNWDHQALIKGVYTRCEDELAAVEVTDQHVYREIAIFLLVPSMAPSRRTRYFSLISGNLSTSETVTGICRDLKGLPCSPTYTLANTVLMRSGEATPVASQGERFEQLMVFGRCDKHWEYCPFGASGLMGEITDHPNNLTMAIVKSAVKCYESMSHGNRL

SEQ ID NO: 32125 - protein, 68 aa, Homo sapiens [sequence omitted]

SEQ ID NO: 32126 - protein, 482 aa, Homo sapiens
MAVAESIGESMCGRLAGCCLSSSTWHLLSTCLWLECRVPEETLQVKLNHPRTLENHHCDGPTLVPSDIYSSGTDSPPPKNGVPCITKPCGQCGLIGSGGLVVLDSEGKERAVKESTGSIACAGVSWDPDQEHTFLTRSPDDSGAHHVREPLDEGLSPIFAGLIYDQALVGKQPRHTLPVMSLCGQRPTRIQTSGLERQMWKKWKNCDILQRFVLQGWLSLSPVQCPWIRHRLCIDDAEITSHKIGDRDHIHMEGAFWICIHLGRATHGLCDTFSSMVNISTRTTLQTWTHNGKLAYMQNSKTEENGFNCGSMVEIIHKAVPAPKLLEILVAWMTIPKENGKCIAHGSGLHRTATSDTEWRDKKMIKVTGYNPVGLCGCGFPERPSLQAPGPATLSADPWFSCHLSGHVASSLPACLSPSPTMNWSSEGRGCASFTLEPSALTRCTEPRETDISHPRTVPTRSVPIDPDYTSHAGMPDECLHL

SEQ ID NO: 32127 - protein, 133 aa, Homo sapiens
MNSECGYRALLLRNTSQELKIPNSKSKETASDKNSDEQQIKRAFELNGHTFIIVLIIHSLHYYHNSGTVKQSVIWAKRSGVEEGGEVEQQGKLKTINQKKTEKKHRASFTGSVAPKPSFQGYGFKIMEEAAFT

SEQ ID NO: 32128 - protein, 94 aa, Homo sapiens [sequence omitted]

SEQ ID NO: 32129 - protein, 138 aa, Homo sapiens
MPSLLNTQQLPVMTPCCRYKVISIYCAPGAPCFSVGSFQAEARSEMLGQDGCMEDHSVLGAAADTTEGTEEAHAVQPLWRCQGIVRGRGSEHSIKPGRCSTFMNDLPNVDFIPVLHVAPLCDPHEHILQVYPQQSSYT

SEQ ID NO: 32130 - protein, 127 aa, Homo sapiens
MLVPVLILSPCLVGIEPWEVSPHTNSTSSYESTPKSYPLGTAAKAASGQSPSTTSPLPETAPSTLHERGLENVVCSDKDLRQATGYSAAEKSKPPGLCTRAFCPEAIPDAQDWVKCQPLGSLSALNF

SEQ ID NO: 32131 - protein, 245 aa, Homo sapiens
MLAGCHDVFICPSLPLCEQAAIRTESGMLDRPTLTRSKRKQTFQRCAASIPEWKHRGAAGSAALAVSGFPAAPSVPNAEQLSEGVLQRAARCLLGKSFANFPSHRALERSPEPHDYARGVAGSAMRNSASWLAQPPSQQSPPTPNIDSTSSQENALVAAPTSSVVTAFPACRQQVMVGSEEGSGPASPSLNHVYCNLTSGPIVGQAADKTSQTPSYRRKGFIQLGALASYCLKIQALRVHNFCPF

SEQ ID NO: 32132 - protein, 70 aa, Homo sapiens
MENPQVICFTRFLITPDREQELFKNFVAVENTGLHKQMALSSNVILELLPSVSEEHLAFLQRTAVYIQTA

SEQ ID NO: 32133 - protein, 75 aa, Homo sapiens
  misc_feature (1)...(75): Xaa = X or * as defined in Table 2
XEETGLKSLSHMLKVTQLVSGGDAFQLELTESRESGPLRSQGIQGLKYSLNLLLVKDTKKKKQDKQPLTVHEVEG

SEQ ID NO: 32134 - protein, 418 aa, Homo sapiens
MGLNSADTERRLDHRLVSEKRAKIRYLQEGSCFLPRLTVDIGETTWVLPGSPAPWEDQSSQSPRSTGASPPRLAADKCILDGASGVAWTVSRVGSFWWVLGLTDFKNEALDVKVNVTALKGGTSGVVCFSRWVHGFPDFSNEAADPREKFSKSPLDPGRPAGFTSQDYRGSESRGKTHRNDYATRQTVIRAIIEAKQHALGEQGMNDGSHLVRRGGLRKSLMETGFSSPMDLGKVSLIAGTAKSIQKKGKAKSWVLNQSLMSSDAGTLSRCYVAHKDGKDKRGGHGGRHEEWRVPGRWNMCGEAVRGKQSHTVRFLGHAGKCGLYLDAEHQPEHFKEVMVEPWKSALQTSSQMMMILLLRRPHFDNHYSGKEVKSRDATNRDKKCDNKTQHDSRQQLRSVTIHVTVGFMILHFGCQQE

SEQ ID NO: 32135 - protein, 47 aa, Homo sapiens
MPGFKSRSLSLPLCSQTIDDWLFLYLLFLPNERFSELSLLPDWSGVS

SEQ ID NO: 32136 - protein, 30 aa, Homo sapiens
  misc_feature (1)...(30): Xaa = X or * as defined in Table 2
MQSKTKIYRRPLDRPASPRSDVNDIKGTPX

SEQ ID NO: 32137 - protein, 49 aa, Homo sapiens
MLIWLDVFLASKEISADAPELPYNVVVVGKKPDWLLSISCQLRPKPVSA

SEQ ID NO: 32138 - protein, 125 aa, Homo sapiens
MAVAGVPAVSFTSPCEPAPALSRSQTSRGPAQPSKGGPGVLGSKSSLGRGPTGTLVGLPCSRSRQTLPGAEWRCEAAEAREGLTRKSRLPVVPYATLWVRGVEAFCTPRLLASSPRHPGVPSDGR

SEQ ID NO: 32139 - protein, 55 aa, Homo sapiens
MCVHLQSFGYFLSCVSQFCCPLLWSLASVSSICASPLLGSEMILLLSCCWMSDSN

SEQ ID NO: 32140 - protein, 105 aa, Homo sapiens
MNTRNCSVLALNSPVITTALGRQENSIDRCSKGFICQTPVQKGGWNPILLRFSPCCAVNLPSSAIHSFISRYFLSTCQVWYTLLETWSKQAGMAQPCPHLKVLKV

SEQ ID NO: 32141 - protein, 142 aa, Homo sapiens
MIIVEGFGLEGGNVQRGSKSSLDQWAELWGKNYVLITEGKTCRLTKKEGCFLRSKELSLFKVTVKLTRRLSNSVEGEPEVQAAAVQGYTGGQWWSQDLNSGLLDPKDSVFPSALERASGPGDVGMAAPFPLNRVGPFFFGIV

SEQ ID NO: 32142 - protein, 62 aa, Homo sapiens
MEYAMRFCQKRSRKTVAHPGPSLSPGSPQMSSESVIIDSPRPARTHGIPHGILRSFLPHPFA

SEQ ID NO: 32143 - protein, 121 aa, Homo sapiens
MVTKYHCLQKVARCPWEAADSRVKGQDSLDPKCLSLNTDSLTCVSSRGTLSKEEQEAEVEEAENKRQETRGLERKKLEIKPFWLPIVGEVETVNGVCNEHLKFVELNQRETCSKIRIQMNQ

SEQ ID NO: 32144 - protein, 127 aa, Homo sapiens
MLASPLWLQALSLAAGTWRPRLGSGQAGNSEMRAGFLPGAGSQVRAQLQDRLPKTTETKGALWPHTELCGMWSIAPGAENQELQIDSPLLGQLSNQVWREDGYGKAFRLRTLSSMGITEEANENVLI

SEQ ID NO: 32145 - protein, 1418 aa, Homo sapiens
  DOMAIN (1338)..(1355): Serine proteases V8 family, histidine proteins. domain identified by eMATRIX, accession number BL00672B, p-value=3.554e- 09, raw score of 9.84
MNVKLKSKVIPSTLGKIEPLRCQRQKYLPAEKRKSTTLTLPRDAFKKSKIPSAMGMGLHQSSQSTAAKGKAKLELYSGPITLDSFSVRGSFIHISGGRINSILVSPSYRVVEVSYILFELIMNSMKTEENKSFSAMEDDQRTRPEVSKDTVMKQTHADTPVDHCLSGIRKCSSTFKLKSEVNKHETALEMQNPNLNNKECCFTFTLNGNSRKLDRSVFTAYGKPSESIYSALSANDYFSERIKNQFNKNIIVYEEKTIDGHINLGMPLKCLPSDSHFKITFGQRKSSKEDGHILRQCENPNMECILFHVVAIGRTRKKIVKINELHEKGSKLCIYALKGETIEGALCKDGRFRSDIGEFEWKLKEGHKKIYGKQSMVDEVSGKVLEMDISKKKALQQKDIHKKIKQNESATDEINHQSLIQSKKKVHKPKKDGETKDVEHSREQILPPQDLSHYIKDKTRQTIPRIRNYYFCSLPRKYRQINSQVRRRPHLGRRYAINLDVQKEAINLLKNYQTLNEAIMHQYPNFKEEAQWVRKYFREEQKRMNLSPAKQFNIYKKDFGKMTANSVSVATCEQLTYYSKSVGFMQWDNNGNTGNATCFVFNGGYIFTCRHVVHLMVGKNTHPSLWPDIISKCAKVTFTYTEFCPTPDNWFSIEPWLKVSNENLDYAILKLKENGNAFPPGLWRQISPQPSTGLIYLIGHPEGQIKKIDGCTVIPLNERLKKYPNDCQDGLVDLYDTTSNVYCMFTQRSFLSEVWNTHTLSYDTCFSDGSSGSPVFNASGKLVALHTFGLFYQRGFNVHALIEFGYSMDSILCDIKKTNESLYKSLNDEKLETYDEEKARPRPAYRRLGCFRFRSRFPILGTGETGRIEAGKDRRGHGVSETGSCSRRQGGALWVSPAQPIGFRSSWSSGAFASSNTSGNCVERWIPGRVLARRAAVRKEIETHQGQEMLVRGTEGIKEYINLGMPLSCFPEGGQVVITFSQSKSKQKEDNHIFGRQDKASTECVKFYIHAIGIGKCKRRIVKCGKLHKKGRKLCVYAFKGETIKDALCKDGRFLSFLENDDWKLIENNDTILESTQPVDELEGRYFQVEVEKRMVPSAAASQNPESEKRNTCVLREQIVAQYPSLKRESEKIIENFKKKMKVKNGETLFELHRTTFGKVTKNSSSIKVVKLLVRLSDSVGYLFWDSATTGYATCFVFKGLFILTCRHVIDSIVGDGIEPSKWATIIGQCVRVTFGYEELKDKETNYFFVEPWFEIHNEELDYAVLKLKENGQQVPMELYNGITPVPLSGLIHIIGHPYGEKKQIDACAVIPQESPEYVPMYTQRSFQKIVHNPDVITYDTEFFFGASGSPVFDSKGSLVAMHAAGFAYTYQNETRSIIEFGSTMESILLDIKQRHKPWYEEVFVNQQDVEMMSDEDL

SEQ ID NO: 32146 - protein, 64 aa, Homo sapiens
  misc_feature (1)...(64): Xaa = X or * as defined in Table 2
XRVHLHFVMLGPTLAGGDLEDIGGADSSSWVSLFVTTWRIVKFSRTLFIMYRSGSCATCARNSQ

SEQ ID NO: 32147 - protein, 457 aa, Homo sapiens
  DOMAIN (65)..(110): TEA domain proteins domain identified by eMATRIX, accession number BL00554A, p-value=1.000e-40, raw score of 11.66
  DOMAIN (15)..(449): TEA domain identified by PFam, accession name TEA, E-value= 2.4e-239, PFam score of 808.5
  misc_feature (1)...(457): Xaa = X or * as defined in Table 2
XPRWGKPRAGAALDDGSGWTGSEEGSEEGTGGSEGAGGDGGPDAEGVWSPDIEQSFQEALAIYPPCGRRKIILSDEGKMYGRNELIARYIKLRTGKTRTRKQVSSHIQVLARRKSREIQSKLKALNVDQVSKDKAFQTMATMSSAQLISAPSLQAKLGPTGPQVVQASELFQFWSGGSGPPWNVPDVKPFSQTPFTLSLTPPSTDLPGYEPPQALSPLPPPTPSPPAWQARGLGTARLQLVEFSAFVEPPDAVDSYQRHLFVHISQHCPSPGAPPLESVDVRQIYDKFPEKKGGLRELYDRGPPPCLLPGQFWADLNWGPSGEEAGAGGSISSGGFYGVSSQYESLEHMTLTCSSKVCSFGKQVVEKVETERAQLEDGRFVYRLLRSPMCEYLVNFLHKLRQLPERYMMNSVLENFTILQVVTNRDTQELLLCTAYVFEVSTSERGAQHHIYRLVRD

SEQ ID NO: 32148 - protein, 159 aa, Homo sapiens
MAAPGYELKDLSNLKPYVGSGNHPVTAFGWNSIQSELKHLLQARHNSDGQQKQGEPDQSHRHLPSARTPGPVQEAVGQLREPAGIQSSRAAWRNVQDANQTPCSAHPSAKNNCGAPSDPSSNNAEPQRKQCAIGGRLLVFQAGSSNAMLYISEPVPRLL

SEQ ID NO: 32149 - protein, 79 aa, Homo sapiens
MAEGKRLQLAHQETCLPEVDLFGPSVYTNGLVSHRGMDPGKRTMQALKIPPRAMTIKGQPGEMSLTVLLNLMGISSFAA

SEQ ID NO: 32150 - protein, 176 aa, Homo sapiens
MAAAQEIKAAVWCPGADSLRQPAGASGQQGGRTGSTGRSGPGGGWNLKVPSHLLPVLGPGTLEEPGWKLQKIPGWRKQPRARVAAAGVSERDEPPETELRPRPAPSSPHAAPPARLSRWRPSVLAVRVTSGCVGARKKVLGWNVCTGLWRWLSAVLPGKLGTDYPTADAVKEVLLL

SEQ ID NO: 32151 - protein, 121 aa, Homo sapiens
MYHNKQCGMKALGEPTKFVIGFELRGGRNLHRPHLSVHVQQAEGTPHFQGQNLIGIAKLPHIGLINSQSIYGVRPCRADFSAKWQLDLLAYIYLSRTLQCSASRLRGGCMLQEPCIPEDLE

SEQ ID NO: 32152 - protein, 133 aa, Homo sapiens
  misc_feature (1)...(133): Xaa = X or * as defined in Table 2
XVHRYSNNCGNQMRCGTIFDCLKWRICICQQESMLLCKLKKGNETVCGCGLSQVEQGTSTGTPDEAAPLAGRTPDTAESLVEKTPDEAAPLVEGTSDKIQCLGKATSGKFEQSAEEYVRPCVSITAIELCIVQ

SEQ ID NO: 32153 - protein, 190 aa, Homo sapiens
MQTVDADSRHQLSSLQVRGLESPSTIPEKETGPGPGPKPSSPGQRAGAFSESSTEVKELLFFEIFALTSFPGSQFSKQCENGLICLGRTATTESTFAIGFKPNYPLLNRKIETEIENGKKEVTKTHLRSLALRKSAAMLQEVLGHSSCGKELKPSVNNTCMSLEADLSAPAKPLDDCSSKVCLNSDLMRP

SEQ ID NO: 32154 - protein, 312 aa, Homo sapiens
  DOMAIN (167)..(244): ParB-like nuclease domain identified by PFam, accession name ParBc, E-value=0.06, PFam score of 4.7
MSLPSLRCTPRKNSLQKELLWANSGKLSIVNLGLPLKENILRGKKSKDKTNNGHFFDMLRDLLKNVDLKGFEPDVRILLTKYSNSNGSQSPWMEEQIRDAWGSMVLKNVVRETDEVGKDTSLSTPAAPMVDSLIARVGVMARGNAITLPVCGRDVKFTLEVLRGDSVEKTSRVWSGNERDQELLTEDALDDLIPSFLLTGQQTPAFGRRVSGVIEIADGSRRRKAAALTESGVLLPQAQISEKPQGRKGEVESLVQGATPSGCTYTKLTEACSEQVAAIAAEAKYGAQKICSVQHSTTSKRVIVKMKGKGQM

SEQ ID NO: 32155 - protein, 247 aa, Homo sapiens
MWGKVLPGEEDPRDEKKVRPIGSEERLCLAAVQSSKCEVTAFLQVYPTAPKRQRPWRMGHDDDGGFVEKKRGKCGEKKERSDCYCVCVERRRRNMEIMSCFLKLPPEVTVLTFAHVLLTNVKVCAGAGTFPNTRAGSTHTIQKYKDDNATAATFNSWKISQLELRLFPMCMRKQNPTPALTAAVRLSPLPSVLTSHCHHSFPDPDSARKTFQLQYPYPIGSFLLCFFISIHPSKTLIGSAYLCAGTG

SEQ ID NO: 32156 - protein, 238 aa, Homo sapiens
MDDLRLTMGLPPRKPINSGKYQVGNAFNIFNLLNITGIYAGPNSYPCGNWGSGGKAQILILWLLLLLVLTSHCHHSFPDPDSARKTFQLQYPYPIGSFLLCFFISIHPSKTLIGSAYLCAGTRRAVIAQCMLSVKWMLRGKLENSDKKLSGRRLALEDVLLPQAQISEKPQGRKGEVESLVQGATPSGCTYTKLTEACSEQVAAIAAEAKYGAQKICSVQHSTTSKRVIVKMKGKGQM

SEQ ID NO: 32157 - protein, 99 aa, Homo sapiens
MTFGWGFCVKVLFIDDVVFSSNRPIFCSVLEIHSRPFLPGYQVQAEEAVCPIAVLKPCAERILFIRINCSLQSCQTQKFKPVEAVPTATPSPRCSVPGR

SEQ ID NO: 32158 - protein, 220 aa, Homo sapiens
MKWIGGERQEAEIMSEPDLLMDVPLLTKDENQKIRLASLSHLLLPAAIRLEGAHRHRGLCRNHGASICFWKLTVMVEGEGEQTHHRARAGARDSGRWTENADANAKEKSVLKKQPWTWSYQIIRSGSWTGWRSQAAEMQFIAGVFLNREKSPQNSKNSKNSKSRTSEFLVLEPLDSRTYTGGCSLPCQPMTPLALGSQTFGLGLEITLLISLVLRPSDPG

SEQ ID NO: 32159 - protein, 104 aa, Homo sapiens
MEQSRCLWDISGGKFDCAWARVEKFSVLFETIDSEKRTTHTETRKRFVLSNKERVIQTCGVMVLGLCDVFDALQGDEVFRVLLLSPLPAYTAFVEESRSPVVAK

SEQ ID NO: 32160 - protein, 71 aa, Homo sapiens
  misc_feature (1)...(71): Xaa = X or * as defined in Table 2
MWLWEDQGGLLGPFSFLMLMLLLETRNPVNACLLTGSLFVLLGVFSFEPVPSCRALQELKPRDRISAIAHX

SEQ ID NO: 32161 - protein, 320 aa, Homo sapiens
  DOMAIN (140)..(176): PROTEIN PHOSPHODIESTERASE HYDROL domain identified by eMATRIX, accession number PD01922B, p-value=4.930e-12, raw score of 21.83
MWLWEDQGGLLGPFSFLLLVLLLVTRSPVNACLLTGSLFVLLRVFSFEPVPSCRALQVLKPRDRISAIAHRGGSHDAPENTLAAIRQGSPIFSGRPSHFLIRPQGTLPALDRSQCLGISGLEVLYLQKTADMYIVSVRLTLRLHTARNKAAKNGATGVELDIEFTSDGIPVLMHDNTVDRTTDGTGRLCDLTFEQIRKLNPAANHRLRNDFPDEKIPTLREAVAECLNHNLTIFFDVKGHAHKATEALKKMYMEFPQLYNNTFLMQKDFVSPAYLKKWSAKGIQVVGWTVNTFDEKSYYESHLGSSYITDSMVEDCEPHF

SEQ ID NO: 32162 - protein, 160 aa, Homo sapiens
MERLRPLALRIPIPDWLGGRLPLWMCLLPPLCGAGPLRGFLLLPEPGGSGTPVRAGAGAGMWLWEDQGGLLGPFSFLLLVLLLVTRSPVNACLLTGSLFVLLRVFSFEPVPSCRALQVLKPRDRISAIAHRGGSHDAPENTLAAIRQAAKNGATRRGVGH

SEQ ID NO: 32163 - protein, 75 aa, Homo sapiens
RLVLIRAGRGGWVGSVGETMTSSYGHVLERQPALGGRLDSPGNLDTLQAKKNFSVSHLLDLEEAGDMVAAQADEN

SEQ ID NO: 32164 - protein, 158 aa, Homo sapiens
MVRHPSWQSEECRNRNSQGLELSPVTWPLQLQNSVSSTAFRLPNSVTAVPTIISDPQRFITEYHRAPQGCWGSPHKFVSHSHNARAQAQGDPNSVPEPLAGVIGDPARKPDSLKKDRSELYLKRLSGHNQCVGLWRQVLGPSHPASLAPAGEEHSLEL

SEQ ID NO: 32165 - protein, 39 aa, Homo sapiens
  misc_feature (1)...(39): Xaa = X or * as defined in Table 2
MKGNVLTSIDSYDHKVKXXXXXXXXXXXXXXXXXXXXQK

SEQ ID NO: 32166 - protein, 68 aa, Homo sapiens
  misc_feature (1)...(68): Xaa = X or * as defined in Table 2
XHFSRGTDITGQMSENQIRSGLIDEYKCTASGSIVYGDKCFKVLYFEDLTEKLVHCFGEGPWEKASMS

SEQ ID NO: 32167 - protein, 55 aa, Homo sapiens
METLKDKTLQELEELQNDSEAIDQLALESPESSHPYSACSQRMAVEPSSTRQVTA

SEQ ID NO: 32168 - protein, 61 aa, Homo sapiens
MEACRSHHFTEWGAMGHNVPITQVLPHVSWTPAVLTLVSTWGTRKFMVFCKERHKTVSSTS

SEQ ID NO: 32169 - protein, 39 aa, Homo sapiens
MTETGDWLKVCILRPGLVAQACNPSTLGGRGGRITRLTR

SEQ ID NO: 32170 - protein, 111 aa, Homo sapiens
MGFCQADQAGLELLTSGDPPASVSQSTGITVLSLSFFFETESRSVAQAGVQWRDLGSLQRPPPGFTPFSCLSLPSSWDYRRPPPRLANFFVFSVETGFHRVSQDGLDLLTS

SEQ ID NO: 32171 - protein, 43 aa, Homo sapiens
MSSLKSVWVFFFFFFLRQSHSVAQAGVQWHNLGSLQPLPPRFK

SEQ ID NO: 32172 - protein, 77 aa, Homo sapiens
MWIYFWTLNSVPVIYMSTLMSIPHYFDYCCFIVSDIMLPEITFSTFILLLMVALAIRGPLHFRRHFRINLSIATKNA

SEQ ID NO: 32173 - protein, 612 aa, Homo sapiens
  misc_feature (1)...(612): Xaa = X or * as defined in Table 2
MSSEVASRKPWQLPQAVEPADAQKSRIQARPWLSFQGGSACALLGESGGQQHSDSVWDLRPVSTATYESRRLHGLEEVGRSGKNSGASGKENRAEQREVEVAPAVSPCGEEPCCFQISPAEETLELGRLVSPGNCDTLSPRAAGFYACHVRSLIPCRSTSYSKDDSVKPSGTKKEDLDDKEKKDETPAPVYRAKSILESWGCSRNARHQKARSMPLQDQHLALAILLELAVQRGTLSQMLSAILLLLQLWDSRAQETDNERSAQGTSTLLLSLLQTFQSIICNNELAIDLQQTAVVVMAHLEDLATPCRCLCRVAVRRLISLSHNHSRKQQESPAPLSIALDTPVFSAQNAPSCNFRTAAGVKPFFSQNHTITSENPLGPSLGSIPQARFLLMMLSMLTLQHSANNLDLLLNSGTLALTQTALRLIVPKKPESTADEEKIGNEESDLEEACILPHSPINVDKRPIAIKSPKDVDLIPPFNRMLLEVTFGKLYAWTVQNILNVLMDASAKFKELVQSCSSKALRDPLLHLCCLWISDHNQYFLLELDLPAPREGAEVGQLGYMCNEYTTMDFYTKDTEGEVIVRPDTNLPAGKLRTPGGAQVTKGRSGHIKAX

SEQ ID NO: 32174 - protein, 19 aa, Homo sapiens
MAASPDSGGLSLGEPALVE

SEQ ID NO: 32175 - protein, 147 aa, Homo sapiens
  DOMAIN (54)..(69): TRKA POTASSIUM UPTAKE PROTEIN SIGNATURE domain identified by eMATRIX, accession number PR00335E, p-value=9.816e-09, raw score of 14.87
MISFNGRKNRHMEVKYLGYRAVKLSLLNEDRVLDVLATKRVTPRTNADTLWLANLHDEKNLNPCPLNMDSNGALGDGGATRWKEPGDPEKERCLADLNIFPELLNAMAGLSGWGWGTDQNCLEAQVPTIPRLRQARDSQRTREKNKA

SEQ ID NO: 32176 - protein, 49 aa, Homo sapiens
  misc_feature (1)...(49): Xaa = X or * as defined in Table 2
XSTGDTQVNNVWSGPPANCSRPAEEGPDCMGLLPPPIATAASLHERLGQ

SEQ ID NO: 32177 - protein, 87 aa, Homo sapiens
MPKNSFDECSLHGISYGTRRERAKERRGFCGYFCRSCSSVVVRQLGLILLPGDTGRCLVTFVVVMTGGRVMSGDICGWPDGDALGME

SEQ ID NO: 32178 - protein, 23 aa, Homo sapiens
  misc_feature (1)...(23): Xaa = X or * as defined in Table 2
MLAKLLCDQVVGAPIAVSAFYAX

SEQ ID NO: 32179 - protein, 119 aa, Homo sapiens
MLSLFPVLGNAENWGLKEEQAFSSSKLYLQESITTYDRLCHILKPYSFAPNIIIASSASPLGETLEYSNQRLTFSMNIIAIHPVTQTKSPNNIFESFSITPYIQPIATFSFIYLLKSRP

SEQ ID NO: 32180 - protein, 49 aa, Homo sapiens; identical to SEQ ID NO: 32176
  misc_feature (1)...(49): Xaa = X or * as defined in Table 2

SEQ ID NO: 32181 - protein, 224 aa, Homo sapiens
MEGEEEDFQGWRIVLFLKDEQFIKGAQASWNKPEAGNAGARDMSRGEEAQQGPAQAPEPDSAASERLPRGERATRGPGVPCPLCREINLLLSLRMWEQGPPPRPHPNPATPATPATAVALTTGRLSPARGDSGVRLPPKKARFSGNQTGQGPVGHTSPQLPPLAGALGLEASTQSPRNGRSWYQHPAASLAAACKAGLARGPSHPAGHAATGPCPHIHSPVMIS

SEQ ID NO: 32182 - protein, 397 aa, Homo sapiens
MSRGEEAQQGPAQAPEPDSAASERLPRGERATRGPGAHFPAPGTFRAGEGFCGLSFITNSSRSTQGYRPRHKQAHICLTAHQMLGQPVYAGLQESSKQPPQSKERPPNPDIICRAAGPGERQCSGGLERWVNVPWQRTECSCLVGQPEPELCLRQNNTGSEEGPPATTRPQTHLEGSTPGAAARAWGLGLPEAGALLCHCFVNCKMGTINNIHDRKRMKAIAVQNPLVSERLELSVLYKEYAEDDNIYQQKIKDLHKKYSYIRKTRPDGNCFYRAFGFSHLEALLDDSKELQRAPSVALALLASVGGQRQPKGKGEELLEFPVRVASLLPALFSEVSTHMETKLERLSPGMVLLLKLYLTESLTARKMGREPCPLAAVLSQPQAMLEHGGGSALTAF

SEQ ID NO: 32183 - protein, 195 aa, Homo sapiens
MKRIMAQQDRIQQEIAVQNPLVSERLELSVLYKEYAEDDNIYQQKIKDLHKKYSYIRKTRPDGNCFYRAFGFSHLEALLDDSKEFAAVRRVGTGHRGRFKAVSAKSKEDLVSQGFTEFTIEDFHNTFMDLIEQVEKQTSVADMLASFNDQSTSDYLVVYLRLLTSGLPAAREQVLRGTSSKGGRDCPKEFCQAGS

SEQ ID NO: 32184 - protein, 177 aa, Homo sapiens
MAAEEPQQQNQYPLGSDSEGVNCLAYDEAIMAQQDRIQQEIAVQNPLVSERLELSVLYKEYAEDDNIYQQKIQGPPQKVLQHLRLTLWSTCGCFTSGYLQRESKFFEHFIEGGRTVKEFCQQEVGAHVARRATTFTSLALAQGLNGAIQGEDMDRGEGGTTNPHIFPEGSEPKKSAL

SEQ ID NO: 32185 - protein, 141 aa, Homo sapiens
MALVLVGFSQLLYGRLFYQQVSVTNGTSPFAYDYDLTHIVAAYQERNGGSQVEPIQPLLRTFKVSGGNRDKQNWNPCDENVKTRECSTMGANVLPRICLFRPDLQTRDHPHPSSIPWSSRLVMVKCHHYPTTGLAPKSKMP

SEQ ID NO: 32186 - protein, 83 aa, Homo sapiens
MAVFREERMVELGRAVGMSILMCEKPLKVLNGAKGEKDKEDWLGCQLEEIAKLLDKEVRLSTEGDKEANNNKKQGKTPSFKEN

SEQ ID NO: 32187 - protein, 108 aa, Homo sapiens
  misc_feature (1)...(108): Xaa = X or * as defined in Table 2
MGFGTVGQTVKSPDKLRKVIYRRKKVHHPFPNPCYRKKQSPGSGGCDMANKENELACAGHLPEKLHHDSRTYLVNSSDSGSSQTESPSSKYSGFFSEAFSAYKAKFFX

SEQ ID NO: 32188 - protein, 262 aa, Homo sapiens
MVRDKTLLHSNVIQTQECIHYISLESGDLPTSTESTKTEDPIEKQQESPLDSNASNDGSKNSYFIMMKRLIKDHGLAMSSSLLKNHLSPRARDHNDNNQLKKNQDQANQRRTSKLHRGQHVITIKVKRKKTRKKTKDENTKRMLMGKEAELKTLQTQVPWSNMGQVGWVEPLRPPEGSEEEKFQECSHLRDRSGDRTPEHHQPVLSPLLLAVCLMPVPGTLRREQTPCGGACRQSPSQGREARGLLQVQGKADALMVGEEAA

SEQ ID NO: 32189 - protein, 394 aa, Homo sapiens
MKLLMTFTRWVSMAWIKQMLHGSEEETTKRQKVQLTYRSRFTELTHAIENNDRCANIIGRGSCHLQIMKLNLEKQSRKKKRDGWGKSVPPRLFCISEEKVSDFAQCPLFSFQTRGFRGSKDLRVNSTITQMGTKIQRGNAFFQAGSQSAELGRVLVTLYVAGPKDPYLIQKRLQCGCLFSSVGTGKQSVECWPVNARGASTNCPQDVVRAAFWGGDWRAGEWKAKDPRPRTGSNPKRKEEETQGLPAARPQTTQSRTGEMPLMSTLFPTPPKCHPSGSTRRGLRALTKGVMSKINWDLFWYLSPVSPGGFKEAFPSSSRQDRTSHLSFPTAHSSRTTLSHCSMTATYQSPRNEKELQCHLLVHAPEWVNLFFSLFRQHVYLLKRRAEAQYGTGG

SEQ ID NO: 32190 - protein, 114 aa, Homo sapiens
MEQNRKSRNKAKYLQPTDLQQSKQKHKAAGHTAIDLCLTSPSSPCQQPCSDINHQCLHVPMARTRGKGVGGKIKISSYFGTGDAHTQKAKRHSIFKEAHKKQCIQKWRELEEWT

SEQ ID NO: 32191 - protein, 1007 aa, Homo sapiens
  DOMAIN (10)..(50): G-protein coupled receptors proteins domain identified by eMATRIX, accession number BL00237A, p-value=7.097e-15, raw score of 27.68
  DOMAIN (218)..(491): Reverse transcriptase domain identified by PFam, accession name rvt, E-value=8.9e-86, PFam score of 298.4
MITDFFSQRKVISFKGCLVQIFLLHFFGGSEMVILIAMGFDRYIAICKPLHYTTIMCGNACVGIMAVAWGIGFLHSVSQLAFAVHLPFCGPNEVDSFYCDLPRVIKLACTDTYRLDIMVIANSEIQTTIREYYKHLYANKLENLEEMDKFLDTYTLPRLNQEEVESLNRPITEAEIVAIINSLPTKKSPGPDGFTAEFYQRYKEELVPFLLKLFQSIEKEGVLPNSFYEASIILIPKPGRDTTKKENFRPISLMNIDAKILNKILAKRIQQHIKKLIHQDQVGFIPGMQGWFNIRKSINVIQHINRAKDKNHMIISIDAEKAFDKIQQPFMLKTLNKLGIDGTYFKIIRAIYDKPTANIILNGQKLEAFPLKTGTRQGCPLSPLLFNIVLEVLARAIRQEKEIKGIQLGKEEVKLSLFADDMIVYLENPIVSAQNLPKLISNFSKVSGYKINVQKSQAFLYTNNRQTESQTMSELPFTIASKRIKYLGIQLTRDVKDLFKENYKSLLKEIKEDTKKWKNMPCSWVGRINIVKMAILPKVIYRFNAIPIKLPMTFFTELEKTTLKFIWNQKRARIAKSILSQKNKAGGITLPDFKLYDKATVTKTAWYWYQNRDIDQWNRTEPSEIMPHIYNYLIFDKPEKNKQWGKDSLFNKWCWENWLAICRKLKLDPFLIPYTKINSRWIKDLNVRPQTIKTLEENLGFTIQDIGMGKDFMSKTPREALLCIVGENTKWSKDPSALSTPPTSCSRPQRRNKSVSHGSYPHPLLFTMNDRVNSVKTTILPKATYKFNAIPIKIPPSFFTELEKTRLKFTWNQKRAHIAKARLSKKNKSRGITLLDFKLYYKAIVTKTAWYWYKNRHIDQWNRIENPEIKPNTFSQLIFDKASKNIKWGKDTLFNKWCWYNWQATCRRMQLDPHLSPYKQINSRWFTDLNLRPETIKILEDKIGKTLLDIGLGKDFTIKNPKANAIKTVINSWDLIKLKSLLHGKRNSRHSKQTTHRVGENLHSLYI

SEQ ID NO: 32192 - protein, 527 aa, Homo sapiens
MVNETTFTFTSPWLEGAGVYGELCCWRFSGVVELQEKGEVGRDSVLMEDRSRASSWVRNCRVILRCFTVTHLCHWPPLAKRPGRFDKQIEPPLGYKSAQVNQALAPSDFSLKVKWLGKWKQILSPSASFKTLIPTLNRQSFLMPFPAINYYCFTSAPAVDVLANICEGQDTLWENVFLDRILLAGALKHCCIRQHYQIFLQMSLAFERRVSPTEPACSQRALSVVDETLSRLTDRQFPPAPEPEPAVEPEEELAESLGTSVSVESAKPLANLGSFTRVGGSRPQAVMLLHLLLISCCVARFLTGHRPVCGFGVGDPYPRAFRQSWLISQGALSHRALTASFSAQGSGQPLTVCQYMGRPTSAQPNLGNGWQGRQGDARPEDGALGLFTLRHIITERWIRSYLRSAFSQSSLATQPPRYKYTPATCATSYSTVRPPEAPGQIPPGSKDIRRSPGHKGVPASTLQDASTPPLKPMLPASSGDSSKAGSSGLGGSGWTHCHALSSTVTQAPFLYLENISELKHSTHILEP

SEQ ID NO: 32193 - protein, 318 aa, Homo sapiens
MDTEIGKMQPKLRNCWSHRKLEEQSWLISQGALSHRALTASFSAQGSGQPLTVCQYMGRPTSAQPNLGNGWQGRQPHRQQLQCSSPAAPVDKSGNDPGTACFGSYKVKGLGHILSKVPFKCPEIPQKSQIKRCKNRSQCHDCESSPTTWNCESIKPLSFINYPVSGDARPEDGALGLFTLRHIITERWIRSYLRSAFSQSSLATQPPRYKYTPATCATSYSTVRPPEAPGQIPPGSKDIRRSPGHKGVPASTLQDASTPPLKPMLPASSGDSSKAGSSGLGGSGWTHCHALSSTVTQAPFLYLENISELKHSTHILEP

SEQ ID NO: 32194 - protein, 522 aa, Homo sapiens
VSVERCVTKNLKPLWLDSSCQGDHWDGAKSCGHSHPDERNLGPISRIQSKDAGGIFPLLSMASLWQTSSSFAQESQLSTAQDFKRFHPALVVVAETPGGSDDGGDSSDDGGSDNGGGGRYGSSDGKGGVNSSDVNVQGGGSGGSNGESGDNYEECEGACDSYEEGGDGDDGGDGDDLGSSDNGDGSRDSWMAVVMMIEVVVVIVLVGDGVGRGSGGDVRGVDDFRNGGSGISGETCGVRTSVITMAMEWCIESGLRNSSQAMSNEKRPMCQEKQQRKQTTSSTEYEFCALTPEYLSPSKLGNHQEYDLHLNTKKGTTQNPRAVQLQRVRSVKCLQLIFLQMSLAFERRVSPTEPACSQRALSVVDETLSRLTDRQFPPAPEPEPAVEPEEELAESLGTSVSVESAKPLANLGSFTRVGGSRPQAVMLLHLLLISCCVARFLTGHRPVCGFGVGDPYPRAFRTRATNRRCEYETELLRAMGMAGSQNRRGQVAALNYQKQCGHNYYNKQQRQSGGLEDRPTER

SEQ ID NO: 32195 - protein, 180 aa, Homo sapiens
MSNEKRPMCQEKQQRKQTTSSTEYEFCALTPEYLSPSKLGNHQEYDLHLNTKKGTTQNPRAVQLQRVRSVKCLQLSQPIYIYKNPPEILIAMELNLQINLERMGTLTVLSVPIHEYDASTPPLKPMLPASSGDSSKAGSSGLGGSGWTHCHALSSTVTQAPFLYLENISELKHSTHILEP

SEQ ID NO: 32196 - protein, 204 aa, Homo sapiens
MRKRRGFESRELKRMVLYQQEPGPRLVSGFWKWGEEDGFSFGHVEKQVLKMLKAVLKKSREGGKGGKKEAAKDVKVPPLPRCAGSLTPVLELPANSSVHYRPLLLEQRKKTMKMPLWGISVSHLDEFTLQLLCLNHRGQSYSTVHESGIFEKPPRGFRPGHEFSQLLSLQLSGEETDLKAELGCTMMPARSGAGCPLTRQTCKS

SEQ ID NO: 32197 - protein, 105 aa, Homo sapiens
MGGENPQQNKHRDEYPTTGQQGENKKVNIYDLLYFRYKDEQCRIPSLLERTVEEMKNSTVTSKGGLRSGKEGSAATASIEGGKPEEYGVPEATRRKCLKEAKNGQ

SEQ ID NO: 32198 - protein, 52 aa, Homo sapiens
  misc_feature (1)...(52): Xaa = X or * as defined in Table 2
XVQETWGTAAFTEPRRRSLVYLQEPFALGIADVLCTGTKGSMPFGMKNENFS

SEQ ID NO: 32199 - protein, 105 aa, Homo sapiens
MLQPRNLKLRELKAFYPKDKIWPPTKMDGTVEGSGNVLSGETKICLVGQVAAESPLQVAVTQSPRIKHHLSLQGTPAALSDQMLLHRCLAGPEYVASRQTSFRKN

SEQ ID NO: 32200 - protein, 56 aa, Homo sapiens
MCMEKLENDYVWPGKGKSKEDKRREQNGGIRPLSVLSLLQALMRQLLLEVAVGLVA

SEQ ID NO: 32201 - protein, 56 aa, Homo sapiens; identical to SEQ ID NO: 32200

SEQ ID NO: 32202 - protein, 265 aa, Homo sapiens
MAAFEKQLPSSSTLTYFPRLKMLMIVKNYSFLSAFMEKSRVLNQIECSGTLNTRLWGGNRQQRSPTLLTFGTKTVKHVCTGDDEGSDIISGDQHGWKTTGWTTEDHTVLSVQDFKDCIMEAAFNHSLFRQGSALKNPLVPTPAELFDYTSALQFFDMLRDLLKNVDLKGFEPDVRILLTKYSNSNGSQSPWMEEQIRDAWGSMVLKNVVRETDEVGKGQIRMRTVFEQAIDQRSSTGAWRNALSIWEPVCNEIFDRLIKPRWEIR

SEQ ID NO: 32203 - protein, 373 aa, Homo sapiens
MWVGTAATCLLVGVSSACPALGAASWRHRLGQKEEALSADQLIRGLSCVGMPPFSGDGCHPRDSQPGLPAVHSKVCRCASLSSCDDPCAILHKWTINGEPSGRAPPPAPWCLVPYHPKAEECGHTVLDWQAAPPAACAKVCSFTLEASETMNPPEGKNAEHVRTSEEANSGHITFKNCNSHWTLNTRLWGGNRQQRSPTLLTFGTKTVKHVCTGDDEGSDIISGDQHGWKTTGWTTEDHTVLSVQDFKDCIMEAAFKTIAKLASPSPYLLIWFMIHALKNPRVVIVPLTVFHTQKAIQNGDAMNGFMLNSLPNWVLQLCPWTCYLSGHQPQNNNSPELQVKIWTRDQDSTNQMVFESASDKKKGTCQNPFWQI

SEQ ID NO: 32204 - protein, 181 aa, Homo sapiens
MEDSSTDTEKEEEEEKDEKDQEPIYAIVPTINIQDERFVDLSETPAFIFLHERARVEVLEPLPSFQGMYGNARMSRQKSDARVEPSWRTSTMAVQGKNVGLEPPHRVPTGALPSGAVRRGPSSSRPQNDRSTNSLHRAPGNATGNQCQPMKAGAGAVLCRATGVELPKALRAHPCVSVAWM

SEQ ID NO: 32205 - protein, 48 aa, Homo sapiens
MWMNLVRQGSHVTGAKSDTGLEDHTNFKPPRSRRQHQAPWKQINPWQN

SEQ ID NO: 32206 - protein, 166 aa, Homo sapiens
VRSPAKKVSGPSAYTGNESVNRQITTASYEKTVLWKRRSLCATKRHLLAASCPLKPRKSWPSQGGAFKWEHLDEALMGNGGGSPRAEQQGMQAQDTQGLHVTPRSSRDPPAASKRGVSASATHVRSPAKKVSGPSAYTGNESVNRQITTASYEKTVLWKRRSLCAT

SEQ ID NO: 32207 - protein, 364 aa, Homo sapiens
MGTPDSGMEEKTTAKYKGEIPYEWSCLITELPRSSLLTMKMYGKRVLNNHLPADTGELSAPCQAVGQHLPAVWSPPPPPYPLPCSSTPLQLNCARAATAATVRKLGELYSSLEEPECKQSSSECTQKPGSRRQSVGRFVLNADRQPALGSGVLSNLRVQSTAPFTGYVWMSNSDEQRGMVGKRELKRTFLPFTKTSIHRSKGQYHKQRRGQALVWKAPGTANLFPFTFPQIFPSAGSQCVPFLVLSAEGFTGHADNHHNLVDWPPSFLLFTQRPPKQWLQTRKPHGFNSSGPLRDKVQALLTISKLEFQNATIGRNPMGPQFSIFTALSLRLTQAVSMALGEWVHGLADFKNEAVDLHSERYSS

SEQ ID NO: 32208 - protein, 102 aa, Homo sapiens
MSLKAQITHAYCLWFKNAFKRFSTPRQAQVFFALIPSKPTTFQLGALWAIMNMLQCCRDFIYGQFMARFWGACSQHSTYAPSCRGFILGSLAKNSRNFAHLG

SEQ ID NO: 32209 - protein, 3 aa, Homo sapiens
MPP

SEQ ID NO: 32210 - protein, 75 aa, Homo sapiens
MNPKLWRRSRTGKAAFPWCLIIAGTASLIIQPHFKGVRPCRDACLGPSPLAASPAFLGKEQTITDTELRVTLTVE

SEQ ID NO: 32211 - protein, 102 aa, Homo sapiens
MQEGRLHWSFTLSGKSRFSGEGASTPTISLRVSTPSPPFWGARNPPTPSPSLLVASPAFVEEGQVPQPCISAPQSLISVAQPLISLRPNPLFPCPDLSSCRI

SEQ ID NO: 32212 - protein, 191 aa, Homo sapiens
  DOMAIN (170)..(181): RNase H domain identified by eMATRIX, accession number PF00075B, p-value=9.182e-13, raw score of 12.56
MDMKRGDSDEGSERKEKSYRESIHLLREYTNNCKQNVGKNMDYKGHSETKETCFIHGPKTPAPVTDWEDSLPLVFNHCRDASLFTHVSKHALKRLKPLITRLLQHGLLKPINSPYNSPILPVLKPDKPYKLVQDLRLSNQIVLPIHPVVPNPYTLLSSIPSSTTHYSVLDLKDAFFTIPLHPLSQPLFAFT

SEQ ID NO: 32213 - protein, 131 aa, Homo sapiens
MQDENHETKETRFVRGPKTPVPVTDWEGSLPLVFNHCRDASLIIHPHFKGVRPRRDACLGPSPLAASPTFLGEWQELATHARNLAIGPRNASSPGFLLSRVPSVSDPTENRTVQLTWQPLPEPLELWPKAL

SEQ ID NO: 32214 - protein, 294 aa, Homo sapiens
  DOMAIN (47)..(65): C-type lectin domain proteins domain identified by eMATRIX, accession number BL00615A, p-value=6.400e-15, raw score of 16.68
  DOMAIN (62)..(176): Lectin C-type domain identified by PFam, accession name lectin_c, E-value=0.00042, PFam score of 19.4
MAQTSSYFMLISCLMFLSQSQGQEAQTELPQARISCPEGTNAYRSYCYYFNEDRETWVDADLYCQNMNSGNLVSVLTQAEGAFVASLIKESGTDDFNVWIGLHDPKKDHNSSSARKQNWIDNEFDELTEVGFRRWVITNPSELKEHVLTQCKKAKNLDKRLQELFHVTQKERDSVCLGESKEKEQELLPGNTENSSRSCPRTSRQYLYEYARTTVLLGLETKETRFIRGPKTPAPVTDWEGSLPLVFNHCRDGLSDHSATFQGCQTMQGCLPWSFTLSGKSRFSGEGASCSLPG

SEQ ID NO: 32215 - protein, 175 aa, Homo sapiens
MIKHQGKAAFPVRDRRQSFVSTDKTCLLCLSQKMKGIEIKRRERLKSGKEKVWLRDRERLEKRTILRASVFKGEKPAAGERGKVWSCDSIHVLQEKGSRPQISVLCILNHRKYSPRFSVWSLKPPSMKLEGSKVHKVESYTKTEEEFKRYWAVTKCDKCPPNHQRPLLPLPKDTS

SEQ ID NO: 32216 - protein, 119 aa, Homo sapiens
  misc_feature (1)...(119): Xaa = X or * as defined in Table 2
MLLTQGLFGGLFTRTCMKFGAVTRIGDLPWEINPLSSCSLLREKDPPTTSGPQTDQPKKHLTNFKSGLQFHSMTSPPPPAQQFPLKKVAGAKGIVKRLKTDTARLPWKPPDHHRRRASX

SEQ ID NO: 32217 - protein, 240 aa, Homo sapiens
  DOMAIN (219)..(230): RNase H domain identified by eMATRIX, accession number PF00075B, p-value=1.346e-09, raw score of 12.56
MEVHKHPFNTLALRHESGCELVWAEKHRNQIFPFPKSTASPKQWDTGRHNSDAKQQEPGGREERNTMEMETKETHFIRGPKTLASVTDWEGSLPLVFNHCRGTSLIIHPRFKGVRPRRDACLGPSPLAASPAFLGKGQHALKGLKPVITRLLQHGLLKPINSPFPSPILPVLKPDKAYKLVQNLRLINQIVLPIHPVVPNPYTLLSSIPPSTTHYSVLDLKHAFFTIPLHPSSQPLFAFT

SEQ ID NO: 32218 - protein, 141 aa, Homo sapiens
MNTLAIGKSGRNGFNNGAGNVAENLLHDERSECGTSSFHRIAILLVKRKLWNLSGAQTLTHTSDSKCLFQTMGTFAKLIQQQRLAAKPGTYRAQNYWNKAGRRQEAPKAASPSPWCQVLLSAVRFTLAFITKTLTELTSGT

SEQ ID NO: 32219 - protein, 59 aa, Homo sapiens
MQLDSLCSKLTHTGCFVRGIILCLQKGIIIRLNIPRNPKRQALQTQVEMRPHQSILLIQ

SEQ ID NO: 32220 - protein, 195 aa, Homo sapiens
MRLRVPGEVKELEGDQRGWRLVSSMDITYLQECGNQLYEWLPRWPCSSGKRATFTHPLCICVLISSSYKDTSHTGLGPTPKTSFNLNYLFKDLISKYSPHVEPRLKIPLASSKHAGRPEIIALNRASQPTVQMVKLLLMCPPSIGYRMAGAVDMVIPGGLHFPEVTALGSPSSSRSFSGVRAAVAPTWFEPKPRP

SEQ ID NO: 32221 - protein, 307 aa, Homo sapiens
  DOMAIN (76)..(108): Ank repeat domain identified by PFam, accession name ank, E- value=0.00018, PFam score of 28.3
MSTRVRIPNPGLRTAEDPQGSCQGRRRGGGALPGAQEWRPRRPEQAAQIAGAQPREEACTVILLEHGTNPNLKDIYRNTALHYAVYSESTSLAEKLHFHGANIEALDKVLSISFLSKILMSSLKTCGRDAEDYTISHHLTKIQQQILERKKKILKKEKRGKASESEFLNSLGGPTLDKKIRNVEISDESAVSILHELCVDSLPALDDEVLSVATKCVPKKVSEPLRGPSHGKGNRIVNGKGEGPPAKHPSLKPSTEMEDPAVKGAVQRKNVQTLRAEKALPVASEEEQQRRERSEKKQPQLILEHAL

SEQ ID NO: 32222 - protein, 336 aa, Homo sapiens
MPGRQRLSLAVGQAAKGRELAVHPIPVSTENSTTMAPERTLRPVRQSAQQRHQGENLLLDTIPVTMKSQPRRPLRSWKAKSLQPLKWAGDALDPEDIRYQARQLRPASELQLQSRCGAPAAIARILRPDPQAAKSGDGPRQQPLSFIRVDTECPVPGPRIQRDVQEERTLSPGSGFREPGSNRRAGARPTAFQVSLGLRGRRLRVSLLKAVVDRAGSRIVEGQTAQGSIEHVYTGSGYRIRDSELQKIHRAAVKGDAAGVERCLARRSGDLDALDKQHSPWDGALQGTGHPRSGGAKRTLSCFPSLIIPWLEQLENLSDLTHKVKHTQCCFSNEHV

SEQ ID NO: 32223 - protein, 217 aa, Homo sapiens
MNDFEARPIETFQTKIQRVGKTQNIQDYGIIEEEERMEQKNVRSNNVWELAKISDRHQLRHQSSRPLDYGTYTIGFPGSQAFRLGLCLTSGSFGSPACRWQIMELPGLHNKVSPSALCPSVEFFLLKRQGLRLLWTHMDSLPVTCVTRISATANIFGPHDSDTFLVAIELQTILTNSALTGSKEPRSTRPRPPLCQQEAVTENRSHPFWMTDLHPKI

SEQ ID NO: 32224 - protein, 165 aa, Homo sapiens
MEEATTKSCQVRELFLTYQSVNKRHLFPSSSFSEGVLGGGTAGDSRSPESVQGWPGEPPSLGEVTLQTGREPEGDHPGELRAGRKGQGTATRTQSDQVNSRLPPHPNRRPPTTYADISFIASCVSPLQRVFIALESCSCCSLLPLFTFLRSLVARLLAHFPTYYG

SEQ ID NO: 32225 - protein, 82 aa, Homo sapiens
MAEGEGEAGTSYMAGAGGRESKGGGAPHTFKQPDLVKTHSLSLLSQERTLSNETQEEKLKTPPLNFGKYFGDTCALLSKEFL

SEQ ID NO: 32226 - protein, 92 aa, Homo sapiens
MQILEPHSSLPESETLGAIHPSIICALTSPPGDPDSPKGGKPPAEGVGGEAEGDSEEERKGDDFVVTRKPEEDVALVAGGGGVVGRKGCGRR

SEQ ID NO: 32227 - protein, 31 aa, Homo sapiens
MFPLYPTYYRAEKRGYFQTISLKCSHGNIYA

SEQ ID NO: 32228 - protein, 47 aa, Homo sapiens
  misc_feature (1)...(47): Xaa = X or * as defined in Table 2
XCLKPWQSSGELKQSCSEEMGWSLEENLAQGLPRDTQKPQRFIGIGI

SEQ ID NO: 32229 - protein, 130 aa, Homo sapiens
  misc_feature (1)...(130): Xaa = X or * as defined in Table 2
MEKGMSSGEGLPSRSSQVSAGKITAKELETKQSYKEKRGGFVLVHADWTTREALCESNPEYLNKSKKPETRFNPIFSQVLLQGGAGYHSESKAKEYKHVCKRACQKAIEKLQAGALATDAVTAALVELEX

SEQ ID NO: 32230 - protein, 102 aa, Homo sapiens
KAIGLPLAPSPGQKGIVAHLLSKYGAFKESVVITTLNSYSVAFRISMKTNHSQRCQRCQFAIDSTGQRLRIADFGAAPGWHQKELVQESFRDNSGDNCIYGT

SEQ ID NO: 32231 - protein, 1375 aa, Homo sapiens
  DOMAIN (1315)..(1346): Protein kinases ATP-binding region proteins domain identified by eMATRIX, accession number BL00107A, p-value=1.818e-15, raw score of 18.39
  DOMAIN (1199)..(1375): Eukaryotic protein kinase domain identified by PFam, accession name pkinase, E-value=5.4e-51, PFam score of 182.8
AGSGGRERADWRRRQLRKVRSVELDQLPEQPLFLAASPPASSTSPSPEPADAAGSGTGFQPVAVPPPHGAASRRGAHLTESVAAPDSGASSPAAAEPGEKRAPAAEPSPAAAPAGREMENKETLKGLHKMDDRPEERMIREKLKATCMPAWKHEWLERRNRRGPVVVKPIPVKGDGSEMNHLAAESPGEVQASAASPASKGRRSPSPGNSPSGRTVKSESPGVRRKRVSPVPFQSGRITPPRRAPSPDGFSPYSPEETNRRVNKVMRARLYLLQQIGPNSFLIGGDSPDNKYRVFIGPQNCSCAHGTFCIHLLFVMLRVFQLEPSDPMLWRKTLKNFEVESLFQKYHSRRSSRIKAPSRNTIQKFVSRMSNSHTLSSSSTSTSSSENSIKDEEEQMCPICLLGMLDEESLTVCEDGCRNKLHHHCMSIWAEECRRNREPLICPLCRSKWRSHDFYSHELSSPVDSPSSLRAAQQQTVQQQPLAGSRRNQESNFNLTHYGTQQIPPAYKDLAEPWIQVFGMELVGCLFSRNWNVREMALRRLSHDVSGALLLANGESTGNSGGSSGSSPSGGATSGSSQTSISGDVVEACCSVLSMVCADPVYKVYVAALKTLRAMLVYTPCHSLAERIKLQRLLQPVVDTILVKCADANSRTSQLSISTLLELCKGQAGELAVGREILKAGSIGIGGVDYVLNCILGNQTESNNWQELLGRLCLIDRLLLEFPAEFYPHIVSTDVSQAEPVEIRYKKLLSLLTFALQSIDNSHSMVGKLSRRIYLSSARMVTTVPHVFSKLLEMLSVSSVSTHFTRMRRRLMAYADEVEIAEAIQLGVEDTLQRQQHNSFCRHLFPTTIWKPQRTVPLECTVHLEKTGKGLCATKLSASSEDISERLARISVGPSSSTTTTTTTTEQPKPMVQTKGRPHSQCLNSSPLSHHSQLMFPALSTPSSSTPSVPAGTATDVSKHRLQGFIPCRIPSASPQTQRKFSLQFHRNCPENKDSDKLSPVFTQSRPLPSSNIHRPKPSRPTPGNTSKQGDPSKNSMTLDLNSSSKCDDSFGLSSNSSNCCYTSDETVFTPVEEKCRLDVNTELNSSIEDLLEASMPSSDTTVTFKSEVAVLSPEKAENDDTYKDDVNHNQKCKEKMEAEEEEALAIAMAMSASQVALPIVPQLQVENGEDIIIIQQDTPETLPGHTKAKQPYREDTEWLKGQQIGLGAFSSCYQAQDVGTGTLMAVKQVTYVRNTSSEQEEVVEALREEIRMMSHLNHPNIIRMLGATCEKSNYNLFIEWMAGGSVAHLLSKYGAFKESVVINYTEQLLRGLSYLHENQIIHRDVKGANLLIDSTGQRLRIADFGAAARLASKGTGAGEFQGQLLGTIAFMAPE

SEQ ID NO: 32232 - protein, 79 aa, Homo sapiens
MSSIDLISIEMGSLRPCWLWTALHDKTLAGVRGLQAGARACGKHVGITSKQKEPLSITVEVRRTITKAPGQERYILCLK

SEQ ID NO: 32233 - protein, 107 aa, Homo sapiens
MSSIDLISIEMGSLRPCWLWTALHDKTLAGVRGLQAGARACGKHVGITSKQKEPLSITVEVRRTITKAPGQAVALFLVNCLLGPKVAHPFLWDSAEHRGQRLKAPPS

SEQ ID NO: 32234 - protein, 68 aa, Homo sapiens
MSDSTWLTSEIHNPLAVGQYVNNCSNDRAANVCYQEFDVPAVFPIELKQYLPNIAYSYDKQSPLRCVV

SEQ ID NO: 32235 - protein, 29 aa, Homo sapiens
MGKVSIHYPSTDKSQTYLHNFWVPGLKEL

SEQ ID NO: 32236 - protein, 79 aa, Homo sapiens
MCKGIQFVLFQLGLCLLRIMILTPLLRCWSMTMMMKELKLWPLGLAGNHLQASHMSFFFAWNTLHGTGLLRLQASAEDC

SEQ ID NO: 32237 - protein, 53 aa, Homo sapiens
MVGFGLGTLRYVPEESKDKVISDEDVLGTLLKVFQALFLNDFNKQSEILKKKK

SEQ ID NO: 32238 - protein, 82 aa, Homo sapiens
  DOMAIN (44)..(78): PROTEIN TRANSCRIPTION REGULATION NUCLEAR domain identified by eMATRIX, accession number PD02411, p-value=5.792e-09, raw score of 21.89
KFITLWLWGQYVNNCSQWTGAANVCYQEFDVPAVFPIELKQYLPNIAYSYDKQSPLRCVVLVALRDINQGEELFSNYYTIVS

SEQ ID NO: 32239 - protein, 33 aa, Homo sapiens
MPGRLLRGLWQRWRRYKYRFVPWIALNLSHNPS

SEQ ID NO: 32240 - protein, 778 aa, Homo sapiens
MGGSRFGLGASVRFELAYAAGEEIGFGVGAPGPQGRTRCSEREFVPEKGVTFRVVWGFGEPVGSLSSEDHDFDPTAEMLVHDYDDERTLEEEEMMDEGKNFSSEIEDLEKVQQNTQEEEEKNPYTRDKDSTVYLQFSIVTSAESVFMPWLEQEGTMPLEDLLAFYGYEPTIPAVANSSANSSPSELADELPDMTLDKRWRRYKYRFVPWIALNLSHNPRTLRYVPEESKDKVISDEDVLGTLLKVFQALFLNDFNKQSEILTMLPESVKSKYQDLLAVGTSRVYQKYEPIFFQSIGNPFIFRCLDGVLIDGNDKGISKVVYRSCNGRDRLGPLEMSDSTWLTSEIHNPLAVGQYVNNCSNDRAANVCYQEFDVPAVFPIELKQYLPNIAYSYDKQRANEQRRAQSPDGAPEPIAAAAATAAATKPPCKFLSPGSFLHVYRDLAWCSTSHFPKKPPDASPTHSGRGPALSVIRCRNGGSESQNGGHVAEEEIQARKETQKMQTQRKRPCEEAVRGQLPASQGERPQRNPALLTPSSWTSTLQSYTTQEERPKRKRQKEHTKKRRPPPTHPTTTTHENTQGQQQPQDKEQKKTEHRNREKSNARQARQTRHNTSNKRDTTKKSIERTQQNTHQSRENKTATNTQKKKKTKRGKKKEGTRNAETTKTNQADAGSDEHAEQTTERGRNERREQEREDRSTKSERAHKEPKGKHAKKNNTKDQTKESKPEQIRDNKKKERSESRSQNRHDTGTREQAKPGKENRKKAKRKTDTRSNTRDRANN

SEQ ID NO: 32241 - protein, 121 aa, Homo sapiens
MFSFILRPYAAKRSIVCVSLFLFPEVCLWKIFKDRGSDYHADLLSYLQDGREVHDFELIHLRDMISFPKWAAFSEHQQRSIRENMESTREETAKDSVQNLQGKWNICDQFIPELTDLDEVA

SEQ ID NO: 32242 - protein, 33 aa, Homo sapiens
  misc_feature (1)...(33): Xaa = X or * as defined in Table 2
MREGNEVACSAGGAAVTMSSQHSAAREWVHRSX

SEQ ID NO: 32243 - protein, 35 aa, Homo sapiens
MLVFIHGVQCGMRKSHYLASPLPQRDQFHVRSQKC

SEQ ID NO: 32244 - protein, 80 aa, Homo sapiens [sequence omitted]

SEQ ID NO: 32245 - protein, 173 aa, Homo sapiens
MVTGSTGGKLHQSQAACRPALSCRVLKALAQTRGHSPEPPDLPMGPLEPWVLEFVFPKCRSPGRGCCRTSADRVRPRPLQATRQGHRGEAPQATESQSCQELTLRGVCPSQACSPPSMALNSSQEECSSKRRPLATKGDEQAKPQFNIDLLATSMGSTFSDQHFQDIMWNWSL

SEQ ID NO: 32246 - protein, 62 aa, Homo sapiens
MHSMLLAQWLSHGKGSAMTPWQLSRGRQEGRLAERKERSVLASVAHGPNQRILKFMVAFPRG

SEQ ID NO: 32247 - protein, 74 aa, Homo sapiens
  misc_feature (1)...(74): Xaa = X or * as defined in Table 2
MHDVKNTNILIKGFATXXXXXXXXXXXXXXXXXXXXXXXXXXXXXXXXXXXXXXXXXRXXXXXWGQKNFFWGGV

SEQ ID NO: 32248 - protein, 167 aa, Homo sapiens
  DOMAIN (67)..(107): Alpha-lactalbumin / lysozyme C proteins domain identified by eMATRIX, accession number BL00128B, p-value=1.000e-40, raw score of 19.94
  DOMAIN (19)..(109): C-type lysozyme/alpha-lactalbumin family domain identified by PFam, accession name lys, E-value=4.2e-66, PFam score of 233.0
MKALIVLGLVLLSVTVQGKVFERCELARTLKRLGMDGYRGISLANWMCLAKWESGYNTRATNYNAGDRSTDYGIFQINSRYWCNDGKTPGAVNACHLSCSALLQDNIADCCSLCKKGLSVIHKALEHGWHGEIVVKTEMSVSMFKVVECNSRIFLLQLILSLSQLRE

SEQ ID NO: 32249 - protein, 173 aa, Homo sapiens
MVTGSTGGKLHQSQAACRPALSCRVLKALAQTRGHSPEPPDLPMGPLEPWVLEFVFPKCRSPGRGCCRTTADRVRPRPLQATRQGHRGEAPQATESQSCQELTLRGVCPSQACSPPSMALNSSQEECSSKRRPLATKGDEQAKPQFNIDLLATSMGSTFSDQHFQDIMWNWSL

SEQ ID NO: 32250 - protein, 169 aa, Homo sapiens
MPRLIESMECGGPTVILKLLDMHSGVEQACSNMRLLKGVQRKSHLCNKPKMQHISNRPSLRAQTQIKARNFSTVWRLEKGYTRQQLSHESTLNKRDRVIYNLTCPPYCRVQFQLAGTGPHILYLSRLASNLELFKRGKGRGEQRKKEVTCGMLRKVKTPSNKEEEQAMT

SEQ ID NO: 32251 - protein, 311 aa, Homo sapiens
MVGPREKHHEFPLQPTGLASQPPGFRPALGLKLSRICYDQSHSIPSVYSVWFHGGVDAYSASEGSIFRSSEQSPDVPPLLLQVLWGYSFGSGPLCSGSTAYCLSPSSLVVPAASCDSEIFRKLTIMAEGEGEAGMPHGQSGSKRDAGRCQHTFKLDLDHQTTQHVLVVETEGRLASNLEPFKTGKGKGEQRKEGVTCGMLRKLKTPSNKEEEQDIDMLSCFEMHPECISECGILLGYRARIRNHRGEEGEEEKRKPTHRKGREFTIPKKFTLINNDRLYNIRLYHCTNETMAGGVTGIHAEEEIQEVGIEE

SEQ ID NO: 32252 - protein, 53 aa, Homo sapiens
MELDDESSPGLDEKLLFTMDFGCKRATSSKKAAMESSLNPYHGTDTELRALHA

SEQ ID NO: 32253 - protein, 91 aa, Homo sapiens
MASKKFAVKCGNFAVLVDLHILPQGSNKDTSWFSEQKKEEVCLLLKETIDSRVQEYLEVRKQHRPSNAEFTRSNPLSLKGYGFQITAYFLK

SEQ ID NO: 32254 - protein, 428 aa, Homo sapiens
  misc_feature (1)...(428): Xaa = X or * as defined in Table 2
MGPYSGMGPYSELSVSVLEWNQTWNQAAQGKELWDPVENPWQSCHSAPSGTWQVFQMINECMRECGDLSTSLKSSESAPEMALWCTVLANPFVRLKMQYLISVICCLEERIPLAVHGIILLWSLPSTDLFNFSRCFTSSNCCRDAWTSPFKCGNFAVLVDLHILPQGSNKDTSWFSEQKKEEVCLLLKETIDSRVQEYLEVRKQHRPSNAEFTRSNPLSLKGPLPYLKDRGLSVSRVLALVYRKYWITRGLGEWVQGFTEWRWLSARISRYPAVHGLPESAGACQNNFFRSSAPLVVQPPGLMEAFLPFLLLPCEDTAFLPSGGLSVQGTILETEIRLSPDLLVPGALILDFSSSTTQLTLTPWGTSLTHKVAIHSGVALVACLSHVEPHTILQIVLGNAGGSPGTGWYCHTDRHADRSCTLGIVYQX

SEQ ID NO: 32255 - protein, 36 aa, Homo sapiens
  misc_feature (1)...(36): Xaa = X or * as defined in Table 2
MPRYELALILKAMQRVLVSACVLLEVGKCRHDPQSX

SEQ ID NO: 32256 - protein, 718 aa, Homo sapiens
  DOMAIN (16)..(71): Sodium:solute symporter family proteins domain identified by eMATRIX, accession number BL00456A, p-value=1.000e-40, raw score of 22.59
  DOMAIN (39)..(477): Sodium:solute symporter family domain identified by PFam, accession name SSF, E-value=4.2e-256, PFam score of 864.2
MRAVLDTADIAIVALYFILVMCIGFFAMWKSNRSTVSGYFLAGRSMTWVTIGASLFVSNIGSEHFIGLAGSGAASGFAVGAWEFNALLLLQLLGWVFIPIYIRSGVYTMPEYLSKRFGGHRIQVYFAALSLILYIFTKLSVDLYSGALFIQESLGWNLYVSVILLIGMTALLTVTGGLVAVIYTDTLQALLMIIGALTLMIISIMEIGGFEEVKRRYMLASPDVTSILLTYNLSNTNSCNVSPKKEALKMLRNPTDEDVPWPGFILGQTPASVWYWCADQVIVQRVLAAKNIAHAKGSTLMAGFLKLLPMFIIVVPGMISRILFTDDIACINPEHCMLVCGSRAGCSNIAYPRLVMKLVPVGLRGLMMAVMIAALMSDLDSIFNSASTIFTLDVYKLIRKSASSRELMIVGRIFVAFMVVISIAWVPIIVEMQGGQMYLYIQEVADYLTPPVAALFLLAIFWKRCNEQGAFYGGMAGFVLGAVRLILAFAYRAPECDQPDNRPGFIKDIHYMYVATGLFWVTGLITVIVSLLTPPPTKEQIRTTTFWSKKNLVVKENCSPKEEPYQMQEKSILRCSENNETINHIIPNGKSEDSIKGLQPEDVNLLVTCREEGNPVASLGHSEAETPVDAYSNGQAALMGEKERKKETDDGGRYWKFIDWFCGFKSKSLSKRSLRDLMEEEAVCLQMLEETRQVKVILNIGLFAVCSLGIFMFVYFSL

SEQ ID NO: 32257 - protein, 169 aa, Homo sapiens
MLFEKDHSGSPRVEEGRPGSVRQMRKLNHRVQLLVQGYTVIGHRRSGFGSMLLTTKLYCCQLATFEQRIQGQKGKKEPDTGTKETKENPKSTGSWMAKKRPSGLQRAASAFKPGLALSDRAFAAWEPSGAAVSRSPLSPPSLSLRVPGTAWASEPHSPILQACPATSWL

SEQ ID NO: 32258 - protein, 229 aa, Homo sapiens
MGQTVCKEQELGWAKLSSHDIFLYKASADVDPLSSGFSIVEAKSMAKGSLSPLYPVDQANPAVTLNAAFSLTFHTEALGLVNSLLFYLPGNKQGIGLVYPFSDPLSDSCNKKNLHGMVSETAHRWLWLHPAKFQVFNLLEGIVGSAKTMPNIWCLPCMILDGLHLGSIECRRGMGKEWRQRPFCADKYNPVVTWKPGDFPEHVEENEELNSHLPAKYAIMEPGACESLG

SEQ ID NO: 32259 - protein, 61 aa, Homo sapiens
MSCHLHKCEKVFRAQSHGCSIGHWMKVHLFMSTSGCSTTSVWMARAPSRCSSAAPNSAPAV

SEQ ID NO: 32260 - protein, 120 aa, Homo sapiens
MAASSRAAGTSTTLPASAEIPLGSSASGFGLRSRGKPCRFSAHRHDSGSTAGAELGAALEQRLGALAIHTEVVEPPELFTVEEMMPHIQHLKGAHSKNLFLKDKKKKNYWLVTVLHDRQI

SEQ ID NO: 32261 - protein, 95 aa, Homo sapiens [sequence omitted]

SEQ ID NO: 32262 - protein, 311 aa, Homo sapiens
MPDRLGAVAHSCNPSILGAEVLYETTEGLMLEHRWGNANIQAHTYSQVLAMDPRCPRALNLSLPNNGPLVHELWKRNAEQTSGLYPTTDNGTLIRARERDCIGPKPPLPSAALHNADIANLEPSSPLPPHLQPREKASEERWQRGHPQEGPPQESNVSIQDGKDKSWGVQINREKQEHLGKKVPKSTMSKVHAVTYTVALEGPDERSLTRPMLYIQPSGQPVVGGEPLLLHLEGSNGWEHLLPAPRDHAGTILSVLPNACQCGTPVCMKPSTNLATQYCEPNIWVSLSLSHTQACIRVTHSIHVTPPHLRG

SEQ ID NO: 32263 - protein, 634 aa, Homo sapiens
  DOMAIN (544)..(572): PRECURSOR GLYCOPROTEIN SIGNAL RE domain identified by eMATRIX, accession number PD01719A, p-value=7.522e-12, raw score of 12.89
  DOMAIN (426)..(601): Thrombospondin type 1 domain identified by PFam, accession name tsp_1, E-value=0.013, PFam score of 14.9
MGINHDNDHPSCADGLHIMSGEWIKGQNLGDVSWSRCSKEDLERFLRSKASNCLLQTNPQSVNSVMVPSKLPGMTYTADEQCQILFGPLASFCQEMQHVICTGLWCKVEGEKECRTKLDPPMDGTDCDLGKILKQGIVMVPENNTEYVRIHLVLQVCLDSETGNVRLIVLELPPQSIYFSGKLSWMKLTLKYIKVAAHPHGSWNTRVPCLVAVLLTPTWLSYYISEKPCALFCSPVGKEQPILLSEKVMDGTSCGYQGLDICANGRCQKVGCDGLLGSLAREDHCGVCNGNGKSCKIIKGDFNHTRGAGYVEVLVIPAGARRIKVVEEKPAHSYLALRDAGKQSINSDWKIEHSGAFNLAGTTVHYVRRGLWEKISAKGPTTAPLHLLVLLFQDQNYGLHYEYTIPSDPLPENQSSKAPEPLFMWTHTSWEDCDATCGGGERKTTVSCTKIMSKNISIVDNEKCKYLTKPEPQIRKCNEQPCQTREYLISRVSATSQAIESKEKASPHWLNGEALLGGMGVGLAVKDPGTGFYKYHEVKIESVWWMMTEWTPCSRTCGKGMQSRQVACTQQLSNGTLIRARERDCIGPKPASAQRCEGQDCMTVWEAGVWSECSVKCGKGIRHRTVRCTNPRKN

SEQ ID NO: 32264 - protein, 85 aa, Homo sapiens
  DOMAIN (50)..(66): FGGY family of carbohydrate kinases proteins domain identified by eMATRIX, accession number BL00933E, p-value=9.217e- 09, raw score of 13.80
MVTGLKLSQDLDDLAILYLATVQAIALGTRFIIEAMEAAGHSISTLFLCGGLSKNPLFVQMHADITGSNGKNEQSWESCVPETTG

SEQ ID NO: 32265 - protein, 245 aa, Homo sapiens
MFEENLNHMEKARQSKILEKTIPERFRKALGRRKVGMFSQQQDGQCVPSMASPGRGEGTRSSAPKIANISKSTTHGIHIFSKGTEEPMASFNLISLVTHSNMAYSPLVAPRPGHYSENWVFPLATCRPGCCQCCHKRSGGHVGQDLRTPGSSLIHGPLGVYGKPLSFGSGQTLAVLVDPRDYDARAASAVLLSDSWPIPVLTGLTQRVSQIGQGEQRPLYYDKKYQVFLKLVEHQKEYLAIMNDD

SEQ ID NO: 32266 - protein, 119 aa, Homo sapiens
MVTGLKLSQDLDDLPILYLATVKAIALGTRFIIEAMEAAGPLNQVLFSYVEASAKNPPFCANACGHYWHACGPCRKRWSPFLCGAAVLGACASGDFASVQEAMAKMSKVGKVVFPRLPE

SEQ ID NO: 32267 - protein, 150 aa, Homo sapiens
  misc_feature (1)...(150): Xaa = X or * as defined in Table 2
MICLDAXXXXXXXXXXXXXXXXXXXXXXXXXXXXXXXXXXXXXXXXXXXXXXXXXKLTSCVLHADIRNRKSQSSXXXXXXXXXXXXXXXXXXXXXXXXXXXXXXXXXXXXXSTPCCKRVKWNLGCCTPLNVHVPXXXRXLLXXQXXXRSS

SEQ ID NO: 32268 - protein, 55 aa, Homo sapiens
MDNLKVYNIRGSISPSGSTEWTRDGVSLCHPGWAQTLGFKRSSRLGLPKCMGLQA

SEQ ID NO: 32269 - protein, 69 aa, Homo sapiens
MGDPAPARSLDDIDLSALRTGIEGSPDLQELSLAEETDKRINHKNVIGVTKESVQGIVGGEDCEGHFLE

SEQ ID NO: 32270 - protein, 97 aa, Homo sapiens
MLRKYGGSYYSYVDAESKGQSPEDSWKHHSHAAHSGQLQSQVKLNVAPVAVFQMLKSMCAGQRMASEPQDSAAVSLHTTSVPEVRAGPIVPAPVVGS

SEQ ID NO: 32271 - protein, 143 aa, Homo sapiens
  DOMAIN (21)..(104): PA domain identified by PFam, accession name PA, E-value= 0.00022, PFam score of 28.0
  misc_feature (1)...(143): Xaa = X or * as defined in Table 2
XTPAKDFGGIFHTRYEQIHLVPAEPPEACGELSNGFFIQDQIALVERGGCSFLSKTRVVQEHGGRAVIISDNAVDNDSFYVEMIQDSTQRTADIPALFLLGRDGYMIRRSLEQHGLPWAIISIPVNVTSIPTFELLQPPWTFW

SEQ ID NO: 32272 - protein, 46 aa, Homo sapiens
MIRRSLEQPGLPWAIISIPVNVTSIPTFELQQPSWSFWAPKGVPEE

SEQ ID NO: 32273 - protein, 66 aa, Homo sapiens
  misc_feature (1)...(66): Xaa = X or * as defined in Table 2
PLDLCNPARTLLLSEELLLYEGRNKAAEVTLFAYSDLLLFTKEDEPGRCDVLKNPLYLQSVKLQEX

SEQ ID NO: 32274 - protein, 60 aa, Homo sapiens
MSTSLTAGPGDPDVSICSTQQLVRTGWVKSPVPRAVCLHFRLSISLWTELLSSAPVWYTE

SEQ ID NO: 32275 - protein, 336 aa, Homo sapiens
MGGPGTCSPGNAALEPLDLCNPARTLLLSEELLLYEGRNKAAEVTLFAYSDLLLFTKEDEPGRCDVLRNPLYLQSVKLQEGSSEDLKFCVLYLAEEVPPTTPCTGSCQCFKRPEGVFLSSCKYTGQMQPTIGFRTQKALKSVGSMGTLKAECLFTLEAHSQEQKKRVCWCLSENIAKQQQLAASPPDSKTGAEDRSSGHKEMDSLNAAHSPGDRTFHPACPDKLLSRADAHIRVPGPAVREVDISSWWALGSDCAPEEDSATLPSILSSPSLPRRLSLNRAIHPPNCSQILGFKVRVFDLPDVDCPPWLSLLDAILNLQGLVAPLRTPFSGMHQES

SEQ ID NO: 32276 - protein, 233 aa, Homo sapiens
MREGGLQTNGPLSGLGGRVADDATFEGRIQEKDWGLGGARGLLQFSNNVSRLQTAAASHREDSRLLARDFLFRTLYDEARLSLMRGQLSKGKLHEGRQCVSILMKACSQGPQCVLERHRALQGPRYSLATDMAHGLGGDNVGSGLVQGMYPCAKSLSLGAFPPGPYPMSTYRPWHYRPSVSSAQGRASLDISVDPQCIPIAAFKTFPQDVSRGIYKGRIGPIRWPRRPYTRFV

SEQ ID NO: 32277 - protein, 434 aa, Homo sapiens
MHIENQPHTQQVTNPEKSIAQGDIIDELQTSCLSAGILDWIRESSYHAGFSKEDLALREEQRCLNTCTLRGLLLKLVTEKEDTKINTKEVDEETKKGKSNSKFERNSSCNSRHINLWLEEGLQEVKMQTKAHAEKDCHTLDGKRVYSIVRAVSSVTEVGDQLPSGHHNENTQMFPPVQQETQDAMARPTIFLGTTRHLLSQSSSSQIMTSLLCPQCKGWLSSFNNPLATHSGQCLFQAKMVHKMVHLETQNRVFSGIRLSKQPWEMNAVGRGQRAWDPDVGKPQDQDLEEAVRHSSTIERKKERKKERKKEEMGVIEIQTFIQRECVFVDREKDRQRERIRLRAMLLKTGRIIKISNSALNSEQNHKDSIAIEIIPQVPCASIFFHLLPWMSVYIISPVGLCHLTSQPGQLLRVKITSPKHLEHKYYSSPRRAI

SEQ ID NO: 32278 - protein, 77 aa, Homo sapiens
  DOMAIN (6)..(45): PROTEIN ZINC FINGER ZINC-FINGER METAL-BINDING NU domain identified by eMATRIX, accession number PD01066, p-value=1.214e-32, raw score of 19.43
  DOMAIN (4)..(66): KRAB box domain identified by PFam, accession name KRAB, E- value=2.3e-39, PFam score of 144.2
MGSLTFRDVTIEFALEEWQCLDMAQQNLYRNVMLENYRNLVFLGIAVSKLDLITCLKQGKEPWNMKRHEMVTKPPGM

SEQ ID NO: 32279 - protein, 277 aa, Homo sapiens
MQLSPLSRFQAGEESDIICFWAQQYVTIHPVDGVQLSPGKESSSSLLAGSRDKAGSHIPWVRDQGSANVYIKSHLQEGPAVRFTILHVSSFRYESQHLLSRYAANHVPLSWVQKSVTVQLVSSVHMTVRLFTVDCICVWVQKLTSVLLSCLEVTIQLLAWYASMDEKTDEEKTHLVLTYLHFHSLFVSVDRAENSISWQDSHLSAINNTLKERYRTRPLTISKLPGGPGVLAVDSKYLQVTGPQRLRTQSVKTRSGAPAGTRNNGPAHPTSRPFRSS

SEQ ID NO: 32280 - protein, 106 aa, Homo sapiens
  DOMAIN (54)..(99): RIBOSOMAL PROTEIN 40S ZINC-FINGER METAL domain identified by eMATRIX, accession number PD01457A, p-value=1.000e-40, raw score of 16.51
  DOMAIN (2)..(53): Ubiquitin family domain identified by PFam, accession name ubiquitin, E-value=8.2e-39, PFam score of 124.5
  misc_feature (1)...(106): Xaa = X or * as defined in Table 2
XNVKAKIQDKEGIPPDQQRLIFAGKQLEDGRTLSDYNIQKESTLHLVLRLRGGAKKRKKKSYTTPKKNKHKRKKVKLAVLKYYKVDENGKISRLRRECPSDECGAG

SEQ ID NO: 32281 - protein, 24 aa, Homo sapiens
  misc_feature (1)...(24): Xaa = X or * as defined in Table 2
XWSRHHNADFLAKPLRGKTHHPRG

SEQ ID NO: 32282 - protein, 163 aa, Homo sapiens
  DOMAIN (128)..(142): C2H2-TYPE ZINC FINGER SIGNATURE domain identified by eMATRIX, accession number PR00048A, p-value=7.353e-12, raw score of 10.52
  DOMAIN (129)..(151): Zinc finger, C2H2 type domain identified by PFam, accession name zf-C2H2, E-value=1.4e-05, PFam score of 31.9
MLENYRNLGFLGIVVSKPDLIAHLEQGKKPLTMKRHEMVANPSVICSHFAQDLWPEQNIKDSFQKVILRRYENYGHDNLQFKKGCESVDECKIIHTGEKPYRCRERGKAFNHPSPLFSHKKILIGEKPYKCVKCGKAFISSSTLIKHEIIHRNSTNVKNVAKF

SEQ ID NO: 32283 - protein, 95 aa, Homo sapiens
  DOMAIN (70)..(92): Kringle domain proteins domain identified by eMATRIX, accession number BL00021C, p-value=7.545e-18, raw score of 22.21
  DOMAIN (2)..(91): Trypsin domain identified by PFam, accession name trypsin, E- value=2.2e-23, PFam score of 76.3
  misc_feature (1)...(95): Xaa = X or * as defined in Table 2
XWVLTAAHCLKKSSRPSSYKVILGAHQEVNLESHVQEIEVSRLFLEPTQADIALLKLSRPAVITDKVMPACLPSPDYMVTARTECYITGWGETQX

SEQ ID NO: 32284 - protein, 814 aa, Homo sapiens
  DOMAIN (607)..(624): Serine proteases trypsin family, histidine proteins. domain identified by eMATRIX, accession number BL00134A, p-value=4.857e- 20, raw score of 11.96
  DOMAIN (103)..(560): Kringle domain identified by PFam, accession name kringle, E- value=2e-244, PFam score of 825.4
MEHKEVVLLLLLFLKSGQGEPLDDYVNTQGASLFSVTKKQLGAGSIEECAAKCEEDEEFTCRAFQYHSKEQQCVIMAENRKSSIIIRMRDVVLFEKKVYLSECKTGNGKNYRGTMSKTKNGITCQKWSSTSPHRPRFSPATHPSEGLEENYCRNPDNDPQGPWCYTTDPEKRYDYCDILECEEECMHCSGENYDGKISKTMSGLECQAWDSQSPHAHGYIPSKFPNKNLKKNYCRNPDRELRPWCFTTDPNKRWELCDIPRCTTPPPSSGPTYQCLKGTGENYRGNVAVTVSGHTCQHWSAQTPHTHNRTPENFPCKNLDENYCRNPDGKRAPWCHTTNSQVRWEYCKIPSCDSSPVSTEQLAPTAPPELTPVVQDCYHGDGQSYRGTSSTTTTGKKCQSWSSMTPHRHQKTPENYPNAGLTMNYCRNPDADKGPWCFTTDPSVRWEYCNLKKCSGTEASVVAPPPVVLLPDVETPSEEDCMFGNGKGYRGKRATTVTGTPCQDWAAQEPHRHSIFTPETNPRAGLEKNYCRNPDGDVGGPWCYTTNPRKLYDYCDVPQCAAPSFDCGKPQVEPKKCPGRVVGGCVAHPHSWPWQVSLRTRFGMHFCGGTLISPEWVLTAAHCLEKSPRPSSYKVILGAHQEVNLEPHVQEIEVSRLFLEPTRKDIALLKLSSPAVITDKVIPACLPSPNYVVADRTECFITGWGETQGTFGAGLLKEAQLPVIENKVCNRYEFLNGKSPIHRTLCWGIWPEALTVARVTVEVLWFASRRTNTFYKESLLGVLAVHAPISLGVLMFVFPRFVYLGLRGVDGEIN

SEQ ID NO: 32285 - protein, 174 aa, Homo sapiens
  misc_feature (1)...(174): Xaa = X or * as defined in Table 2
MMADEALGKWAVKPGFPQTKRSCWMLSLALAARDFPAKEPRWAVQSNPRSNLAGNSPRNHLGGRRALNYVVRRPWNNEHAARPKTIVKVGSRPRLRNRELKTRHLLPSSESPRVPQPQPGGLALSRLIHEKGRMGDDSCFLWLLTPVFPVYNFMTMSFCKPKALSSPHKHIKQX

SEQ ID NO: 32286 - protein, 366 aa, Homo sapiens
  misc_feature (1)...(366): Xaa = X or * as defined in Table 2
MEDENLSPRKFPKKRGGTVALSSLSSLNTNLAEPFLSAEPENPVAVGSVVKGKHTGRCGSPGVRGGIPCGTSQSDLDLNPSAPLARRLLDTADGFEILAADFQVILALKAAVSLNDMGSNFTHHGTGDSLRLSVSNKRGFVRRTVGSEGGPGHGVTAFVRTAGAKAXEFRRPLLGAEAAPPTSKHRAWEARPTRLPGFAPSPDLIGWWREEAGRPPKKGREGRPGVPTEASRGQRGGTGLRTVARPHIGKKPVGDCWKGRTLQKRVGFCPLGPEGARAEQPRFRSELKPRKKPELRSRRRGRVSSGATSEAKGFRFNNRGNSLQVQHPEKDASGAATARGCAGRSCRSGRLSSPLRRPAHSARPQP

SEQ ID NO: 32287 - protein, 69 aa, Homo sapiens
  misc_feature (1)...(69): Xaa = X or * as defined in Table 2
MQGRLTSLDEESAGETGDRPTFPKAKALNSDHRYSARNAGSRRRQNTGPGGRGLRVSRASRPSPDLIGX

SEQ ID NO: 32288 - protein, 94 aa, Homo sapiens [sequence omitted]

SEQ ID NO: 32289 - protein, 213 aa, Homo sapiens
MGKAPAGCWARGWLRVLGWAGLGLGEPGQQQPHIQDRAICVPRGQWTISVDAGSTEHESHLVDGQVARWEHKTRKLSRAFGSPYLACYSLSVTILLLNFLRSHWILEPCSSAGQLLKAVGWQMDESRVCILLSTGRGTSRIQKMTPADFCVMTRLLGYVDPLDPSFVAAVITITFNPLYWNVSPERPVITPEANLQSKAKISVSSTLFQTVFI

SEQ ID NO: 32290 - protein, 229 aa, Homo sapiens
  DOMAIN (130)..(156): + TRANSPORT EXCHANGER NA H TRANS domain identified by eMATRIX, accession number PD01672E, p-value=9.690e-09, raw score of 10.95
LRLFLGDLWDSSYSCSSTNLLAEADFCVMTRLLGYVDPLGSQLCGCRHHHHLQSALLECGCTMGTQDPQAEQGLSDPPTWACYFSEGVTILLLNFLRSHCFTQAMLSQPRMESLDTPAAYSLGLALLGLGVVLVLSSFFALGFAGTFLGDYFGILKEARVTVFPFNILDNPMYWGSTANYLGWAIMHASPTGLLLTVLVALTYIMALLYEEPFTAEIYRQKASGSHKRS

SEQ ID NO: 32291 - protein, 217 aa, Homo sapiens
MKPRTLVVSVTAHKSSVDPKNSGAQLASPSGSHTGAAGGAACQSCTVRSHSSALGWSMGLGAVEQGVVLVGEARAAQEPMEWGGGSGMAGCRSRALPRGKAAKARREIEHSAALRRQVFAGKPRALPGQGRTLADSASGRGFPVHRDPAIALGVPVSSSPRLLHALPSLGLKRGALGAPHTGSPTPSQPAAWRIPAAPFAAPAAAALLLQPPPPPLK

SEQ ID NO: 32292 - protein, 42 aa, Homo sapiens
  misc_feature (1)...(42): Xaa = X or * as defined in Table 2
MMMTDQIPLELPPLLNGEVAMMPHLVNGDAAQQVILVQVNPX

SEQ ID NO: 32293 - protein, 51 aa, Homo sapiens
MTPAQTCTPLSYSPERTLDARRVWIPMMRAGERRPCTEGCPRSAGRSRWAR

SEQ ID NO: 32294 - protein, 135 aa, Homo sapiens
  misc_feature (1)...(135): Xaa = X or * as defined in Table 2
XPSCNAATAAIAPGPAGASGTQEASASGAPLSPAQSPAPGSRFCERLPPGCSAGASAMSELPGDVRAFLREHPSLRLQTDARKVRCILTGHELPCRLPELQVYTRGKKYQRLVRASPAFDYAEFEPHIVPSTKNP

SEQ ID NO: 32295 - protein, 219 aa, Homo sapiens
TDARKGEVHPTRSRAALPPCRSSRSTPAGKKYQRLVRASPAFDYAEFEPHIVPSTKNFAPVVLQRATLRHINKCPEHVLRHTQGRRYQRALCKYEECQKQGVEVRACLPGAPGGGAFWEPTSSDEGGAASDDSMTDLYPPELFTRKDLGSTEDGDGTDDFLTDKEDENAKPPREKATDESRRETTVYRGLVQKRGKKQLGSLKKKFKSHHRKPNELQLL

SEQ ID NO: 32296 - protein, 98 aa, Homo sapiens
MGCTGQRRLRERMHLRGLGRVQKHKFGWEVSSRQSYSPKTASFASCCLWIFSTLQITYLYLRSSVTIFRQQLFTPQYLRMRHLASLLPNVWNFSWTIF

SEQ ID NO: 32297 - protein, 225 aa, Homo sapiens
MEGKKWEATRVVGSLVVFDTRNRKGQNPVANEAAGEGLEEGLWVLGGAGDPGSLTAQGPTAGSRGLSVAVSGLPGRLHWSHIKFSAIYGGHLFSSTAVTNHHKPCGQQHRNSSSHGSGGQKSNVKVSGTWQCPQMLSEDAPEVPVLTAKVTALDLSQLICRMASSKTVRAVSQLPPTGHQCHHTEGTMEPPGKVNRELDITIWFCKERKPLVLGFSLQAVISIYG

SEQ ID NO: 32298 - protein, 317 aa, Homo sapiens
MHLRGLGRVQKHKFGWEVSSRQSVEVWLVAELLEQWEHPVEYFPSAMKHSCFCHCYHSEIESNSLLLDLSLCLAFTRPCLVSIFGTSTHQLARASFGNLFSTLGSSKSFWQFEISPGLLMPGKSANVTSRGPPIPQKAGYQHSTAYLPIPWAGCELHEGGRGISESPCVSHQQLLTGTALNRNFKLKFNSCDARVPETGREMGKVCPPKSDLRLEQFSAIYGGHLFSSTAVTNHHKPCGQQHRNSSSHGSGGQKSNVKVSGTWQCPQMLSEDAPEVPVLTAKVTALDLSQLICRMARPEVLKAWSLDQQHQYLLGAC

SEQ ID NO: 32299 - protein, 224 aa, Homo sapiens
MTFCLQGSVWYRVDKLKWDSDPSTPPYPFYGHRIEDLKKLPTVFSHLGYLHSLLGYLRLLKVHGDNNDDSDEDSLEYAPKSPTCPPIPHLGSGTSTRVFGLNDQQQGLHQKCCHKKTVWTQFPDDIPITGPNFFRVTSQVCSHSLVPSLYRPYEKYLAWQLPALLYGAHSTLPGSKLRRASITVISGHLGKDAQTSQCPLILRDGPFPSGALPQCLPAPWCRGP

SEQ ID NO: 32300 - protein, 98 aa, Homo sapiens; identical to SEQ ID NO: 32296

SEQ ID NO: 32301 - protein, 43 aa, Homo sapiens
MTTRMALSPGRRCRPHCDILLLCDTDGPGLVLKAVLLMKQHRS

SEQ ID NO: 32302 - protein, 107 aa, Homo sapiens
MTTRIGAEPVLDLSSSPFSSSDSRATGKDFWGGEKVKSQRSQPGLGPAQPQARQFLHGGLRGGGRPEVLLVLGLGPQSLHPEAPVLGAVVVPQAPAGAALAVASFLG

SEQ ID NO: 32303 - protein, 150 aa, Homo sapiens
  DOMAIN (47)..(58): Paramyxovirus nucleocaspid protein domain identified by eMATRIX, accession number PF00973A, p-value=5.275e-09, raw score of 11.35
MGEGVEGKNPRLSQKQKNSATGIQSVRRKAFHVEAREISQSPEITRMAGLLKDFALFPNDKALKDLEGHHSDLGSVGSFTKPKISLQWKDNYVVLLMTQQPSDSICWKGVRTTRFLHKLQKIRKERNAWELNEAKPNDWLLKGLMKSASE

SEQ ID NO: 32304 - protein, 124 aa, Homo sapiens [sequence omitted]

SEQ ID NO: 32305 - protein, 331 aa, Homo sapiens
KTADKNLLAELYQYSNFNSSKPNKLPNGVDFCDMVGNVVRAERDCLIGKHFCSGRELEKFLSSSSPRAIWLDSFWWIFHERDQRLPSLLSKAVYTSFCCCFPQSWVDTHEFKSDICNTMSLWISGTYSSPQSYDSWDYSELDPERFRREELMLYRRRLTKGREFSLFAGKRAFSQKPAQSRKFYHPQHHPGKVFTEKSQAVSRKARAFPPPRQPAPLCTLAICHLCAYGEVLLPSQSLQQPCKVGHYYFLSLFDKAEHHCQTLVLKKPTQEVKRISEARECENMFPKKSCAACKSPELTSNLFNIYGKSPLIVYFLQNYASLQQHGKNVLI

SEQ ID NO: 32306 - protein, 28 aa, Homo sapiens
MSGKSYCSTVTKIKSYFTFLSAAALRHS

SEQ ID NO: 32307 - protein, 357 aa, Homo sapiens
MNARKARTTNVHYTSSPSSNNQLLEANGLSPTISCQCGSGYDGRGNFTGGNIPRLLVGGHQTLADTTEMRHIAAPEGLLRSCMHDEAEVFTFSKAMSWEFRSSLAGRFWIRIAHDVEVNLLVKTVVKQGLTGSWTIASKMVCSYGCWQETSVPYQDQVLRQQLGLAPGPREEALSWWASSRLDGTFPPNQGFSGGDVWEKCGPRSPSSLVAEPRLKLRPSDTFLSKIIFTTPEEALCVQTTHLTAALSQRQIDEVWREMRWIMDALQYARYKQPVSGLPITKLIDPSDEQSLKKINSTSSSHIDCLPSPPPSPEMHRRKTVSDSQPCSDEEACSEVFLPTNSDYDSSDALSPRDLDL

SEQ ID NO: 32308 - protein, 230 aa, Homo sapiens
MDALQYARYKQPVSGLPITKLIDPSDEQSLKKINSTSSSHIDCLPSPPPSPEMHRRKTVSVHFCSYREKFISLYCRLSAVVELDSLNTQQSLREAISDSEVAAAKQRHQQVLDFIQARNFRLYTQEVLEMGHNVSFLLLLPASDDVCTAPGQNNPYTPHSGFLNLPLQMFELEVRKSEGKKWFAEGSDAFSFEYVETEGAKSTSKWTCFTGSRNAGEKLDTKHRDLSSVY

SEQ ID NO: 32309 - protein, 392 aa, Homo sapiens
MIKRALSLGCKAQLPQKEQFFGAEVEKPLPVATTTTNPQQVLPGHHQCSLKAEKLFGHLKRSGLEMLSKSLGLDLGTLRTHLLLYPTVAKLVPKVQDKVPFTLPSVFLKQRGSFTIAATVGNVLGYICIQHVTQGLGIAAGYSGPKGAQTPRNARPLPGNAGGVMLAIEDCLSYPLQCLFQQYEVKTRASKEESAPSAQGQVAAMVVNSHNGEDNGWKRRLPQWQQGDLQDQEEVSRKNDFSPFPSFQLLQQRLHTGNCNPEPYEKVDSWNALPAFPSPNAEEAVEGSSGNFRFNSLLIKDKISIYYVAVCKKKTWTKKCLGDILYLKAMHRFSRESHETGEGHFKGIREDPQEDDRDLKQKPQQTLPGQMTQEPDGPSSVSRYPTYLWELQ

SEQ ID NO: 32310 - protein, 212 aa, Homo sapiens
MVLITTPPARKSDASNSTRTVTLRFRCEVFGGVAVPSPALSTATARSLRLPQSLRTGQASAKYRVPGTPRGRARESRAGLQDTCRTKWLEPGEGEASHASPLDCKLQDRCRKCYSPRSGQACPPALAAAWLRRCERRGGRPRGGRRKELTLGLRPARCSAPGPAKDDAWRPQAGGSSAVSEEAHTFKQVVKIKTICTVMAVGIKHASPPVFA

SEQ ID NO: 32311 - protein, 55 aa, Homo sapiens
  misc_feature (1)...(55): Xaa = X or * as defined in Table 2
XPDCYLYSLVLVIAELGLWSEITPYIPEYFPVEALHCIFHPEIPHLRPYQAQERV

SEQ ID NO: 32312 - protein, 171 aa, Homo sapiens
MVTSYGLGQILPWASKVACQNQEGPRHPKGKRPEWMKQKKGARILQQFGSNEDVMCQLFIQYVNDKSLVSQEELDYALCWRQRPVLFPLKTTREEPNVTSQKEKLHKLVPMRKDSSIWDPLDHLPLLSDPKPSPQTAAAAQDPAPDSSPTHVIPPPYNPDSWKLSSQESVP

SEQ ID NO: 32313 - protein, 347 aa, Homo sapiens
MSGNPGGVVPGDLVHVVLSGKCPSKCCHVERRVGNEVLVVRIRSGVNAKCEHGVFSTQRCVRRSLEARNPEGQAHADPWAEFHLEDIATERALDTASEKQDHVWTLCPMVDGSLQVQRRPGEWLDDEVLIKMASQPPKCWDYRHELPHVALVTTLLTHASAVTVTSLHPGDRDGALPGLCALTCHAYLATDLLHYSSVSLRFSSKTTLSVVEKLQFKPGMCREVEFLNSSRLHLPRASAVALKCKGLMLWTSKRKSGSHFGEGPSGHGALHEGGRFCEKGEEWDQEWLSSTWSTQPTWASWRPRGPGTHVLAVASSHPSDVSLKVMTQQEGPCKTLHTDIRLPSLQN

SEQ ID NO: 32314 - protein, 1214 aa, Homo sapiens
  DOMAIN (1158)..(1203): 3-beta hydroxysteriod dehydrogenase/isomerase family domain identified by eMATRIX, accession number PF01073B, p-value=5.544e- 09, raw score of 12.26
  DOMAIN (647)..(922): 3-beta hydroxysteroid dehydrogenase/isomera domain identified by PFam, accession name 3Beta_HSD, E-value=5.5e-10, PFam score of -14.7
MADEDLIFRLEGVDGGQSPRAGHDGDSDGDSDDEEGYFICPITDDPSSNQNVNSKVNKYYSNLTKSERYSSSGSPANSFHFKEAWKHAIQKAKHMPDPWAEFHLEDIATERATRHRYNAVTGEWLDDEVLIKMASQPFGRGAMRECFRTKKLSNFLHAQQWKGASNYVAKRYIEPVDRDVYFEDVRLQMEAKLWGEEYNRHKPPKQVDIMQMCIIELKDRPGKPLFHLEHYIEGKYIKYNSNSGFVRDDNIRLTPQAFSHFTFERSGHQLIVVDIQGVGDLYTDPQIHTETGTDFGDGNLGVRGMALFFYSHACNRICESMGLAPFDLSPRERDAVNQNTKLLQSAKTILRGTEEKCGSPRVRTLSGSRPPLLRPLSENSGDENMSDVTFDSLPSSPSSATPHSQKLDHLHWPVFSDLDNMASRDHDHLDNHRESENSGDSGYPSEKRGELDDPEPREHGHSYSNRKYESDEDSLGSSGRVCVEKWNLLNSSRLHLPRASAVALEVQRLNALDLEKKIGKSILGKVHLAMVRYHEGGRFCEKGEEWDQESAVFHLEHAANLGELEAIVGLGLMYSQLPHHILADVSLKEVQSFQIMETESFLKERRKAVRLRGEAHPEHKNQMPKEGSPNLPSQKAATSQSAPQQKTQAKPTKAARQKVLVTGGGGYLGFSLGSHLAKSGTSVILLDRRRPQWELSPETKFIQADVRDEEALYRAFEGVDCVFHVASYGMSGAEKLQKEQIESINVGGTKLVIDVCVRRRVPRLIYTSTVNVAFGGKPIEQGDEDSVPYFPLDEHVDHYSRTKAIADQLTLMANGMPLPGPCPFIIQHILSTCCVAAPHQGYSPEEVRFSRPESEQARQRRVQSYEFLQKKHAEEPWVHLHYYGLRDSRSEHERQYLLCPGSSGVENTELVKSPSEYLMMLMPPSQEEEKDKPVAPSNVLSMAQLRTLPLADQIKILMKNVKVMPFANLMSLLGPSIDSVAVLRGIQKVAMLVQGNWVVKRWGSRFIAQAVDVNVPKTKKCINRYAHYPDLIITHCMHVGGGTLRTCVLRPPGIYGPEEQRHLPRVAVRHPRLQDPSQRRILAEVYTGRALPAPGRCISLEAKCPEPGTLSSTRCSCPHWSTGPLELLAGTELSECTSQAKARGHIKKRLFMFRFGDHKARMNWVHVHNLVQAHVLAAEALTTAKGYVASGQAYYINDGESVNLFEWMAPLVSK

SEQ ID NO: 32315 - protein, 959 aa, Homo sapiens
  DOMAIN (81)..(120): PROTEIN ZINC FINGER ZINC-FINGER METAL-BINDING NU domain identified by eMATRIX, accession number PD01066, p-value=7.000e-36, raw score of 19.43
  DOMAIN (248)..(959): Zinc finger, C2H2 type domain identified by PFam, accession name zf-C2H2, E-value=3.9e-97, PFam score of 336.1
MFSSFTPLTSELNFNVAAIGHVCLLSDWNVAGLNCDVLERCPSLLTLAVEEAFLLREATESWKGGDPQADAVKVKMGPLTFRDVAIEFSLEEWQCLDTAQQDLYRKVMLENYRNLVFLGIAVSKPDLITCLEQGKEPWNMKRHAMVDQPPVTYSHFAQDLWPEQGIKDSFQEVILRRYGKCGHEDLQLRTGCKSVDECNLHKECYDELNQCLTTTQSEIFQYDKYVNVFYKFSNPNIQKIRHTGKKPFKCKKCDKSFCMLLHLTQHKRIHIRENSYQCEECGKVFNWFSTLTRHRRIHTGEKPYKCEQCGKAFKQSSTLTTHKIIHTGEKPYRCEECGKTFNRSSHLTTHKRIHTGEKPYRCEECGRAFNRSSHLTTHKIIHTGEKPYKCEECGKAFNQSSTLTTHKIIHAGEKPYKCEECGKAFYRFSYLTKHKIIHTGEKFYKCEECGKGFNWSSTLTKHKRIHTGEKPYKCEQCGKAFNESSNLTAHKIIHTGEKPYKCEECGKAFNRSPKLTAHKVIHSGEKPYKCEECGKAFNQFSNLTKHKITHIGDTSYKYLECDKAFSQSSTLTKHKVIHTGEKPYNCEEYGKAFNQSSNLIEQKEPYECEEYGKAFNKSSILTRHKIILAGAREGGVLKVIQSATLGWEPSNQACSWSGQDGFGDVAGPLSLAAAGAAGLAFTALCPLLAEAQPLWPCDLQVLRDPQLRRQMSSLLTPAMEEAFLLTEPWKAEDPQANAVKETLTFRDVAIEFSLEEWECLNPAQQNLYMNVMLENYKNLVFLGIAVSKQDPITSLEQEKEPWNMKICEMVDESPAMCSSFTRDLWPEQDIKDSFQQVILRRHGKCEHENLQLRKGSANVVECKVYKKGYELNQCLTTTQSKIFPCDKYIKVFHKIFNSNRHKTRHTGEKPFKCKKCDESFCMLLHLHQHKRIHIRENSYQCEECDKVFKRFSTLTRHKR

SEQ ID NO: 32316 - protein, 382 aa, Homo sapiens
MGGQWPWEAQELLPTDPVPDEFLAQKNHPDNFWVPKASIIGQYCIAREGKEFTHPVGRLSCLGQKLYNGTTETVTWWSSNHIERNPFSKFPKLQTVWTHPESHQDWTAPTGLYWICGHRAYAKLPDHWAGSCVIGTIKPSFFQLPIKTGELLGFPVYASRKKRSIAIENWKDDEWPPPERIIQYYGPVTWAQDGLWGYQTPIYVLNRIIRLQAALEIITDKISRALTILAWQETQMRNAISQNRLALDYLLAAEGGVYGKFNLTNCCLHVDDQGQVVEDIVRDRTKLAHVPVQVWHEFDPGAMFGKWFPALGGFKTLIIGVLIVIGTCLLLPCLLPVLLQMIKSFIATLVHQNASAQVYYVNHYRSVLQEDMSSEDKGENFH

SEQ ID NO: 32317 - protein, 249 aa, Homo sapiens
MVQSEEKAQAQTENKKCSLFRWLCSLLPTVRDVSRKNRHTVYFSAFCIVHLLGMHTSGILEQLKMHLQNLKTEDKLSLFLKLGTENKHSHHNWSLEDKKNLAVMLWKTYYHELRFAPTSFGSSTSGFEPQITGPRAVIHHLNPRLKLPFENVNHMCTPKWDFCSTSPESADVRAGRMSVKPEMHLRRRSQEEFLRAVGISSVHGGPSVDRSLLRKGILKNENVGLMTLSKYEQQLRAAKEWSPGIAENI

SEQ ID NO: 32318 - protein, 146 aa, Homo sapiens
MTTWLAGEDWDLDSLLFGSVGFLLQTLHTCGQWRQEPVNSLHYTATGTLQMWLRLKLPFENVNHMCTPKWDFCSTSPESADVRAGRMSVKPEMHLRRRSQEEFLRAVGISSVHGGPSAASDTHWIVIANDMPDLILIDNVMAPPGK

SEQ ID NO: 32319 - protein, 61 aa, Homo sapiens
MFMKSSQSTFFCHGFGRSLRSGSLTSCNKNQPLLFLHLLSLLNVKMMRMKEFYYDLLPFNE

SEQ ID NO: 32320 - protein, 66 aa, Homo sapiens
MSVPIIWHQKPSCVPDQSKNPTSKLRERTSLHRMAHLYKKKGRDVAGSQGPQTEGPAEAMAEEHKL

SEQ ID NO: 32321 - protein, 70 aa, Homo sapiens
MVGAGARGQRGRCYTLFKMTTSHNSRQEGGATHSSETHLHDPVTSHQAPPPTLQITTDHEIWVGTQIQTI

SEQ ID NO: 32322 - protein, 61 aa, Homo sapiens; identical to SEQ ID NO: 32319

SEQ ID NO: 32323 - protein, 75 aa, Homo sapiens
MGSVPARLTQWSEFKVISLIPLNNCCYPVLFSKVPQISYCLKHTCCTICAVNANYHMVLRRHTSSSAYEMTGLRD

SEQ ID NO: 32324 - protein, 98 aa, Homo sapiens [sequence omitted]

SEQ ID NO: 32325 - protein, 75 aa, Homo sapiens
MHFLSFQRAKSAKQRQECSFTLIWQGTGQNHPDTQVHGQQVHFVQPRRWRPNAGWWVWFCLFCCPSTQTCTQRTL

SEQ ID NO: 32326 - protein, 103 aa, Homo sapiens
MLLNLHSKIPNSISRSNLFLLRLPFSECVHIPSRAHTLAHTLTSSCAVAALSRAVHGAKLQSVSLAACGFCYGNGSMVKHIPDPSQTYTFTHQEVAAVWEEEC

SEQ ID NO: 32327 - protein, 723 aa, Homo sapiens
MWGGSPDTVPTEALLSGAVRREPLSSRPQNGRSTNSLPCAPGKAANTQHQPMKATGKGVVPCKATAAELPKAMGAYLLFQCDLDVRHGVKGDHCGTLRFNDYPIGFQTCMGHVAPLLWPISPIGNRKHASFINFFPYGLFHLAANERAHCQLSMPMGIGLDYERETGDQKIFLGCSPQRMINASPAFRSKLHKQSLGIVLGTVPFVRHHIIQSLQGMAAGHPEWLTTPPGKSTLGCWTDSAEMSDPTFGLMDSRQLASAPPFAQHQGLGQLIGSLQRHLVDQGLGCLHSKDLGEGNSHRRLHQKRGCALKPGRTPGATEDELGKHTSQPPRTTSRNIWEEYEKGWESPKYALQSQKCEFELFGSWPGSETESLKEGDIKRDQDNFSCTMKHNPLLSQTTSFSLGMRDRQESSRRWEKADRIMALVRVLVNFTYTGPKAACRFGLEFRWSMKPVAITAQCSWVLYFGDPQGTGQNHPDTQVHGQQVHFVQPRRGVQMLGVLTPYYFHEGKEGVERQEKTRRDISIWANTQPRYQLASSILKGILGERASESQDSFANPGRPTLVLLLTNSNHTASCRSFTLCSSFISHIRCPLGPNIVEAEKKRQTPPEFERLFNSKRMKPQAARLTDCSFAPCTALLRAATAQEEHCTLQTHRHLHPEAPVTTGREQEKSSCERQMAHRQEDNQRHRIHIKEYLTQQLQTSPSTTPTMIFINLLDGNVNLSMD

SEQ ID NO: 32328 - protein, 143 aa, Homo sapiens
MLGSVRNGALPAAPLAPGPARGPVAAAVPPARERAAPARRTPPPPRGDGGRRNNELRKLGVCILALEVWRTPSSDVTTSESLPALASSPLASSTPPSPQSRIQTLGPQNAELQQEPDNGVGDKASFRDASVYAEGTWAESADK

SEQ ID NO: 32329 - protein, 145 aa, Homo sapiens
TVGGTVQNLSVNGPRHTNPMGADSTGVDGEVHGACWPPVLGLLVSGRAPVPCGITQSQLLGIETCSSSWEVRVRHYFVYHTWPWPRFRCTTHCNDKAKDSIDAGSKELQLKQKLEGGVTKCVDDHMHLLPTMTEKVKEALSSIGK

SEQ ID NO: 32330 - protein, 110 aa, Homo sapiens
GLMFRCSASCCEDSQAFHAVGAPVHQSTAMAPLAQARALLTSELEKFRHHLARCAMHCNDKAKDSIDAGSKELQVKQQLDSCVTKCVDDHMHLIPTMTKKMKEALLSIGK

SEQ ID NO: 32331 - protein, 86 aa, Homo sapiens
  misc_feature (1)...(86): Xaa = X or * as defined in Table 2
MVREWKFREIKSLAYSHKTFKATTRKRSMEEEAYAGIQQNRVGSHIHHLWLHDLGQSRGLIPTEQDLIAQQLCPETSQPAFSGKLX

SEQ ID NO: 32332 - protein, 40 aa, Homo sapiens
MLRHFNNISLIEKKNPAGERNWQHLAFFGDPHKRTVTHSQ

SEQ ID NO: 32333 - protein, 1212 aa, Homo sapiens
  DOMAIN (161)..(196): Crystallins beta and gamma 'Greek key' motif proteins domain identified by eMATRIX, accession number BL00225B, p-value=9.565e- 11, raw score of 18.06
  DOMAIN (331)..(698): WD domain, G-beta repeat domain identified by PFam, accession name WD40, E-value=4.5e-38, PFam score of 139.9
MSRVAGGPSSAGACIGKSNQKPEDKRAGVMQSVERLDPCGMKNEEIDETAAAISAVLLPVLCVDDRSRLDDGGVLLLGGSGRACAYGTAKQLARALLFVISTKLHRFNKSFVYSLTSRPDDSNSVPNTDSSVLLLWGYPTKNRLHEDKSLRRCSSVVISGFKMSARVGVVLYEEPNYHGRMYVVESGDFRSFSDWEAHSARVQSLHKIWGQFPRGESVIYDLQEKREDRLAEDICTHSSTVQTQPPEMAGSSPPGGHFVPNRRRRGGGGGEAKNKKSINLERGSRSRAPRSPRWPRAAVVRSRRADPGAPLPSGAQLLLVPRPASGMGGGGSALRVCADHRGGINWLSLSPDGQRLLTGSEDGTARLWSTADGQCCALLQAHRPQTADPSSCARRPLSRSPAPAHPGTLAEERLSGPSIWLLSARQGRVPCGLFVANCALLLAFPVDDSHSNSRRLLRASDEKHPGKKIPQGSKKQNLASLLTKSYTESTQVKRCVAIACKENSEHVPFPLRLPLSSVCATSREAGIVPIPGHESYVTFCQLEDEAAFTCSADCTIRRWDVLTGQCLQVYRGHTSIVNRILVANNQLFSSSYDRTARVWSVDKGQMSREFRGHRNCVLTLAYSAPWDLPSTPCAEEAAAGGLLVTGSTDGTAKVWQVASGCCHQTLRGHTGAVLCLVLDTPGHTAFTGSTDATIRAWDILSGEQLRVFREHRGSVICLELGSTLPCPERLKGLAEGRQHTLLQKEQLALKAAKRLMVWGSAQVVTKLVNRLVYSGSADRTVKCWLADTGECVRTFTAHRRNVSALKYHAGTWREAQRALCVRSVHGQRGRCARAFDAQSGELRRVFRGHTFIINCIQVGPSALLGAAAVGGKVPRPDPSTRAAVSPPPTASPVTPAPAPAVHGQVLYTASHDGALRSGTCAGSEVPRGPPPPMAALAALQQQAPERGALQSLDGATFCIHVPRLARVPGEKLQVTVSAVESSSSRCREKHLLQEQPLQVEQPLQVEQPFQVEQHALHSLNAEDTSSETAGAARDHLLGDGRVRPRARMNRKMGLLGGKQIGAGEPAETAPCTVLRVRLKHTQTSGVARSCCVPEPLGPVAATRGIPTREDLSIVLKGRFRWRRPENRLECCLRAVLPAGPEPAQTFTLTPACRRHCCLVMLRSGLSSPSLTRQLQSPPYLPTAENGACIKPSRETQWGMDPKHGRCTHFAFL

SEQ ID NO: 32334 - protein, 33 aa, Homo sapiens
  misc_feature (1)...(33): Xaa = X or * as defined in Table 2
VPCGLFVANCALLLAFPVDDSHSNSRRLLRASX

SEQ ID NO: 32335 - protein, 153 aa, Homo sapiens
MPRFCISRRLITFNEADESVNYKTGPKPVRFLGPSTSTQIKVKNSASVTVSPASAIQTSAGATANRFQSGSRRKAAQRFCTFQSHGPAKVLLSDKKPTPQRVIKLKRTPLCASRALPALPHGHEGRANSLKPLPGEAARALGVRTENGKTKGN

SEQ ID NO: 32336 - protein, 111 aa, Homo sapiens
  misc_feature (1)...(111): Xaa = X or * as defined in Table 2
XRQRPWSKRNARILHRQTRASLSTDSRRADSRAILGAKAQRGAAATASYQVTGAAEAAPSTSCCSSAPEDPAELVSTPYLVLPCPQGDVEVGIMQNRPFPQGSSSSKFVYI

SEQ ID NO: 32337 - protein, 32 aa, Homo sapiens
LGGSGEVVLLPPRFSAELLELREEHWPRPQAR

SEQ ID NO: 32338 - protein, 256 aa, Homo sapiens
MREGYEVCLCHQCSRPGCYSELASRGQRGKSCHSPKKLKDESREQVCLRKHTTNEWKEDLNICCNLTVQCSTKVSESVSHAGRLPTMAEPSGAVLMTSIDTVCCVHSNLPGTKDLRMSLVPPYEKHPQVKNGYCVENIVSSYYDEKVDDVCGSPDSTELLGDSGEVVLLPPRFSAELLELREEHWPRPQARVSLRAPPPSGPPGTGAEKRNFGTPQVFVAKDARSPASRRMRGSRGGNVASRQPLSCLKPEVDMVA

SEQ ID NO: 32339 - protein, 162 aa, Homo sapiens
MAAEIHSRPQSSRPVLLSKIEGHQDAVTAALLIPKEDGVITASEDSLGNKNKTLSQKKKKERNKEFGPYFAGSVEPSKSSKQANDMIGICNLEITIANLLKVPFLYEYRIGPYVLLDPILTLPPYKECYGTTMVLRRTSMQSKSLDMPEICLKVLSQCIAQG

SEQ ID NO: 32340 - protein, 137 aa, Homo sapiens
  DOMAIN (41)..(52): Trp-Asp (WD) repeat proteins proteins domain identified by eMATRIX, accession number BL00678, p-value=5.800e-10, raw score of 9.67
MAAEIHSRPQSSRPVLLSKIEGHQDAVTAALLIPKEDGVITASEDRTIRVWLKRDSGQYWPSIYHTMASPCSAMAYHHDSRRIFVGQDNGAVMEFHVSEDFNKMNFIKTYPAHQNRVSAIIFSLATEWVISTGHDKC

SEQ ID NO: 32341 - protein, 423 aa, Homo sapiens
MVGGAQKNKILHLQVPNRAEKTHAEPEHKRAGVVTASKAFLSLSLEKGEISQTMNTGGEREFQAEVQKEQRQKSTGRYQCSLREVQFCKKRMFQAGDKARRWEGSEESFDSVGSLQMASSLQGKASVTRADLCGISQHEEATGSGDSLHVGSAGAWHHQFLSTVLSFYLQSLIRLATPVSTDDENSKDLLARVKSAARGQVKGFPHTARHLPLPRQRGRPRRAVRPQPEREPGLGGAGSRRTQPSGGGEEGRPLSACDFSDAAPPGVRVVGLRPERAGETRRPRGAAPARAQLHLGFWGPKDPTLMTVIYVAVSVESSLAGRRPQQRGRNVNLPIHSPGLRVQLLMRATWKISLQSPLGMQVAVPECARTCDEANDEVSQRKVIEDKDPFCQWDMLGIPTILVTECAWLVLASLPDASKRRQK

SEQ ID NO: 32342 - protein, 852 aa, Homo sapiens
MYKGAPWHPLPATDFQLARHPQAIRAVRRQHSGAYGGAAPKRPQQPKGNRRVPRPPRRQLMGCLPRRPQQSPREHGGRNPLQAAEQPPGAAEQDRGAPGRRHGALLIPKEDGVITASEDRARVTSPMLEWAVSANSSPPCFRVILIWVCSLRAGVVTASKAFLSLSLEKGEISQTMNTGGEREFQAEVQKEQRQKSTGRYQCSLREVQFCKKRMFQAGDKARRWEGSEESFDSVGSLQMASSLQGKASVTRADLCGISQHEEATGSGDSLHVGSAGAWHHQFLSTVLSFYLQSLIRLATPVSTDDENSKDLLARVKSAARGQVKGFPHTARHLPLPRQRGRPRRAVRPQPEREPGLGGAGSRRTQPSGGGEEGRPLSACDFSDAAPPGVRVVGLRPERAGETRRPRGAAPARAQLHVGLPDGGVACRLGCPLEETEGALRQRSVLRVMGKRCQDAAGKGQITPRGVLQGVLELTSPCLGDRGTAASRLRQIQTREPENWIPGYGDSMRYPQRPGTQPFSAGNHCCWDPLGFWGPKDPTLMTVIYVAVSVESSLAGRRPQQRGRNVNLPIHSPGLRVQLLMRATWKISLQSPLGMQVAVPECARTCDEANDEVSQRKVIEDKDPFCQWDMLGIPTILVTECAWLVLASLPDASKRRQNGTNIDLSVATNTCSPPHLLIVETPLLFYAAFCWEGNQEEMGIVRLDTFGLSETNVISNLDFMVCKNEEKEEGFQRKVNRKLYSCEIADICLPDSFWLGLSMMTCRTNQPLEECPGYEPVQHITTLNTIDNCNTMAHKLKMVPEQFLSMSRKGTEIQKFLYGKECPGLETVSEAKNFLKIVLQKGSCRLVGSLQNH

SEQ ID NO: 32343 - protein, 123 aa, Homo sapiens
MSLQGRTLKPAPLPIREVHRVGAESQVPTERVKIQTRCVKSDSCVLELAYLPQTSSHPREEKTRRHPRDRIFAGKLGLGAPAGRLVSARMRRQKSCGGRITSSPRPRPGQLSVSMANVYSGGR

SEQ ID NO: 32344 - protein, 206 aa, Homo sapiens
  DOMAIN (95)..(117): FUNGAL PHEROMONE MATING FACTOR STE2 GPCR SIGNATURE domain identified by eMATRIX, accession number PR00250A, p-value=5.368e- 09, raw score of 12.48
MPWVWGGVGTLLYQLGILKDYYTAALSGGLMLFTAFVIQFTSLYAKNKSTTVERILTTDILAEEDEHEFTSCTGAETVKFLIPGKKYVANTVFHSILAGLACGLGTWLLVMFIMSAGTAIASYFIPSTVGPSGGIPEEGIVIIGDDNSMYVIAPEDFPVEQDVKFQGPHTVMAISPIYTFKSVLSELSLSSLTRRACLLAQYPMER

SEQ ID NO: 32345 - protein, 97 aa, Homo sapiens
MEEISLANLDTNKLEAIAQEIYVDLIEDSCLGFCFEVHRAVKCGYFYLEFAETGSVKDFGIQPVEDKGACRLPLCSLPGEPGNGPDQQLQRSPPEFQ

SEQ ID NO: 32346 - protein, 262 aa, Homo sapiens
MQPNDFYILKSGFLQLVRSSPGTSLSRGGAFPTLARGRRSPGVSAAGLRLKLGIRLLSEPRARAGAAGGQASIPPHLFVKNRRKQSLLALAANFGASERVKRPSPPHSHPATLPAVARRLIVKKVDSPREIDERIVPGELVCAHSQVQRINLGPDCGRRANWGKKAGRRPGGAETRGACSRGSRGWRALRLRSALEYLPRRARDQREHLPWKPTSITQRSPLHREQGLLRVAEDLEGSRFCISVAETLSARGPGESGSESLF

SEQ ID NO: 32347 - protein, 91 aa, Homo sapiens
MKLCPTQLVVSAVVKATPGSGYSASPVSRGCSSPSRSYAVLRRQEREPGRSRWRRLGIAVPVLHSEKTQPQPAMCEVPSTHSARLLLTLKC

SEQ ID NO: 32348 - protein, 122 aa, Homo sapiens
MSATRAKKVKMATKSCPECDQQILGPAGGGGDPGPVGLHRGVSREKPGAVARQRPPGGGQTAKPLLAVSRPLEERAFGLSFEKEKQEKEIDIYANLSDEKAFVFSVALAEINRKIINQRLIL

SEQ ID NO: 32349 - protein, 93 aa, Homo sapiens
MSATRAKKVKMATKSCPECDQQVPVACKSCPCGYIFISRKLLNAKHSEKSPPSTEKQEKEIDIYANLSDEKAFVFSVALAEINRKIINQRLIL

SEQ ID NO: 32350 - protein, 54 aa, Homo sapiens
  misc_feature (1)...(54): Xaa = X or * as defined in Table 2
MRPVTGPALPGCRSVRGGARAVAAAAAKGEEHVCNSSQESEDGHQIMPRVRPTX

SEQ ID NO: 32351 - protein, 59 aa, Homo sapiens
MHLHQVLTGAVNPGDNCYSVGSVGDVPFTAYGSGCDIVILANDFECVQIIPGAKHGNIQ

SEQ ID NO: 32352 - protein, 260 aa, Homo sapiens
MGPGKVAQACNPSTFGGQDNRLLTATDSIQLWAPPGDDILEEEEEIDNTEPSVSVHLMEWSPDGEYFATAGKAYGSGCDIVILANDFECVQIIPGAKHGNIQVSCVECSNQQGRRRLRNNKDCCLFLPLGALSQKGTRQMPGRALLYVVSVGPYCEVSPVWVHGGVRDPLEEAVCPVSELECCAGRIAALFRAVRQGRLSLLKLCLQPPLPPRALSRGAVVGSTQFKLPSSFVYTVRVKPSTQASAMADAPPPTKLECPS

SEQ ID NO: 32353 - protein, 182 aa, Homo sapiens
  misc_feature (1)...(182): Xaa = X or * as defined in Table 2
MAEMEKEGRPPENKRSRKPAHPVKREINEEMKNFAENTMNELLGWYGYDKVELKDGEDIEFRSYPTDGESRQHISVLKENSLPKPKLPEDSVISPYNISTGYSGLATGNGLSDSPAGSKDHGSVPIIVPLIPPPFIKPPADLEAYERKMVSWARSSPPCCMQLLDLVPCISAASAMAKRGQX

SEQ ID NO: 32354 - protein, 72 aa, Homo sapiens
  misc_feature (1)...(72): Xaa = X or * as defined in Table 2
XPDEEAEKPAKTKTVSSSNGGESSSRSAEKRSAEEEAADLPTKPTKISKFGFAIGSQTTKKASAISIKLGSS

SEQ ID NO: 32355 - protein, 76 aa, Homo sapiens
MADGKAGDEKPEKSQRAGAAGGPEEEAEKPVKTKTVSSSNGGESSSRSAEKRSAERRSCRPPNKAYKDLQVWICHS

SEQ ID NO: 32356 - protein, 98 aa, Homo sapiens
MWPWGKTPGITGRRDVRGEESSGWGRLDPQQLCIRGGLSSSRPESSEPSAAIASGQSRRVSGAPSGWGALPASQPLPASSFFDFLPALGPAVRCGRAL

SEQ ID NO: 32357 - protein, 131 aa, Homo sapiens
MREDEEEEEEYRMTTRLPAWAAEEKVTCHSPRQENGGAGLRQKEPHQQKPPNHTRKTSLGTKALVDTRCLAASLDSTYWKLPVTLSQPPPRCKNDHGEQNCPWLRVTVRTSLEEYTRNQVKVEQKRQMRTV

SEQ ID NO: 32358 - protein, 238 aa, Homo sapiens
  misc_feature (1)...(238): Xaa = X or * as defined in Table 2
XKSIGIVAWLKQKNIKQAIKSLKKYSDKSAEKSPFPEEKSHIIDKEEDIGKRSLFHYTSSITTKFGDSFYFLSNHINSYFKRKEKMSQQKGNEHFRDKSELEDKKVEEGKLRSPDPGILAYKPGSESVHTVDKPTSPSAIPDVLQVSTKQSIANFLSRPTEGVQALVGGYIGGLVPKLKYDSKSQSEEQEEPAKTDQAVSKDRNAEEKKRLSLQREKASCSVCFSVLLLFVKFISFIS

SEQ ID NO: 32359 - protein, 120 aa, Homo sapiens
MGKVKRIRADESNMYLDCQTRAKLTAVNMFGCNIGDSWGGVSSRATMQHSPGSCKVRSALRSPCLSSFSDSWMCIVRTKRRKRCVRRLYELGMIAIGRYSMTIETVDVGGVKKSQTKEPP

SEQ ID NO: 32360 - protein, 106 aa, Homo sapiens
MEIVKRCKNLISLNLCLNWIINDRCVEVIAKEGQNLKELYLVSCKITDYALIAIGRYSMTIETVDVGWCKEITDQGATLIAQSSKSMRYLGLMRCDKVNEVTVEQL

SEQ ID NO: 32361 - protein, 56 aa, Homo sapiens
  misc_feature (1)...(56): Xaa = X or * as defined in Table 2
MXXXXXXXXXXXXXXXXXXXXXXXXXXXXXXXXXXXXXXXXXXXXXXXXXXXXXXX

SEQ ID NO: 32362 - protein, 82 aa, Homo sapiens
MKTTCVTFGAEDPGQRDSFGGPVRCPCPHSVRRPTYDLGSSDQPAQGTSHQFQIGTPLENGLSNSPGSHSQSPWNSGPRLSD

SEQ ID NO: 32363 - protein, 12 aa, Homo sapiens
  misc_feature (1)...(12): Xaa = X or * as defined in Table 2
MQALNLVELFLX

SEQ ID NO: 32364 - protein, 541 aa, Homo sapiens
  DOMAIN (301)..(351): Myelin proteolipid protein domain identified by eMATRIX, accession number BL00575A, p-value=1.000e-40, raw score of 13.10
  DOMAIN (301)..(541): Myelin proteolipid protein domain identified by PFam, accession name Myelin_PLP, E-value=1.5e-183, PFam score of 618.5
MIWEGVSQRALGQSSSGSGSGCRDEPFQILSPFRILRNLEEDTGLPWHPVQAAGCHQEGWQCPLEESLGSARSLAGLKNILPRAPSRTNGSRITEIGGGKITGKVPGDHTFLLRSLPTGAPLIICQPVVLKAIHGRTPASRCLCSKAKFQASLREKRKNKENETIGSERQKEKMEPLEKGVSLSRRRGQRYSERKSKRPKKEAGETRILPAEQSQPQSRLASRLQLESESQRHGKTLSASLLSSENSGCYPGNQTVMPPSKSGCLPSSVVLAGLHTSHGCSSISALSTTAGPDQGGLCSWGLLECCARCLVGAPFASLVATGLCFFGVALFCGCGHEALTGTEKLIETYFSKNYQDYEYLINVIHAFQYVIYGTASFFFLYGALLLAEGFYTTGAVRQIFGDYKTTICGKGLSATFVGITYALTVVWLLVFACSAVPVYIYFNTWTTCQSIAFPSKTSASIGSLCADARMYGVLPWNAFPGKVCGSNLLSICKTAEFQMTFHLFIAAFVGAAATLVSLLTFMIAATYNFAVLKLMGRGTKF

SEQ ID NO: 32365 - protein, 101 aa, Homo sapiens
  misc_feature (1)...(101): Xaa = X or * as defined in Table 2
XGNQPCHFQIVGDFKDRGQDSPLNPTYPIKLKDCLEPGHGAVVCQAQGVSQCVTDVIGRLEVKLGLVRGQDEFGFETSAFEMLTGRPHGNVQLAAEKMSRM

SEQ ID NO: 32366 - protein, 170 aa, Homo sapiens
MDLPSTVRVTRSSASVMVQGGSEAIRQRQSSAAKPRRSGKESKSLGPEFQGLWEWLPEIYFSQFRRLGNPKSRHQQIQCLMGACFVVTERLSFQDSLDLAEPRHSYPLQVKRLDLPTVLETETDLEKLDPFTTIPSPVETLQCLFVSLRIKSRVPIMDLKALSDLTPLDP

SEQ ID NO: 32367 - protein, 123 aa, Homo sapiens; identical to SEQ ID NO: 31191

SEQ ID NO: 32368 - protein, 136 aa, Homo sapiens; identical to SEQ ID NO: 30814

SEQ ID NO: 32369 - protein, 287 aa, Homo sapiens; identical to SEQ ID NO: 31761
  DOMAIN (200)..(243): 1 kw MIND INHIBITOR DIVISION CONTROL domain identified by eMATRIX, accession number DM01756B, p-value=4.822e-15, raw score of 22.91
  DOMAIN (165)..(270): ParA family ATPase domain identified by PFam, accession name ParA, E-value=3.6e-23, PFam score of 90.4

SEQ ID NO: 32370 - protein, 272 aa, Homo sapiens
MGVRGLLRRSGSVSLQPLSREDLGRSQSESLGPEFQGLWEWLPECIIETDILSSVENFHIGFLICGMRALMMGKANWKPLELPLPKKIANNDQYCILTWLAEISITIKNFKDLHKNFMKIAKQTNKLSLTEVKTNIQIDAKVMKEKEMTYAKEIDAQDFCKSVSVQKFMNSHLQKPYEINLMEELTLKGVTQYYACITELQKLAETYLHRIGRSGRFGHPGLAINLITYDDHFNLKSIEEQLGTEIKPIPSNIDKSLCGAEYHSEPVEDEKP

SEQ ID NO: 32371 - protein, 341 aa, Homo sapiens
MTSGKTALLNWAISNRDFAAPPIAGQYLLTANCYGALLALGTALRSCTVSDKAPQELLDTGIVITILQKFLLGNWLNAESWFHRRESDSIGPGWGRLLSAGDPAMNKASTRSPEKQTDAKQVITSVMDATKEKQQGPWEETVGDANISHLYKRPIVPAAPKFPEDLPAVTLSQRHPLSKGPAVWLLPATTTTKEAGPAWWSQLHRRPRDFRALLGTCSRVLGEERLEPGAEGLFAGLQEDLSCTAGAGEESSSGSMKAGVANCYPEGMVPIGSCSSKDSGKQPGESNEDTCSFRKPKPSQALGWRSLSPWIQLPVPSWTELHPASCFLLPAPSFTLSVVSA

SEQ ID NO: 32372 - protein, 335 aa, Homo sapiens
MGAVCEALRQYSLGNLLSLVGVRGASEAIGQRQSSAAKPRRSGKESESLGPEFQGLWEWLPVHDWRQSFGSTDKTCLLCLYQKMKGIEIKRRKRLKSGKEKVVEGQWDCPVTGNTLQSFYQFYIMRLKTDTARSPQKAPGPSQMLWVTLTVQATLLPKEAGVIHCKGHQKASDPITQDNAYPDKVAKKAAIKRAQIPSLRTMLMLISEISTFSISPSDSLFKLMALRFIIRTNRDQLLQDTADLLKQDNGSGQTPALQRMESLRRKGQQRRWPLLTKNQIDRKISKRMFDNVKFDSNPHDDFEGLKTSVEEATADAVETARDLELEVEAEDAVIS

SEQ ID NO: 32373 - protein, 195 aa, Homo sapiens
MGEQQSHFEKEHAEWKDKTIATENGNMMGKLVKQGKGKQGQGASKAIGQCQSSAAKPRRSGKESVREPWARVPGALGVAASITAVVNCQQPSDSVSCLQRSTIAHDPTHPPHTKPQRKAARVLNSQQAYQSLYSMQLLPLLEMSSCLLLPKLIYFQLGAEKVSNLEMSINAGEKKALRESCSLLPKDQKRVAKQG

SEQ ID NO: 32374 - protein, 138 aa, Homo sapiens
  misc_feature (1)...(138): Xaa = X or * as defined in Table 2
MVWRDSGRCFSGLLRAGLGAAREPRVGEIKLKEDFVGASEAIGKRQSSAAKLRRSGKESVRAPWARVPGALGVAARNPSAGIWFRQALYPGYTGLLLCGAGPVSISAVVPRGSEEQERADPSSFLQILDLLLIAQITX

SEQ ID NO: 32375 - protein, 616 aa, Homo sapiens
  DOMAIN (115)..(158): kw TRANSCRIPTASE REVERSE II ORF2 domain identified by eMATRIX, accession number DM01354T, p-value=1.000e-40, raw score of 9.48
  DOMAIN (5)..(237): Reverse transcriptase domain identified by PFam, accession name rvt, E-value=1.6e-20, PFam score of 81.6
MQGASEAIGQCQSSAAKPRRSGKELVREPWARVPGALGVAARLNQEEVESLKRPITGSEIVAIINSLPTKRSPGPDGFTAEFYQRYKEELLKIIRATYDKPTANIILNGQKLEAFPLKTGTRQGCPLSPLLCNIVLEVLARAIRQEKEIKGIQLGKEEVKLSLFADDMIVYLENPIVSAQNLLKLTSNFSKVSGYKINVQKSQAFLYTNNRQTESQIMSEFPFTIASKRIKYLGIQLTRDVKDLFKENYKPLLNDIKEDTKKWKNIPCSWVGRINIVKMAILPKVIYRFNAIPIKLPMTFFTELEKTTLKFTWNQKRAHIAKSILSQKNKAGGITLPDFKLYYKATVTKTAWYWYQNRDIDQWNRTETSEIMPHIYNYLIFDKPDKNRKWGKDSLFNKWCWENWLAIRRKLKLDPFLTPYTKINSRWIKDLHVRPKTIKTLEENLGNTIQDIDMGKDFMSKTLKATATKAKIDKWDLIKLKSFCTAKETTIRVNRQPTEWEKIFTTYSSDKGLISRIYKELKQIYKKKTNNPIKKWVKDMNRHFSKEDIYVAKRHMKKCSSSLAIREMQIKTTMRYHLTPVRMEIIKKSGNNRRELNNENTWTQEGEHHTLGTAVG

SEQ ID NO: 32376 - protein, 119 aa, Homo sapiens
  misc_feature (1)...(119): Xaa = X or * as defined in Table 2
MNQLASLGKTNEQSPHSQIHHSTPIRNQVPALQPIMSPGLLSPQLSPQLVRQQIAMAHLINQQIAVSRLLAHQHPQAINQQFLNHPPIPRAVKPEPTNSSVEVSPDIYQQVRDELKRAX

SEQ ID NO: 32377 - protein, 174 aa, Homo sapiens
  DOMAIN (104)..(121): Zinc finger, CCHC class domain identified by PFam, accession name zf-CCHC, E-value=0.057, PFam score of 16.2
MPILASWPHPPGPFLLLTLLLGLTGPPMWTMLKNNIAEKNDIHSRDSHASQSGMASYMLHHLEASAFSLQHLRCSSSGSMKAGVANCYPEGMVPIGSCSSKDSGSCFKCQKFCHWAKECLQPRIPPKLCPICVGLHWKSDCPTHQAATPRAPGTLAQGSLTDSFPDLLGLVTED

SEQ ID NO: 32378 - protein, 737 aa, Homo sapiens
  DOMAIN (564)..(597): RECEPTOR INTERLEUKIN-1 PRECURSOR domain identified by eMATRIX, accession number PD02870B, p-value=7.400e-10, raw score of 18.83
  DOMAIN (354)..(728): Immunoglobulin domain identified by PFam, accession name ig, E-value=1.4e-36, PFam score of 122.9
MIPLTCAPPLACGEPAPARCVLRAPSLARALRGRAGAAWEAPREREPEEEETGLARRPRTVRAAAVGDASERKREVNQAPGRGSAKKRPLPLVGIGMSKNTVSSARFRKVDVDEYDENKFVDEEDGGDGQAGPDEGEIPQVAPECLPASGTGPAGRALAALGKAAPAGNMTAALQAALKNPPINTKSQAVKDRAGSIVLKVLISFKANDIEKAVQSLDKNGVDLLMKYIYKGFESPSDNSSAMLLQWHEKGASEAIGQYQSSAAKPRRSGKESVREPWARVPGALGVAARKYQKMKGIEIKRRERLKCGAKIERRKRLKDREVGEESKKRPLTGFEIEPPKVTVMPKNQSFTGGSEVSIMCSATGYPKPKIAWTVNDMFIVGSHRYRMTSDGTLFIKNAAPKDAGIYGCLAKAPKLMVVQSELLVALGDITVMECKTSGIPPPQVKWFKGDLELRPSTFLIIDPLLGLLKIQETQDLDAGDYTCVAINEAGRATGKITLDVGSPPVFIQEPADVSMEIGSNVTLPCYVQGYPEPTIKWRRLDNMPIFSRPFSVSSISQLRTGALFILNLWASDKGTYICEAENQFGKIQSETTVTVTGLVAPLIGISPSVANVIEGQQLTLPCTLLAGNPIPERRWIKNSAMLLQNPYITVRSDGSLHIERVQLQDGGEYTCVASNVAGTNNKTTSVVVHVLPTIQHGQQILSTIEGIPVTLPCKASGNPKPSVIWSKVNDTSSYIS

SEQ ID NO: 32379 - protein, 161 aa, Homo sapiens
MPGHQKAPLRPAVSKKVVNVGERQNQVIIETGGDFADFGTTIKQDFRLLGQTSVDRLLQLSQGQAVKGNQLLPVSLVKRKTTLAPNTQTASPRALADSLMQLARQVSRLESGQGLPRRSGSVSLQPLSREDLRRSQSESFGPEFQGLWEWLPANTVWMLRK

SEQ ID NO: 32380 - protein, 257 aa, Homo sapiens
  DOMAIN (141)..(184): kw TRANSCRIPTASE REVERSE II ORF2 domain identified by eMATRIX, accession number DM01354T, p-value=1.000e-40, raw score of 9.48
  DOMAIN (26)..(257): Reverse transcriptase domain identified by PFam, accession name rvt, E-value=8.8e-20, PFam score of 79.1
MDVAGSRYPQQTNAGTENQTLCILTYKWELNDENTWTPEGEQHTMGPFEGWGLPRRSGSVSLQPLSREDLGRSQSESLGPEFQGLWEWLPDAEKAFDKIQQPFTLKTLNKLGIDGYLKIIRAISDKPTANIILNGKKLDAFPLKTGTRQGCPLSPLLFNIVLEVMARTIRQEKEIKGIQIGSEKVKLSLFVDDMIVYLENPIASAQNLLKLIINFSKVSGNKINVQKSQAFLYTNNRQTESQIMGELPFTIATKRIK

SEQ ID NO: 32381 - protein, 70 aa, Homo sapiens
MGAVCEALQQYSPGPPTDQPKKHLTNFKSGPHWKSDCPTHLAATPRAPGTLAQGSLTDSFPDFLSLAAED

SEQ ID NO: 32382 - protein, 31 aa, Homo sapiens
  misc_feature (1)...(31): Xaa = X or * as defined in Table 2
RLKTDAARSPRKPPTRPFTDAELRVTLTVEX

SEQ ID NO: 32383 - protein, 52 aa, Homo sapiens; identical to SEQ ID NO: 31830

SEQ ID NO: 32384 - protein, 356 aa, Homo sapiens
  DOMAIN (82)..(102): PERIPHERIN (RDS)/ROM-1 FAMILY SIGNATURE domain identified by eMATRIX, accession number PR00218B, p-value=7.718e-09, raw score of 11.99
MAIGNKGSRSGGRSPPSCVAHHRPATRTLGFRSRNRILFLHPDRKKPQPSGTDRRPGLYLAHNQAPSGTGLSFCTRSASLQFPATLLGVGPGHCGTYLGGGARGRRRPGSCGLLPELGRRVGLELSPKLNLKFEIEVLCKNLALDINELKPGNLLKDKDRLKNLDEQLSAPKKDVKQPEELPPITTTTTSTTPATNSTCTATVPPQPQYSYHDINVYSLAGLVPHITLNPTAHPQLKQCVRQAIERAVQELVHPVVDRSIKIAMTTYFPQERCPVVLAPLLYPEKRDILMDRILPDSGGVAKTMMESSLADFMQEVGYGFCASWWVLVSYGVLLVTLGAFIFGQTTANAIFVDLLA

SEQ ID NO: 32385 - protein, 441 aa, Homo sapiens
MQRDDSHLHARREASEKLALPDEVELTAQRRGRSGHNHDDRRIENTEKPKYKKKIKKINQHIVERHRRYTDKPEDRRRHRQHRQENKNSRNEPERKQETTDNTKQQKQARIKIASKNLACSNSLAPNERCQRSPEQNSTPNRHTTTTSTTPATNTTCTATVPPQPQYSYHDINVYSLAGLAPHITLNPTAHPQLKQCVRQAIERAVQELVHPVVDRSIKIAMTTCEQIVRKDFALDSEESRMRIAAHHMMRNLTAGMAMITCREPLLMSISTNLKNSFASALRLMEVVRSNYEAMIDRAHGGPNFMMHSGISQASEYDDPPGLREKAEYLLREWVNLYHSAAAGRDSTKAFSAFVGQMHQQGILKTDDLITRFFRLCTEMCVEISYRAQAEQQHNPAANPTMIRAKCYHNLDAFVRLIALLVKHSGEATNTVTKINLLNKV

SEQ ID NO: 32386 - protein, 1097 aa, Homo sapiens
  misc_feature (1)...(1097): Xaa = X or * as defined in Table 2
MVVLANGPKLNCFGNLTVLSPVQDCLSTESTQQNTGPEDASREARMRAVVEGLWLRYQGVPVEEDVGRERRRRVLQTLVWFLLTLLLALFIPDIGKVISVIGGLAACFIFVFPGLCLIQAKLSEMEEVKPARCLIECRDEYKYNVEAVELLIRNHLVNMQQYDLHLAQSMENGLNYMAVAFAMQLVKILLVDERSVAHVTEADLFHTIETLMRINAHSRGNAPEGLPQLMEVVRSNYEAMIDRAHGGPNFMMHSGISQASEYDDPPGLREKAEYLLREWVNLYHSAAAGRDSTKAFSAFVGQVEELKETVKEEFMPWVSQYLVMKRVSIEPNFHSLYSNFLDTLKNPEFNKMVLNETYRNIKVLLTSDKAAANFSDRSLLKNLGHWLGMITLAKNKPILHTDLDVKSLLLEAYVKGQQELLYVVPFVAKVLESSIRSVVFRPPNPWTMAIMNVLAELHQEHDLKLNLKFEIEVLCKNLALDINELKPGNLLKDKDRLKNLDEQLSAPKKDVKQPEELPPITTTTTSTTPATNTTCTATVPPQPQYSYHDINVYSLAGLAPHITLNPTIPLFQAHPQLKQCVRQAIERAVQELVHPVVDRSIKIAMTTSLRTASPQQREMMDQAAAQLAQDNCELACCFIQKTAVEKAGPEMDKRLATEFELRKHARQEGRRYCDPVVLTYQAERMPEQIRLKVGGVDPKQLAVYEEFARNVPGFLPTNDLSQPTGFLAQPMKQAWATDDVAQIYDKCITELEQHLHAIPPTLAMNPQAQALRSLLEVVVLSRNSRDAIAALGLLQKAVEGLLDATSGADADLLLRYRECHLLVLKALQDGRAYGSPWCNKQITRCLIECRDEYKYNVEAVELLIRNHLVNMQQYDLHLAQSMENGLNYMAVAFAMQLVKILLVDERSVAHVTEADLFHTIETLMRINAHSRGNAPEGLPQLDWKYYRAQAEQQDNPAGNPNMIRAKCYHNLDAFVRLIALLVKHSGEATNTVTKINLLNKVLGIVVGVLLQDHDVRQSEFQQLPYHRIFIMLLLELNAPEHVLETINFQTLTAFCNTLPHVEALPKLPGFVYAWLELISHPDIYCKNAGHIPPQAEX

SEQ ID NO: 32387 - protein, 44 aa, Homo sapiens [sequence omitted]

SEQ ID NO: 32388 - protein, 78 aa, Homo sapiens
GLVSIKDKSQQVIVQGVHELYDLEETPVSWKDDTERTNRLVLIGRNLDKDILKQLFIATVTETEKQWTTHFKEDQVCT

SEQ ID NO: 32389 - protein, 62 aa, Homo sapiens
MDLIVVLNFFTSSSGTKSVLLMRMISAKATCLVASLIRPSGFSSVKCFNPYFESTIVMIPSR

SEQ ID NO: 32390 - protein, 200 aa, Homo sapiens
  misc_feature (1)...(200): Xaa = X or * as defined in Table 2
MNVTVLEGGPSNAQAPDVGQRLAAVSEGHGWGQLGAWEDLLDSMPGAPAHPAACSGEGSPAESIYSGSPSPSTKRDTADDFLAQTEVSDWGGIKDARRRTSDRQQVTYKDPQRGLGSDGMPSFQAELNLFLLWETAPETSDCVGSEWHMLVGPRNTAVGLTVADIINQSCTLSSSAPSLIPGGCSTGQQEPPSQTGGPGX

SEQ ID NO: 32391 - protein, 256 aa, Homo sapiens
MKPQTLAVRGLTGSEVKLQTFTVSVTALKVAHLELFVPPGGLVILLASGVKLQTFACSAGLKDSSSAAKVGAQAEEAPRASEGCEDCQHAVTSQADIGSCEDPPVSLHLKQSYNCPVNAEEEAPVCCSARYNLAILAFFGFFIVYALRVNLSVALVDMVDSNTTLEDNRTSKACPEHSAPIKVHHNQTGKKYQWDAETQGWILGSFFYGYIITQIPGGYVASKIGGKMLLGFGILGTAVLTLFTPIAADLGVGPLI

SEQ ID NO: 32392 - protein, 332 aa, Homo sapiens
  DOMAIN (182)..(202): VASOPRESSIN V2 RECEPTOR SIGNATURE domain identified by eMATRIX, accession number PR00898F, p-value=8.886e-09, raw score of 9.10
MKPRTLARVQSSSDVRMCSAFWWVRGLAGSEVKLQTFLVSVTALKVVRLELFVPPGVKVQTFTVSITAHKSSVDPKREQQQGLSQRAKEQSYHSVEGDPSKLPLLAQAACFYSLIWPHPHPADWSILQRAEWHKRSSSSHQTQEPSWLHPVDLALGLQVELPASPEPSAALLSPWVVDGTGRPGAGGGARRGGSGCTGAHGGGGSSGMEGCRSRALPRGKAAKARGEIERSAAEGAGFGLGRPRKGLPQCSGGLKGSSSAAKVGAQAEEAPRASEGCEGCPHAVTSHLGLELQLCPEVWAPAGLVERTTLATPPTSASFFSAATPEGPPLAS

SEQ ID NO: 32393 - protein, 83 aa, Homo sapiens
MASCRSRALLRGKAAKAAEGAGSGLGHPRKGLPQCSGGLKGSSSAAKVGAQAEEAPRASEGCEDCQHAVTSQEEEELKLKSKT

SEQ ID NO: 32394 - protein, 150 aa, Homo sapiens
MEQRVVFVEEARAAQEPTEGVEGSGMAGCRSRALPDGKAAKARREIERSAAEGAGFGLGRPRKGLPQCSGGLKGSSSAAKVGAQAEEAPRASEGCEGCPHAVTSHLGLELQLCPEVWAPAGLVERTTLATPPTSASFFSAATPEGPPLAS

SEQ ID NO: 32395 - protein, 281 aa, Homo sapiens
  DOMAIN (214)..(228): Phage integrase family domain identified by eMATRIX, accession number PF00589B, p-value=1.621e-11, raw score of 16.17
  DOMAIN (78)..(260): "Phage" integrase family domain identified by PFam, accession name Phage_integrase, E-value=1.5e-13, PFam score of 58.5
MACALVHVKGAPGSGGTHYTYSYCVRNWWVLGLTDFKNEAANPHGVKLRTFAVSVTAHEGNVDPKTEQQQDLLQRAKEQSFHSVEGDQSGLPLLAWAACFYSLIWPHPHPADWSILQRAQCTGVFIKHSADMEAIPNGMMNLNRQRIHTLSPCVYYLPMVFIRDKLMERRNRRTGRTEKARIWEVTDRTVRTWIGEAVAAAAADCVTFSVPVTPHTFRHSYAMHMLYAGIPLKVLQSLMGHKSISSTEVYTKVFALDVAARHRVQFAMPESDAVAMLKQLS

SEQ ID NO: 32396 - protein, 118 aa, Homo sapiens
MVSLASGVKLQTFTVSVTAHKGGMDPKSEQQQDLLQRATEQSFHSMEGHPSGLPLLAQAACFSSLIWPHPHPADWSILQKVSLFYRELLVHFYRVLIGAFTIPELDTKVLHVPTRLAR

SEQ ID NO: 32397 - protein, 1192 aa, Homo sapiens
  DOMAIN (107)..(152): Phosphorylase pyridoxal-phosphate attachment site proteins domain identified by eMATRIX, accession number BL00102I, p-value= 8.060e-09, raw score of 12.62
MRCHIRLGGPEPEPPGDEGADSRQPPPPPEPAAQVIREEAGRRVPWPLSPTTRGGNEDPLSASTSGCQSVVDPGLRPGPKSCNEDPGSDPTSSPDSATPDDTSNSSSVEPTEAGGSSGMAGCRSRALPGGKAAKARREIQRSAGEGMLGTQRENSRTSCAQRDNPKASRTSSPNRATRDNPRTSCAQRDNPRASSPSRATRDNPTTSCAQRDNPRASRTSSPNRATRDNPRTSCAQRDNPRASSPSRATRDNPTTSCAQRDNPRASRTSSPNRATRDNPRTSCAQRDNPRASSPNRAARDNPTTSCAQRDNPRASRTSSPNRATRDNPRTSCAQRDNPRASSPNRATRDNPTTSCAQRDNPRASRTSSPNRATRDNPRTSCAQRDNPRASSPNRTTQQDSPRTSCARRDDPRASSPNRTIQQENPRTSCALRDNPRASSPSRTIQQENPRTSCAQRDDPRASSPNRTTQQENPRTSCARRDNPRASSRNRTIQRDNPRTSCAQRDNPRASSPNRTIQQENLRTSCTRQDNPRTSSPNRATRDNPRTSCAQRDNLRASSPIRATQQDNPRTCIQQNIPRSSSTQQDNPKTSCTKRDNLRPTCTQRDRTQSFSFQRDNPGTSSSQCCTQKENLRPSSPHRSTQWNNPRNSSPHRTNKDIPWASFPLRPTQSDGPRTSSPSRSKQSEVPWASIALRPTQGDRPQTSSPSRPAQHDPPQSSFGPTQYNLPSRATSSSHNPGHQSTSRTSSPVYPAAYGAPLTSPEPSQPPCAVCIGHRDAPRASSPPRYLQHDPFPFFPEPRAPESEPPHHEPPYIPPAVCIGHRDAPRASSPPRHTQFDPFPFLPDTSDAEHQCQSPQHEPLQLPAPVCIGYRDAPRASSPPRQAPEPSLLFQDLPRASTESLVPSMDSLHECPHIPTPVCIGHRDAPSFSSPPRQAPEPSLFFQDPPGTSMESLAPSTDSLHGSPVLIPQVCIGHRDAPRASSPPRHPPSDLAFLAPSPSPGSSGGSRGSAPPGETRHNLEREEYTVLADLPPPRRLAQRQPGPQAQCSSGGRTHSPGRAEVERLFGQERSLDWEGLLELLQARLPRKDPAGHRDDLARALGPELGPPGTNDVPEQESHSQPEGWAEATPVNGHSPALQSQSPVQLPSPACTSTQWPKIKVTRGPATATLAGLEQTGPLGSRSTAKGPSLPELQ

SEQ ID NO: 32398 - protein, 181 aa, Homo sapiens
MQGNVDNQFPGQAAPPGFPVYPAFSPLQMLWWQQMYAHQYYMQYQAAVSAQATSNVNPTQPTTSQPLNLAHVPGEEPPPAPNLVAQENRPMNENVQMNAQGGPVLNEEDFNRDWLDWMYTFSRAAILLSIVYFYSSFSRFIMVMGAMLLVYLHQAGWFPFRQEGGHQQAPNNNAEVNNDGF

SEQ ID NO: 32399 - protein, 1168 aa, Homo sapiens
  DOMAIN (395)..(410): PHD-finger domain identified by eMATRIX, accession number PF00628, p-value=8.714e-10, raw score of 15.84
  DOMAIN (260)..(433): PHD-finger domain identified by PFam, accession name PHD, E- value=4.2e-08, PFam score of 40.4
MKLPSVEKEEAVDEAERGHWTATTSGKCPGQVVPGDLRQSNSSRALDIVTAHISPKSLRRGTRETGEGAGSGKQERERAALARIGRRRGHEQGLSTYCVPSRFTKGFSFDVHYSPCPGVLMPHLQRDKPDFGEVKSLAESRTARTSQGTFADGLVEEARTSQFRTRTRPTRAKFTNLTKEPERGRPRRDSGHRNNLALGPYSQARRSKRRASPTPPCVDVASSSRQPSEIPCVHRSEERKRSRPRAPEGAHGSMKEMVGGCCVCSDERGWAENPLVYCDGHACSVVVHQACYGIVQVPTGPWFCRKCESQERAARVRCELCPHKDGALKRTDNGGWAHVVCALYIPEVQFANVLTMEPIVLQYVPHDRFNKTCYICEEQGRESKAASGACMTCNRHGCRQAFHVTCAQMAGLLCEEEVLEVDNVKYCGYCKYHFSKMSRKDKERLKQKHKKRPESPPSILTPPVVPTADKVSSSASSSSHHEASTQETSESSRESKGKKSSSHSLSHKGKKLSSGKVSSLQSSPDFSAFPKLEQPEEDKYSKPTAPAPSAPPSPSAPEPPKADLFEQKVVFSGFGPIMRFSTTTSSSGRARAPSPGDYKSPHVTGSGASAGTHKRMPALSATPVPADETPETGLKEKKHKASKRSRHGPGRPKGSRNKEGTGGPAAPSLPSAQLAGFTATAASPFSGGSLVSSGLGGIYTSNKDPISHSGGMLRAVCSTPLSSSLLGPPGTSALPRLSRSPFTSTLPSSSASISTTQVFSLAGSTFSLPSTHIFGTPMGAVNPLLSQAESSHTVCLGISAYGGLNLSGYLRVKGAGHKRPALSLESQPSPRKLIGAGRPPVRLGGGAYSQAADSEPDLEDCSFRCRGTSPQESLSSMSPISSLPALFDQTASAPCGGGQLDPAAPGTTNMEQLLEKQGDGEAGVNIVEMLKALHALQKENQRLQEQILSLTAKKERLQILNVQLSVPFPALPAALPAANGPVPGPYGLPPQAGSSDSLSTSKSPPGKSSLGLDNSLSTSSEDPHSGCPSRSSSSLSFHSTPPPLPLLQQSPATLPLALPGAPAPLPPQPQNGLGRAPGAAGLGAMPMAEGLLGGLAGSGGLPLNGLLGGLNGAAAPNPASLSQAGGAPTLQLPGCLNSLTEQQRHLLQQQEQQLQQLQQLLASPQLTP

SEQ ID NO: 32400 - protein, 93 aa, Homo sapiens
SLRRGTRETGEGAGSGKQERERAALARIGRRRGHEQGLSTYCVPSRFTKGFSFDVHYSPCPGVLMPHLQRDKPDFGEVKSLAESRTARVCVTP

SEQ ID NO: 32401 - protein, 113 aa, Homo sapiens
MAAVAAVRWLGLCSRLDQPLTDLRALDVANWLEVITQIWKDSKEYSHTFCNNLREEILTLMAMDKHPPELQRVMTDFAINQEQKEALGNFTALTSNSDTDSSSDSDSDTSEGK

SEQ ID NO: 32402 - protein, 394 aa, Homo sapiens
MGDTTAVPYVFQDDPYLMPASSLESRSFLLAKKSGENVAKFIINSYPKYFQKDIAEPHIPCLMPEYFEPQIKDISEAALKERIELRKVKASVDMFDQLLQAAPALEAAGYRANTDLCNANQACIALRQPHPRPWFINKDKIYSCKKSCQHRAYEQALNLYTELLNNRLHADVYTFNALIEATVCAINEKFEEKWSKILCSSLRDLELAYQVHGLLKTGDNWKFIGPDQHRNFYYSKFFDLICLMEQIDVTLKWYEDLIPSAYFPHSQTMIHLLQALDVANRLEVIPKIWKDSKEYGHTFRSDLREEILMLMARDKHPPEVGLKLTSQTLPRPIEVVELASAFSLPICEGLTQRVMSDFAINQEQKEALSNLTALTSDSDTDSSSDSDSDTSEGK

SEQ ID NO: 32403 - protein, 16 aa, Homo sapiens
MFEERPKGRCRRSCEG

SEQ ID NO: 32404 - protein, 85 aa, Homo sapiens
MKRVQKPCKKDLNSIRQNLASHRGQALASGLRPWARCQANQGHSASHLQWVLTVGARLWLPLIFTPISVPTSHKRHFQNADASRE

SEQ ID NO: 32405 - protein, 280 aa, Homo sapiens
MPRSSQHSESSPLDTTTQRKGASSLAHQASEKQFQPTHDLAAKERCIPGANRTQGRRSQCPLRCHSQSIKKSHPGKSGISSSFGSIAGPAGAIHFLQSVYGFAQHSWYIPAVVLEQKLMMGSLPAGAPPQQGHCGLPVALDKGHTYEGPFPHSPVCSQVLATTPCSHTYPPRVSNSSKFLIVLGAGKSELNMPADSVAGGFVGPADQNTSSGVSPEFEFYLSYLLAAIPDSHYFTSLCLHIFLSITGDPEAKPGLKGLVPQEWHMGPHTPMVVLVSIELS

SEQ ID NO: 32406 - protein, 74 aa, Homo sapiens
MGNMHKEENISGCCGRADVLCLQSRIPLIPPFNKGNPVGRERNVLKCRSRRDRRIKRNVSRCPLRKDDECSIVA

SEQ ID NO: 32407 - protein, 48 aa, Homo sapiens
MPDPSLVSSRGSSRCELGYQSCVQGCRLAMSFEHLLHLWHMVSSLFFL

SEQ ID NO: 32408 - protein, 167 aa, Homo sapiens
MASLQPDTGLVASSHLEDPLLDTKEGSGILKAKGKHELLNEVTRDLISCLAEIQMYHILNVSLIYPPCHTIRRRNECRGAVHSVMDVDGALQQAVGSLGGSRNVNLETDEQERGSLEKSLIRHYPGSQITGNAEAKSLPFVTAGTQFALYGHEPSYLQHQMGGMKPR

SEQ ID NO: 32409 - protein, 48 aa, Homo sapiens; identical to SEQ ID NO: 32407

SEQ ID NO: 32410 - protein, 128 aa, Homo sapiens
MCRGAKVFKDMASLQPDTGLVASSHLEDPLLDTKEGSGILKAKGKHELLKEVTRDLISCLAEIQMYHILNVSLIYPPCHTIRRRNECRGAVHSVMDVDGALQQAVGSLGGSRNVNLETDEQERGSLEK

SEQ ID NO: 32411 - protein, 298 aa, Homo sapiens
MSGFCKAALNTSAGNSNPYLPYSCELPLCYFSSKCMCSSGGPVDRAPDSSKDGRNHHKTMGHYNHNDSLRKTQINSLKNSVACPGAQKAITSSEAVDRFMPRTTQLQERKRRREDDRKLGTFLQTNPTGNEIMIGPLLPDISKVDMHDDSLNTTANLIRHKLKELIRFNFSYDVLVAGRAADKTPQTPGYRKKRLYSARSVGRLVSQEPCSLKKKFLVLLRAYNSSQYTLDLVWEIHHTYRKQELSIAKEVKSSMEVLNIVTEIIMNVFLGPKCQDGAELSMIALTSAVGCSPTEESV

SEQ ID NO: 32412 - protein, 109 aa, Homo sapiens
MEGALTARDKVGVQDFVLLDAYTSESAFVDNLRKRFSENLIYDCHWLMSQELLGAIATFSLKQIGMVTTVQSSVTDSSAPRGQIPTIGAHQASRRGSNSNSSGPPREQW

SEQ ID NO: 32413 - protein, 120 aa, Homo sapiens
MGQDFVFFQLGIPFKASQAFGRAFLGATSWGFHIGPGDYIQASLGQNHPFRRQWGCGPGSLHPRLRPNGRNQRITGPQAVPPAEPGAAGCIATFSLSKSAWSPQSSPQSPTALPLGVRSH

SEQ ID NO: 32414 - protein, 184 aa, Homo sapiens
MQTLFTLLQPSSQTPGIPQPIVCCVYAESGARDSGQPPLKCQCLHSALLLPHRGAEGNQDAATQQEIALLPNNAADLGKYITGDKVLASNTYLPGPPGLPGGQGPPGTWMKVETITQQTNTGTENRVFSLSLYMTISKQYLSEEQGSHWLSCLINALQAFFSNAAIWLVTWFELSRVLDGAEND

SEQ ID NO: 32415 - protein, 129 aa, Homo sapiens
MTPKHDHLGHVLPISLQLLLELSSCLPAASAVWCAGCNDPWMTGYPDNMHYNYKPMLHDRGGSAVTLSASQSWYAGCNAEKSEVNAFPGTQGMRFISAASYKDWVQVLQQKDVSRNMGTKARSASSLKN

SEQ ID NO: 32416 - protein, 569 aa, Homo sapiens
MKEALREAVFVTSEASLKNLCQMSQAVLDEDLFNFLQAHWFTCELLWYMHVRKGLLACNTYMDSLDIVTSKVSSLFREQQSLLDCILCFVDYIDFFNTKGLKNLPTPPPKLKRARPASMPLKSKKAFGICGESLTSLPAEETKPDAQHIAKVMKNFLKVDEGSMASFSVGDSQHLDRRGGQSSKMTDLFIRFPENLLLHRVENTQGHILYAFLVENKERESRVVHFAVLKAETVTSVAKMLSIFTEFNSDWPKVKVVFVDPSFHYRAILQEIFPAARILLSIYHTTRLLEKKLHRSSANPSFKRLMKEALREAVFVTSEASLKNLCQMSQAVLDEDLFNFLQAHWFTCELLWYMHVRKGLLACNTYMDSLDIVTSKVSSLFREQQSLLDCILCFVDYIDFFNTKGLKNLPTPPPKLKRARPASIATEVQEGFWESVERALPASLQKRPKPDAQQRTLTRLAKMGCKLQAGSFQQWYHLPCRHILALLHTSQQPVGEAMVSRRWQKKYQYLLGPNGELQDRGMVPITGKHKKQGRNDMIQDLSRELANLLMQTRGARAGGTLLHPAQDVE

SEQ ID NO: 32417 - protein, 135 aa, Homo sapiens [sequence omitted]

SEQ ID NO: 32418 - protein, 171 aa, Homo sapiens
MTNKKTGNPYTNVPPLEVGVITALRKPGVQTGSWAQSILKMRKQHPQGGEGLTEDPPTLKDSGYSLPDPRHIAKGLWLSPQCSSVQELSGLRSACIDSRPHTLDAVCAVAISATHHQELVHVGLQSRSLAPHRSYYVVTGANVTQRVGQRTDEGLSRNLLYRCPSQYSQWH

SEQ ID NO: 32419 - protein, 203 aa, Homo sapiens
MSQSALAFTAADPQAVPRRMGEACQGSHMSSIKLKGPKEMAVTENSGPWLAGALENSYAGQRPGETCAPGGSAPAGSSLEEIPQCVYSLRVPLNLSGKPTVARASRWNVGAAVEVLRLHWLSVSHGGRAWTLIPVERACCCGRWAGEGPSMLHAALEVVSRFQAGVYNLGGSAMVSVLLTVQSDFKSVESEPEAPGTAAPLAV

SEQ ID NO: 32420 - protein, 101 aa, Homo sapiens
  DOMAIN (7)..(77): Eukaryotic protein kinase domain identified by PFam, accession name pkinase, E-value=1.2e-09, PFam score of 38.8
  misc_feature (1)...(101): Xaa = X or * as defined in Table 2
MRFVRLITYILLCGFEPFYDERGEPVMFKRNLKCEYYFISPWGDEESLNAKDLGRKLIVLDPKKRLTTFQALQHPWVTGKAANFVHMDTAQKKLQEFYARX

SEQ ID NO: 32421 - protein, 159 aa, Homo sapiens
MPIILRNTRFLYTTSKRKVDLQILGLSIVPSMYTAAVWHRYVSCRIASYKVATPEVPCTTSARTTSVMNGCPSEQGPCDLACPVPSRNFTSTIDVEHTDHTRGQKINCLGSKETADYIQALQHPWVTVLFLVSIAFSYGASHDTIDARYQIEQEQHQLM

SEQ ID NO: 32422 - protein, 474 aa, Homo sapiens
  DOMAIN (169)..(188): TYROSINE KINASE CATALYTIC DOMAIN SIGNATURE domain identified by eMATRIX, accession number PR00109B, p-value=1.353e-12, raw score of 12.27
  DOMAIN (61)..(301): Eukaryotic protein kinase domain identified by PFam, accession name pkinase, E-value=2.3e-86, PFam score of 300.3
  misc_feature (1)...(474): Xaa = X or * as defined in Table 2
XGGGGGGGFRSPAAKMLKVTVPSCSASSCSSVTASAAPGTASLVPDYWIDGSNRDALSDFFEVESELGRGATSIVYRCKQKGTQKPYALKVLKKTVDKKIVRTEIGVLLRLSHPNIIKLKEIFETPTEISLVLELVTGGELFDRIVEKGYYSERDAADAVKQILEAVAYLHENGIVHRDLKPENLLYATPAPDAPLKIADFGLSKIVDYQVSHEDSCAYGPEVDMWSVGIITYILLCGFEPFYDERGDQFMFRRILNCEYYFISPWWDEVSLNAKDLVRKLIVLDPKKRLTTFQALQHPWVTGKAANFVHMDTAQKKLQEFNARRKLKAAVKAVVASSRLGSASSSHGSIQESHKASRDPSPIQDGNEDMKAIPEGEKIQGDGAQAAVKGAQAELMKVQALEKVKGADINAEEAPKMVPKAVEDGIKVADLELEEGLAEEKLKTVEEAAAPREGQGSSAVGFEVPQQDVILPEY

SEQ ID NO: 32423 - protein, 65 aa, Homo sapiens
MEVSGSCSCSEGVAQCPAGWVTSGTARPLVGFSLPIGMLELLLHISSPLTPAPETVFPSPSSGCD

SEQ ID NO: 32424 - protein, 196 aa, Homo sapiens
MTIHILILLLLLAFSAQGDLDTAARRGQHQVPQHRGHVCYLGVCRTHRLAEIIYWIRCLHQGALGEGQPRAPGPLQLWAPPVARGGSPARFPGFRPAARGLAQCPARWVTSGTARPLLGFSLPIWLQRDMAEAHQAVGFRPSLTSDGAEVELSAPVLQEIYLSGLRSWKRHLSRFWVRSGAGRFPSGDPGFCFRDV

SEQ ID NO: 32425 - protein, 113 aa, Homo sapiens
MPEPTAWRKNHILDSLVSNQGAFGKAQPRSPRTPYSLWAPPVARGGSPARFPGFRPAARGLAQCPARWVTSGTARPLLGFSLPICMLELLLHISSPLTPAPETVFPSPSPGCD

SEQ ID NO: 32426 - protein, 98 aa, Homo sapiens
MVKYFLGQSVLRSSWDQSVSRLSGSGYPNPYSKHVLTEDIVHRELPLGCNVLEDSIVDPQNQTMTTFTWEHPTTPRLNGGGGNDVFYCCELLTTVGWD

SEQ ID NO: 32427 - protein, 165 aa, Homo sapiens
MGQDFAASPAIQVGGRRVEGRQAVTNLERQGRKECRYKSSSEAITGSAGADPEVELLDHKDRAKAEAVNKRLRKQLAEFRAPQVMTYVREKILNADLEKSIRMWERKVEIAEDLIPCMYTVGMGLSDSVRIPQTLNMVPCNRKHPRSCELREINGLWETICWCQK

SEQ ID NO: 32428 - protein, 67 aa, Homo sapiens
  misc_feature (1)...(67): Xaa = X or * as defined in Table 2
MTYKSNQLLSSHGLLSLFPVCLGVSQPPTPXLSIISLGPHLPIGKLFSKPWPLELLPLKEPQGTLMV

SEQ ID NO: 32429 - protein, 152 aa, Homo sapiens
MGASSQGPLKSLDGALYDDEDDDDIERASKLSSEDGEEASAYLYESDDSVETRVKTPYSGLDFQLTSPEVSQTDKGKTEKRETLSQISDDLLIPGLGRHSSTFVPWEKEGKEAKETSEDIGLLHEVVSLCHMTSDFQQSLNISDKNTNGNQT

SEQ ID NO: 32430 - protein, 142 aa, Homo sapiens
MTFTLGDSQVLLINLFPSMPSGTLCHTLDCEGPTVLLLYELPEPLFRGPNVTSLSWAWPMEHLGDICLTVLAPSAKADNTRPLLPHDHLQTSPSPYPSQCGRKTRTALKKSPKPTDTQRVHCVCHLPPPTFCILRDAAWMFP

SEQ ID NO: 32431 - protein, 43 aa, Homo sapiens
MSGYGNQGAVNSSYYSSGSRASMGVNGMGGLSSMSSMSGGWGM

SEQ ID NO: 32432 - protein, 354 aa, Homo sapiens
  DOMAIN (26)..(273): RNA recognition motif. domain identified by PFam, accession name rrm, E-value=7.1e-21, PFam score of 82.8
  misc_feature (1)...(354): Xaa = X or * as defined in Table 2
XFKSNGIEMDWVMKHNGPNDASDGTVRLRGLPFGCSKEEIVQFFQGLEIVPNGITLTMDYQGRSTGEAFVQFASKEIAENALGKHKERIGHRYIEIFRSSRSEIKGFYDPPRRLLGQRPGPYDRPIGGRGGYYGAGRGSMYDRMRRGGDGYDGGYGGFDDYGGYNNYGYGNDGFDDRMRDGRGMGGHGYGGAGDASSGFHGGHFVHMRGLPFRATENDIANFFSPLNPIRVHIDIGADGRATGEADVEFVTHEDAVAAMSKDKNNMQHRYIELFLNSTPGGGSGMGGSGMGGYGRDGMDNQGGYGSVGRMGMGNNYSGGYGTPDGLGGYGRGGGGSGGYYGQGGMSGGGWRGMY

SEQ ID NO: 32433 - protein, 479 aa, Homo sapiens
  DOMAIN (13)..(32): Eukaryotic  RNA-binding region RNP-1 proteins domain identified by eMATRIX, accession number BL00030A, p-value=8.286e- 09, raw score of 14.39
  DOMAIN (13)..(359): RNA recognition motif. domain identified by PFam, accession name rrm, E-value=8e-32, PFam score of 119.1
MMLGTEGGEGFVVKVRGLPWSCSADEVQRFFSDCKIQNGAQGIRFIYTREGRPSGEAFVELESEDEVKLALKKDRETMGHRYVEVFKSNNVEMDWVLKHTGPNSPDTANDGFVRLRGLPFGCSKEEIVQFFSGLEIVPNGITLPVDFQGRSTGEAFVQFASQETPEKALKKHKERIGHRYIEIFKSSRAEVRTHYDPPRKLMAMQRPGPYDRPGAGRGYNSIGRGAGFERMRRGAYGGGYGGYDDYNGYNDGYGFGSDRFGRDLNYCFSGMSDHRYGDGGSTFQSTTGHCVHMRGLPYRATENDIYNFFSPLNPVRVHIEIGPDGRVTGEADVEFATHEDAVAAMSKDKANMQHRYVELFLNSTAGASGGAYEHRYVELFLNSTAGASGGAYGSQMMGGMGLSNQSSYGGPASQQLSGGYGGGYGGQSSMSGYDQVLQENSSDFSIKHCIGNQGAVNSSYYSSWKPVHLWGVNGMGRVV

SEQ ID NO: 32434 - protein, 122 aa, Homo sapiens
MDLAGLLKSQFLCHLGFCYVFIASGLIINTIQLFTLLLWPINKQLFPEDQLQDCSYCISSRHVVLLPEEQGTNSSDTDTSHHRAFPVNAYVFNWSLQASHRTCSTLQGPHSLEVELVGGISV

SEQ ID NO: 32435 - protein, 58 aa, Homo sapiens
MPTTWTLCLSEINPVPERDKYTPFPTYMGYLTSNVRRTKYCGICPQAGGGENELFNGY

SEQ ID NO: 32436 - protein, 64 aa, Homo sapiens
  misc_feature (1)...(64): Xaa = X or * as defined in Table 2
MWESLELPRDWFNGFDQNCGNDMDNEIQDEVVSDGDEKLVGNWSKAGTSNLSETEPPLWKESPX

SEQ ID NO: 32437 - protein, 86 aa, Homo sapiens
  DOMAIN (15)..(28): HMG-I and HMG-Y DNA-binding domain proteins (A+T-hook) domain identified by eMATRIX, accession number BL00354B, p-value=7.608e- 09, raw score of 3.16
MAAVQSSFGSASEGDRGKRGRGRPWGEGEGEGEGEVESFILDQEDLDNPVLKTTSEIFLSSTAEGADLRTVDPETQARLEALLEAA

SEQ ID NO: 32438 - protein, 874 aa, Homo sapiens
  DOMAIN (136)..(191): Domain present in ZO-1 and Unc5-like netrin receptors domain identified by eMATRIX, accession number PF00791B, p-value=4.165e- 13, raw score of 28.49
  DOMAIN (99)..(304): Ank repeat domain identified by PFam, accession name ank, E- value=1.5e-26, PFam score of 101.6
MLRSLRLQQEWLEWEDRRRAAAQQCRSRRCPSSPRARLTRPHRSCRDPAVHQALFSGNLQQVQALFQDEEAANMIVETVSNQLAWSAEQGFWVLTPKTKQTAPLAIATARGYTDCARHLIRQGAELDARVGGRAALHEACARAQFDCVRLLLTFGAKANVLTEEGTTPLHLCTIPESLQCAKLLLEAGATVNLAAGESQETPLHVAAARGLEQHVALYLEHGADVGLRTSQGETALNTACAGAEGPGSCRRHQAAARRLLEAGADARAAGRKRHTPLHNACANGCGGLAELLLRYGARAEVPNGAGHTPMDCALQAVQDSPNWEPEVLFAALLDYGAQPVRPEMLKHCANFPRALEVLLNAYPCVPSCETWVEAVLPELWKEHEAFYSSALCMVNQPRQLQHLARLAVRARLGSRCRQGATRLPLPPLLRDYLLLHMKRSRCRDRPQPPPPDRREDGVQRAAELSQSLPPRRRAPPGRQRLEERTGPAGPEGKEQPPALASQSAEIAASARLPPRLGSEERLCLAAHRLGYNSLSNYWGIILDTSVPREIHTILVYQESNRKMDSVDPASSQAMELSDVTLIEGVGNEVMVVAGVVVLILALVLAWLSTYVADSGSNQLLGAIVSAGDTSVLHLGHVDHLVAGQGNPEPTELPHPSEGNDEKAEEAGEGRGDSTGEAGAGGGVEPSLEHLLDIQGLPKRQAGAGSSSPEAPLRSEDSTCLPPSPGLITVRLKFLNDTEELAVARPEDTVGALKSKYFPGQESQMKLIYQGRLLQDPARTLRSLNITDNCVIHCHRSPPGSAVPGPSASLAPSATEPPSLGVNVGSLMVPVFVVLLGVVWYFRINYRQFFTAPATVSLVGVTVFFSFLVFGMYGR

SEQ ID NO: 32439 - protein, 515 aa, Homo sapiens
MRLSVNNCSRPPGIFKASLHSHRGTQALTTQKKSPAKSPTAATTETRVMRKISHGTRDPPGFASLTAVDALWEVVCIPVRAAVPEPAEVTLDPELVAVLAPLEVVLDSELVAVLAPLDTVLDSELVAVLAPLEVVLDSEVVAVLAPLDTVLDSELVAVLVPLEVVLDPELVAVLAPLEVVLDSELVAVLAPLEVVLDSELVAVLAPLEVVLESELVAVLAPLEVVLDSELVAVLAPLEGVLDSELVTVLIPLDTVLDSELVAVPAPLEVVLDSELVAVPAPLEGVLDSELVAVLAPLEVVLDSELVAVPAPLEVVLDSELVAVLAPLEVVLDSELVAVLALLDTVLDSELVAVLAPLEVVLDSELVAVLASLEVVLESELVAVLAPLEVVLESELVAVLAPLEGVLDSELVAVLAPLEVVLDSELVAMLIPLDAVLNSELVAVLIPLEVVWNSELVTMLTPLEVTLDPEMVAVLTPLEVTLDPELVAVLAPLEITLDPVLAEVLVSLEFVAEEII

SEQ ID NO: 32440 - protein, 305 aa, Homo sapiens
  DOMAIN (128)..(150): MARCKS FAMILY SIGNATURE domain identified by eMATRIX, accession number PR00963C, p-value=1.900e-28, raw score of 7.52
  DOMAIN (11)..(305): MARCKS family domain identified by PFam, accession name MARCKS, E-value=1.4e-117, PFam score of 404.1
  misc_feature (1)...(305): Xaa = X or * as defined in Table 2
XERDKGEWAKVKVNGDASPAAAESGAKEELQANGSAPAADKEEPAAAGSGAASPSSAEKGEPAAAAAPEAGASPVEKEAPAEGEAAEPGSATAAEGEAASAASSTSSPKAEDGATPSPSNETPKKKKKRFSFKKSFKLSGFSFKKNKKEAGEGGEAEAPAAEGGKDEAAGGAAAAAAEAGAASGEQAAAPGEEAAAGEEGAAGGDPQEAKPQEAAVAPEKPPASDETKAAEEPSKVEEKKAEEAGASAAACEAPSAAGPGAPPEQEAAPAEEPAAAAASIKPAQPPHMRPSPSAVLKPPQRKSAE

SEQ ID NO: 32441 - protein, 116 aa, Homo sapiens
METALHSLYQDLSRVDIWGESRMYLEKIPSANCFPADNNWVSYNSITCWHHLPGESFRSHRLRTQSHKTAPDFARPVLLTNLLQRGDCQDSLRGFDQLARAYRTQGNSLLIIKPIR

SEQ ID NO: 32442 - protein, 188 aa, Homo sapiens
MRENQKRDFWPSSGIILRVYQFVVRLSFWNGSSTWTWDCSPLLPDTGPASVQKLQNREIKEAGDPIPALLLLPEPQFFDLQSACPAYLRARLKIDRTALRPGSRPSCESVKWTHAGTHVPSCGWKAEKGEGKGYFFLKEKKAFRQSSYQPLNCKFAQVTVHTYIPNLNDYLCQTLIVKLENVVLHYIK

SEQ ID NO: 32443 - protein, 42 aa, Homo sapiens
MNQASCAGHQDFVSLKGSRMTCVQICEWRLEAWKGQCGVSWA

SEQ ID NO: 32444 - protein, 94 aa, Homo sapiens
  misc_feature (1)...(94): Xaa = X or * as defined in Table 2
MWIKQENLLSSTRPAAPEXXESSSSAGSSXSLSRTHPPLQSTPLVSGVAAGSPGCVPYPENGIGGQVAPSSTSYILLPLEAATGIPPGKQSFFN

SEQ ID NO: 32445 - protein, 79 aa, Homo sapiens
  DOMAIN (7)..(56): R3H domain identified by PFam, accession name R3H, E-value= 2.1e-09, PFam score of 44.6
  misc_feature (1)...(79): Xaa = X or * as defined in Table 2
MILLKMEQEIIDFIADNNNHYKKFPQMSSYQRMLVHRVAAYFGLVHNVDQTXKSVIINKXSSTRXLPASLVXSTGXSKG

SEQ ID NO: 32446 - protein, 81 aa, Homo sapiens
MVSYPTMSSYQVPMTQGSQGLPQQSYQQPIMLPNQAAITEYLKLGNLQRNKVYLAQGADGWKVQDWAAASGESLKLLQLVA

SEQ ID NO: 32447 - protein, 433 aa, Homo sapiens
  DOMAIN (87)..(131): Synapsins proteins domain identified by eMATRIX, accession number BL00415N, p-value=6.058e-12, raw score of 4.29
  misc_feature (1)...(433): Xaa = X or * as defined in Table 2
MPGSESSSSAGSSGSLSRTHPPLQSTPLVSGVAAGSPGCVPYPENGIGGQVAPSSTSYILLPLEAATGIPPGSILLNPHTGQPFVNPDGTPAIYNPPTSQQPLRSAMVGQSQQQPPQQQPSPQPQQQVQPPQPQMAGPLVTQSIPAKKELNAFRVRNQEQRDTGTLHEGSGKISRMVLGWEPLSPYAPDRDDVATQFGQMTLSRQSSGETPEPPSGPVYPSSLMPQPAQQPSYVIASTGQQLPTGGFSGSGPPISQQVLQPPPSPQGFVQQPPPAQMPVYYYPSGQYPTSTTQQYRPMAPVQYNAQRSQQMPQAAQQAVLEVLSPLVSTVMPPKLAVLVMAGFRLRLELSESVLLQALWWSDHLSSFSELLCRLPDVLPEPSLLPLEYDHQKDAQGQDYLTCMVLVTLLLESPTGIQEDDSNEISVIGAGPSX

SEQ ID NO: 32448 - protein, 371 aa, Homo sapiens
  DOMAIN (121)..(170): R3H domain identified by PFam, accession name R3H, E-value= 4.3e-07, PFam score of 37.0
MSEQGDLNQAIAEEGGTEQETATPENGIVKSESLDEEEKLGTCRGGWRLRIKKEENPSQEQEKLSSFSSLQEEDKSRKDDSEREKEKDKNKDKTSEKPKIRMLSKDCSQEYTDSTGIDLHEFLINTLKNNSSNHYKKFPQMSSYQRMLVHRVAAYFGLDHNVDQTGKSVIINKTSSTRIPEQRFCEHLKDEKGEESQKRFILKRDNSSIDKEDNQFPLHVWEGRDATGSELWRKALSVAYPDVCVTMAVVPLPTALSFSCAQIELDYQYGPMINRCSCKEQTLLCPQAFKMISSLSYLELATSSFFTGILPPSEESEPHSSAAPEETTSSESDGHTFLQLFHSHFSSSDLHAEQTKSKTWRRPEGKIPYAA

SEQ ID NO: 32449 - protein, 438 aa, Homo sapiens
  DOMAIN (274)..(318): Synapsins proteins domain identified by eMATRIX, accession number BL00415N, p-value=1.857e-11, raw score of 4.29
  DOMAIN (7)..(56): R3H domain identified by PFam, accession name R3H, E-value= 4.8e-12, PFam score of 53.5
MILLKMEQEIIDFIADNNNHYKKFPQMSSYQRMLVHRVAAYFGLDHNVDQTGKSVIINKTSSTRIPEQRFCEHLKDEKGEESQKRFILKRDNSSIDKEDNQSVCSQESLFVENSRLLEDSNICNETYKKRQLFRGNRDGSGRTSGSRQSSSENELKWSDHQRAWSSTDSDSSNRNLKPAMTKTASFGGITVLTRGDSTSSTRSTGKLSKAEHTPSRRVWQLALQAVCLSPENGIGGQVAPSSTSYILLPLEAATGIPPGSILLNPHTGQPFVNPDGTPAIYNPPTSQQPLRSAMVGQSQQQPPQQQPSPQPQQQGFVQQPPPAQMPVYYYPSGQYPTSTTQQYRPMAPVQYNAQRSQQMPQAAQQAGYQPVLSGQQGFQGLIGVQQPPQSQNVINNQQGTPVQSVMVSYPTMSSYQVPMTQGSQGLPQQSLPTANHAT

SEQ ID NO: 32450 - protein, 64 aa, Homo sapiens
MRGTPSVHTWRQRGQPEMERGKQLSNDGLQGENRRRRNCNSSPSTWPSSERQLHGQREQKHHAD

SEQ ID NO: 32451 - protein, 821 aa, Homo sapiens
MWMGRKSSDKCPYKTKGVSEAGYFPDPFTGLTTGASYTQPTTLNSLQEGACEQMSEGTGVNEHGNRPAALVLAGVNFMQAQWQHPEFYSVWDKVVGGKVKKPGKRGRKPAKIDLKAKLERSRQSARECRARKKLRYQYLEELVSSRERAICALREELEMLAFAGSPEENQLCASLPNLMFSDIRLYRKHDWGGLRKLTVMMEDKVRAGILHGSIGTRDRGYHTLLNNRIFSRLDINVFDEDEKKGRIQIPLKGCIPVPSLLTDGLREPGARILIKIQPQKTCQQVPIYGVLSIADLASGYLEEAHQEVDDSVGSAFPRGGEEIVTMTVPVGAIEKEHRGHKACIKDPRCRNHFLGFFSGHLEAQRIDDGVEPVYADGEENVDLDTWSEILKISHNLARCTTQRPPSSGELEQDERRAGNADEKVSTCHGDHKVVGGRLSPPTPMDDQTNQGIAEDRKQPQNPKEDAGCGHFPGFQHIVKLLYTHESVCPFPQPNHLEAEDPNAQKQDEGARGVPESRFPLLGLVLDGVVRERFSEEVIWQLKPQRQEVRHNIQAEEMMSAKTLVGHEFTMSSPAAGFSITGQHVPQGSGRQGHFPMHFTHTAQLPGYTLGCQNEMKSLSWLAAFLWGRGIPRRRSLRGPEGRTTTSSETKFFKKVKIEEVSQFITLEPAFCLAFPLFTLRKSPLAATQVTVLLPLRLRGGCEDYRNLGWLMGRFSALSRKTAVKMATKTSRRTGGFGETAHFRAVQCRAFRLLPGSTFNTVYLKIFPLAYSLAAAHFAEGWRSDLYAPCSFRDSIVFFFTRRRYYSRRLRSHYLLYRSPVP

SEQ ID NO: 32452 - protein, 200 aa, Homo sapiens
MVLLPKKGRRGYSPRRVWSPHEYLSYSYLDTDETFDVTDHAQFERDQGMELSFGYRRRILIKIQPQKTCQQVPIYGVLSIADLASGYLEEGHPQPTHTPVLARFPAKAQRTPSKHPAAGSGIRLGPFQQLLPVSGAEWKYEELMEAFKTLHKEYEQLKISGFSTAEIRKGELFAKMVEHMYDIFDEDVDSEGGVRRSTCS

SEQ ID NO: 32453 - protein, 317 aa, Homo sapiens
MVLATEPLSEPRARLYQPAHSSRNAESAQGLGGEVRATGDSLIHQVMGPEDVDMRGLYHVAIRQNPALRVTEPGTHTPAAPLNNSAAPSAQLPTLRGRVLRVQGGGNPKQLKVNSHWQDGQEKSQRCRQAGPAAQELGQGKAQLACSCWGCQRKKSCSQPHGDQQGPLSLKGGPTSTKDGKWKLAGGASPGEDLSSKELRVTDEHTHKLSQLPAATPHPAQSLRPRPPSSPGLTPRNTALRGFPKTCWHAGFSHASFLPQTAPGQLSRSLKHLLTQQLLPVLRPAQGGSGTQCVGSRNQSNLCFDIPTPPHKHLASV

SEQ ID NO: 32454 - protein, 79 aa, Homo sapiens
MDTSHKLHCEPGHSPDRMPGKTEPETAGPNQVHNVRGLLKRLKEKKKARLEPRDGPPSALGSRESLATLSELDLGAERD

SEQ ID NO: 32455 - protein, 517 aa, Homo sapiens
  DOMAIN (68)..(102): PH domain identified by PFam, accession name PH, E-value= 0.0083, PFam score of 15.1
VHNVRVRQPVKGLLKRLKEKKKARLEPRDGPPSALGSRESLATLSELDLGAERDVRIWPLHPSLLGEPHCFQVTWTGGSRCFSCRSAAERDRWIEDLRRQFQPTRTRGAGRDMAERVGARSEGLPRAAAGAPGVRAELCWMARCWHARRLGPAQAALLGRALPLRGAATGTCLSLRLRGLGPGSAVLGAWPWRWRSWTPHARLPRSGALVPAARGAGGRSVRARIRARRLRVLPSERTRSWRSSSPSTMRASAGPGARAACAGQGGAGGTMDSLGAARAPGQTSEQLRGGLRNHYPFLRLVPCELGIVFSSWREACKERGLRCWAPDWFGEKEAYMGFRIASWRNMDQPCNASWTEPVSAQRSPLRELGPPRPDEERPLRRPRPVQPRRVSRSGVLPAAANLRALAATQRLPEHGTSAPARPWTRDSASLPRKPSVPWQRQMDQPQDRNQALGTHRPVNKLAELQCEVAALREEQKVLSRLVESLSTQIRALTEQQEQLRGQLQDLDSRAPCWELRV

SEQ ID NO: 32456 - protein, 122 aa, Homo sapiens
CCVEGPGEDGWRRESLGKDGSRQNLAATGLTPILSCLLVFRTVVANSSACKHTVSYMERRIEPQVYEPGRGRSCLPTPGDLEYVDWSHRTESGCNGHISITFEKATKWHIDELLGMKTRGYF

SEQ ID NO: 32457 - protein, 451 aa, Homo sapiens
MAEGKEEQVPSYMDGSRQRKNEEDVKAETPDKTISSLRGAGGYYMWGHTRAAFSVNPFGSLGQVSLKRKTVISELKQAVPRERSTGPRRQPKPSSWLKDTLFGGRSQDGRVGTAPVYSSQRERQRRRVISAFASEERSSSPATEQSWMENDFDELREEGFRRSNYSELREDIQTKGKEVENFEKNLEECITRITNTEKCLKALMELKTKARELREECRSLRSRCDQLEERVSAMEDEMNEMKREGKSREKRIKRNEQSLQEIWDYVKRPNLRLIGVPESDAENGTKLENTLQDIIQENFPNLARQANVQIQEIQRTPQRYSSRRATPRHIIVRFTKVEMKEKMLRAAREKGRVTLKGKPMRLTANLSAETLQARREWGPIFNTLKEKNFQPRISYPAKLSFISEGEIKYFTDKQMLRDFVTTRPALQELLKEARNMERNNRYQLLQNYAKM

SEQ ID NO: 32458 - protein, 359 aa, Homo sapiens
MTNTHSYGLKGRAQHLQAPPLQLHSPSPIQTMLNFTVGHKQRCQALSTTFMSFVPEKCRTIIHCSARVEECSSSPAMEQSWMENDFDELREEGFRRSNYSELWEDIQTKGKEVENIEKNLEECITRIINTEKCLKELMELKTKAQELHEECRSLRSRCDQLEERVSAMEDEMNEMKPNLRLIGVPESDVENGTKLENTLQDIIQENFPNLARQANVQIQEIQRTPQRYSSRRATPRHLIVRFTKVEMKEKMLRAAREKGRVTLKGKPIRLTADLSAETLQARREWGPIFNIFKEKNFQPRISYPAKLSFISEGEIKYFTDKQMLRDFVTTRPALKELLKEALNMETNNQYQLLQNHAKM

SEQ ID NO: 32459 - protein, 346 aa, Homo sapiens
  DOMAIN (259)..(271): Fungal Zn(2)-Cys(6) binuclear cluster domain proteins domain identified by eMATRIX, accession number BL00463, p-value=4.214e-09, raw score of 8.22
MSVHSWKPSWIRPIRSLSPKRPLGTQGTSEVPPDTHICQTKFHSLSSGPLLLSVHPVGKLSAVVGRVFIHILSQRERRRRRVISAFPSEVPGSSHQGVPDSGCRSVGAHPVREPKQGEALPHSGSPREGKLTNRKDIHTKNPSVHHHHQRPKVDKTTKIGKKQNRKTGNSKTQSASPPPKECSSSPATEQSWMENDFDELREEGFRQSNYSELRKDIQTKGKEVENFEKNLEECKTRITNTEKCLKELMELKTKARELCEECRSLRSRCNQLEERVSVMEDEMNEMKREGKFREKRIKRNEQSLQEIWDYVKDQIYVRLVYLKVTGRMEPSWKTLCRILSRRTSPI

SEQ ID NO: 32460 - protein, 564 aa, Homo sapiens
  DOMAIN (63)..(78): G-PROTEIN BETA WD-40 REPEAT SIGNATURE domain identified by eMATRIX, accession number PR00320A, p-value=1.794e-10, raw score of 16.74
MERSFKEKRAQIWAMGQMWKEEEGNERWSVDRVVTLGKEDLREVKWARENYHHNIGSPYCLRLASADVNGKIIVWDVAAGVAQCEIQEHAKPIQDVQWLWNQDASRDLLLAIHPPNYIVLWNADTGTKLWKKSYADNILSFSFDPFDPSHLTLLTSEGIVFISDFSPSKPPSGPGKKVYISSPHSSPAHNKLATATGAKKALNKVKILITQEKPSAEFITLNDCLQLAYLPSKRNHMLLLYPREILILDLEVNQTVGVIAIERTGVPFLQVIPCFQRDGLFCLHENGCITLRVRRSYNNIFTTSNEEPDPDPVQELTYDLRSQCDAIRVTKTVRPFSMVCCPVNENAAALVVSDGRVMIWELKSAVCNRNSRNRVSAERSAVSLMGFPLKPVGKAQYSGGSDPIFQVLSVTPFFDSERELPDPLRFPGEAMPRPASARARCTHPLTCADCLALPSEMNLVPQMEMQKSPVFCVTQAGSCRPELFLFGHLGSSLEGSAFWRAVTLTVKVCGFILEVSETKNPPEGTNSRHRTARQSTELRTNIPGTGLPFHGAQFLDRRVSDWLV

SEQ ID NO: 32461 - protein, 588 aa, Homo sapiens
  DOMAIN (370)..(416): kw TRANSCRIPTASE REVERSE II ORF2 domain identified by eMATRIX, accession number DM01354O, p-value=1.000e-40, raw score of 8.73
  DOMAIN (403)..(586): Reverse transcriptase domain identified by PFam, accession name rvt, E-value=4e-07, PFam score of 31.5
MGPRWSRHSLVLYTLYTLGRHETSINICKVYISSVQKEGKLTNRKDIHTKNPSVHHRHQRPKVDKTTKTGKKQNRKTGNSKKQSASPPPKECSSSPAMEQSWMENDFDELREEGFRRSNYSELREDIQTKGKEVENFEKNLEECITRITNTEKCLKELMELKTKARELREECRRLRSRCDQLEERENGTKLENTLQDIIQENFPNLARQANIQIQEIQRTPQRYSSRRATPRHIIVRFTKVEMKEKMLKAAREKGRVTLKGEPIRLTADLSTETLQARREWGPIFNILKEKNFQPRISYPAKLSFISEGEIKYFTDKQMLRDFVTTRPALKQLLKEALNMERNNRLNQEEVESLNRPITGSEIVAIINSLPTKKSPGPDGFTAEFYQRCKEELVPFLLKLFQSIEKEGILPNSFYEASMILIPKPGRDTTKKENFRPISLMNIGAKILNKILAKKIQQHIKKLIHHDQVGFIPGMQGWFNIYKSINAIQHINRAKDKNHMIISIDAEKAFDKIQQPFMLKTLNKLVTVKWGKEKFEGVELNTDEPPMVFKAQLFALTGVQPARQKVMVKGGTLKDVEGCNTEGLTTER

SEQ ID NO: 32462 - protein, 761 aa, Homo sapiens
  DOMAIN (138)..(181): kw TRANSCRIPTASE REVERSE II ORF2 domain identified by eMATRIX, accession number DM01354T, p-value=1.000e-40, raw score of 9.48
  DOMAIN (21)..(260): Reverse transcriptase domain identified by PFam, accession name rvt, E-value=7.8e-26, PFam score of 99.2
MELKAKARELREECRSLRSRCDQLEERVSVMEDEMNEMKLNQEEAESLNRLITGSEIVAIINSLPTKKSPGPDGFTAEFYQRYKEELMQKRPLTKFNTFMLKTLNKLGIDGTYLKIIRAIYDKPTANIILNGQKLGAFPLKTGTRQGCPLSPLLFNIVLEVLARAIRQEKEIKGIQLGKEEVKLSLFADDMIVYLENPIVSAQNLLKLISNFSKVSGYKINVQKSQAFLYTNNRQTESQIMSELPFTIASKRIKHLGIQLTSDVKDFFKENYKPLLNEIKEDTNKWKNIPCSWVGRINIVKMAILPKVIYRFNAIPIKLPMTFFTELEKTTLKFIWNQKRARIAKSILSQKNKAGGITLPDFKLHYKATVTKTAWYWYQNRDIDQWNRTEPSEITLHIYNYLIFDKPEKNKQWGKDFLFNKCSAPLSWYPFTILVHFHIADKDITTKMAEQEQLRSTAPSGIPTDLQLRVLSVRRKTNRKDIHTENPSVHHHHQRPKVDKTTKMGKKQSRKTGNSKTQSTSPPPKERSSSPATEQSWMENDFDELREEGFRRSNYSELQEDIQTKGKEVENFEKNLDECITRITNKEKCLKELMELKAKARELREECRSLRSRCDQLEERVSVMEDEMNEIKREGKFREKRIKRKEQSLQEIWDYVKRPNLRLIGVPESDGENGNKLENTLQDIIQENFPNLARQANIQIQEIQRMPQRYSSRRATPRHIIVTSSKVEMQKKMLRAAREKGHVTYKGKPTKPTANLSAETL

SEQ ID NO: 32463 - protein, 388 aa, Homo sapiens
  DOMAIN (111)..(156): kw TRANSCRIPTASE REVERSE II ORF2 domain identified by eMATRIX, accession number DM01354N, p-value=4.635e-39, raw score of 13.17
MYRRSSRPSARSQDEKSMCKNHKHSYTPITNREPKHERTPICNCYKENKIPKNTAYKGCEGPLQGELQTTAQGNKRGHKQMEKHSMLMDRKNQYRENGHTAQKIKTTIREYYKHFYTNKLENLEEIDKFLETYTLLSLNQEEVESLNRPITSSEIEEVINSLPTKKVQDQTKSQPDSIREGKLTNRKDIHTKNPSVHHHHQRPKVDKTTKMGKKQNRKTGNSKTQSTSPPPKERSSSPATEQSWMENDFDELREEGFRRSNYSDLREDIQTKGKEVENFEKNLEECITRITNTEKCLKELMELKTKARELREECRSLRSRCDQLEERVSAMEDEMNEMKREGKVREKRIKRNEQSLQEIWDYVKRPNLRLIGVPESDAENGTKLENTL

SEQ ID NO: 32464 - protein, 780 aa, Homo sapiens
  DOMAIN (265)..(277): RNase H domain identified by eMATRIX, accession number PF00075C, p-value=5.622e-12, raw score of 11.58
  DOMAIN (166)..(347): Reverse transcriptase domain identified by PFam, accession name rvt, E-value=1.1e-21, PFam score of 85.5
MTHVTTWQLTFQQIHEQESERGALELMTKYFNNWNWVYDNVINHDESELNLKHIKIDLDKFSDNPDGYIDVLQGLGQSFDLTWRDIMLLLDQTLTPSERSAAITAAREFGNLWYLSQSGQQKDNMDGQRMPVLFKLKDSASFPYQRRYPLRLEAQQGLQKIVKDLKAQGLVKPFNSPCNTPILGVQKPNGQWKLVQDLRIINEAIVPLYPAVPNPYTLLSQIPEEAEWFTVLDLKDAFFCIPVHRESQFLFAFEDPSNPTSQLTWTVLPQGFRNSPHLFGQALAQDLSQFSYLNTLVLRYLDDLLLAAHLETLCHQATQKKTGIALGVLTQVQGTSFQPVAHLSKEIDVVAKGWPHCLWVVAAVAVLVSEAVKIIQGRELTVWTSHDVSGTLTAKGDLWLSDNLLLNQALLFKRPVLRLHTCATLNPATFLPNNKEKIEHNHQQVIVQTYTIQGDLLEVPLTDPDLNLYTNGSSFVEKGLRKAGIHPSRQWTPLWPKAGPEMLSKRQVLESGILKAFLVPYLLVAVLGSIDFNGKPPVAVFSLSQAHRFLCATWLLLGYGEVWIHSHTAIKTYQRRRSQDGRIGTAPVYSSQRERRRRRVISAFPSEGIPTDLQLRVLSVRRKTNKQKGHPHQKPICTSPSSRPKVDKTTKMGKKQNRKTGNSKTQSASPPPKERSSSPATEQSWMENDFDELREEGFRRSNYSELREDIQTKGKEVENFEKNLEECITRITNTEKCLKELMELKTKARELREECRSLRSQCDQLEERVSAMEDEMNEMK

SEQ ID NO: 32465 - protein, 351 aa, Homo sapiens
  DOMAIN (236)..(272): kw TRANSCRIPTASE REVERSE II ORF2 domain identified by eMATRIX, accession number DM01354F, p-value=7.943e-37, raw score of 14.56
  DOMAIN (106)..(329): AP endonuclease family 1 domain identified by PFam, accession name AP_endonucleas1, E-value=1.1e-58, PFam score of 208.4
MGKKQNRKTGNSKTQSTSPPPKECSSSPATEQSWMENDFEELREEGFRRSSYSELREDIQTKGKEVENFEKDLEECITRITNTEKCLKELMELKTKARELREECRSLRSRCDQLEERVSAMEDEMNEMKREAKETHLTCRDTHRLKIKGWRKIYQANGKQKKAGGAILVSDKTDIKPTKIKRDKEGHYIMVKGSIQQEELTILNTYAPNTGAPRFIKQVLSDLQRDLDSHTIIMGDFNTPLSTLDRSTRQKVNKDTQELNSALHQADLIDIYRTLHPKSTEYTFFSAPHHTCSKIDHILGSKALLSKCKRTEIITNCLSDHSAIKLELRIKNLTQNRSTTWKLNNLLLNDY

SEQ ID NO: 32466 - protein, 460 aa, Homo sapiens
  DOMAIN (391)..(436): kw TRANSCRIPTASE REVERSE II ORF2 domain identified by eMATRIX, accession number DM01354N, p-value=1.000e-40, raw score of 13.17
  DOMAIN (32)..(215): AP endonuclease family 1 domain identified by PFam, accession name AP_endonucleas1, E-value=2.5e-06, PFam score of -20.3
MGKKQSRKTGNSKKQSASPPPKECSSSPATEQSWMENDFDELREEGFRRSNYSELREDIQTKGKEVENFEKNLEECITRITNTEKCLKELMELKTKARELREECRSLRSRCDQLEERVSVMDDEMHEMKQERKSRQKVNKDTQELNSAQHQADLIDIYRTLHSKSIEYTFFSAPHHTYSKFDHILGSKTLLSKCKRTEIITNYLSDHSAMKLELRIKNLSQNLSTTWKLNNLLLNDYWVHNEMNAEIKMFFETNENKDTTYQNLWDAFKAVCRGRFIALNAHKRKQERPKIDTLTSQLKELEKQEQTHSKASRRQEITKIRAELKEIETQKTLQKINESRSWFSERINKIDRLLARLIKKKREKNQIDAIKNDKGDIITDLTEIQTTIREYYKHLYANKLENLEEMDKFLDTYTLPRLNQEEVEFLNRPITGSEIVAIINSLPTKKSPGPDGFTAEFYQS

SEQ ID NO: 32467 - protein, 612 aa, Homo sapiens
  DOMAIN (235)..(278): 1 kw MIND INHIBITOR DIVISION CONTROL domain identified by eMATRIX, accession number DM01756B, p-value=4.822e-15, raw score of 22.91
  DOMAIN (200)..(306): ParA family ATPase domain identified by PFam, accession name ParA, E-value=6.2e-24, PFam score of 92.9
MKLMETLNQCINAGHEMTKAIAIAQFNDDSPEARKITRRWRIGEAADLVGVSSQAIRDAEKAGRLPHPDMEIRGRVEQRVGYTIEQINHMRDVFGTRLRRAEDVFPPVIGVAAHKGGVYKTSVSVHLAQDLALKGLRVLLVEGNDPQGTASMYHGWVPDLHIHAEDTLLPFYLGEKDDVTYAIKPTCWPGLDIIPSCLALHRIETELMGKFDEGKLPTDPHLMLRLAIETVAHDYDVIVIDSAPNLGIGTINVVCAADVLIVPTPAELFDYTSALQFFDMLRDLLKNVDLKGFEPDERSSSPATEQSWMENDFDELREEGFRRSNYSELREDIQTKGKEVENFEKSLEECITRITNTEKCLKELMELKAKARELREECRSLRSRCNQLEERVSVMEDEMNEMKQEGKFREKRIKRNEQSLQEIWDYVKRPNLRLIGVPESDGENGTKLENTLQDIIQENFPNLARQANTQIQEIQRTPQRYSSRRATPRHIFVRFTKVEMKEKMLRAAREKGWVTHKGKPIRLTADLSAETLQARREWGPIFNILKEKNFQPRIAYPAKLSFISEGEVKYFTDKQMLRDFVTTRPALKELLKEALNMERNNRYQPLQNHAKM

SEQ ID NO: 32468 - protein, 1389 aa, Homo sapiens
  DOMAIN (725)..(771): kw TRANSCRIPTASE REVERSE II ORF2 domain identified by eMATRIX, accession number DM01354O, p-value=1.000e-40, raw score of 8.73
  DOMAIN (758)..(1033): Reverse transcriptase domain identified by PFam, accession name rvt, E-value=1.4e-81, PFam score of 284.5
MGDFNTPLSTLDRSTTQKVNKDTQELNSALQQADLIDIYKTLHPKSTEYTFFSAPHHTYSKIDHIIGSKALLSKCKRTEITTNYLSDHRAIELEIRIKKLTQNHTTTWKLNNLLRNDYWVNNEMKAEIKMFFETNENKDTTYQNLWDTFKAVCRGKCTALNAHKRKQERSKINTLTSQLKELEKQEETNSKASRRQEITKIRAELKEIKTQKTLQKISESGRRSQDGRIGTAPVYSSQRERRRRQVISAFPSEGTDKQKDSSNLCRLTCPCLTALKRAVVLPARSWRSENGQTASSKGKLTTRKDIYTENPSVHHHHQRTKVDKTTKMGKKQNRKTGNSKTQSTSPPPKERSSSPATEQSWMENDFDELKEEGFRRSNYSELREDIQTKGKEVENFEKNLEECITRIANTEKCLKEQLMELKTKARELREECRSLRSRCEQLEERVSAMEDEMNEMNEMKREGKFREKRIKRNEQSLQEIWDYVKRPNLRLTGVPESDGENGTKLENTLQDIIQENFPNLARQANVQIQEIQRTPQRYSSRRATPRHIIVRFTKVEMKEKILRAAREKGRVTLKGKPIRLTADLSAETLQARREWGPIFNILKEKNFQPRISCPAKLSFISEGEIKYFTDKQMLRDFVTTRPCPKRAPEGSAKHGKEQPVPAAAKSWPNVKTIETRKKLHQLTSKITSMDTFLDTYTLPRLNQEEVESLNRPITGAEIVAIINSLSTKKSPGPDGFTAEFYQRYKEELVPFFLKLFQSIEKEGILPNSFYEASIILIPKPGRDTTKKENFRPISLMNIDAKILNKILANQIQQHIKKLIHHDQVGFIPGMQGWFNIRKSINVIQHINRAKDKNHMIVSIDAEKAFDKIQQPFMLKTINKIGIDGMYFKIIRAIYDKTTANIILNGQKLEAFPLKTGTRQGCPLSPLLFNIVLEFLARAIRQEKEIKGIQLGKEEVKLSLFADDMIVDLENPIVSAQNLLKLISNFSKVSGYKINVQKSQGFLYTNNRQTESQIMSELPFTIASKRIKYLGIQLTRDVKDLFKENYKPLLKEIKEDTKKWKNIPCSWVGRINIVKMAILPKVIYSFNAIPIKLPMPFFTELEKTTLKFIWNQKRARITKSILSQKNKAGGITLPDFKLYYKATVTKTAWYWYQNRDIDQWNRTEPSEITPHIYNYLIFDKPEKNKQWGKDSLFNKWCWENWLAICRKLKLDPFLTPYTKINSRWIKDLNVRPKTIKTLEENLGNTIQDIGMGKDFMSKTPKAMATKAKIDKWDLIKLKSFCTAKETTIRVNRQPTKWEKIFATYSSDKGLISRIYNELKQIYKKKTNNPIKKWVKDMNRHFSKEDIYAAKKHMKKCSSSLAIREMQIKTTMRYHLTPVRVAIIKKSGNNS

SEQ ID NO: 32469 - protein, 138 aa, Homo sapiens
ASPGHLLGSKKEVEACSTFGGPGWDLVYCDFCILSAKARCKTSPDSKERWKETLAKALIRISERYLDLQHRAAANLSEQSSAALNGINILDIASQANEGQSEVQSSYLSTAPNQQPKALCWFSNRRVCLLKEKTSFLP

SEQ ID NO: 32470 - protein, 177 aa, Homo sapiens
MIKHQGKAAFPVRDRRRNFGSTDKTCLLCLYQKMKGIEIKRRERLKCGAKIERRKRILELEGNLENVFSIILAFQTPKLRVAEWIVIVTKRVLAELEPKLRSSDSRSALIPYQGKQVLLEDMAQDTLTAASEKKVRDSAGPTDNGCQSYSHLPSKSEQPHEPQILTSGSTPVTKPVT

SEQ ID NO: 32471 - protein, 178 aa, Homo sapiens
MIKHQGKAAFPVRDRRRSFGFMDKTCLFCKNQKMKGIEIKRRERLKCGAKIERRKRLRDKTITFLMSVALYKANERKISEEIVCPFANDGTRSISENSLVAMDFSGQKSRVIENPTEALSVAVEEGLAWRVEDDGEMFHTLDDGHTRFTDLIQLVEFYQLNKGVLPCKLKHYCARIAL

SEQ ID NO: 32472 - protein, 17 aa, Homo sapiens
  misc_feature (1)...(17): Xaa = X or * as defined in Table 2
MVYGASEAIGQHQSSAX

SEQ ID NO: 32473 - protein, 143 aa, Homo sapiens
MVYGASEAIGQHQSSAAKPRRSQSESLGPEFQGLWEWLPGSRAVKHLRVIFDEKEPKRYLIWDKEKGALTLTMPLAPATFLRVNCWAGGGGLVTERNCKPDQKMKGIEIKRRERLKCGSKIERRKRLRDSEGGWRRVEAAYRI

SEQ ID NO: 32474 - protein, 204 aa, Homo sapiens; identical to SEQ ID NO: 31010

SEQ ID NO: 32475 - protein, 138 aa, Homo sapiens
  misc_feature (1)...(138): Xaa = X or * as defined in Table 2
XVGGSGERERERERERYARYVWEKASEAIGQCHSSAAKPRRSGKESESLGPEFQGLWEWLPGELDSSISSGKMKGIEIKRMERLKCGAKIERRKRLRDSEERLRDSGEENKKRPLTGFKIGWRKKFSSGSSKIQHYCX

SEQ ID NO: 32476 - protein, 434 aa, Homo sapiens
  DOMAIN (270)..(303): RECEPTOR INTERLEUKIN-1 PRECURSOR domain identified by eMATRIX, accession number PD02870B, p-value=7.400e-10, raw score of 18.83
  DOMAIN (60)..(434): Immunoglobulin domain identified by PFam, accession name ig, E-value=1.4e-36, PFam score of 122.9
MKGIEIKRRERLKCGAKIERRKRLKDREVGEESKKRPLTGFEIEPPKVTVMPKNQSFTGGSEVSIMCSATGYPKPKIAWTVNDMFIVGSHRYRMTSDGTLFIKNAAPKDAGIYGCLAKAPKLMVVQSELLVALGDITVMECKTSGIPPPQVKWFKGDLELRPSTFLIIDPLLGLLKIQETQDLDAGDYTCVAINEAGRATGKITLDVGSPPVFIQEPADVSMEIGSNVTLPCYVQGYPEPTIKWRRLDNMPIFSRPFSVSSISQLRTGALFILNLWASDKGTYICEAENQFGKIQSETTVTVTGLVAPLIGISPSVANVIEGQQLTLPCTLLAGNPIPERRWIKNSAMLLQNPYITVRSDGSLHIERVQLQDGGEYTCVASNVAGTNNKTTSVVVHVLPTIQHGQQILSTIEGIPVTLPCKASGNPKPSVIWSK

SEQ ID NO: 32477 - protein, 118 aa, Homo sapiens
MEEVKVGAKVGKVRGLQIRSNQEVMSSKNCVCGAFSIPRATLDDIAIGSLEWPPLTPKEEDPQSFWASGKVTVLHCWRGSLPAGKSGQDHYRCPRGLHQHHSVGGFIAAEPDPPLGLS

SEQ ID NO: 32478 - protein, 142 aa, Homo sapiens
MILSGTIKHQQTSVYISLVRGLQIRSNQEVMSSKNCVCGAFSIPRATLDDIAIGSLEWKMKGIEIKRRERLKCGTKIERRKRLRDTTLNTQGGGSSILLGQWKSHSPPLLAWKPPSWEEWAGPLPLPTWPPPAPQCGRLHRC

SEQ ID NO: 32479 - protein, 137 aa, Homo sapiens
  DOMAIN (116)..(136): APPLE DOMAIN SIGNATURE domain identified by eMATRIX, accession number PR00005A, p-value=3.250e-28, raw score of 12.01
MGAVCEALRQYGPEGDRLTFHCESYPKLGVHDGLGGFRGDPAVSVFSREAEKIWEGVNQRALGQSSRGSGSGRQKMKGNEIKRRERLKGGTKIERRKWLRDRERDVDVARVLTPDAFVCRTICTYHPNCLFFTFYTN

SEQ ID NO: 32480 - protein, 152 aa, Homo sapiens
MGAVCEALQQYSLEGDGLTFHCESYPKLGVGDGLGGFRGDRAVSVFSRQAKKIWEGVSQRALGQSSRGSGSGCQKMKGIEIKRRERLKCGAKIERRKRWRDSEGGWRRVKRGRLPDLKLKGFVANVYERRTFYLLFVAEIQKAKCAETLSLE

SEQ ID NO: 32481 - protein, 108 aa, Homo sapiens
MTSGPQTHQPKEHLTNFKSCKQASCYSLLQPLSLSLNLFLLLILAPPFNLSLLLISTPFIFWWSQRRHILSIDPKLQRQSRTRKGRLPLVFNHCEDASLIIHPRSTGV

SEQ ID NO: 32482 - protein, 344 aa, Homo sapiens
MIVLRKYDNDDDSDGDDDDDNNLLNISICVFTSKLFSFPPLTCQSSPTDPLPNRRCLGALSVAPPALSLPSPLPARAGALLPSASILARGSATCCPARVHRAGPSAFLMLLLLLPPPPLLQPSRGWCLASHLKAPEPQGYREGALPAGGVTERGRAPSTEAMAETRSRAPQVTKTRVRGARFRQRLVLLPPFLLPFLWAPAARAGIVSNSGCRSSSNGGGGSGSRLQGTGTLIPELLKSWTAPGWHARAVTFTKTTPAMLLEKWSLAIPGWFSELVDDEPHAGASKDKECDQAKLPGILSMRVAEKLDLGEDPIQGECPMFPLEDLPPTWPREWSSLEIKASRP

SEQ ID NO: 32483 - protein, 114 aa, Homo sapiens
MDLMQLAMIMLKQQECYEDNETGPSDKKFSNPVYGSSFEPVRILYRILFLPESALREMELAIPGWFSELVDDEPHAGASKDKECDQAKLPGILSMRVAEKMDLGEDPITLRPLT

SEQ ID NO: 32484 - protein, 106 aa, Homo sapiens
MIEGTQASRRAKGGALNSEEWTSRGGFPEEAVPVLTLERQAAVALLEGMAWFLSPEKRTWALMGVSRPRIAWGVWRLTQPFIQGKLFLQEVLPDKPALVQHPSLKQ

SEQ ID NO: 32485 - protein, 105 aa, Homo sapiens
MIKHQGKAAFPVRDRRRNFGSTDKTCLLCLYQKMKGIEIKRRERLKCGAKIERRKRILELEGNLENVFSIILAFQTPKLRVAEWIVIVTKRVLAELEPKLRSSDS

SEQ ID NO: 32486 - protein, 164 aa, Homo sapiens; identical to SEQ ID NO: 31011

SEQ ID NO: 32487 - protein, 138 aa, Homo sapiens; identical to SEQ ID NO: 32475
  misc_feature (1)...(138): Xaa = X or * as defined in Table 2

SEQ ID NO: 32488 - protein, 129 aa, Homo sapiens
MVTEKERNVVNEQKQSVFQAIRIIIILPAAINIPTLIRKYILHRNPHRIVNLRGYLRTYSATIHLKMKGIEIKIRERLKCGAKIERRKRLRDIHLYLIIGPREQAAGPCSSGNGINLTTNLGSLRGLVY

SEQ ID NO: 32489 - protein, 60 aa, Homo sapiens
MFLGLRHKDLKMFRWKSYLPVVGSIVVCPVEAFLSMRTKISKLAELKAVEERSNYSSYCV

SEQ ID NO: 32490 - protein, 73 aa, Homo sapiens
MRLTSRSPDKHPVPMRPISWAPVIRPFPFPPPSLCSNSFVPLQCPFFFLKVRSTVIPHLSTPLSLTPLMTVSF

SEQ ID NO: 32491 - protein, 80 aa, Homo sapiens [sequence omitted]

SEQ ID NO: 32492 - protein, 247 aa, Homo sapiens
MVSSERTLLPQKRCVRWGGGGDWGTGTVTTGAQSWVVVTARGPPEVFPADGAMHNRVTAHASEIMLLTAVSVKPQSASTRAPASQALNLNHPFCPEEAIHKVGASRAEEFAHLLIGQKMTGGQPHMFQTALSFQGSTPTLGCVYSSPGDSVTVEDMLQQAWVESKSQHVQQAPALALDYIDLRDALDCLSAGPASDASSAPPFSFQNANMAHQKERESQKHSHTPPFYTIVLDSFDDCVFYYLHHTV

SEQ ID NO: 32493 - protein, 277 aa, Homo sapiens
MALPSPKRVMLVCTQSAGKGKSGGSCRGAFGTKPGMLPTSVHSPLVRLSHKPASTYREPGQQGAQDISVVMDPGRTGNGFGEHMVESLPHTEQLCSWKFPDFAPSFSLVTDAPIWCWTPACVTEFCSSVSLLADPLCKPTSTCQISHWSPLNITSPASPVLHPWCSPPHPEADLDDMIDCPCGSFPFMLSISPNCSEIDRVPMQAEGTRVKSCQGPGSLCSEVRCPAQDVLNWAKIRTHMKEQRAILTKQQVDCIQEEFQELLQEERNSRRKGGRLY

SEQ ID NO: 32494 - protein, 2618 aa, Homo sapiens
  DOMAIN (544)..(565): BREAST CANCER TYPE I SUSCEPTIBILITY PROTEIN SIGNATURE domain identified by eMATRIX, accession number PR00493G, p-value=8.100e- 12, raw score of 7.57
  misc_feature (1)...(2618): Xaa = X or * as defined in Table 2
MKPRTLTVRVTALKVARLESVPSDVQMCSEFLPSDSAAQLASPSGSRTGAAGGAAYQSCAVLPHSSALWVVDGTRCRGAGGSAHQGGSATQEPTERVEGSGMAGCRSRVLPHWKAANVLGMSVESAPAVEEEKGEELEQKEKEKEEDTSGNTTHSLGAEDTASSQLGFGVLELSQSQDVEENTVPYEVDKEQLQSVTTNSGYTRLSDVDANTAIKHEEQSNEDIPIAEQSSKDIPVTAQPSKDVHVVKEQNPPPARSEDMPFSPKASVAAMEAKEQLSAQELMESGLQIQKSPEPEVLSTQEDLFDQSNKTGVVKGHRKESGELYYSIEKEGQRKWYKRMAVILSLEQGNRLREQYGLGPYEAVTPLTKAADISLVAAAQPLPERSQKVLVPPLGVLSGKRKLITSEEERSPAKRGRKSATVKPGAVGAGEFVSPCESGDNTGEPSALEEQRGPLPLNKTLFLGYAFLLTMATTSDKLASRSKLPDGPTGSSEEEEEFLEIPPFNKQYTESQLRAGAGYILEDFNEAQCNTAYQCLLIADQHCRTRKYFLCLASGIPCVSHVWVHDSCHANQLQNYRNYLLPAGYSLEEQRILDWQPRENPFQNLKVLLVSDQQQNFLELWSEILMTGGAASVKQHHSSAHNKGILSWNIDLSSFDLNQQLRLFITRHLAHFSSEVKAFLFRLHRFQGFWFLLRLSQQISRAEQNLGTYMMMGTIKSRVEGGAPEFTATRSSCTLRFGPDQSSHNAVSHSAGRIVENFLEKPTQLKTATAPPLLAPLSAVPTNNSQPRAAADTAPPSSLLLPHRAKQKHWSSDVVKAKKQLSLQCLVTDQPLFPALAPPSSSSTPLPPPPPAPLPPLSAADSSLKLPAEAGAAASMRGFLLHPRVRTEPKGLACGGQRTLCHQSEILETIILVNPSADSISSEVHHLLSSSSAYKLLILSGQSLEPGGDLILQSGTYSYENFAQVLHNPEISQLLSNRDPGIQAFLTVSCLGEGDWSHLGLSSSQETLHLRLNPEPTLPTMDGVAEFSEYVSETVDVPSPFDLLEPPTSGGFLKLSKPCCYIFPGGRGDSALFAVNGFNILVDGGSDRKSCFWKLVRHLDRIDSVLLTHIGADNLPGINGLLQRKVAELEEEQSQGSSSYSDWVKNLISPELGVVFFNVPEKLRLPDASRKAKRSIEEACLTLQHLNRLGIQAEPLYRVVSNTIEPLTLFHKMGVGRLDMYVLNPVKDSKEMQFLMQKWAGNSKAKTGIVLPNGKEAEISVPYLTSITALVVWLPANPTEKIVRVLFPGNAPQNKILEGLEKLRHLDFLRYPVATQKDLASGAVPTNLKPSKIKQRADSKESLKATTKTAVSKLAKREEVVEEGAKEARSELAKELAKTEKKAKESSEKPPEKPAKPERVKTESSEALKAEKRKLIKDKVGKKHLKEKISKLEEKKDKEKKEIKKERKELKKDEGRKEEKKDAKKEEKRKDTKPELKKISKPDLKPFTPEVRKTLYKAKVPGRVKIDRSRAIRGEKELSSEPQTPPAQKGTVPLPTISGHRELVLSSPEDLTQDFEEMKREERALLAEQRDTGLGDKPFPLDTAEEGPPSTAIQGTPPSVPGLGQEEHVMKEKELVPEVPEEQGSKDRGLDSGAETEEEKDTWEEKKQREAERLPDRTEAREESEPEVKEDVIEKAELEEMEEDETIPGYSETEQTISDEEIHDEPEERPAPPRFHTSTYDLPGPEGAGPFEASQPADSAVPATSGKVYGTPETELTYPTNIVAAPLAEEEHVSSATSITECDKLSSFATSVAEDQSVASLTAPQTEETGKSSLLLDTVTSIPSSRTEATQGLDYVPSAGTISPTSSLEEDKGFKSPPCEDFSVTGESEKRGEIIGKGLSGERAVEEEEEETANVEMSEKLCSQYGTPVFSAPGHALHPGEPALGEAEERCLSPDDSTVKMASPPPSGPPSATHTPFHQSPVEEKSEPQDFQEADSWGDTKRTPGVGKEDAAEETVKPGPEEGTLEKEDKDKAIVFEIMEAGEPTGPILGAEALPGGLRTLPQEPGKPQKDEVLRYPDRSLSPEDAESLSVLSVPSPDTANQEPTPKSPCGLTEQYLHKDRWPEVSPEDTQSLSLSEESPSKETSLDVSSKQLSPESLGTLQFGELNLGKEEMGHLMQAEDTSHHTAPMSVPEPHAATASPPTDGTTRYSAQTDITDDSLDRKSPASSFSHSTPSGNGKYLPGAITSPDEHILTPDSSFSKSPESLPGPALEDIAIKWEDKVPGLKDRTSEQKKEPEPKDEVLQQKDKTLEHKEVVEPKDTAIYQKDEALHVKNEAVKQQDKALEQKGRDLEQKDTALEQKDKALEPKDKDLEEKDKALEQKDKIPEEKDKALEQKNTALEQKDKALEPKDKDLEQKDRVLEQKEKIPEEKDKALDQKVRSVEHKAPEDTVAEMKDRDLEQTDKAPEQKHQAQEQKDKVSEKKDQALEQKYWALGQKDEALEQNIQALEENHQTQEQESLVQEDKTRKPKMLEEKSPEKVNAMEEKLEALLEKTKALGLEESLVQEGRAREQEEKYWRGQDVVQEWQETSPTREEPAGEQKELAPAWEDTSPEQDNRYWRGREDVALEQDTYWRELSX

SEQ ID NO: 32495 - protein, 439 aa, Homo sapiens
MAPLSSGEAAELPDSTYQGYILTRSFFRRRGNRLAPPMGPPETPPPLKSKWKLPLAAANELHLPPAFKSRAHSACSGSCRTNTPRVFPWRPRPSLRGLTALAMETTPGLGLRSPGAPLAQNPRGACGPSPEPRCPGKVSMAEFLTEFLEIPPFNKQYTESQLRAGAGYILEDFNEAQVDVLESQFSQLLHQINSTRDFESIRLAHDHFLSNLLAQSFILLKPSPVEEKSEPQDFQEADSWGDTKRTPGVGKEDAAEETVKPGPEEGTLEKEEKVPPPRSPQAQEAPVNIDEGLTGCTIQLLPAQDKAIVFEIMEAGEPTGPILGAEALPGGLRTLPQEPGKPQKDEVLRYPDRSLSPEDAESLSVLSVPSPDTANQEPTPKSPCGLTEQYLHKDRWPEVSPEDTQSLSLSEESPSKETSLDVSSKQLSPKALAPFQLGN

SEQ ID NO: 32496 - protein, 860 aa, Homo sapiens
  DOMAIN (668)..(719): Neuromodulin (GAP-43) proteins domain identified by eMATRIX, accession number BL00412D, p-value=2.378e-09, raw score of 16.54
  misc_feature (1)...(860): Xaa = X or * as defined in Table 2
XTYDLPGPEGAGPFEASQPADSAVPATSGKVYGTPETELTYPTNIVAAPLAEEEHVSSATSITECDKLSSFATSVAEDQSVASLTAPQTEETGKSSLLLDTVTSIPSSRTEATQGLDYVPSAGTISPTSSLEEDKGFKSPPCEDFSVTGESEKRGEIIGKGLSGERAVEEEEEETANVEMSEKLCSQYGTPVFSAPGHALHPGEPALGEAEERCLSPDDSTVKMASPPPSGPPSATHTPFHQSPVEEKSEPQDFQEADSWGDTKRTPGVGKEDAAEETVKPGPEEGTLEKEDKDKAIVFEIMEAGEPTGPILGAEALPGDTANQEPTPKSPCGLTEQYLHKDRWPEVSPEDTQSLSLSEESPSKETSLDVSSKQLSPESLGTLQFGELNLGKEEMGHLMQAEDTSHHTAPMSVPEPHAATASPPTDGTTRYSAQTDITDDSLDRKSPASSFSHSTPSGNGKYLPGAITSPDEHILTPDSSFSKSPESLPGPALEDIAIKWEDKVPGLKDRTSEQKKEPEPKDEVLQQKDKTLEHKEVVEPKDTAIYQKDEALHVKNEAVKQQDKALEQKGRDLEQKDTALEQKDKALEPKDKDLEEKDKALEQKDKIPEEKDKALEQKNTALEQKDKALEPKDKDLEQKDRVLEQKEKIPEEKDKALDQKVRSVEHKAPEDTVAEMKDRDLEQTDKAPEQKHQAQEQKDKVSEKKDQALEQKYWALGQKDEALEQNIQALEENHQTQEQESLVQEDKTRKPKMLEEKSPEKVNAMEEKLEALLEKTKALGLEESLVQEGRAREQEEKYWRGQDVVQEWQETSPTREEPAGEQKELAPAWEDTSPEQDNRYWRGREDVALEQDTYWRELSX

SEQ ID NO: 32497 - protein, 1714 aa, Homo sapiens
  DOMAIN (233)..(284): Neuromodulin (GAP-43) proteins domain identified by eMATRIX, accession number BL00412D, p-value=7.848e-10, raw score of 16.54
  misc_feature (1)...(1714): Xaa = X or * as defined in Table 2
XNLPGINGLLQRKVAELEEEQSQGSSSYSDWVKNLISPELGVVFFNVPEKLRLPDASRKAKRSIEEACLTLQHLNRLGIQAEPLYRVVSNTIEPLTLFHKMGVGRLDMYVLNPVKDSKEMQFLMQKWAGNSKAKTGIVLPNGKEAEISVPYLTSITALVVWLPANPTEKIVRVLFPGNAPQNKILEGLEKLRHLDFLRYPVATQKDLASGAVPTNLKPSKIKQRADSKESLKATTKTAVSKLAKREEVVEEGAKEARSELAKELAKTEKKAKESSEKPPEKPAKPERVKTESSEALKAEKRKLIKDKVGKKHLKEKISKLEEKKDKEKKEIKKDRKELQKDEGRKEDKKDARKEEKRKDSSPELRKISKPDLKPFTPEVRKTLYKAKVPGRVKIDRSRAIRGEKELSSEPQTPPAQKGTVPLPTISGHRELVLSSPEDLTQDFEEMKREERALLAEQRDTGLGDKPFPLDTAEEGPPSTAIQGTPPSVPGLGQEEHVMKEKELVPEVPEEQGSKDRGLDSGAETEEEKDTWEEKKQREAERLPDRTEAREESEPEVKEDVIEKAELEEMEEVHPSDEEEEDATKAEGFYQKHMQEPLKVTPRSREAFGGRELGLQGKAPEKETSLFLSSLTTPAGATEHVSYIQDETIPGYSETEQTISDEEIHDEPEERPAPPRFHTSTYDLPGPEGAGPFEASQPADSAVPATSGKVYGTPETELTYPTNIVAAPLAEEEHVSSATSITECDKLSSFATSVAEDQSVASLTAPQTEETGKSSLLLDTVTSIPSSRTEATQGLDYVPSAGTISPTSSLEEDKGFKSPPCEDFSVTGESEKRGEIIGKGLSGERAVEEEEEETANVEMSEKLCSQYGTPVFSAPGHALHPGEPALGEAEERCLSPDDSTVKMASPPPSGPPSATHTPFHQSPVEEKSEPQDFQEADSWGDTKRTPGVGKEDAAEETVKPGPEEGTLEKEEKVPPPRSPQAQEAPVNIDEGLTGCTIQLLPAQDKAIVFEIMEAGEPTGPILGAEALPGGLRTLPQEPGKPQKDEVLRYPDRSLSPEDAESLSVLSVPSPDTANQEPTPKSPCGLTEQYLHKDRWPEVSPEDTQSLSLSEESPSKETSLDVSSKQLSPESLGTLQFGELNLGKEEMGHLMQAEDTSHHTAPMSVPEPHAATASPPTDGTTRYSAQTDITDDSLDRKSPASSFSHSTPSGNGEVLTWGDHQALNEHILTPDSSFSKSPESLPGPALEDIAIKWEDKVPGLKDRTSEQKKEPEPKDEVLQQKDKTLEHKEVVEPKDTAIYQKDEALHVKNEAVKQQDKALEQKGRDLEQKDTALEQKDKALEPKDKDLEEKDKALEQKDKIPEEKDKALEQKDTALEQKDKTLEPKDKDLEQKDRVLEQKEKIPEEKDKALDQKVRSVEHKAPEDTVAEMKDRDLEQTDKAPEQKHQAQEQKDKVSEKKDQALEQKYWALGQKDEALEQNIQALEENHQTQEQESLVQEDKTRKPKMLEEKSPEKVKAMEEKLEALLEKTKALGLEESLVQEGRAREQEEKYWRGQDVVQEWQETSPTREEPAGEQKELAPAWEDTSPEQDNSCPLQLNPARHPVAPLPSLGIELWLWLQDPPPEPVRASYYVVSGNDPANGEPSRAVLDALLEGKAQWGENLQVKVTLIPTHDTEVTREWYQQTHEQQQQLNVLVLASSSTVVMQDESFPACKIEF

SEQ ID NO: 32498 - protein, 94 aa, Homo sapiens
MPEEEYSEFKELILQKELHVVYALSHVCGQDRTLLASILLRIFLHEKLESLLLCTLNDREISVEDEATTLFRATTLASTLMEQYMKATASQFVH

SEQ ID NO: 32499 - protein, 264 aa, Homo sapiens
MGPELEGLGLTDFKNEAVDSRAGLGMSECGAANQDNRNPVAKGGQDRTENNTIADRAVCDYRKGMPQMMVSAQLPYTIKRSYPFNGFGSWPGSVGNLVSTVIDLATPGKREIEGHRIDKISSSTKAEEFSPREKVPPGVSRNFGTRPQRGVLYTPQENPLDEQKSTQLTQQVLTNVFLREDLMGPGPAMNTYDCPFQRQNTEGICTTISANLSGPVGPADQHVETPVARHPWTLTAGVPHTTTVGTVHFQSGHADLNIQQRPRR

SEQ ID NO: 32500 - protein, 220 aa, Homo sapiens
MQSLGRIWQEVHKSKTEDKAVLRLCPSVVSPPPNALEIIAIRLMSFVSVTVMRATEDCSMATLCQCISSPHNIISYNEITLVQGGPYIQRQVSLQEEERSHRENLVKAEVETAATSQGMNTYMGLLLVLALLFLVLAEPRNPSHTLPSTTRNALPLEILVVNSLISFKSAQMLLLKQNSNAAIEDKTFADYETREHCPRCQIIYRHRAEHQKPIHTSQWL

SEQ ID NO: 32501 - protein, 100 aa, Homo sapiens
MGEFPKWHMTVLWEHSAGEGRIPQVSTLLPFIPAKNFLINFHSSSKTCFRLSLCLMPLSRILSSEEARIEVAADPCGFAATNISYYLCRFSISSSASRDT

SEQ ID NO: 32502 - protein, 41 aa, Homo sapiens
  misc_feature (1)...(41): Xaa = X or * as defined in Table 2
XSDVTECLHAPRVSGSPRTSVVLIAKVVPPGECTLPGISGX

SEQ ID NO: 32503 - protein, 235 aa, Homo sapiens
MMALLIQAVLPPPPRLLPAPSTATAASKQKAQDAFRELRAQASLLWAAIPSLAESNPSVPLLQHFCCWNFSWMNVLLWIKSFAFTTRAQTGAVTGYVTICLGIKTPSRHDSNRRCEEIQSLMAKAQTQKLEAHVVATLQQLQDTLKQLDFRCISQSVRQAILIFHIQDFPCLSDGISGIFLDLTQPLKLVLMFSPPDLKSMKKGSDVTECLDAPRVSGSPRTFVVLIAKVVPPVD

SEQ ID NO: 32504 - protein, 239 aa, Homo sapiens
  DOMAIN (8)..(22): C-type lectin domain proteins domain identified by eMATRIX, accession number BL00615B, p-value=9.308e-09, raw score of 12.25
MVTLTAGWDELECHRVYNFLCELTNLCRKIQMAVCSKPGQVVWQEMIEEPTDEFSLKGLADAIKLLYDASTKEWTADDVISLVDELSVVPREWLLENNARLLMLSGNNICFSFMASKAVNGRTIELARLVVFLALVCEKELYCMDWTVKMMQKVCKVFSTPVERKNFLQNVANAFACVIMEMLQSIMSGSGRSSRPLEQIDNVGQNDQAYDGKEHQDENIQHCGFLGRPSPWILVNREL

SEQ ID NO: 32505 - protein, 49 aa, Homo sapiens
  misc_feature (1)...(49): Xaa = X or * as defined in Table 2
XSGRSSRPLEQIDNVGQNDQAYDGKEHQDENIQHCGFLGRPSPWILVNX

SEQ ID NO: 32506 - protein, 52 aa, Homo sapiens
  misc_feature (1)...(52): Xaa = X or * as defined in Table 2
XALSQADERFIYKPLIGAAAFLSEMPHTAVGRPRALLAAGQRYQFLAMWAFP

SEQ ID NO: 32507 - protein, 50 aa, Homo sapiens
MVQHLLLLRVSGCFHSWQMMKGEPVYADITKINRAIAHSPLNPERALIYS

SEQ ID NO: 32508 - protein, 55 aa, Homo sapiens
  misc_feature (1)...(55): Xaa = X or * as defined in Table 2
MPSLXXXXXXXSPXXXXGESXXXXXVNYRGNRGRGEEXXXXGGHIKNLGRETKRK

SEQ ID NO: 32509 - protein, 51 aa, Homo sapiens
MNMIFNRLVPMNYYRDGPQQCQLTISQLYDGTKVICCYSLDICPSKSHVEV

SEQ ID NO: 32510 - protein, 45 aa, Homo sapiens
MNQTWLFKLIKIKFKIQCFQSSGHISRADVADGYHTGQCGVRESV

SEQ ID NO: 32511 - protein, 68 aa, Homo sapiens
  misc_feature (1)...(68): Xaa = X or * as defined in Table 2
XTVLCRTSCNADTFYVCAVCTVTMNQTWLFKLIKIKFKIQCFQSSGHISRADVADGYHTGQCGVRESV

SEQ ID NO: 32512 - protein, 153 aa, Homo sapiens
MISPSVWRRGFWKHGQKQKDQLGGFAMIQAREDRVLSEGDTSRGAKGCWRILLDSGYLLKVESTGFVDRLDNIGKAGPRLGLGSKVLGPTLDSLRNASSGQKSEDMFSPGWGSRHKQVKIMNLGKFQEPEPEECCSMQQLENSFVDRLQVWPK

SEQ ID NO: 32513 - protein, 118 aa, Homo sapiens
MFKYANKQHTGKRIGCGIQRTSFQYATSCHLSFVTFNVFFIANSKNRILDNRKGQLGTSCLPLSVLEGTRPFALACVVLKLCFSGTSSSKPRTSRPAPSEQPRLASSPLSRLTPLPSL

SEQ ID NO: 32514 - protein, 1070 aa, Homo sapiens
  DOMAIN (206)..(245): kw TRANSCRIPTASE REVERSE II ORF2 domain identified by eMATRIX, accession number DM01354X, p-value=2.800e-25, raw score of 13.86
  DOMAIN (294)..(1068): Eukaryotic protein kinase domain identified by PFam, accession name pkinase, E-value=1.3e-28, PFam score of 107.1
MGVDFHFDAVLMVVKLAFKKLSVCLFSVALTGGMRSAYTLRLQGLRILRVIHVGSSADAAGLRAAVAEMPQGMALTCRATDPQSNLSTAAVIFSARIQWPEPQQKAPLVPPPPPPPPPPPPPLPDPTPPEPEEEILGSDDEEQEDPADYCKGDVPSMVSIKVSISKVIRDSKVPSLYPCQPPPNLVGRISIAKMTILPKAVYKFGAIPIKVLPSFFTELEKTILKFTWNRKRVCIVKARLSKKRKFEGITLPDFKLYSGAAALDRAGPTVDAAAAAGAGGYHPVKIGDLFNGRYHVIRKLGWGHFSTVWLCWDMQMDGLSRNVSVSFWWVLGLTDFKNEAADLAVSVTALKGGASRVVCSSRWVRGLADFRNEATDPHDVCMVFEVLGHHLLKWIIKSNYQGLPVRCVKSIIRQVLQGLDYLHSKCKIIHTDIKPENILMCVDDAYVRRMAAEATEWQKAGAPPPSGSAVSTAPQQKPIGKISKNKKKKLKKKQKRQAELLEKRLQEIEELEREAERKIIEENITSAAPSNDQDGEYCPEVKLKTTGLEEAAEAETAKDNGEAEDQEEKEDAEKENIEKDEDDVDQELANIDPTWIESPKTNGHIENGPFSLEQQLDDEDDDEEDCPNPEEYNLDEPNAESDYTYSSSYEQFNGELPNGRHKIPESQFPEFSTSLFSGSLEPVACGSVLSEGSPLTEQEESSPSHDRSRTVSASSTGDLPKASKIDEPALQTARHSAAPLVPAVWNCTPTCPSMVLLECLCSMLTRSVYSPAHSFHSSPSSTAVVSTVESVHPCITSTIQEAKTRAADLLVNPLDPRNADKIRVKIADLGNACWVHKHFTEDIQTRQYRSIEVLIGAGYSTPADIWSTACMAFELATGDYLFEPHSGEDYSRDEDHIAHIIELLGSIPRHFALSGKYSREFFNRRALDPESSNARKACTFGHSSCALFLSARAVVVSACSVLIKLSCVSVLLAMFPNADHIALIIELLGKVPRKYAMLGKYSKEFFTRKGELRHITKLKPWSLFDVLVEKYGWPHEDAAQFTDFLIPMLEMVPEKRASAGECLRHPWLNS

SEQ ID NO: 32515 - protein, 187 aa, Homo sapiens
GDKGADEREISGGTDTAAAAQLKIHYWIPGPSTVQEHKEVFNTKLADGQNGSPSKQASICDRQFVVAGGYHRSLADEAYGDEEDLPKVVGLVHSTRGPAHPTYLLRPLQKDQDSSLLRASGGGGGSPSSSTKSEHSCRQIHIPGPFSHADITGQKWFPGGVSTEPARNMGFLKPTPTPLLRSPKDFR

SEQ ID NO: 32516 - protein, 134 aa, Homo sapiens
MADSKQLRFEAPTEMNENGQQRQRPKPDKIRKMRKNQYKNAENSKSQKASSPPNDCNTSPAMAQNWPEAEMDELTEVAFRSGFLVSLISRMKLRTLAVSVTALKDGVKPRTFVESVIALNDDADPKSGQLQDLL

SEQ ID NO: 32517 - protein, 112 aa, Homo sapiens
MVCPEFVPSDVQMCPEFLPSGGLIVSLASGVKLQTFAVSVTAHKGGASGVVRSFRGFVVSLASGVKLQTFAVSVTALKGGTDPKSEQQQDLLQRAKEQNFEKVEGDLSGLLS

SEQ ID NO: 32518 - protein, 437 aa, Homo sapiens
MRAISTAARTSKAEPKCLFRQGHSRTIDEGSETRAVLENLGHSATCTMPVVSTAGPGAFRNLAENCRSDEEHKGRVPREQEPLKEEGGADCRLPNLEGVHRKAAVSYSQSLLRDTNPALTAQGTQVYTWGFMPFSGSGVGGRDFTVYQGLSLSLVPELSVAWQQPQLTGTRKTQWPDLEEPSTSSINQLSAAWAASKAVGPDKPQGRGGDQETDSPHSLSAPRQQVHSTRGPAHPTYLLRPLQKDQDSSLLRASGGGGGSPSSSTKSEHSCRESYGRQERGQTLSRSRPSSWTLGVKSSFSLSSELVNKDHRDSLMDEWCREKSLSPARSDHWEGFWRGSGGATDRSGSEGQMAWGTQAWAPPSLGSGGSHSCVAFGCMDPKFTEEDPGGGHVSLDVNRLWVLGLADFKNEAADFEVSVTALKGGTDPKSEQQQDLL

SEQ ID NO: 32519 - protein, 43 aa, Homo sapiens
MLACLARLGKFSWIISCRVFSNLVPFSPSLSGTPIRRRFGLFT

SEQ ID NO: 32520 - protein, 251 aa, Homo sapiens
MGKKQNRKTGNSKNQSASPPPKERSSSPATELSWMENDFDELREEGFRRSNYSELREDIQTKGKEIENFEKNLEECITRITNTEKCLKELMELKTKARELHEECRSLRSRCDQLEERVSAMEDEMNEMKREGKFREKRIKRNEQSLQEIWDYVKRPNLRLIGVPESDGENGTKLENTLQATKDKIDKWDLIKLKSFCTAKETTIRVNRQPTKWEKIFATYSSDKGLISRMYNELKQIYKKKTTPSKSGQRT

SEQ ID NO: 32521 - protein, 214 aa, Homo sapiens
MAEQEQLWSTAPSMSNSEDRRFLHFHLRYRVHLTRECPTERSSSPAMEQSWTENDFDELREEGFRRSNYSELQEEIQTNSKEVINFEKQLDECITGIINAEKCLKELMELKAKAQELHEECRSLRSGCNQLEERVPGMEDEMNEMKQEGKFREKRIKRNEQSLQEIWDYVKRPNLRLISVPESDGENGTKLENTLQDIIQENFPNLARQANIQI

SEQ ID NO: 32522 - protein, 315 aa, Homo sapiens
MAEQLWLQTATALVYSSQRERCRRCMISAFPSEEEIQTKGKEFENFEKNLDECITRITNTEKCLKELMELKAKAGELREECRSLRSRCDQLEERVSAMEDEMNEMKREGKFREKRIKRNEQSLQEIWDYVKRPNLHLIGVPESDGENGTKLENILQDIIQENFPNLARQANIQIQEIQRMPQRYSLRRATPRHIIVRFTKVEMKEKMLRAAREKGRVTHKGKPIRLTADLSAETLQTRREWGPIFNILKEKNFQTRISYPAKLSFISEGEIKYFTDKQMLRDFVTTRPALKELLKEALNMERNNRYQLLQNHAKM

SEQ ID NO: 32523 - protein, 219 aa, Homo sapiens
MGKKQNRKTGNSKKQSASPPPKESSSSRATEQSWMENDFHELREEGFRRSNYSEPQEDIQTKDKEVENFEKNLEECITRITNTEKCLKELMELKTKARELREECRSLRSQCNQLEERVSAMEEEMNEMKREGKLREKKHKKKRANIQEIWDYVKRPNLRPIGVPESDRENGTKLENTLQDIIQENFPSLARPALKELLKEALNMERNNRYQPLQNHAKM

SEQ ID NO: 32524 - protein, 110 aa, Homo sapiens
MELKTKARELREECRSLRSRCDQLEERVSAMEDEMNEMKREGKFREKRIKRNEQSLQEIWDYVKRPNLRLIGVPESDVENGTKLENTLQDIIQENFPNLARQANVQIQEI

SEQ ID NO: 32525 - protein, 1189 aa, Homo sapiens
  DOMAIN (562)..(607): kw TRANSCRIPTASE REVERSE II ORF2 domain identified by eMATRIX, accession number DM01354N, p-value=1.000e-40, raw score of 13.17
  DOMAIN (646)..(871): Reverse transcriptase domain identified by PFam, accession name rvt, E-value=4.9e-50, PFam score of 179.7
MHIVVETALSASWQNKAKPPARVLLQVVPNVWFLVAVVWELYPSLDLMDRSIECSSSPATEQSWTENDYDKLREEGFRRSNYSELQEDIQTKGKDVENFEKNLEECITRITNTQKCLKELMELKTKARELREECRSLRSRCDQLEERVSVMEDEMNEMKQEGKFREKRIKRNEQSLQEIWDYVKRPNLRLIGVPESDGENGTKLKNTLQDIIQENFPNLARQAKVQIQEIQRMPQRYSLTRATPRHIIVRFTKVEMKEKMLRAAREKGAPRFIKQVLSDLQRDLDSHTLIMGDFNTPLSTLDRSTRQKVNKDTQELNSALHQVDLIDIYRTLHPKSTEYTFFSAPHHTYSKIDHILGSKALLSKCKRTEIITNYLSDHSAIKLELRIKNLTQNRSTTWKLNNLLLNDYWVHNEMKLEIKMFFETNENKDTTYQNLWDAFKAVYRGKFIALNAHKRKQERSKIDTLTSQLKELEKQEQTHSKASRRQEITKIRAELKEIETQKTLQKINESRSWFFERINKIDRLLARLIKRKREKNQIDAIKNDKGDITTNPTEIQTTIREYYKHLYANKLENLEEMDKFLDTYTLPRLNQEEVESLNRPITGSEIVAIINSLPTKKSPGPDGFTAEFYQRYKKELVPFLLKLFQSIEKEGILPNSFYEASIILIPKPGRDTTKKENFRPISLMNIDAKTLNKILADRIQQHIKKLIHHDQVGFIPGMQGWFNIHISINVIQHINRAKDKNHMIICIDAERAFDKIQQPFMLKTLNKLVLEVLARAIRQEKEIKGIQVGKEEVKLSLFADDMIVYLENPIVSAQNLLKLISNFSKVSGYKINVQKSQAFLYTNNRQTESQIMSELPFTIASKRIKYLGIQLTRDVKDLFKENYKPLLNEIKEDTNKWKNILCSWVGRINIVKMAILPKVIYRFNAIPIKLPMPFFTELEETTLKFIWNQKRARIAKAILSQKKKAGGITLPDFKLYYKATVTKTAWYWYQNTDIEQWNRTEPSEIMLHIYNYLIFDQPEKNKQWGKDSLFNKWCWENWLAICRKLKLDPFLTPYTKINSRWIKDLNVRPKTIKTLEENLGITIQDISMGKDFMSKTPKAKATKAKIDKWDLIKLKSFCTAKETTIRVNRQPTKWEKIFATYSSDKGLISRIYNELKQIYKIKTNNPIEKWVKDMNRHFSKEDIYAAKNT

SEQ ID NO: 32526 - protein, 1117 aa, Homo sapiens
  DOMAIN (297)..(338): kw TRANSCRIPTASE REVERSE II ORF2 domain identified by eMATRIX, accession number DM01354I, p-value=1.000e-40, raw score of 15.55
  DOMAIN (543)..(752): Reverse transcriptase domain identified by PFam, accession name rvt, E-value=1.8e-46, PFam score of 167.8
MGKKQNRKTGNSKMQSASPPPKERSSSPATDQSWMENDFDELREEGFRRSNYSELREDIQTKGKEVENFEKNLEECITRITNTEKCLKELMELKTKARELREECRSLRSRCDQLEERVSAMEDEMNEMKQEGKIKRDKEGHYIMVKGSIQQEELTILNIYAPNTGAPRFIKQVLSDLQRDLDSHTLIMGDFNTSLLTLDRSMRQKVNKDTQELNSSLHQADLIDIYRTLHPKSIEYTFFSAPHHTYSKIDHIVGSKALLSKCKRTEIITNYLSDHSAIKLELRIKNLTQSRSTTWKLNNLLLNDYWVHNEMKAEIKMFFETNENKDTTYQNLWDAFKAVCRGKFIALNAHKRKQERSKIDTLTSQLKELEKQEQTHSKASRRQEITKIRAELKEIETQKTLQKINESRSWFFERINKIDRPLARLIKKKREENQIDTIKNDKGDITTDPTEIQTTIREYYKHLYANKPENLEEMDKFLDTYTLPRLKQEEVESLNRPITGAEIVAIINSLPTKKSPGPDGFTAEFYQRYKEELVPFLLKLFQSIEKEGILPNSFYEASIILIPKPGRDTTKKENFRPISLMNIDAKILNKILANRIQQHIKKLIHHDQVGFIPGMQGCQYHTEWAKTGSIPLKTGTRQGCPLSPLLFNTVLEVLARAIRQEKEIKGIQLGKEEVKLSLFADDMIVYLENPIVSAQNLLKLISNFSKVSGYKINVQKSQAFLYTNNRQTESQIMSELPFTIASKRIKYLGIQFTRDVKDLFKENYKPLLKEIKEDTNKWKNIPCSWVGRINIVKMAILPKVIYRFNAIPIKLPMTFFTELEKTTLNFIWNQKRARIAKSILSQKNKAGGITLPDFKLYYKATVTKTAWYWYQNRDIDQWNRTEPSEITPHTYNYLIFDKPEKNKQRGKDSLFNKWCWENWLAICRKLKLDPFLTPYTKINSRWIKDLNVRPKTIKILEENLGITIQDIGVGKDFMSKTPKAMATKAKIDKWDLIKLKSFCTAKETTIRVNRQPTTWEKIFATYSSDKGLISRIYNELKQIYKKKTNNPIKKWAKDMNRHFSKEDIYAAKKYMKKCSSSLAIREMQIKTTMRYHLTPAPVCDVRLPVSKCSHCSVPTYE

SEQ ID NO: 32527 - protein, 743 aa, Homo sapiens
  DOMAIN (217)..(262): kw TRANSCRIPTASE REVERSE II ORF2 domain identified by eMATRIX, accession number DM01354N, p-value=1.000e-40, raw score of 13.17
  DOMAIN (286)..(559): Reverse transcriptase domain identified by PFam, accession name rvt, E-value=8.9e-80, PFam score of 278.5
MEQSWRENDFDELREEAFRRSNYSELQEEIQTKGQEVKNFEKTLDEYITRITNTEKCLKELMELKAKARELREECRSLRSRCDQLEERVSVMEDEMNEMKREGKFREKRIKRNEQSLQEKWDYVKTPNLRLIGVPESDGENGTKLENTLQDIIQENLPNLVRQANIQIQEIQRTPQRYSSRRATPRHIIVRFTKVEMKEKMLRAAREKEIQTTIREYYKHLYANKLENLEEMDKFLDTYTLPRLNQEEVESLNRPITGSEIVAIINSLPTKKSPDQLDSQPNSAREKEGILSISFCEASIILIPKLGRDTTKKENFRPISLMTIDTKIFNKILANQIQQHIKKLIHHDQVGFIPGMQGWFNICKSINVIQHINRTKDKNHMIISIDAEKAFDKIQQLFMLKTLNKLGIDGTYFKIIRAIYDKPTANIILNGQKLEAFPLKTGTRQGCPLSPLLFNIVLEVLAGAIRQEKEIKGVQLGKEEVKLSLFADDMIVYLENHIVSAQNLLKLISNFSKVSGYKINVQKSLAFLYTNNRQTESQIMSELPFTIASKRIKYLGIQLTRDVKDLFKENYKPLLNEIKEDTNKWKNIPCSWVGRINIVKMAILSKVIYRFNAIPINLPITVFTELEKTTLKFTWNQKRAHIAKSILSQKNKAGGITLPDFKLYYKATVTKTGWYWYQNRDIDQWNRTEPSEITTHIYNYLIFDKPEKNKQRGKDSLFNKWCWENWLAICRKQCVFIVPPTEG

SEQ ID NO: 32528 - protein, 451 aa, Homo sapiens; identical to SEQ ID NO: 32457

SEQ ID NO: 32529 - protein, 330 aa, Homo sapiens
  misc_feature (1)...(330): Xaa = X or * as defined in Table 2
MSMQDGEPDALLALSQASFPDDSLCPVPCSVLDAQVRKELALPSRNFLSNGEMCYECDLKGIVCHLISDCCASNQRDSVGVGPSEPXKRDKPQRWETPDQKPGTLNAERSSLTKERSSSQPTDQSWMENDFDELKKKGFRRSYYSELREHIQTKGKEVENFEKNLEECITRITNTEKCLKELMELKTKARELREECRSLRSRCDQLEERVSAMEDEMNEMKREGKFREKRIKRNEQSLQEIWDYVKRPNLRLIGVPESDVENGTKLENTLQDIIQENFPNLARQANVQIQEIQRTPQRYSSRRATPRHIIVRFTKVEMIGKNVKGSQRES

SEQ ID NO: 32530 - protein, 633 aa, Homo sapiens
  DOMAIN (318)..(365): kw TRANSCRIPTASE REVERSE II ORF2 domain identified by eMATRIX, accession number DM01354V, p-value=1.000e-40, raw score of 12.97
MNAKALPTLSPLPQATTESVSLTQERSSSPATEQSWTENDFDELREEGFRRSNYSELREDIRTKGKEVENFEKNLEECITRIINTEKCLKELMELKTKARELREECRSLRSRCDQLEERVSAMEDEMNEMKREGKFREKRIKRNEQSLQEIWDYVKRPNVRLIGVPESHGENGTKLENTLQDIIQENFPNLARQANIQIQEIQRTPQRYSSRRATPRHIIVRFTKVEMKERMLRAAREKEIQTTIREYYKHLYANKLENLEEMDKFLDTYTLRRLNQEEVESLNRPITGAGIEAIINSLPTKKIPGPDGFTAEFYQRYKEELRIKYLGIQFTRDVKDLFKENYKPLLKEIKEDTNKWKNIPCSWVGRINIVKMAILPKVIYRFNAIPIKLPMTFFTELEKTTLKFIWNQKRARIAKSILSQKNKAGGITLPDFKLYYKATVTKTAWYWYQNRDIDQWNRTEPSEIMPHIYNYLIFDKPEKNKQRGKDSLFNKWCWENWLAICRKLKLDPFLTPYTKINSRWIKDLNVRPKTIKTLEENLGITIQDIDMGKDFMSKTPKAMATKAKIDKWDLIKLKELLTAKETTIRVNRQPTKWEKIFTTYSSDKGLISRIYNELNKFTRKKQTTPSKSGQRT

SEQ ID NO: 32531 - protein, 743 aa, Homo sapiens
  DOMAIN (246)..(291): kw TRANSCRIPTASE REVERSE II ORF2 domain identified by eMATRIX, accession number DM01354N, p-value=1.000e-40, raw score of 13.17
  DOMAIN (330)..(605): Reverse transcriptase domain identified by PFam, accession name rvt, E-value=5.1e-89, PFam score of 309.1
MGKKQNRKTGNSKTQSASPPPKERSSSPATEQSWMENDFDELREEGFRRSNYSELREDIQTKGKEVQNFEKNLEECITRITNTEKCLKELMELKTKARELREECRSLRSRCDQLEERVSAMEDEMNEMKREGKFREKRIKRNEQSLQEIWDYVKRPNLRLIGVPESDVENGTKLENTLQDIIQENFPNLARQANVQIQEIQRTPQRYSSRRATPRHIIVRFTKVEMKEKMLRAAREKEIQTTIREYYKHLYANKLENLEEMDTFLDTYTLPRLNQEEVESLNRPITGSEIVAIINSLPTKKSPGPDGFTAEFYQRYKEELVPFLLKLFQSIEKEGILPNSFYEASIILIPKPGRDTTKKENFRPISLMNIDAKILNKILANRIQQHIKKLIHHDQVGFIPGMQGWFNIRKSINVIQHINRAKDKNHMIISIDAEKAFDKIQQPFMLKTLNKLGIDGTYFKIIRAIYDKPTANIILNGQKLEAFPLKTGTRQGCPLSPLLFNIVLEVLARAIRQEKEIKGIQLGKEEVKLSLFADDMIVYLENPIVSAQNLLKLISNFSKVSGYKINVQKSQAFLYTNNRQTESQIMGELPFTIASKRIKYLGIQLIRDVKDLFKENYKPLLKEIKEDTNKWKNIPCSWVGRINIVKMAILPKNWKNYFKVHMEQKEPHRQVNPKPKEQAGGITLLTQLYYKATVTKTAWYWYQNRDIDQWNRTEPSEIMPHIYNYLIFDKPEKNKQWGKDSLL

SEQ ID NO: 32532 - protein, 996 aa, Homo sapiens
  DOMAIN (302)..(343): kw TRANSCRIPTASE REVERSE II ORF2 domain identified by eMATRIX, accession number DM01354I, p-value=1.000e-40, raw score of 15.55
  DOMAIN (514)..(792): Reverse transcriptase domain identified by PFam, accession name rvt, E-value=5.9e-63, PFam score of 222.6
MENDFDELREEGFRRSNYSELWEDIQTKGKEVENFEKNLEECITRITNTEKCLKELMELKTKARELHEECRSLRSRCDQLEERVSAMEDEMNEMKGEGKFREKRIKRNEQSLQEIWDYVKRPNLHLIGVPESDGENGTKLENTLQDIIQENFPNLARQANVQIQEIQRMPQRYSSRRATPRHIIVRFTKVEMKEKILKAAREKDRSTRQKVNKDTQELNSALHQADLIDIYRTLHPKSTEYTFFSAPHHTYSKIDHILGSKALLSKCERTEIITNYLSDHSAIKLELRIKNLTQNRSTTWKLNNLLLNDYWVHNEMKAEIKMFFETNENKDTTYQNLWDAFKAVCRGKFIALNAHKRKQERSKIDTLTSQLKELEKQEQTHSKASRRQEITKIRAELKEIETQKTFQKINESRSWFFERINKIDRPLARLIKKKREKNQIDTIKNDKGDITTNPTEIQTTIREYYKHLYANKLENLEEMDKFLDTNTLPRLNQEEVESLNRPITGSEIVAIINSLLTKKSPGPDGFTAEFYQRYKEELLGRDTTKKENFRTISLVNIDAKILNKILAKRIQQHVKKLIHYDQVGFIPGMQSWFNIRKSINVIQHIKRAKDRNHMIISIDAEKAFDKIQQPFMLKTLNKLGIDGTYFKIIRVIYDKPTANIILNGQQLEAFPLKTGTRQGCPPSPLLFNIVLEVLARAIRQEKEIKGIQLGKEEVKLSLFADHMIVYLENPIVSAQNLLKLISNFSKVSGYKINVQKSQAFLYTNNRQTESQIMSELPFTIASKRIKYLGIQLTRDVKDLFKENYKPLLKEIKEDTNKWKNIPCSWVGRINIVKMAILPKVIYRFNAIPIKLPMPFFTELEKTTLRFIWNQKRACIAKAILSQKNKAGGITLPDFKLYYKATVTKTACESYSVKKNATNKTVEIGSFSLLEHKKEMALGHNRTSNQLGGLLRSRCQDRIKCARVLLENQLCGGKRRGNREFLKEPWDLSEGEGEKVV

SEQ ID NO: 32533 - protein, 711 aa, Homo sapiens
  DOMAIN (534)..(546): Fungal Zn(2)-Cys(6) binuclear cluster domain proteins domain identified by eMATRIX, accession number BL00463, p-value=7.469e-10, raw score of 8.22
MDACGDHYSKQIKAGTEHQIPHVLTSKWALDTKKETTNSGDPKSGKGQREISVQNLPALVHFHTAGGSRPPARRFPPLNHPKGGDKGGDPPPRAPKGFFLIKGFQPGVEEGPKKLTQLESQSPLKPGPQLRWQPEFQAHERPAQQMKCSHKQKAKTRLKPKSNFHRLTHKLHDLHIETRSCHVTYNTARSTPPTWGQIKVSSHQTENFLKEKVTPKTTSNMILAAFMVVSAALSIPPVRAIHNYTYWEYVPFPPLIRSVSWMDSPVEVYTNNSAFMSVSNDDWLPAQPEEDVQKLEICILQTQASILSRKLMDMSEIIDDGNDGDAHGSDYDVNGDGDDGGGDINYGYGNDNNGSDDGNNDNDNVDDHDGGAGDNDSNDGDGDDGGDGDGNGNDNYDDDNNNGNGMIMMMMMVTMLGTDKQKDSSNLCGLKCPCLTALKRAVVLPARSWRFENQQTAALSGSLTPDPKQPNWEAPPSRGRLTPHTAGYSNRPAAEGKEVENFEKNLEECITRITNTEKCLKELMELKTKARELCEECRSLRSRCDQLEERVSAMEDEANEMKREGKFGEKRIKRNEQSLQEIWDYVKRPNLCLIGVPESDGENGTKLKNTLQDIIQENFPNLARQANIQIQEIQRTPQRYSSRRATSRHIIVRFTKVEMKEKMLRAAREKGRVTLKGKPIRLTVDLLAETLQARREWGPIFNILKEKNFQI

SEQ ID NO: 32534 - protein, 507 aa, Homo sapiens
  DOMAIN (308)..(353): kw TRANSCRIPTASE REVERSE II ORF2 domain identified by eMATRIX, accession number DM01354N, p-value=1.000e-40, raw score of 13.17
MGKKQSRKTGNSKTQSASPPPKELSSSPAMEQSWTENDFDELREEGFRRSNYSELREDIQTKGKEVENFEKNLEECITRITNTEKCLKELMELKTKAQELREECRSLRSRCDQLEERVSAMEDEINEMKREGKFREKSIRRNEQSLQEIWDYVKRPNLRLIGVPESDRENGIKLENTLQDIIQENFPNLARQANIQIQEIQRTPQRYSSRRATPRHIIVRFTKVEMKEKMLRAAREKGRVTLKGKPIRLRADLLAETLQARRQINKIARPLARLIKKKREKNQIDAIKNDKEDITTDPTEIQTTIREYYKHLYANKLENLEEMDKFLDTYTLPRLNQEEVESLNRPITGAEIVAIINSLPTKKSPGPDGFTAEFYQRYKEELVPFLLKLCQSIEKEGILPNSFYEASIILIPKPGRDTTKKENFRPIALMNIDAKILNKILANQIQQHIKKLIHHDQVGFIPGMQGWFNICKSINVIQHINRTKDKSHMIISIDAEKASDKIQQPSC

SEQ ID NO: 32535 - protein, 701 aa, Homo sapiens
  DOMAIN (373)..(418): kw TRANSCRIPTASE REVERSE II ORF2 domain identified by eMATRIX, accession number DM01354N, p-value=1.000e-40, raw score of 13.17
  DOMAIN (457)..(701): Reverse transcriptase domain identified by PFam, accession name rvt, E-value=6.5e-65, PFam score of 229.1
MGKKQSRKTGNSKKQSASPPPKEHSSSPATEQSWTENDFDELREEGFRRSNYSELQEEIQTKGKQVENFEKNLDECITRITNTEKCLKELMEMKGKARELCEECRSLRSRCDQLEERVSVIKDEINEMKREGKFREKRIKRNEQSLQEIWDYVKRPNLRLTGVPESDGENGTKLENTLQDIIQENFPNLARQANIQNQEIQRMPQRYSSRRATPRHIIVRFTKVEMKEKMLRAAREKGRVTHKVKPIRLTADLSAETLQARREWGPIFNMLKEKNFESRISYPAKLSFISEGEIKYFTDKQMLRDFVTTRPALKELLKEALNMERNNWINKIDRLLARLIKKKREKNQIDAIKNDKGDITTDPTEIRTTIREYYKHLYANKLENLEEMDKFLDTYTLPRLNQEEVESLNRPITGSEIVAIINSLPMKKSPGPDGFTAEFYQRYKEELVPFLLKLFQSIEKEGILPNSFYEASIILIPKPGRDTTKKENFRPISLMNIDAKILNKILANRIQQHIKKLIHHDQVGFIPGMQGWFNIRKSINVIQHINRTNDKNHMIISKDAEKAFDKIQQRFMLKTLNKLGIDGTYLKIIRAICDKPTANIILNGQKLEAFPLKTGTRQGCPLSPLLFNIVLEVLARAIRQKKEIKGIQLGKEEVKLSLFADDMIVYLENPIVSAQNLLKLISNFSKVSGYKINVQKSQAFL

SEQ ID NO: 32536 - protein, 407 aa, Homo sapiens
MGKKQNRKTGNSKTQSASPPPKERSSSPATEQSWMENDFDELREEGFRRSNYSELREDIQTKGKEVENFEKNLEECITRITNTEKCLKELMELKTKARELREECRSLRSLCDQLEERVSAMEDEMNEMKREGKFREKRIKRNEQSLQEIWDYVKRPNLRLIGVPESDVENGTKLENTLQDIIQENFPNLARQANVQIQEIQRTPQRYSSRRATPRHIIVRFTKVEMKEKMLRAAREKGRVTLKGKPIRLTADLSAKDMNRHFSKEDIYAAKKHMKKCSSSLAIREMQIKTTMRYHLTPVRMAIIKKSGNNSYIMAAEAPSIMASDNHLQRQENMSLWDTSSPQDTSPGVSQQTCSRHYLEFYHMPSLSNHLQEEWNYYGWLTNKDSPLESYGQPASKGRSEDRQDCC

SEQ ID NO: 32537 - protein, 644 aa, Homo sapiens
  DOMAIN (541)..(582): kw TRANSCRIPTASE REVERSE II ORF2 domain identified by eMATRIX, accession number DM01354I, p-value=6.921e-40, raw score of 15.55
  DOMAIN (303)..(527): AP endonuclease family 1 domain identified by PFam, accession name AP_endonucleas1, E-value=1e-53, PFam score of 191.9
MGKKENRKTGNSKKQSASPPPKERSSSPAMEQSWMENDFDELREEGFRRSNYSELQEDIQTKGKEVENFEKNLEECITRITNTEKCLKELMELKTKAQELREECRSLRSRCNQLEERVSAMEDEMNEMKREGKFREKRIKRNEQSLQEIRDSVKRPNLRRTGVPESDGDNGTKLENTLQDIIRENFPNLARQANVQIQEIQRTPQRYSSRRATPRHIIVRFTKVEMKEKMLRAAREKGQVTLKGKPIRLTADLSAETLQARREWGPIFNILKEKNFQPRISYPAKLSFISEGEIKYFTNKQMLRDSVTTRPALKELLKETLNMERNNRYQPLQNHAKTDTHSLKIKGWRKLYQANGKQKKAGVAILVSDKTDFKPTKIKRDKEGHYIMVKGSIQQEELTILNVYAPNTGAPRFIKQVLSDLQRDLDSHTLIMGDFNTPLSTLDRSMRQKVNKDTQELNSALHQADLIDIYRTLHLKSTEYTFFSARHHTYSKIDHILGSKALLSKCKRTEIITNYLSDHSAIKLELTIKNLTQNPSTTWKLNNLLLNDYWVHNEMKSEIKMFFETNENKDTTYQNLWDAFKAVCRGKFIALNAHKGKQERSKIDTLTSQLTELEKQEQTHSKASRRQEITKIRAEPKEIETPKN

SEQ ID NO: 32538 - protein, 475 aa, Homo sapiens
MGKKQSRKTGNCKKQSASPPPKECSSSPAMEQSWMGNDFDELREEGFRQSNYSELQEEIQTNGKEVKNFEKKLDDWITRITNTEKSLKELMELKAKARELLEECRSPRSQCDQLEERVSVMEDEMNEMKREGKFREKRIKRNEQILQEIWDYVKRPNLHLIGVPESDGENGTKLENTLQDIMQENFPNLARQANIQIQEIQRTPQRYSLRRATPRHIIVRFTKVEMKEKMLRAAREKGQVTHKGKPIRLTADLFAETLQARREWGPIFNILKEKMGKKQSRKTGNCKKQSASPPPKECSSSPAMEQSWMWNDFDELREEGFRRSNYSELQEEIQTNGKEVKNFEKKLDDWITRITNAEKSLKELMELKAKARELREECRSPRSQCDQLEERVSVMEDEMNEMKREGKFREKRIKPRISYPAELSFISEGEIKYFTDNQMLRDFVTTRSALKELLKEALNMERNNRYQPLQKHAKM

SEQ ID NO: 32539 - protein, 285 aa, Homo sapiens
  DOMAIN (121)..(161): bZIP transcription factor domain identified by PFam, accession name bZIP, E-value=0.064, PFam score of 12.2
MVGWSVDLNFLPSVDPETVLQTGHELLSELQQRRFNGSDGGVSWSPMDDELLAQPQVMKLLDSLREQYTRYQEVCRQRSKRTQLEEIQQKEEIQTKGKEVKNFEKNLDESITRITNTEKCLKELMELKAKVQELQEECRSLRSRCNQLEEMVSVMKDEMNEMKQEGKFREKRIKRNEQSLQEIWDYVKRPNLHLIGVPESDGENGTKLENTLQDIIQENFPHLARQAKIHIQEIQRTPQRYSSRRATPRQIIVRFTKVEMKEKMLRAAREKGRVTLKGKPIQTNS

SEQ ID NO: 32540 - protein, 721 aa, Homo sapiens
  DOMAIN (562)..(607): kw TRANSCRIPTASE REVERSE II ORF2 domain identified by eMATRIX, accession number DM01354N, p-value=1.000e-40, raw score of 13.17
  DOMAIN (136)..(386): AP endonuclease family 1 domain identified by PFam, accession name AP_endonucleas1, E-value=1.6e-13, PFam score of 58.4
  misc_feature (1)...(721): Xaa = X or * as defined in Table 2
MHIVVETALSASWQNKAKPPARVLLQVVPNVWFLVAVVWELYPSLDLMDRSIECSSSPATEQSWTENDYDKLREEGFRRSNYSELQEDIQTKGKDVENFEKNLEECITRITNTQKCLKELMELKTKARELREECRSLRSRCDQLEERVSVMEDEMNEMKQEGKFREKRIKRNEQSLQEIWDYVKRPNLRLIGVPESDGENGTKLKNTLQDIIQENFPNLARQAKVQIQEIQRMPQRYSLTRATPRHIIVRFTKVEMKEKMLRAAREKGAPRFIKQVLSDLQRDLDSHTLIMGDFNTPLSTLDRSTRQKVNKDTQELNSALHQVDLIDIYRTLHPKSTEYTFFSAPHHTYSKIDHILGSKALLSKCKRTEIITNYLSDHSAIKLELRIKNLTQNRSTTWKLNNLLLNDYWVHNEMKLEIKMFFETNENKDTTYQNLWDAFKAVYRGKFIALNAHKRKQERSKIDTLTSQLKELEKQEQTHSKASRRQEITKIRAELKEIETQKTLQKINESRSWFFERINKIDRLLARLIKRKREKNQIDAIKNDKGDITTNPTEIQTTIREYYKHLYANKLENLEEMDKFLDTYTLPRLNQEEVESLNRPITGSEIVAIINSLPTKKSPGPDGFTAEFYQRYKKELVPFLLKLFQSIEKEGILPNSFYEASIILIPKPGRDTTKKENFRPISLMNIDAKTLNKILADRIQQHIKKLIHHDQVGFIPGMQGX

SEQ ID NO: 32541 - protein, 457 aa, Homo sapiens
MRSVTGNGRLEKSLCADHAGGVMAVAAKTKNAGKWHNHIIRRFDINPGDRLYDQGGRAHHPFAVLPPPVPALKPPPGMREKRKCGINFTVRCFCTGGNKSRRPRKSVKKPGNKSSNQHDRDPQSDPQRQSRPAATSRARVTLVMRVHYRVIRNNRTNVLICIPCMRRLLAHYRGRNFSAPRSVLVFRFHSPIHRQVRRGGREERERRRQRETDEKRERREEKNQSFTTPDQSGRENDELREEGFRRSNYSELQEEIQTKGKEVENFEKNLEECITRITNTEKCLKELMDLKAKARELREECRSLRSRCDQLEERVSAMEDEMNEMKREGKLREKTIKRNEQSLQEIWDYVKRPNLRLIGVPESDGENGTNLENTLQDIIQENIPNLARQANIQIQEIQRTPQRYSSRRATPRNIIVRFTKVEMKEKMLRAAREKGWVTHKGKPIILTADLLAETLQP

SEQ ID NO: 32542 - protein, 1153 aa, Homo sapiens
  DOMAIN (319)..(364): kw TRANSCRIPTASE REVERSE II ORF2 domain identified by eMATRIX, accession number DM01354N, p-value=1.000e-40, raw score of 13.17
  DOMAIN (405)..(678): Reverse transcriptase domain identified by PFam, accession name rvt, E-value=1.8e-87, PFam score of 304.0
MELKTKARELRKECRSLRSRCNQLEERVSAMEDGMNEMKQEGKFREKRIKRNKQSLQEIWDYVKRPNLRLIGVPESDGENGTKLENTLQDIIQENFPNLARQANIQIQEIQRTRQRYSSRRATPRHIIVRFTKVEMKEKMLRAAREKGRVTHKGKPIRLTADLSAETLQARREQKPSFFETNENKDTTYQNLWDAFKAVCRGKFIALNAHKRKQERSKIDTLTSQLKELEKQEQTHSKASRRQEITKIRAELKEIETQKTIQKINESRSWFFERINKIDRPLARLTKKKREKIQIDAIKNDKGDITTDPTEIQTTIREYYKHLYANKLENLEEMDKFLDTYTLPRLNQEEVESLNRPITGSEIVAIINSLPTKKSPGPDGFTAEFYQRYKEELVPFLLKLFQSTEKEGILPNSFYEASIILIPKPGRDTTEKENFRPISLMNIDAKILNKILPNRIQQHIKNLLHHDQVGFIPGMQGWFNICKLINVIQHINRTKDKNHMIISIDAEKAFDKIQQPFMLKTLNKLGIDGTYLKIIRAIYDKPTANIIWNGQKLEAFPLKTGTRQGCPLSPLLFNIVLEVLARAIRQEKEIKGIQLGKEEVKLSLFADDMIVYLENPIVSAQNLLKLISNFSKVSAYKINVQKSQAFLYTNNRQTESQIRSELPFTIASKRIKYLGIQLTRDVKDLFKENYKPLLNEIKEDTNKWKNIPCSWVGRINIVKMAILPKIIYRFNAIPIKLPMTFFTELEKTTFKFIWNQKRARIAKSILSQKNKAGGITLPDFKLYYKATVTKTAWYWYQNRDIDQWNRTEPSEITPPIYNYLIFDNPEKNKQWGKDSLFNKWCWENWLAICRKLKLDPFLTPYTKINSRWIKDLKVRPKTIKTLEESLGITIQDIGMCKDFMSKTPKAMATKAKIDKWDLIKLKSFCTAKETTIRLGVELHKHPCGHHHYDTTGSDLKPAQHWVSPKAYYNHSQAIANVHSRPCDFTISMWQSQSGLCPSLQDGKVSHALGRLAPLWPREGPEMPSKYQVLESGTPSILLMLYPSVAMLVPKVQDKVTFTFPSTFLKQMEFLHAASTAGEGRGGVASEIQDCFFYLFSASLSDMKLKPGTVDAHWTFGSYEAIIAKNSGKSMVSLPLASTSLIISRNSASDPVTS

SEQ ID NO: 32543 - protein, 1418 aa, Homo sapiens
  DOMAIN (623)..(655): ABC transporters family proteins domain identified by eMATRIX, accession number BL00211B, p-value=7.750e-19, raw score of 13.37
  DOMAIN (533)..(697): ABC transporter domain identified by PFam, accession name ABC_tran, E-value=3.3e-22, PFam score of 87.2
  misc_feature (1)...(1418): Xaa = X or * as defined in Table 2
TFHKLEAVKHNFNLEEYSLSQCTLEKFELPDSFVYTVRGKPPIQASVMADTPPVTKLEHPRSTSDCCAGSENFSLVDLTLLGSVKETGQNEQETHERGSANMGSSLQELSQKMENEKTDLVDSLETSHQDLIGYAKRTQQPMWRRTIMGWPDEKSMDELDLNYSIDAVRVIFTDTFSYHLKFSWGHRIPMMKEHRDHSAHCQAVNEKMKCEGSEFWEKGFVAFQAAINAAIIEIATNHSVMEQLMSVTGVHMKILPFVAQGGVATDFFIFFCIISFSTFIYYVSVNVTQERQYITSLMTMMGLRESAFWLSWGLMYAGFILIMATLMALIVKSAQIVVLTGFVMVFTLFLLYGLSLITLAFLMSVLIKKPFLTGLVVFLLIVFWGILGFPALYTRLPAFLEWTLCLLSPFAFTVGMAQLIHLDYDVNSNAHLDSSQNPYLIIATLFMLVFDTLLYLVLTLYFDKILPAEYGHRCSPLFFLKSCFWFQHGRANHVVLENETDSDPTPNDCFEPVSPEFCGKEAIRIKNLKKEYAGKCERVEALKGSVTVYNHTLSRMADIENISKFTGFCPQSNVQFGFLTVKENLRLFAKIKGILPHEVEKEVQRVVQELEMENIQDILAQNLSGGQNRKLTFGIAILGDPQVLLLDEPTAGLDPLSRHRIWNLLKEGKSDRVILFSTQFIDEADILADRKVFISNGKLKCAGSSLFLKKKWGIGYHLSLHLNERCDPESITSLVKQHISDAKLTAQSEEKLVYILPLERTNKFPELYRDLDRCSNQGIEDYGVSITTLNEVFLKLEGKSTIDESDIGIWGQLQTDGAKDIGSLVELEQVLSSFHETRKTISGVALWRQQVCAIAKVRFLKLKKERKSLWTILLLFGISFIPQLLEHLFYESYQKSYPWELSPNTYFLSPGQQPQDPLTHLLVINKTGSTIDNFLHSLRRQNIAIEVDAFGTRNGTDDPSYNGAIIVSGDEKDHRFSIACNTKRLNCFPVLLDVISNGLLGIFNSSEHIQTDRSTFFEEHMDYEYGYRSNTFFWIPMAASFTPYIAMSSIGDYKKKAHSQLRISGLYPSAYWFGQALVDVSLYFLILLLMQIMDYIFSPEEIIFIIQNLLIQECSSSPATEQSWMENDFDKLREEGFRRSNYSELREDMQTKGKEVENFEKNLEESITRITNTEKCLKELIELKTKARELREECRSLRSPRDQLEERVSAMEDEMNEMKREGKFREKRIKRNQQNLQEIWDYVKRPNLRLIGVPESDGENGTKLENTLQDSIQENFPNLARQANVQIQEIQRTPQRYSSRRATPRHIIVRFTKVEMKEKMLRAAREKGRVTLKGKPIRLTVDLSAETLQARREWGPIFNILKEKNFQPRISYPAKLSFISEGEIKSFTDKQMLRDFVTTRPALKELLKEVLNMERNNX

SEQ ID NO: 32544 - protein, 436 aa, Homo sapiens
MLVDLVTGACMSGKHPQSMSEGRALTVIRAGRCHRQLELMGCQTGPDQPGTSSVLPGTSPVQTEGTQAWDARGTALMPTGKAKLGCFGNRGLGEKLVHKQVLPVCQRKAQGLLRPESSYFSDGAESCITSCLMVVKYTQECSSSPATEQSLTENDFDELREEGFRRSNYSELQEEIQSKGKKVKHFEKNLDECITRITNREKCLKELMELKAKARELREECRSLRSQCDRLEERVSVMEDEMNEMKREGKFREKGIKRNEQSLQEIWDYVKRPNLHLIGVPESDRENGTKLENTLQDIIQENFPNLARQANIQIQEIQRMPQRYSSRRATPRHIIVRYTKVEMKEKMLRAAREKGRVTHKGKPIRLTADLLAETLQARREWGPIFNILKEKNFQPRISYPDKLRFISEGEIKYFTDKQMLRDFVTTRPALKELLKH

SEQ ID NO: 32545 - protein, 913 aa, Homo sapiens
  DOMAIN (188)..(234): kw TRANSCRIPTASE REVERSE II ORF2 domain identified by eMATRIX, accession number DM01354O, p-value=1.000e-40, raw score of 8.73
  DOMAIN (221)..(496): Reverse transcriptase domain identified by PFam, accession name rvt, E-value=1.8e-83, PFam score of 290.7
MGKKHNRKTGNSKKQSASPPPKERSSSPATEQTWMENDFDELREEGFRRSNYSELREDIQTKVKEVENFEKNLEECITRITNTEKCLKELMELKTKARELREECRSLRSRCNQLEERVSAMEDEMNEMKREGKFREKRIKRNEQSLQEIWDYVKRPKSTSDLVYLKEEVESLNRPITGAEIVAIINSLPTKKSPGPDGFTAEFYQRYKEELVPFLLKLFQSIEKEGILPNSFYEASIILIPKPGRDTAKKENFRPISLMNIDAKILNKILTKRIQQHIKKLIHHDQVGFIPGMQGWFNIRKSINVIQHINRAKDKNHMIISIDAEKAFDKIQQPSMLKTLSKLGIDGTYFKIIRAIYDKPTANIILNGQKLEAFPLKTGTRQGCPLSPLLFNTVLEVLARAIRQEKEIKGIQLGKEEVKLSLFADNIIVYLENPIVSAQNLLKLISNFSKVSGYKVNVQKSQAFLYTNNRQTESQIMSELPFTIASKRIKYLGIQLTRDGKDLSKENYKPLLKEIKEDTNKWKNIPCSWVGRINIVKMAILPKVIYRFNAIPIKLPMTFFTELEKTTLKFIWNQKRARIAKSILSQKNKAGGITLPDFKLYYKATVTKTAWYWYQNRDIDQWNRTEPSEIMPHIYNYLIFDKPEKNKQWGKDSLFNKWCWENWLAICRKLKLDPFLTPYTKINSRWIKDLNVRPKTIKTLEENLGITIQDTGRGKDFMSKTPKAMATKAKTDKWDLIKLKSFCTAKETTIRVNRQPTKWEKIFTTYSSDKGLISRIYNELKQIYKKKTNNPIKKWAKDMNRHFSKEDIYAAKKHMKKCSSSLAIREMQIKTTMRYHLIPVRMAIIKKSGNNRFDDKYTLKLTFISGRTKQQREAEFTKSIAKFFDHSGTLVMDAYEPEISRLHDSLAIERKIK

SEQ ID NO: 32546 - protein, 625 aa, Homo sapiens
  DOMAIN (235)..(278): 1 kw MIND INHIBITOR DIVISION CONTROL domain identified by eMATRIX, accession number DM01756B, p-value=4.822e-15, raw score of 22.91
  DOMAIN (200)..(319): ParA family ATPase domain identified by PFam, accession name ParA, E-value=9.1e-22, PFam score of 85.7
MKLMETLNQCINAGHEMTKAIAIAQFNDDSPEARKITRRWRIGEAADLVGVSSQAIRDAEKAGRLPHPDMEIRGRVEQRVGYTIEQINHMRDVFGTRLRRAEDVFPPVIGVAAHKGGVYKTSVSVHLAQDLALKGLRVLLVEGNDPQGTASMYHGWVPDLHIHAEDTLLPFYLGEKDDVTYAIKPTCWPGLDIIPSCLALHRIETELMGKFDEGKLPTDPHLMLRLAIETVAHDYDVIVIDSAPNLGIGTINVVCAADVLIVPTPAELFDYTSALQFFDMLRDLLKNVDLKGSQCERHRRRVISAFPSEERSSSPATEQSWMENDFDELREEGFRRSNYSELREDIQIKGKEVENFEKNLEECITRITNTEKCLKELMELKTKARELREECRSLRSRCDQLEERVSAMEDEMNEMKREGKFREKRIKRNEQSLQEIWNYVKRPNLRLICVPESDAENGTKLENTLQDVIQENFPNLARQANVQIQEIQRMPQRYSSRRTTPRHIIVRFTKVEMKEKMLRAAREKGRVTLKGKPIRLTADLSAETLQARREWGPIFNILKEKNFQPRISYPAKLSFISEGEIKYFTDKQRLRDFVTTRPALKELLKEALNMERNNQYQPLQNHAKM

SEQ ID NO: 32547 - protein, 357 aa, Homo sapiens
  misc_feature (1)...(357): Xaa = X or * as defined in Table 2
MVLPLKLLFAQGLSSLLYCQDCQRCHGNAHVYARVLLMFSELRALPLPEDCGYKEVHKSPHPIATTTNTASPSRCGVHHPGCFLLLPLPCPLPLRGEPRAPSPRERGSAGSPGGLGAQICWSHRRQGEHKSSPATEQSWTENDFDELREEGFRRSNYSELQEEIQTKGKAVKNFEKSLDECITRITNTEKCLKELMELKAKARELREECRSLRSQCDQLEERVSVMEDEMNEMKQEGKFREKRLKRNEQSLQEIWDYVKRPNLRLIGVPESDGENGTKLENTLQDIIQENFPNLARQATVHIREIQRTPQRFSLRRSTPRHLXENYLNKRLTKGAPIKGRPLGTFRLGKRGNGGLSG

SEQ ID NO: 32548 - protein, 738 aa, Homo sapiens
  DOMAIN (397)..(442): kw TRANSCRIPTASE REVERSE II ORF2 domain identified by eMATRIX, accession number DM01354N, p-value=1.000e-40, raw score of 13.17
  DOMAIN (481)..(726): Reverse transcriptase domain identified by PFam, accession name rvt, E-value=3.7e-54, PFam score of 193.3
MTLCNDNGFYQKQKLKNRKAQHQKSSPALRMSFTCRPVMVHNLTGSSGVLEWARSTIRVDSVHLFPAAFFPIFPDGYTTGRKEIKADFYDKSLVLERISCKKQSSNTRTNDKNDMIVSIDAEKAFDKIQHRFMLKTLNKLDPLSLTLCMFGHSRSLSGCHFANTCAKKPSQVMPPRRAWASTSCPEVHQGTLPCLQTLSPRDLKTESHSEGRKGKEVENFEKNLEECITRITNTEKCLKELMELKTKARELREECRSLRSRCDQLEERVSAMEDEMNEMKREGKFREKRIKRNEESLQEIWDYVKRPNLRLIGVPESHGENGTKLENTLQDIIQENFPNLARQANVQIQEIQRMPQRYSWRRATPRHIIVRFTKVEMKEKRLRAAREKEIQTTIREYYKHFYTNKLENLEEMDKFLDTYTLPRLNQEEVQSLNRPITGAEIVAIINSLPTKKSPGLDGFTAKFYQRYKEELVPFLLKLFQSIEKEGILPNSFYEASIILIQKPGRDTTKKENFRPISLMNIDAKILNKILANRIQQHIKKLIHHDQVGFIPGMQGWFNIRKSINVIQHINRAKDRNHMIISIDAEKAFDKIQQPFMLKTLNKVGTDGTYFKIIRAICDKPTANIILNGQKLEAFPLKTGTRQGCPLSPLLFNIVLEVLARAIRQEKEIKGIQLGKEEVKLSLFADDMNVYLENPIVSAQNLLKADKQLQQSLRIQNQCAKITSIPIHQQQTNREPNHE

SEQ ID NO: 32549 - protein, 590 aa, Homo sapiens
  DOMAIN (452)..(464): Fungal Zn(2)-Cys(6) binuclear cluster domain proteins domain identified by eMATRIX, accession number BL00463, p-value=7.469e-10, raw score of 8.22
MGKKQSRKTGNSKKQSATPPPKERSSSPATEQSWTENDFDELREEGFRRSNYSELQEETQTKGREVENFEKNLDECITRTTNTEKCLKELMELKAKAWELREECRSLRSRCNQLEERVSVMEDEMNEMKREGKFREKRIKRNEQSPQVIRDYVKRPNLRLIGVPESDGKNGTKLENTLQDIIQENFPNLARQANIQIQEIPRTSKDTLQKSTPLLALLVDSQVEGRTCLGPQKSGNKKGTTERFKKKKEDEPHQLGSELGISERNTAAPVRDCGRSFSRLKRSCLLALKTAADLPVQHSSYAKGQTASSSRQTGSGVDLQQTPTDLQLRVLTVGRKTNKQKGHPHQNPNCTSPSSKTKDKTSRGMIRQQHLQVTNIRCSTATAADTQANRVWSGPLANSNRPAAEGPEEIQINGKEVKKFEKKLDEWITRITNAEKSLKELMELKAKARELCEECRSLRSRCDQLEERVSVMEDEMNEMKREGKFREKRIKRNEQSLQEIWDYVKRPNLRLIGVPESDRENGTKLENTLQDIIQENFPNLARQANIQIQEIQRTPQRYSSRRATPRHIIVRFTKVEMKEKMLRAARKKGQ

SEQ ID NO: 32550 - protein, 646 aa, Homo sapiens
  DOMAIN (409)..(421): Fungal Zn(2)-Cys(6) binuclear cluster domain proteins domain identified by eMATRIX, accession number BL00463, p-value=3.357e-09, raw score of 8.22
MGARAGGSCSCLMWLLLASGHFMGCVAAGDTVGPEKFRSCYTITLLQSKLSYSFGKNNKNFQLRKCLQTVDNLFVPNQNGYYCHSQTSLDRAQIDLNGRIRNGSVYSAHSTNSLNNPQPYLQPSPMSSNPSITGSDVMRPDYLPSHRHSAVIPPSYRPTPDYETVMKQLNRGLVHAERQSHSLRNLNIGSSYAYSRPAALVYSQPEIREHAQLPSPAAAHCPFSLSYSFHSPSPYPYPAERRPVVGAVSVPELTNAQLQAQDYPSPNIMRTQVYRPPPPYPPPRPANSTPDLSRHLYISSSNPDLITRRVHHSVQTFQEDSLPVAHSLQEERSSSPATEQSWTENDFDELREEGFRRSNYSELREDIQTKGKEVENFEKSLEECITRITNTEKYLKELMELKTKARELCEECRSLRSQCDQLEERVSAMEDEMNEMKREGKFREKRIKRNEQSLQEIWDYVKRPNLRLIGVPESDGENGTKLENTLQDIIQENFPNLAKQANVQIQEIQRTPQRYSSRRATPRHIIVRFTKVEMKEKMLRAAREKGRVTLKGKPIRLTADLSAETLQARREWGPIFDILKEKNFQPRISYPAKLSFRSEGEIKSFTDKQMLRDFVTTRPALKELLKEALNMERNNRYQPLQNHAKM

SEQ ID NO: 32551 - protein, 578 aa, Homo sapiens
  DOMAIN (259)..(271): Fungal Zn(2)-Cys(6) binuclear cluster domain proteins domain identified by eMATRIX, accession number BL00463, p-value=4.214e-09, raw score of 8.22
MSVHSWKPSWIRPIRSLSPKRPLGTQGTSEVPPDTHICQTKFHSLSSGPLLLSVHPVGKLSAVVGRVFIHILSQRERRRRRVISAFPSEVPGSSHQGVPDSGCRSVGAHPVREPKQGEALPHSGSPREGKLTNRKDIHTKNPSVHHHHQRPKVDKTTKIGKKQNRKTGNSKTQSASPPPKECSSSPATEQSWMENDFDELREEGFRQSNYSELRKDIQTKGKEVENFEKNLEECKTRITNTEKCLKELMELKTKARELCEECRSLRSRCNQLEERVSVMEDEMNEMKREGKFREKRIKRNEQSLQEIWDYVKRPNLRLIGVPESDGENGTKLENTLQDIIQENFPNIARQANVQIQEIQRTPQRYSSRRATPRHIIVRFTKVEMKEKMLRAAREKGRVTLKGKPIRLTADLSAETLQARRECRAGSCRKIFATIPISTTTIPAISIPPRNDISLRVVSTYAEQQKNTNAVPPSVYLGFGVGSAWRAVLWRVWWSLVVVVGFVSIAAAGVCVRGGVCMTSVEEVTLDVVEIAKEQELEVEPENVAELLPFMINVTIGRQWPSPKFFAPKKQCPQFKTLL

SEQ ID NO: 32552 - protein, 473 aa, Homo sapiens
MAEGKEEQVPSYMDGSRQRKNEEDVKAETPDKTISSRAALRRGTSSDGRKLNGTFAVRGAGGYYMWGHTRAAFSVNPFGSLGQVSLKRKTVISELKQAVPRERSTGPRRQPKPSSWLKDTLFGGRSQDGRVGTAPVYSSQRERQRRRVISAFASEERSSFTSNRNQKLGLENDFDELREEGFRRSNYSELREDIQTKGKEVENFEKNLEECITRITNTEKCLKELMELKTKAQELREECRSLRSRCDQLEERVSAMEDEMNEIKREGKFREKRIKRNEQSLQEIWDYVKRPNLRLIGVPESDAENGTKLENTLQDIIQENFPNLARQANVQIQEIQRTPQRYSSRRATPRHIIVRFTKVEMKEKMLRAAREKGRVTLKGKPMRLTANLSAETLQARREWGPIFNTLKEKNFQPRISYPAKLSFISEGEIKYFTDKQMLRDFVTTRPALQELLKEARNMERNNRYQLLQNYAKM

SEQ ID NO: 32553 - protein, 3021 aa, Homo sapiens
MKLQTLLVRGLAHFFNEAADLTDVSRDSSFWQFPGLPHFKNEAADLSDVSRVSSFWQVRGLAHIFNEAADLTDVSRVSSFLQFRGLPHFKNEAADLTDVSRVSSFLQVRGLAHFLNEAADLTDVSRVFSFWQVRGLAHFLNEAADLTDMSSVSSFWQVHGVAHFKNEAADLNDVSRVSSFLQVRGLAHFLNEAADLNDVPRVSSFLQVRVLAHFLNEAADLTEFDPSDISRVSSFWQVRVLAHFFNEAAELTDVSRVSSFWQFRGLPHFKNEAADLSDVSRVSSFWQVRGLAHFFNEAADLTDVSRVSSFWQVRGLAHIFNEAADLTDVSRVTSFWQVHGVAHFKNQAADLTDVSRVSSFWQVRGLAHFFNEAADLTDVSRVSSFWQVHGLAHFTNEAADLTDVSRVSVFWQVHGLPHFKNEAADLSDVSRVSVFWQVHGLPHFKNEAADLSDVSRVSSFCQVRGVAHFFNEAADLTDVSRVSSFWQFRGLPHFKNEAADLTDVSRVASFWQVRGLAHFLNEAADLTDVSSVSSFWQVHGVAHLKNEAADLPDVPRVSSFLQVRVLAHFLNEAADLTDVSRVSSFWQVRGLAHIFNEAADLTDVSRVSSFWQVHGLAHFKNEAADLTGVSRVSVFWQVHRLAHFKNEAADLCDVSRVSSFLEVRGLVHFLNEAADLTGSWSCSLKNEAADLSDVSRVSSFWQLHGLAHFTNEAADLTDVSRGSSFWQVHGVAHFKNEAADLSDDSRVSSFLQVRGLAHFLNEAADLTDVSRVSSFWQFRGLPHFKNEAADLTDMSSVSSFWQVHGLAHFKNEAADFYDVSRDSSFWQFPGLPHFKNEAADFTDVSRVSVFWQVHGLAQFKNEAADISDVSRVSSFLHVRGLAHFLNEAADLTDVSRVTSFWQVHGVAHFKNQAADLTDVSRVSSFWQVRGLAHFFNEAADLTDVSRVSSFWQVRGLAHFTNEAADLTDVSSVSSFWQVHGLPHFKNEAADLTDVSRVSSFWQVRLLALFFNEAADLTDVSRVSSFWQFRGLPHFKNEAADLTDVSRVSSFWQVHGLAHFTNEAADLTDVSRVSVFWQVHGLPHFKNEAADLSDVSSVSSFWQVHGLPHFKNEAADLTDVSRVSSFWQVRGVAHFFNEATDLTDVSRVSSFWQFRGLPHFKNEAADLTDVSRVSSFWQVHGLTHFKNEAADLTDVSRVSSFWQVRGLAHFLNEAADLTDVSSVSSFWQVHGVAHFKNEAADLTDVSRVSSFLQVRGLAHFLNEAVDLNGECYSTSRCYVQSFFLQMCPECLPSGRFMVLLTSLTKLQTLLVHGLAHFKNEAAELSDVSRVSSFLQVRGLAHFLNEAADLNDVSRVSSFLQVRGLAHFLNEAADLTDVSRVASFWQVRGLAHFLNEAADLTDVSSVSSFWQVHGVAHLKNEAADLPDVSRVSSFLQVRGLAHFLNEAADLNDVSSVSSFWQVHGLAHFKNEAADLTDVSRVSSFWQFRGLPHFKNEAADLTDVSRISSFLEVRGLAHFLNEAADLTDVSRVSSFWQLHGLAHFTNEAADLTDVSRVSSFLQVPGLAHFLNEAADLTDVSRVSSFWQIHGLVHFTNEAADLTDVSRVSSFWHFRGLPHFKNEAADLTDVSRVSVFWQVHGVAHFKNEAADLSDVSRVSSFWQFRGLPHFKNEAADLTDVSRDSSFWQFPGLPHFKNEAADFTDVSRVSVFWQVHGLAQFKNEAAEISDVSRVYSFLQVRGLAHFLNEAADLTDMSGDSSFWQVLCLAHCKNETADLSDVSRMSSFWQLHSLAHFTNEAADLTDVSRGSSFWQVHGVAHFKNEAADLSDVSRVSSFLQVRGLAHFLNEASDLTDVSRVSSFWQVHVLVHFTNEAANLTDVSRVSSFLQVRGLAHFLNEAADLTDVSSVSSFWQVHGLAHFKNEAAGLTDVSRVSSFWEFRGLPHFKNEAADLTDMSSVSSFWQVHGLAHFKNEAADFYDVSRDSSFWQFPGLPHFKNEAADFTDVSRVSVFWQVHGLAQFKNEAAEISDVSRVYSFLQVRGLAHFLNEAADLTDVSRVCVFWQVHGLAHFKNEAADLSDVSRVSVFWQFHGLAHFKNEAADLSDVSRVSSFLQVRGLAHFLNEAADLTDVSSVSSFWQVDCLAHFKNEAADLTDVSRVSSFWQVRDLAHFFNEAADLTDVSRVSSFWQFLGLPHFKNEAADITDVSRVSSFWQFRGLPHFKNEAADLTGECYSTYSCYVQSLFLRMCPECLPSGRFMVFLTSLMKLQTLLVHGVAHFKNEAADLSVECYSTYRCCVQSLFLQMCLEFLPSFRFVVLLTSLMKLQTLPVHGLAHFKNEAADLTDVSRVSSFWQFRGLPHFKNEAADITDVSRVSSFWQVHGVAHFKNEAADLTGISRVSSFWQVRGLPHFFNEAADLTDVSRVSSFWQFRGLPHFKNEAADLTDVSRVSSFLQVRGLAHFLNEAADLTDVSSLSSFWQVHGLAHFKNEAADLTDVSRVSSFWQVRGLAHFFNEAADLTDVSRVSSFWQFRGLPHFKNEAADITDASRVSSFWQVHGVAHFKNEAADLTGFSRVSSFWQVRGLAHFFNEAADLTDVSRVSSFWQFRGLPHFKNEAADLTDMSRVSSFWQVHGLAHFTNEGADLTDVSRVSSFWQVRGLAHFKNDAADLSGECFNTKRCYVQSLFLQKYPGFLPSGRFMVLLTLRMKLQTLLKRSSSPAMEQSWMENDFDELREEGYRRSNYSELREDIQTKGKEVENFEKNLEECVTRITNTEKCLKELIELKTKARELHEECRSLRSRCDQLEERVSAMEDEMNDMKREGKVREKRIKRNEQSLQEIWDYVKRPNLRLIGVPESDAENGTKLENTLQDIIQENFPNLAKQANVQIQEIQRTPQRYSSRRATPRHIILRFTKVEMKEKMLRAAREKGWVTLKGKPIRLTADLSAETLQARREWGPIFNILKEKNFQPRISYPAKLSFISEGEIKYFTDKQMLRDFVTTRPALKELLKEALNMERNNQYQPLQNHAKM

SEQ ID NO: 32554 - protein, 1628 aa, Homo sapiens
  DOMAIN (615)..(656): kw TRANSCRIPTASE REVERSE II ORF2 domain identified by eMATRIX, accession number DM01354I, p-value=1.000e-40, raw score of 15.55
  DOMAIN (861)..(1136): Reverse transcriptase domain identified by PFam, accession name rvt, E-value=7.7e-89, PFam score of 308.6
MKENFKHRHVVAFISSQEAQEDSREEEDRLESRFYFLFLLELSYKTTGLNREPTVSLNSKSGTPMDQNEHSHWGPHAKGQCASRSELRIILVGKTGTGKSAAGNSILRKQAFESKLGSQTLTKTCSKSQGSWGNREIVIIDTPDMFSWKDHCEALYKEVQRCYLLSAPGPHVLLLVTQLGRYTSQDQQAAQRVKEIFGEDAMGHTIVLFTHKEDLNGGSLMDYMHDSDNKALSKLVAACGGRICAFNNRAEGSNQDDQVKELMDCIEDLLMEKNGDHYTNGLYSLIQRSKCGPVGSDERVKEFKQSLIKYMETQRSYTALAEANCLKGALIKTQLPKVDKTTKIGKKQSRKTGNSKKQSTSPPPKERSSSPAMEQSWTENDFDELREEGFRRSHYSELPEDIQTEGREVENFEKSLEECITRITHTEKCLKELMELKTKARELREECRSLRSQCDQLEERVSAMEDEMNEMKREGKPNLRPIGVSESDGENGTKLENTLQDIIPENFPNLARQANVQIQEIQRMPQRYSSRRATPRHIIVRFTKVEMKEKMLRAARQKAPHHTYSKIDHIVGSKALLSKCKRTEIITNYLSDHSAIKLELRIKNLTQSRSTTWKLNNLLLNDYWVHNEMKAEIKMFFETNENKDTTYQNLWDTFKAVCRGKFIALNAYKRKQETSKIDTITSQLKELEKQEQTHSKASRRQEITKIRAELKEIETQKTLQKINESRSWFFERINKIDRPLARLIKKKREKNQIDTIKNDKGDITTDPTEIQTTIREYYKHLYANKLENLEEMDTFLDTYTLPRLNQEEVESLNRPITGSEIVAIINSLPTKKSPGPDGFTAEFYQRYKEELVPFLLQLFQSIEKEGILPNSFYEASIILIPKPGRDTTKKENFRPISLMNIDAKILNKILANRIQQHIKKLIHHDQVGFIPGTQGWFNIRKSINVIQHINRAKDKNHMIISIDAEKAFDKIQQPFMLKTLNKLGIDGTYFKIIRAIYDKPTANIILNGQKLEAFPLKTGTRQGCPLSPLLFNIVLEVLARAIRQEKEIKGIQLGKEEVKLSLFADDMIVYLENPIVSAQNLLKLISNFSKVSGYKINVQKSQAFLYTNNRQTESQIMSELPFTIASKRIKYLGIQLTRDVKDLFKENYKPLLKEIKEDTNKWKNIPCSWVGRINIVKMAILPKVIYRFNAIPIKLPMTFFTELEKTTLKFIWNQKRACISKSILSQKNKAGGITLPDFKLYYKATVTKTAWYWYQNRDIDQWNRTEPSEIMPHIYNYLIFDKPEKNKQWGKDSLFNKWCWENWLAICRKLKLDPFLTPYTKINSRWIKDLNVRPKTIKTLEENLGITIQDIGVGKDFMSKTPKAMATKAKIDKWDLIKLKSFCTAKETTIRVNRQPTTWEKIFTTYSSDKGLISRIYNELKQIYKKKTNNPIKKWAKDMNRHFSKEDIYAAKKHMKKCSSSLAIREMQIKTTMRYHLAPVRMAIIKKSGNNSKMVEADGPGNLFTGVLHLETNEKSLKAVFGKYGPILEDNFLDGKAMKVEQVNKPSFQSGGNVEITIFLEKQEPFRKSETGKKFFKLFLLTLANFFKFSDHDDYSGGLGRDHSEHPNGSSYRDAYQSYGTFYGAPPA

SEQ ID NO: 32555 - protein, 539 aa, Homo sapiens
  DOMAIN (28)..(71): 1 kw MIND INHIBITOR DIVISION CONTROL domain identified by eMATRIX, accession number DM01756B, p-value=4.987e-13, raw score of 22.91
  DOMAIN (2)..(114): ParA family ATPase domain identified by PFam, accession name ParA, E-value=5.1e-10, PFam score of 46.7
  misc_feature (1)...(539): Xaa = X or * as defined in Table 2
MGKFDEGKLPTDPHLMLRLAIETVAHDYDVIVIDSAPNLGIGTINVICAADVLIVPTPAVLFDYTSALQFFDLLCDLLKNVDLKWVTVDSDTLASDAARLTCRHGLGNQPTGRSKEPPSPVLTFTTALLAGGATQAFAKENNQKAYKETYGVSHITRHDMLQIPKQQQNEKYQVPQFDQSTIKNIESAKGLDVWDSWPLQNADGTVAEYNGYHVVFALAGSPKDADDTSIYMFYQKVGDNSIDSWKNAGRVFKDSDKFDANDPILKDQTQEWSGSATFTSDGKIRLFYTDYSGKHYGKQSLTTAQPCPHTHLELSSQYQQLSSAGGVTRRKMPTPSSPKGRKATNYKPKXPPGFIRSNYTELQEEIQTKGKEVKNFDKNLDECVTRITNREKCLKELMELKAKAQELREECRSLRSRCDQLEERVSVMEDEMNEMKREGKFREKRIKRNEQSLQEIWDYVKRPNLRLIGVPESDEENGTKLENTLQDVIQENFPNLARQANIQIQEIQRTPQRYSFEKSNSKTHNCPDSPNFEIEGKNV

SEQ ID NO: 32556 - protein, 312 aa, Homo sapiens
MGKKQNRKTGNSKTQSNSPPPKERSSSPATERSWMENDFDELREEGFRRSNYSELREDIQTKCKEVENFEKNLEECITRITNTEKCLKELMELKTKARDLHEECRSVRSRCDQLEERVSVMEDEMNEMKPNLRLTGVPESDGENGTKLENTLQDIIQENFPNLARQANVQIQEIQRMPQRYSSRRATPRHIIVRFTKVEKKEKMLRAAREKGRVTLKGKPIRLTADLSAETLQARREWGPIFNILKEKNFQPRISYPAKLSFISEGEIKYFTDKQMLRDFVTSRPALKELLKEALNMERNNRNQPLQNHAKM

SEQ ID NO: 32557 - protein, 940 aa, Homo sapiens
  DOMAIN (317)..(360): 1 kw MIND INHIBITOR DIVISION CONTROL domain identified by eMATRIX, accession number DM01756B, p-value=4.822e-15, raw score of 22.91
  DOMAIN (282)..(396): ParA family ATPase domain identified by PFam, accession name ParA, E-value=4.4e-27, PFam score of 103.4
MALSPYACSCYGICWLPITCRLDWKLREASPATEAVLVDSCQPCTCKIPLREEGFRRSNYSELQEDIQTKGKEVENFEKNLEECMTRITNTEKCLKELMELKTKARELHEECRSLRSRCDQLEERVSAMEDEMNEMKREGKFREKRIKRNEQSLQEIWDYVKRPNLHLMGVPESDGENGSKLENTLQDIIQENFPNLARLISGTAYNQLEKDLALKGLRVLLVEGNDPQGTASMYHGWVPDLHIHAEDTLLPFYLGEKDDVTYAIKPTCWPGLDIIPSCLALHRIETELMGKFDEGKLPTDPHLMLRLAIETVAHDYDVIVIDSAPNLGIGTINVVCAADVLIVPTPAELFDYTSALQFFDMLRDLLKNVDLKGFEPDVRILLTEYSNSNGSQSPWMEEQIPDAWGSMVLKNVVRETDEVGKGIFALQFFDADNYLNRIHAVENFEKNLEECITRITNTEKCLKELMELKTKARELCEECRSLRSRCDQLEERVSAMEDEMDEMNEMKREGKFRERRIKRNEQSLQEIWDYVKRPNLRLIGVPETRQANVQIQEIQRTPQRFSSRRATPRHIIVRFTKVEMKEKILRAAREKGRVTLKGKPIRLTADLSAETLQARREWGPIFNILKEKNFQPRISYPAKLSFISEGEIKYSIDKQMLRDFVTTRPALIEALKEVLNMERNNRSPSSSPATEQSWMENDFDELREEGFRRSNYSELREDIQTKGKEVENFEKNLEECITRITNTEKCLKELMELKTKARELREECRSLRSRCDQLEERVSAMEDEMNEMKREGKFREKRIKRNEQSLQEIWDYVKRPNLRLIGVPESDVENGTKLENTLQDIIQENFPNLARQANVQIQEIQRTPHRFSSRRATPRHIISHPDLIKHEPLFSSPSVQRVSINGQGSTLNALALQPPLRTFVNISTGVFGNIRQELQRKHG

SEQ ID NO: 32558 - protein, 2012 aa, Homo sapiens
  DOMAIN (1085)..(1126): kw TRANSCRIPTASE REVERSE II ORF2 domain identified by eMATRIX, accession number DM01354I, p-value=1.000e-40, raw score of 15.55
  DOMAIN (330)..(1606): Reverse transcriptase domain identified by PFam, accession name rvt, E-value=1.1e-100, PFam score of 347.9
MGKKQSRKTGNFKKQRHLSFSKGIAVLHQQWNKAGQRLTFDELREGFRPSNYSKLQKEIQTKGKEVENFEKNSDECITRITNTKKCLKELMELKAKARELREECRSLRSRCDQLEERVSGMEDEANEMKREGKFGEKRIKRNEQSLQEIWDYVKRPNLRLIGVPESDGENGTKLKNTLQDIIQENFPNLARQANIQIQEIQRTPQRYSSRRATPRHIIVRFTKVEGKNIKGSQRERAEIQTTIREYYKHLYSNKLENLEEMDKFLDTYTLPSLNQEEVESLNRTITGSEIVAIINSLPTKKSPGPDGFTAEFYQRYKEEVVPFLLKLFQSIEKEVILPNSFYEARIILIPKPGRDTTKKENFRPISLMNIDAKILNKILANRIQQHIKKLIHHDQVGFIPGMQGWFNICKSINIIHHINRTNDKNHTIISIDAEKAFDKIQQPFILKTRNKLVHSTDNSAARFLCARHCRRAGSELNVEPASRGLPPNTKFKICIGIFVSVPRRSYIGSIFGVWEFSPLAFSTPVSTVKATDSTYRKCILKFGKKIPKTLTSKHFKAAKVGETSANLGQRAILLLRLASREKGEMDHFAGSSSRRTDLAGWLFGADTQVTKMEFSGRKWRKLRLAGDQRNASYPHCLQFYLQPPSENISLIEFENLAIDRVKLLKSVENLGVSYVKGTEQYQSKLESELRKLKFSYRENLEDEYEPRRRDHISHFILRLAYCQSEELRRWFIQQEMDLLRFRFSILPKDKIQDFLKDSQLQFEALREDIQTKGKEVENFEKNLEECITRITNTEKCLKELMELKTKARELREECRSLRSRCDQLEEKISAMEDEMNEMKREGKFREKRIKRNEQSLQEIWDYVKRPNLRLIGVPESDGENGTKLENTLQDIIQENFPNLARQANIQIQEIQRTPQRYSSRRATARHIVVRFTKVEMKETMLRAAREKDKQMLRDFVNTRPALKELLKEVLNMERNNWYQPLQNHAKIQINETESQQGYPGIELSSAPSGPNRHLQNSPHQINRIYFFSAPHHTYSKIDHIVGSKALLSKCKRTEIITNYLSDHSAIKLELRIKNLNQSRSTTWKLNNLLLNDYWVHNEMKAEIKMFFETNENKDTTYQNLWDAFKAVCRGKFIALNAHKRKQERSKIDTLTSQLKELEKQEQTHSKASRRQEITKIRAELKEIETQKTLQKINESRSWFFERINKIDRPLARLIKKKREENQIDTIKNDKGDITTDPTEIQTTIREYYKHLYANKLENLEEMDKFLDTYTLPRLNQEEVESLNRPITGAEIVAIINSLPTKKSPGPDGFTAEFYQRYKEELVPFLLKLFQSIEKEGILPNSFYEASIILIPKPGRDTTKKENFRPISLMNIDAKILNKILANRIQQHIKKLIHHDQVGFIPGMQGWFNIRKSINVIQHINRAKDKNHMIISIDAEKAFDKIQQPFMLKTLNKLGIDGTYFKIIRAIYDKPTANIILNGKKLEAFPLKTGTRQGCPLSLLLFNIVLEVLARAIRQEKEIKGIQLGKEEVKLSLFADDMIVYLENPIVSAQNLLKLISNFSKVSGYKINVQKSQAFLYTNNRQTESQIMSELPFTIASKRIKYLGIQLTRDVKDLFKENYKPLLKEIKEDTNKWKNIPCSWVGRINIVKMAILPKVIYRFNAIPIKLPMTFFTELEKTTLKFIWNQKRARIAKSILSQKNKAGGITLPDFKLYYKATVTKTAWYWYQNRDIDQWNRIEPSEITPHTYNYLIFDKPEKNKQWGKDSLFNKWCWENWLAICRKLKLDPFLTPYTKINSRWIKDLNVRPKTIKTLEENLGITIQDIGVGKDFMSKTPKAMATKAKIGKWYLIKLKSFCTAKETTIRVNRQPTTWEKIFATYSSDKGLISRIYNELKQIYKKKTNNPIKKWAKDMNRHFSKEDIYAAKKYVKKCSSSLAIREMQIKTTMRYHLTPVRMAIIKKSGNNSDLYLMSAGTSCLMGRHWDSGQETCVQNVVLDTCSPSEQLLRAIADLVPQP

SEQ ID NO: 32559 - protein, 1553 aa, Homo sapiens
  DOMAIN (1473)..(1511): Chloramphenicol acetyltransferase proteins domain identified by eMATRIX, accession number BL00100D, p-value=7.677e-36, raw score of 17.22
  DOMAIN (369)..(644): Reverse transcriptase domain identified by PFam, accession name rvt, E-value=5.3e-86, PFam score of 299.1
  misc_feature (1)...(1553): Xaa = X or * as defined in Table 2
XTEASALQHKIKNSICKTVQSKVDCILQEVEKFTDLEKLYLYLQLPSGLSNGEKSDQNAMSSSRAQQMHAFSWIRNTLEEHPETSLAKQEVYDEYKPKVDKTTKMGKKQNRKTGNSKNQSASPPPKERSSSPATEQSWMENVFEEQREEGFRRSNYSELREDIQTKGKEVENFEKHLEECITRITNTEKCLKELMELKTKVRELREECRSLRSRCDQLEERVSAMDDEMNEMKREGNFREKRIKRNEQSLQEIWGLCEKDQIYVMKEKMLRAAREKEIQTNIREYYKHRYANKLENLEEMDKFLNIYTLRRLNQEEVESLNRPIRGSEIVAIINSLPTKKSPGPDGFTAEYYQRYKEELVPFLLKLFQSIEKEGILPNSFYEASIILIPKPGRDTTKKENFRTISLMNIDAKILNKILANRIQQHIKKLIHHDQVGFIPGMQGWFNIRKSINVIQHINRTKDKNHVIISIDAEKAFDKIQQLFLLKTLNKLGIDGTYLKIKRAIYDKPTANIILNGQKLEAFPLKTGTRQGCPLSPLLFNIVLEVLARAIRQEKEIKGIQLGKEEVKLSLFADDMIVYLENPIVSAQNLLKLISNFSKVSGYKINVQKSQAFLYTNNRQTETQIMSELPFTIASKRIKYLGIQLTRDVKDLFKENYKPLLNEIKEDTKKWKNIPCSWVGRINIMKMAILHKVIYRFNAIPIKLPMTFFTELEKTTLKFTWNQKRARIAKSILSQKNKAGGIMLPDFKLYYKATVTKTAWYWYQNRDIDQWNRTEPSEITPHIYNYLIFDKPEKNKQWGKDSLFNKWCWENWLAIWRKLKLDPFFTPYTKINSRWIKDLNVRPKTIKTLEENLGITIQDIGMGKDFMSKTPKAIATKAKIDKLDLIKLKSFCTAKETTIRVNRQPTEWEKIFATYSSDKGLISRIYNELKQIYKKKTNNPIKKWAKDMNRHFSKEDIYAAKKHMKKCSPSLAIREMQIKNTMRYHLTPLRMAIIKKSGNNRCWRGCGEIGTLLHHWNCRVKMTQQMQNLHLCQSKKHSAPSSPNAAKRLYRNLSEKLKGSHSSFDEAYFRTRTDRLSLRKTSVNFQGNEAMFEAVEQQDMDAVQILLYQYTPEELDLNTPNSEGLTPLDIAIMTNNVPIARILLRTGARESPHFVSLESRAMHLNTLVQEAQERVSELSAQVENEGFTLDNTEKEKQLKAWEWRYRLYRRMKTGFEHARAPEMPTNVCLMVTSSTSLTVSFQEPLSVNAAVVTRYKERSSSPATEQSWTENDFDELREEGIRRSNYSELQEAIQTKGKQVENFEKNLDECITRITNTGNCLKELMELKAKARELREECRSLRSRCNQLEERVSVIEDEMNEMKREGKFREKRIKRNEQSLQEIWDYVKRPNLRLIGVPECDGENGTKLENTLQDIIQENFPNLARQANIQIQEIQRTPQRYSSRRATPRHIIVRFTKVEMKEKMLRAAREKGFIENMFFVSANPWVSFTSFDLNVANMDNFFAPVFTMGKYYTQGDKVLMPLAIQVHHAVCDGFHVGRMLNELQQYCDEWQGGA

SEQ ID NO: 32560 - protein, 2544 aa, Homo sapiens
  DOMAIN (2037)..(2062): 7 kw REVERSE TRANSCRIPTASE RNA POLYMERASE domain identified by eMATRIX, accession number DM00895E, p-value=4.889e-11, raw score of 15.72
  DOMAIN (303)..(2262): Reverse transcriptase domain identified by PFam, accession name rvt, E-value=7.3e-132, PFam score of 451.5
  misc_feature (1)...(2544): Xaa = X or * as defined in Table 2
MGDFNTPLSTLDRSTRQKVNKDTQELNSALHQADLIDIYRTLHPKSTEYTFFSAPHHTYSKIDHIVGSKALLSKCKITEIITNYLSDHSAIKLELRIKNPTQSRSTTWKLNNLPLNDYWVHNEMKAEIKMFFETNENKDTTYQNLWDTFKAVCRGKFIALNAHKRKQERSKIDTLASQLKELEKQEQTHSKASRRQEITKIRAELKEIETQKTLQKINESRSWFFERINKIDRPLARLIKKKREKNQIDTIKNDKGDITTDPTEIQTSIREYYKHLYANKLENLEEMDKFLDTYTLPRLNQEEVESLNRPITGAEVVAIINSLPTKKSPGPENFRPISLMNIDAKILNKILGAKDKNHMIISIDAEKAFDKIQQPFMLKTLNKLGIDGTYFKIIRAIYDQPTANIILNGQKLEAFPLKTGTRQGCPLSPLLFNIVLEVLARAIRQEKEIKSIQLGKEEAKLSLFADKMIVYLENPIVSAQNLLKLISNFSKVSGYKINVQKSQAFLYTNNRQTESQIMSELPFTIASKRIKYLGIQLTRDVKDLFKQNYKPLLKEIKEDTNKWKNIPCSWVGRINIVKMAILPKVIYRFNAIPIKLPMPFFTELEKTTLKFIWNQKRARIAKSILSQKNKAGGITLPDFKLYYKATVTKTAWYWYQNRDIDQWNRTEPSEIMPHIYSYLIFDKPEKNKQWGKDSLFNKWCWENWLAICRKLKLDPFLTPYTKINSRWIKDLNVRPKTIKTLEENLGITIQDLGMGKDFMSKTPKAMATKDTIDKWDLIKLKSFCTAKETTIRMNRQPTKWEKIFTSYSSDKGLISRIYNELKQIYKKKTNNPIKKCQQASQLKALPTQSCSPSSNSYETFLVSPLHPFQFYISFPHYTEMVPPLTPEDYNSRGDFGGDTETNHIISKFHRSLEQVQNAASRRSQDGRIGTAPVYSSQRERRRRRVISAFPSEERSSSPAMEQSWMENDFDELREEGFRRSNDSELREDIQTKGKEVENFEKNLEEYITRINNTEKCLKELMELKIKAQELREECRSLRSQCDQLEERVSVMEDEMNEMKREGKFREKRIKRNEQSLQETWDYVKRPNLRLIGVPKSDGENGNKLENTLQDIIQENFPNLARQANVQIQEIQRIPQRYSSKRATPRHIIVRFTKVEMKEKMLRAAREKGRVTLKGKPITLTADLLAETLQARREWGPIFNILKEKNFQTRISYPAKLSFISEGEIKYFTDKQMLRDFVTTRPALKELLKEALNMERNNQYQPLQNHAKMMELKTKARELREECRSLRSQCDQLEERVSAMEDEMNEMKQEGKFREKRIKRNEQSLQEIWDYVKRPNLRLIGVPESDAENGTKLENTLQDIIQETFPNLARQANVQIQEIQRTPQRYSSRRATPRHIIVRFTKVEMKEKMLRAAREKGRVTLKGKPIRLTADLSAETLQARREWGPILNILKEKNFQPRISYPAKLSFISEGEIKYFTDKQMLTDFVTSRPALKELLKEALNMERNNRYQPLQNHAKMMELKTKARELREECRSLRSRCDQLEERVSAMEDEMNEMKGEGKFREKRIKRNEQSLQETWDYVKRPNLRLIDVPESDGENGTKLENTVQDIIQENFPNLARQANIHIQEIQRTSQRYSSRRATPRHIIVRFTKVEMKEKMLRAAREKDRSTRQKVNKDTQEFNSALHQVDLIDIYRILHPKSTEYTFFSAPHHTYSKIDHIVRSKALLSTCKRTEIITNYLSDHSAIKLELSIKKLTQNHSTTWKLNNLLLNDYWVHNEMKAEIKMFFETNENKDTTYQNLWNTFKAVCRRKFIALNAHKRKQERSKIDILTSQLKELEKQEQTHSKASRRQEITKIRAELKEIETQKTLQKINESRSLFFERINKIDRPLARLIKKKREKNQIDAIKNDKGDITTNPTEIQTTIREYYKHLYTSKLENLEEMDKFLDTYTLPRLNQEEVESLNRPITGSEIVAIINSLPTKKSPGPDGFTAEFYQRYKEELVPFLLKLFQSIEKEGILPNSFYEASIILIPKPGRDTTKKKNFRPISLMNIDAKILNKILANRIQQHIKNLIHHDQHINRTKDKNHMIISIDAEKAFDKIQQPFMLKSLNKLGIDGTYLKIIRAIYDKPTANIMLNGQKLEAFPLKTGTRQGCPLSPLLFNIVLEVLARAIRQEKEIKAIQLGKEEVKLSLFADDMIVYLENPIVSAQNLLKLISNFSXLSGYKINVQKSQAFLYTNNRQTESQIMGELPFTIASKRIKYLGIQLTRDVKDLFKENYKPLLKEIKEETNKWKNIPCSWVGRINIVKMAILPKVIYRFNAIPIKLPMTFFTELEKTTLKFIWNQKRARIAKSILSQKNKAGGITLPDFKLYYKATVTKTACGYQKQGADTSEPAGAVRGNLPNFPSPQECRDARSTAMAWLAAAVPKKGKTHILLPNSTRLASDILGAGLEKRCWGFTIQYELCVQYSLSPSLCLVSQCQTAVVQAPKHRGHVQWCLIPSAQSLASQEAPQSRVNRVSDARPHQLTDVSESPFHSGHTYIHSSLLNIR

SEQ ID NO: 32561 - protein, 1509 aa, Homo sapiens
  DOMAIN (852)..(877): 7 kw REVERSE TRANSCRIPTASE RNA POLYMERASE domain identified by eMATRIX, accession number DM00895E, p-value=3.333e-11, raw score of 15.72
  DOMAIN (823)..(1098): Reverse transcriptase domain identified by PFam, accession name rvt, E-value=1.6e-88, PFam score of 307.5
MALYTEEPKNKKEGEISPALSPPFPSVLLLPGQNNKEEMESFPDLPLTISRKKGKKHTSAMGPCLKQAALEGELLAYLVMQDQHGHQAHEPVSFHSYEELRKSIKENRATRPSAKRMIEALADHFCMAQWDWSMLPKATLETSPYLLWTVEYDELCEQQDNQNQAARQNTTVDKLQGRYSHADVQQQLNFEPQAYAQSSLYWECRTRFTLPGQISAKRGRSPKRVATGICGLLPPGTAGLVLGQSSLSSKGINVLPGLIDSDYQGPSAAGLLAFAGGLCQTLFAWVSAAEAAEQRILHVCLNNMKSRHLEKEQDNSNFQGTREITIGSDCLGAGQERSILLLLPETGSLQARENLACIPGPGRCSGTMRLSYRKSWQPVPSQLDGPLLRSLEVPTYELIDGDSMDFDFSVLHQDRASSVSTAERGGECSSLKSQRNKAWMENHFDFDELRAEGFKRSKLLMGRMEPSWKTLLQDIIPGELPPILARAGPTVQIQEIQRTPQRYSSRKSNSKDTLIVRFTKVGNGREKMFKGQPERERSGYPSKGKPITLNSGISRQKTFSPEESGGQIFNILKEKNFQPRISYLAKLSFISEGEINKILYRQANAERFLSPLGPALKELLKEALNMERNNRRKQERSKIDTLTSQLKELEKQEQTHSKASRRQEITKIRAELKEIETQKTLQKINESRSWFFERINKIDRPLARLIKKKREKNQIDTIKNDKGDITTDPTEIQTTIREYYKHLYANKLENLEEMDTFLDTYTLPRLNQEEVESLNRPITGSEIVAIINSLPTKKSPGPDGFTAEFYQRYKEELVPFLLKLFQSIEKEGILPNSFYEASIILIPKPGRDTTKKENFRPISLMNIDAKILNKILANRIQQHIKKLIHHDQVGFIPGMQGWFNIRKSINVIQHINRAKDKNHMIISIDAEKAFDKIQQPFMLKTLNKLGIDGKYFKIIRAIYDKPTANIILNGQKLEAFPLKTGTRQGCPLSPLLFNIVLEVLARAIKQEKEIKGIQLGKEEVKLSVFADDMIVYLENPIVSAQNLLKLISNFSKVSGYKINVQKSQAFLYTNNRQTESQIMSELPFTIASKRIKYLGIQLTRDVKDLFKENYKPLLKEIKEDTNKWKNIPCSWVGRINIVKMAILPKVIYRFNAIPIKLPMTFFTELEKTTLKFIWNQKRARIAKSILSQKNKAGGITLPDFKLYYKATVTKTAWYWYQNRDIDQWNRTEPSEIMPHIYNYLIFDKPEKNKQWGKDSLFNKWCWENWLAICRKLKLDPFLTPYTKINSRWIKDLNVRLKTIKTLEENLGITIQDIGVGKDFMSKTPKAMATKAKIDKWDLIKLKSFCTAKETTIRVNRQPTTWEKIFATYSSDKGLISRIYNELKQIYKKKTNNPIKKWAKDMNRHFSKEDIYAAKKHMKKCSSSLAIREMQIKTTMRYHLTPVRMAIIKKSGNNSSQMPLTSSDNTAVNCKKLRSKPDEIAKESEAPPGLASFHLCSSYIYGAPLNSQMG

SEQ ID NO: 32562 - protein, 102 aa, Homo sapiens
  misc_feature (1)...(102): Xaa = X or * as defined in Table 2
XPQSRPGLRRELRRARRTLLRSPTAEVEAADSEGGVERNLEGPGPGGTHCADGACVRTQLFSPLSSGSPLKAVPMPVSFFCLLVSLRRVSATVNFRFRRCPC

SEQ ID NO: 32563 - protein, 35 aa, Homo sapiens
MGRVLEEARFAVAFTESMKEMAQAQWVRSSVYKGS

SEQ ID NO: 32564 - protein, 218 aa, Homo sapiens
MGVQFSSVTDEAKIEILKGLYLALSQDVNTLKSKIAKVAKDAGFAEIGEIDVGELLGPQAPGPPGTADTSSVRSEEDTDGQRQPGLWDQTSPLMCPPQCAPAELQFSFSAERGIPDPEQRSQAGSKSPHECVSSSPDCTIETVLKVTKDLHVGHRIPFGVIFGGTDVNEDANQAEKNTVMGRVLEEARFAVAFTESMKEMAQAQWRLTKVLIICTYFF

SEQ ID NO: 32565 - protein, 336 aa, Homo sapiens
MRNTVFVSPHSSTTLQLTNYYRKVITFRHAQSLAALQAYSHWLAQYCSEVHRQNTQQFVTLISTTMDAITPLISTKVQDKLLLSACHLLVSLATTVRPVFLISIPAVQKVFNRITDASALRLVDKAQVLVCRALSNILLLPWPNLPENEQQWPVRSINHASLISALSRDYRNLKPSAVAPQRKMPLDDNSGGLSACQPLWATQGTAHGQWLRGYVPMRPAGCGSYTADLPIFHGTSGGGDCFVGSMTLLECENRTIRRSLRAPPKPSAVAETSLAIPSGLGCVSVPPNCPPFFFFLFQESPFCKLWVEAVRVGALGWDPGTVPYSLSDPVQVISVS

SEQ ID NO: 32566 - protein, 410 aa, Homo sapiens
MGPPRVLLFGISDSGGLSACQPLWATQGTAHGQWLRGYVPMRPAGCGSYTADLPIFHGTSGGGDCFVGSMTLLECENRTIRRSLRAPPKPSAVAETSQLGLGIKGNSEHPSSLYGENRHVSALHVGAACYGLRFPGDLLSNLLQSPSSAKLLNQPIPILDVETSPHPSLPPSSTLHDLAVTSGPERWRQLTAASQNCVSGQERGRLGVLAMSCINELMSKNCVPMEFEEYLLRMFQQTFYLLQKITKDNNAHTVKSRLEELDERSEVVQGLRLLLLRSQEQEKRSVESCLMTAATARESLPAQPPAGHPPPWVGGCELTCFGDYRVMKLSKGAGVRGLSNGHTASAVRDKRECEDRDELEHMGPSERGRHGPDRVSRGHVWPSPARSFLSSKRSQNPGFWVESPDVSSLK

SEQ ID NO: 32567 - protein, 37 aa, Homo sapiens
MDRCLPLAPRLFHKIRFRAVNQAACCPFPRVSLAPLP

SEQ ID NO: 32568 - protein, 106 aa, Homo sapiens
MPPSTHMKGEAASGAGRILRGDSGHCSSDEDNKAFEVWQQLPVSGSQLTLKSGKEYLCHELVAKIKCPEPSSLPAPHPIPSEKCEKLILTKCQALTACRGVILPDG

SEQ ID NO: 32569 - protein, 121 aa, Homo sapiens
  misc_feature (1)...(121): Xaa = X or * as defined in Table 2
XATLGSTPVGPLDALGARQLLGNAGSPQERSSTGDGSWFTVSWFVLLQVGKKDNRNANSFLMKRPQHAGAGLGPYVSRLACFQRLPAPLHKLRQPLSPFASTGVPARLCDPVQIPSSMYRS

SEQ ID NO: 32570 - protein, 226 aa, Homo sapiens
  DOMAIN (1)..(32): + TRANSPORT EXCHANGER NA H TRANS domain identified by eMATRIX, accession number PD01672K, p-value=2.403e-10, raw score of 18.06
MRRSAYRIRDQIWDVYYRLNIRDAISFWTRWASSFQGWPLQQGCQQGHGLGLQLRFILWQEEGSVEHSGSSLLPASGPQPQRLTPYLEPITADDLPAKIMSEASGTRRLRASRALQDCYSAAHPRAAQPKVLAGTEQEQSLLSGLHSVGNPWRYTPLQGHPFSPAMPLTRSNTCRTRSPPACTPETRLPGHTTSPRPRNWHHILLSGPLYHPVGFLGHLASAEGLL

SEQ ID NO: 32571 - protein, 85 aa, Homo sapiens
MAPKGKVGTRGKKQIFEENRETLKFYLRIILGANAIYCLVTLVFFYSSASFWAWLALGFSLAVYGASLPLYELDGTSSVSLRMGP

SEQ ID NO: 32572 - protein, 60 aa, Homo sapiens
DSGLHPAETPQRTEENPAFYQKKKRLPRSPGSPFRSQRFAYQEGDGVLKGTFEKRRQRVY

SEQ ID NO: 32573 - protein, 170 aa, Homo sapiens
CMASYIWGRVPPKIDSKLRFLDERGKLGANLPIHPRARSRQPGLREARPCSRVPTPIAHPRLQPEGRGFSWSDGTRRQSRRGFAPWRGLKFCGAQRLAERLRGVTSPVFAGFRSTPRRDSAAYEENPAFYQKKKRLPRSPGSPFRSQRFAYQEGDGVLKGTFEKRRQRVY

SEQ ID NO: 32574 - protein, 499 aa, Homo sapiens
MQELQEKKRNGGTTHDIKKRSVEDFKRSLTKPHLVAQQKPVGLKHSFSQGWWSVLAVTARKKPQDRINSPSQSAEKSKQWMYSSDLSTSRRTQHKRGGRRQQQDEGLPVREHTEVYPQMGSISSLGKLVRFSVDIAQESMQTLPGILMPAEGPTDLMGMELAQKELHRKSIYPALSAGSLVNLILGCNAKTLAVKENGTLWKILQGVLSERSRLLPGQPLSKGSAAGCLDSPSHDHDETANTIRVKRSQQPHIAELPECAEHTRLGCLPEQQPWSKPLCTVNKVLLEMLVKFIFQVHQGHMVKSGGSGARMPDLNSSFANYWLCNTEQFRWSWSDCRIVCKEKLLVQGARARAPDQMLHLPSLKKELSSRNGWKHSAVEGHMDLRDLEFMKSTAACYRVFECTTAEPHEVEVGCFRKDLVKPAVYAGWQSVCRTRKITRTQESRVGRRKPREVSLAKGNIGSTWERSLFSGNANSQIDYENAAASGHLPRLPKETLYEV

SEQ ID NO: 32575 - protein, 69 aa, Homo sapiens
MVWGCGGVDAPSCVPGREWVLFGVPGEGWACFAVFCRRGSKMLQIKSQTGAATAQTGSEVVCSGSLAWL

SEQ ID NO: 32576 - protein, 196 aa, Homo sapiens
MVVVESQELAIFSHVQVITTHHKSGRSKSLVTVALREKGKKEVEAGSTDTILSLNVKRATMKDYCLTFEPKDVSYGSSLLTTVKGRMVWNHTIESWALKYVLLLMIGVAVRHIFLLDRDTSTSITSTALQASCHSGTTYHLGPTLHKCAAAMQAWQVLGVERMSFREYNGFCTSKQVNRSKRLPIQSALLRLPFGI

SEQ ID NO: 32577 - protein, 116 aa, Homo sapiens
  misc_feature (1)...(116): Xaa = X or * as defined in Table 2
MAGILAWFWNERFWLPHNVTWADLKNTEEATFPQAEDLYLAFPLAFCIFMVRLIFERFVAKPCAIALNIQANGPQIAPPNAILEKVFTAITKHPDEKRLEGLSKQLDWDVRSIQRX

SEQ ID NO: 32578 - protein, 282 aa, Homo sapiens
  DOMAIN (81)..(129): Ribosomal protein S18 proteins domain identified by eMATRIX, accession number BL00057, p-value=7.158e-09, raw score of 24.94
MWTSLRPGPALLGAPHTGEGCTCYTNSSVGSVATAFWGSLGWIGELERFGPLEKARFVAKPCAIALNIQANGPQIAPPNAILEKVFTAITKIMSFEAGIMGSRGDKLKDKTQNGRAERQKGSTSLWLCKASAAKPEQLTYMLLLYKIISFHLVSINQGLKVSKGYSISNLDLSTVPVRNEGSLLARRPWEIFAGEAPQSLSTFGLLLCSDVTEVDEERKREGKSLMSLSQSVAFEDTEDVKPTYGAYFAYDHLEGKRYHVHKVLLCLLVHYPLLSLRVSDVK

SEQ ID NO: 32579 - protein, 188 aa, Homo sapiens
MTHEDASYRIPEDRKAMVQCCLQHIARLEALIGIRTVMDLSRGDRRKKQERLECQVRVRNEEQTLIPSQLDGQASSSAASKPPRARGLRTNRPDPNTGQGAAPEASRARTTPSTELARTRTRPQSRPAQTAQCILGAVVFVRFGGWPVGRRRTVETEPSYPIGRRPQYALRSLWWRRTASVKVNLTGI

SEQ ID NO: 32580 - protein, 94 aa, Homo sapiens
  misc_feature (1)...(94): Xaa = X or * as defined in Table 2
XPIDHPRAEECWAHGTELAGSSTCSPGADPLGEASWAPESGGDLENLYVYLRDCKHTNQHPVSSSGIVNTPIGTLYLAQGLQTPISILRLAQGL

SEQ ID NO: 32581 - protein, 273 aa, Homo sapiens
MDRYQEHTSRALTQKAGSQDYEAVASPPAALVHLCHEAVSHHLQCSDETWVFLLHPLLIEWQNTKPPSCITQLALQSPSPFGFSVILFDEQNNDLKELAHLASLPFVIYVMNKRSDSKKVSLHLYQSNQSGLYLSHALSHVCLTETKWSCGTNMVVVGRVSPQPHPHSIDKRQKSGREVYREMNKSNNYIERRVLFSLTLLVTPSSRPLNPLLLTHIGSYLTAPSPINHPRAEECGLTAADWQAAPPVALVRDPLGEASWAPESGADVENLYV

SEQ ID NO: 32582 - protein, 37 aa, Homo sapiens
CREPARPSQLRPNRQLAAVATLLRRFSLPAAAPGEHG

SEQ ID NO: 32583 - protein, 23 aa, Homo sapiens
MGELEQDGPARRDWGLPPEPPRP

SEQ ID NO: 32584 - protein, 889 aa, Homo sapiens
  DOMAIN (6)..(92): Fes/CIP4 homology domain identified by PFam, accession name FCH, E-value=0.03, PFam score of 8.5
MSYFGEHFWGEKNHGFEVLYHSVKQGPISTKELADFIRERATIEETYSKAMAKLSKLASNGTPMGTFAPLWEVFRVSSDKLALCHLELTRKLQDLIKDVLRYGEEQLKTHKKCKEEVVSTLDAVQVLSGVSQLLPKSRENYLNRCMDQERLRRESTSQKEMDKAETKTKKAAESLRRSVEKYNSARADFEQKMLDSALRFQAMEETHLRHMKALLGSYAHSVEDTHVQIGQVHEEFKQNIENVSVEMLLRKFAESKGTGREKPGPLDFEAYSAAALQEAMKRLRGAKAFRLPGLSRREREPEPPAAVDFLEPDSGTCPEVDEEGFTVRPDVTQNSTAEPSRFSSSDSDFDDEEPRKFYVHIKPAPARAPACSPEAAAAQLRATAGSLILPPGPGGTMKRHSSRDAAGKPQRPRSAPRTSSCAERLQSEEQVSKNLFGPPLESAFDHEDFTGSSSLGFTSSPSPFSSSSPENVEDSGLDSPSHAAPGPSPDSWVPRPGTPQSPPSCRAPPPEARGIRAPPLPDSPQPLASSPGPWGLEALAGGDLMPAPADPTAREGLAAPPRRLRSRKVSCPLTRSNGDLSRSLSPSPLGSSAASTALERPSFLSQTGHGVSRGPSPVVLGSQDALPIATAFTEYVHAYFRGHSPSCLARVTGELTMTFPAGIVRVFSGTPPPPVLSFRLVHTTAIEHFQPNADLLFSDPSQSDPETKDFWLNMAALTEALQRQAEQNPTASYYNVVLLRYQFSRPGPQSVPLQLSAHWQCGATLTQVSVEYGYRPGATAVPTPLTNVQILLPVGEPVTNVRLQPAATWNLEEKRLTWRLPDVSEAGGSGRLSASWEPLSGPSTPSPVAAQFTSEGTTLSGVDLELVGSGYRMSLVKRRFATGMYLVSC

SEQ ID NO: 32585 - protein, 146 aa, Homo sapiens
  misc_feature (1)...(146): Xaa = X or * as defined in Table 2
XSRRRTVCLQIEQIRKAEPPKDEESFRPREDEEGQEGQDSMSRAKANWLRAFNKVRMQLQEARGEGEMSKSLWFKGGPGGGLIIIDSMPDIRKRKPIPLVSDLAMSLVQSRKAGITSALASSTLNNEELKNHVYKKTLQALIYPIS

SEQ ID NO: 32586 - protein, 68 aa, Homo sapiens
  DOMAIN (1)..(28): B-box zinc finger domain identified by PFam, accession name zf-B_box, E-value=0.013, PFam score of 19.8
LYCQDDGRAICVVCDRAREHREHAVLPLDEAVQEAKELLESRLRVLKKELEDCEVFRSTEKKESKELL

SEQ ID NO: 32587 - protein, 432 aa, Homo sapiens
KGLPAEDHISVRSSFHRSSARILGKRRTLPGHGQVWDALQASDPSCSGHKGGKRQQSEKHDTHMNLGAASAKEIGSVQFSTWSRKEGVHGLGHLEARGDLDRESDAHKKGSRPAPKGAAFGVTEAARIPDQQDCPRFQAIQGLPESPGGSNTVSRRGMPRKTDERLKSARRLGLEILVEVHAVEGVHRRANSDAVTTTCTTHQVVCSSSASGRGTRRVIGSPIPRGLFSNLRENAQRLQRRSRRVPRARAPSQLRPNRQLAAVATLRGASACPRLPRESTGLSGRGPGSGCPLRAAWRTFKLYCQDDGRAICVVCAAPASTASTPCCRWTRRAGGQGALGVQAEGLEEGLEDCEVFRSTEKKESKSCWNSKAPEQPLGGASHALSAERASSAELPPQPAAGQYGPVIRQMHPTPGRGSRVTDRASVPNTKKP

SEQ ID NO: 32588 - protein, 350 aa, Homo sapiens
MDSLQGHIGKGVHTGSSGELQSFLQPTSQDFHIWCLNIVTSTTTKLSAETWRTCSGKLGIYVQDLDLPTRLRDSNQAVRLALAMQLGFEGPRFSGEKSRQEGCWEVCQAQLSKERFFEETTNGNAMMPCFRGWLLLGREAGSYLEGQGIGDYKSTFLQIDAFQPYWKHTTFEGGYPVHHILFQTPIFTALALRVAESVSQPSAPVTHMWYFSLPACCEILIKLSLINHPVQLLKVTFITQNNTSETKLTVESLKESQHSFIPERKKGIGFLPPGNGSNIGDSSSCRTTDVSLRVQGAMAGAAAVLPITRGEARPGEVQALAEVTAARLEPRTLSAPKHSVPYLQHLSPIV

SEQ ID NO: 32589 - protein, 53 aa, Homo sapiens
MEKRYAEQITAENFQNQKYELSDLKGPTVYVFKTHIQKYYSKFQYIKSFYYRT

SEQ ID NO: 32590 - protein, 107 aa, Homo sapiens
  DOMAIN (18)..(57): 'Cold-shock' DNA-binding domain proteins domain identified by eMATRIX, accession number BL00352B, p-value=2.000e-20, raw score of 23.66
  DOMAIN (7)..(47): 'Cold-shock' DNA-binding domain identified by PFam, accession name CSD, E-value=6.1e-11, PFam score of 44.1
  misc_feature (1)...(107): Xaa = X or * as defined in Table 2
XVQNVKLFFHVKEVQDGIELQAGDEVEFSVILNQRTGKCSACNVWRVCEGPKAVAAPRPDRLVNRLKNITLDDASAPRLMVLRQPRGPDNSMGFGAERKIRQAGVID

SEQ ID NO: 32591 - protein, 1813 aa, Homo sapiens
  DOMAIN (891)..(914): TRANSFORMING PROTEIN P21 RAS SIGNATURE domain identified by eMATRIX, accession number PR00449E, p-value=7.000e-21, raw score of 13.50
  DOMAIN (1355)..(1769): Adenosine/AMP deaminase domain identified by PFam, accession name A_deaminase, E-value=1.6e-229, PFam score of 775.9
MENVFTVSSDPHPSPAAPPSLSLPLSSSSTSSGTKKQKRTPTYQRSMSFDPNLLHNNGHNGYPNGTSAALRETGVIEKLLTSYGFIQCSERQARLFFHCSQYNGNLQDLKVGDDVEFEVSSDRRTGKPIAVKLVKIKQEILPEERMNGQEVFYLTYTPEDVEGNVQLETGDKINFVIDNNKHTGAVSARNIMLLKKKQARCQGVVCAMKEAFGFIERGDVVKEIFFHYSEFKGDLETLQPGDDVEFTIKDRNGKEVATDVRLLPQGTVIFEDISIEHFEGTVTKVIPKVPSKNQNDPLPGRIKVDFVIPKELPFGDKDTKSKVTLLEGDHVRFNISTDRRDKLERATNIEVLSNTFQFTNEAREMGVIAAMRDGFGFIKCVDRDVRMFFHFSEILDGNQLHIADEVEFTVVPVEFSISDKQRPGQQVATCVRLLGRNSNSKRLLGYVATLKDNFGFIETANHDKEIFFHYSEFSGDVDSLELGDMVEYSLSKGKGNKVSAEKVNKTHSVNGITEEADPTIYSGKVIRPLRSVDPTQTEYQGMIEIVEEGDMKGEVYPFGIVGMANKGDCLQKGESVKFQLCVLGQNAQTMAYNITPLRRATVECVKDQFGFINYEVGDSKKLFFHVKEVQDGIELQAGDEVEFSVILNQRTGKCSACNVWRVCEGPKAVAAPRPDRLVNRLKNITLDDASAPRLMVLRQPRGPDNSMFSVNGERMEANKVLLIFETLAPSAFIIETSRVGGAGLGSCWCEMTEYKLVVVGAGGVGKSALTIQLIQNHFVDEYDPTIEDSYRKQVVIDGETCLLDILDTAGQEEYSAMRDQYMRTGEGFLCVFAINNSKSFADINLYREQIKRVKDSDDVPMVLVGNKCDLPTRTVDTKQAHELAKSYGIPFIETSAKTRQGVEDAFYTLVREIRQYRMKKLNSSDDGTQGCMGLPCVSLECKEDFAERLNGCGSAPPPLSPNFKEGGGEIDDAMRNFAEKVFASEVKDEGGRQEISPFDVDEICPISHHEMQAHIFHLETLSTSTEARRKKRFQGRKTVNLSIPLSETSSTKLSHIDEYISSSPTYQTVPDFQRVQITGDYASGKREPLGRHGVSGEKKDPSRPRIVRRVADSINQPKKTDPEKERGKRKKKEPEKRRKMRERTVGQLINLCHMDLQNQHHIGETAVQPSVDAPNIVLMTSAGSPSHVTDPLRVTVEDFEIVCKGLYRALCIREKYMQKSFQRFPKTPSKYLRNIDGEAWVANESFYPVFTPPVKKGEDPFRTDNLPENLGYHLKMKDGVVYVYPNEAAVSKDEPKPLPYPNLDTFLDDMNFLLALIAQGPVKTYTHRRLKFLSSKFQVHQMLNEMDELKELKNNPHRDFYNCRKVDTHIHAAACMNQKHLLRFIKKSYQIDADRVVYSTKEKNLTLKELFAKLKMHPYDLTVDSLDVHAGRQTFQRFDKFNDKYNPVGASELRDLYLKTDNYINGEYFATIIKEVGADLVEAKYQHAEPRLSIYGRSPDEWSKLSSWFVCNRIHCPNMTWMIQVPRIYDVFRSKNFLPHFGKMLENIFMPVFEATINPQADPELSVFLKHITGFDSVDDESKHSGHMFSSKSPKPQEWTLEKNPSYTYYAYYMYANIMVLNSLRKERGMNTFLFRPHCGEAGALTHLMTAFMIADDISHGLNLKKSPVLQYLFFLAQIPIAMSPLSNNSLFLEYAKNPFLDFLQKGLMISLSTDDPMQFHFTKEPLMEEYAIAAQVFKLSTCDMCEVARNSVLQCGISHEEKVKFLGDNYLEEGPAGNDIRRTNVAQIRMAYRYETWCYELNLIAEGLKSTE

SEQ ID NO: 32592 - protein, 874 aa, Homo sapiens
  DOMAIN (709)..(748): 'Cold-shock' DNA-binding domain proteins domain identified by eMATRIX, accession number BL00352B, p-value=2.000e-20, raw score of 23.66
  DOMAIN (25)..(738): 'Cold-shock' DNA-binding domain identified by PFam, accession name CSD, E-value=3.3e-103, PFam score of 356.3
  misc_feature (1)...(874): Xaa = X or * as defined in Table 2
MSFDPNLLHNNGHNGYPNGTSAALRETGVIEKLLTSYGFIQCSERQARLFFHCSQYNGNLQDLKVGDDVEFEVSSDRRTGKPIAVKLVKIKQEILPEERMNGQVVCAVPHNLESKSPAAPGQSPTGSVCYERNGEVFYLTYTPEDVEGNVQLETGDKINFVIDNNKHTGAVSARNIMLLKKKQARCQGVVCAMKEAFGFIERGDVVKEIFFHYSEFKGDLETLQPGDDVEFTIKDRNGKEVATDVRLLPQGTVIFEDISIEHFEGTVTKVIPKVPSKNQNDPLPGRIKVDFVIPKELPFGDKDTKSKVTLLEGDHVRFNISTDRRDKLERATNIEVLSNTFQFTNEAREMGVIAAMRDGFGFIKCVDRDVRMFFHFSEILDGNQLHIADEVEFTVVPDMLSAQRNHAIRIKKLPKGTVSFHSHSDHRFLGTVEKEATFSNPKTTSPNKGKEKEAEDGIIAYDDCGVKLTIAFQAKDVEGSTSPQIGDKVEFSISDKQRPGQQVATCVRLLGRNSNSKRLLGYVATLKDNFGFIETANHDKEIFFHYSEFSGDVDSLELGDMVEYSLSKGKGNKVSAEKVNKTHSVNGITEEADPTIYSGKVIRPLRSVDPTQTEYQGMIEIVEEGDMKGEVYPFGIVGMANKGDCLQKGESVKFQLCVLGQNAQTMAYNITPLRRATVECVKDQFGFINYEVGDSKKLFFHVKEVQDGIELQAGDEVEFSVILNQRTGKCSACNVWRVCEGPKAVAAPRPDRLVNRLKNITLDDASAPRLMVLRQPRGPDNSMGFGAERKIRQAGVIDXNWRKQKCFVFTKINGLFTQRSKPQTTRGKIKPPSPTSPELTLVILDKAFSPLARDPVYGQFKKRAKKSDPSIPVI

SEQ ID NO: 32593 - protein, 65 aa, Homo sapiens
MVWRVCEGPKAVAAPRPDRLVSRLKNITLDDASDPRLMALRQPRGPDNSMGFGAERKIRQAGVID

SEQ ID NO: 32594 - protein, 661 aa, Homo sapiens
  DOMAIN (318)..(333): 'Cold-shock' DNA-binding domain proteins domain identified by eMATRIX, accession number BL00352A, p-value=6.940e-11, raw score of 12.19
  DOMAIN (25)..(661): 'Cold-shock' DNA-binding domain identified by PFam, accession name CSD, E-value=4.6e-73, PFam score of 256.2
MSFDPNLLHNNGHNGYPNGTSAALRETGVIGKLLTSYGFIQCSERQARLFFHCSQYNGNLQDLKVGDDVEFEVSSDRRTGKPIAVKLVKIKTRNPPEERMNGQEVFYLTYTPEDVEGNVQLETGDKINFVIDNNKHTGAVSARNIMLLKKKQARCQGVVCAMKEAFGFIERGDVVKEIFFHYSEFKGDLETLQPGDDVEFTIKDRNGKEVAPDVRLLPQGTVIFEDISIEHFEGTVTKVIPKVPSKNQNDPLPGRIKVDFVIPKELPFGDKDTKSKVTLLEGDHVRFNISTDRRDKLERATNIEVLSNTFQFTNEAREMGVIAAMRDGFGFHPSVWIRECSVCSFPLPVKFWMGTSSHIADEVEFTVVPDMLSAQRNHAIRIKKLPKGTVSFHSHSDHRFLGTVEKEATFSNPKTTSPNKGKEKEAEDGIIAYDDCGVKLTIAFQAKDVEGSTSPQIGDKVEFSISDKQRPGQQVATCVRLLGRNSNSKRLLGYVATLKDNFGFIETANHDKEIFFHYSEFSGDVDSLELGDMVEYSLSKGKGNKVSAEKVNKTHSVNGITEEADPTIYSGKVIRPLRSVDPTQTEYQGMIEIVEEGDMKGEVYPFGIVGMANKGDCPARKGRASSSSCVSWAKMHKLWLTTSHPLRRAAVECVKDQFGFI

SEQ ID NO: 32595 - protein, 81 aa, Homo sapiens
GWLHDLWIPVHNETSIKIGRMQEVELADKHHKEYQLIEKVFTRCQELCQLDKTQGRNNAERLERNLAVTKYLIYMSGFRAE

SEQ ID NO: 32596 - protein, 296 aa, Homo sapiens
MGSHRKGHSSCSTKSSRGDWARLEQTWTVAVVQLNDGVGPWSPRSTQMKFQKGRGGLLTLINGEGSLNTTGHQGGPEQSEAATAAQRMLMRYLQDTRSMPEGGAQKRRCPLWGPALPQYHLARDPRTLWQGTIGNLVELKSDPDAVSFPNLSSSIPSHPSAVASSAALHLPDHSSSTAFITRSATVCRTGYKERDWLTRWGERSAGLGARDGSAGTGLSLMHNGSASPHDAEVNRTRSSFALLVRGCSSEDERPSVFVCAKDNTLYGTDQNKFTVTLRNVRGTNPPEVDEIPKPEK

SEQ ID NO: 32597 - protein, 214 aa, Homo sapiens
  misc_feature (1)...(214): Xaa = X or * as defined in Table 2
MELKFTEFADLLTVAQEGEDGGLFVLSLTAFKILENLVFGKGSQAKTFPEILLCLLLALFASGLIHRVCVTTCFIFSVVGLCYINKISTLYQAAAAVLTGPWLLPSFTANPQKQVCELEYLCSTATRSTGTGRLELKSGGLSLGPANPRSASRPVSETATTAKEYARQETSAAQFLPQLWHLRRHVPALGTSSLVFHFDLEVEKEAGKGCARRX

SEQ ID NO: 32598 - protein, 74 aa, Homo sapiens
MVVCDGHLAGRFSSLLSLLLFAGMQMYSRQLASTEWLTIQGGLLGSGLFVFSLTAFNNLGESCLWQRIPSKDLP

SEQ ID NO: 32599 - protein, 112 aa, Homo sapiens
MGDILAHESELLGLVKEYLDFAEFEDTLKTFSKECKIKGKPLCKTVGGSFRDSKSLTIQKDLVAAFDNGDQKVFFDLWEEHISSSIRDGDSFAQKLEFYLHIHFAIYLLKYS

SEQ ID NO: 32600 - protein, 58 aa, Homo sapiens
IEEHLLVSVVKCSDKILLNSIVAPGSDFDGEIRDFKPEPNVVTERYFGSSVFAFRDDP

SEQ ID NO: 32601 - protein, 214 aa, Homo sapiens
MAEGERHVPYGGRQKRTCAGKFPFLKPSDLVRLIHNHENSTGKICPHDLVPPPLGPVGIQDEIWHPDEKRLEGLSKQLDWDVRSIQRWFRQRRNQEKPSTLTRFCESITSLIRVPEDGCRKVMFYASSSGSYFWQTKSDISKYEIRVRLTLEDIHTFTTSLVAGPVGQYGGEGSGLWSLGVCIGVFSLIKTSRVFGRVAGHWIRKMGTLIVSAS

SEQ ID NO: 32602 - protein, 54 aa, Homo sapiens
VSRRPPYDSRDLYRSRRDRGCGGDTLGLSEKRRREPGWGRSPETKASTLEDPLL

SEQ ID NO: 32603 - protein, 68 aa, Homo sapiens
  DOMAIN (22)..(61): PROTEIN ZINC FINGER ZINC-FINGER METAL-BINDING NU domain identified by eMATRIX, accession number PD01066, p-value=3.302e-31, raw score of 19.43
  DOMAIN (20)..(66): KRAB box domain identified by PFam, accession name KRAB, E- value=7.6e-16, PFam score of 66.1
  misc_feature (1)...(68): Xaa = X or * as defined in Table 2
XRGSRMEDAGTPGSREMDSVAFEDVAVNFTLEEWTLLDPSQNNLYRDVMRETFRNLASVGKQWEDQNI

SEQ ID NO: 32604 - protein, 39 aa, Homo sapiens
MINAGDFIADESGSQCEEELKRRQSRKVFFPWSPANQTK

SEQ ID NO: 32605 - protein, 447 aa, Homo sapiens
MTHIQNEVHLVSYRDSRGSPSGRCSKVFAEYPNVINEIINLRYPTVRRWGKLWGVDTNYKSVSKFHYSMTPPTSMAARVMRAAGGGEYLQRGLPDSDGANDKNYWLAFGEKRAWDKTSWRTLRKRLLLLSRKRYALRDPLIISPKRLVRRQDFSSLEGFFNLHSLRIDINKLLGVRISTVRLNSQYHKPFLLTDIRPVNSTMGIVLPEQIKLACQRIQRVALCGGDDYLTIGDSFDVMFCSRFGWQVTPSSPLNAAAWKSLPEFARFVPGKSCQITAPTLRDQTLNVIKRFLHEASEIVHAGTRIVKASALCLDRSLSFYGGVCSASVVVYGLVLVYFLRWYCDCVTLSRSESYPEAPKGDPRRAKWPKRPPPRTPTTVPPKSPQRRGPKPHAKKGVHQTSNQPTSLQNEGEKNLSRQANAENFVNTRPAPKRLLKEPLNMERNKQY

SEQ ID NO: 32606 - protein, 865 aa, Homo sapiens
  DOMAIN (474)..(529): ELEMENT INSERTION TRANSPOSABLE SEQUENCE TRANSPOSASE FOR domain identified by eMATRIX, accession number PD02662D, p-value= 8.398e-09, raw score of 21.71
  DOMAIN (213)..(295): ParB-like nuclease domain identified by PFam, accession name ParBc, E-value=7.1e-05, PFam score of 29.6
  misc_feature (1)...(865): Xaa = X or * as defined in Table 2
MSNSFNGQLGASDRKAGECLLHEYEDLVPIRDTLRLFPGGRYLPRAKHVAPSEPDPEQDEQKLRFCKRHLYGQQPRSPVEIRLQHVAIASAYCTFPLTRLNQYQPSFSTDLYHGTLKPASLTMSGVVLLGRMLARPVNKYNGHRIARTDKASMPTVYSESLFVENTPLSTPAAPMVDSLIARVGVMARGNAITLPVCGRDVKFTLEVLRGDSVEKTSRVWSGNERDQELLTEDALDDLIPSFLLTGQQTPALRSKKIADGSRRRKAAALTESDYRVLVGELDDEQMAALSRLGNDYRPTSAYERGQRYASRLQNEFAGNISALADAENISHKEELLKQQASNLHEQKKAGVDIGAEEHYYSYSTDEEKDSEKLSNLPMSTLEDPLDWSDIREQKRLMVLRASVALHGRSVTLYEKAFPLSEQCSKKAHDQFLADLASILPSNTTPLIVSDAGFKVPWYKSVEKLASAKEPWILATNLPVEIRTPKQLVNIYSKRMQIEETFRDLKTLSGYTVRDRNVLSTVRLGMGVCGILATHNRGDLEFGLNPFGATLKAPTSVDSFDVMFCSRFGWQVTAKFENNQKAYKETYGVSHITRHDMLQIPKQQQNEKYQVPQFDQSTIKNIESAKGLDVWDSWPLQNADGTVAEYNGYHVVFALAGSPKDADDTSIYMFYQKIPKQQQNEKYQVPQFDQSTIKNIESAKGLDVWDSWPLQNADGTVAEYNGYHVVFALAGSPKDADDTSIYMFYQKVGDNSIDSWKNAGRVFKDSDKFDANDPILKDQTQEWSGSATFTSDGKIRLFYTDYXEKEEPRWPAKRREEELLPSREQTIKITSKLQANLWEEGIESEQRKDADPGLKEEEAGNSTQGY

SEQ ID NO: 32607 - protein, 973 aa, Homo sapiens
  DOMAIN (782)..(824): CYTOCHROME C-TYPE BIOGENESIS PROTEIN CHAIN domain identified by eMATRIX, accession number DM01577B, p-value=9.379e-37, raw score of 18.96
  DOMAIN (51)..(247): Isocitrate lyase domain identified by PFam, accession name ICL, E-value=2.2e-169, PFam score of 431.1
MLLATALRGFLKNGDRGHVDTEEWRSYPWAASFGQLRSSQNCPGASASGRTGVPTVLVARTDADASDLITSDCDPYDSEFMTGERTSEGFFRTHAGIEQAISRGLAYAPYADLVWCETSTPDLELARRFAQAIHAKYPGKLLAYNCSPSFNWQKNLDDKTIASFQQQLSDMGYKFQFITLAGIHSMWFNMFDLANAYAQGEGMKHYVEKVQQPEFAAAKDGYTFVSHQQEVGTGYFDKVTTIIQGGTPDKAFTPHPASKPAHKPGEQPMKNNPLISIYMPTWNRQQLAIRAIKSVLRQDYSNWEMIIVDDCSTSWEQLQQYVTALNDPRITYIHNDINSGACAVRNQAIMLAQGEYITGIDDDDEWTPNRLSVFLAHKQQLVTHAFLYANDYVCQGEVYSQPASLPLYPKSPYSRRLFYKRNIIGNQVFTWAWRFKECLFDTELKAAQDYDIFLRMVVEYGEPWKVEEATQILAINHGEMPIHSSREHFRVLPFCRSTRPFRQARKISRVIVTSTKSDSLYTVGMLALSVRAIRCPLYLLTGLISVSKNGLWYCELQVALHGRSVTLYEKAFPLSEQCSKKAHDQFLADLASILPSNTTPLIVSDAGFKVPWYKSVEKLGWYWLSRRMQIEETFRDLKSPAYGLGLRHSRTSSSERFDIMLLIALMLQLTCWLAGVHAQKQGLDLGVYGAPETFLIDGNGIIRYRHAGDLNPRVWEEEIKPLWEKYTLATIDVLQFKDEAQEQQFRQLTEELRCPKCQNNSIADSNSMIATDLRQKVYELMQEGKSKKEIVDYMVARYGNFVTYDPPLTPLTVLLWVLPVVAIGIGGWVIYARSRRRVRVVPEAFPEQSVPEGKRAGYVVYLPGIVVALIVAGVSYYQTGNYQQVKIWQQATAQAPALLDRALDPKADPLNEEEMSRLALGMRTQLQKNPGDIEGWIMLGRVGMALGNASIATDCYATGYRLDRTTVMLDGDR

SEQ ID NO: 32608 - protein, 1130 aa, Homo sapiens
  DOMAIN (280)..(310): Glutathione S-transferases domain identified by eMATRIX, accession number PF00043, p-value=2.333e-14, raw score of 21.83
  DOMAIN (233)..(387): Glutathione S-transferases domain identified by PFam, accession name GST, E-value=9.7e-43, PFam score of 144.0
  misc_feature (1)...(1130): Xaa = X or * as defined in Table 2
XLDRVKDKDYINVNLTYELDKLTKGNQQLGSGEWSLIAESIDPSAVRQFIIQYNIAMQKQLAAHPELANDEVALQEVNAALFKEYLPLLQKSSRFTQEKHQQTHSTFQNLLPPKAAGIAMALNVLGKQFDKLLNVTLCYPDNNRQPFFDMLSGKLTRIVVHVDLQPIADELHGDYINDKSFKRHFQQWLNSLWQEKDRLLTSLMSSQRQNNSKNSDYTWRFSWRVAANKRSVMTLFSGPTDIYSHQVRIVLAEKGVSFEIEHVEKDNPPQDLIDLNPNQSVPTLVDRELTLWESRIIMEYLDERFPHPPLMPVYPVARGESRLYMHRIEKDWYTLMNTIINGSASEADAARKQLREELLAIAPVFGQKPYFLSDEFSLVDCYLAPLLWRLPQWASSSAAGCEKSLKGAILTRVFEPHADLVADVKLLDVQFLWNLRVRANRSSHCALVSQLELRWKTSYGHTRLFSYGTTDLLPSYSADFGRRRAFKPSSYGLMEVKLGFICSGNTMPIVLVDWSDIREQKRLMVLRASVALHGRSVTLYEKAFPLSEQCSKKAHDQFLADLASILPSNTTPLIVSDAGFKVPWYKSVENLGWYWLSRRSTRTHCHHPSPKIYSASAKEPWVLATNLPVEIRTPKQLVNIYSKRMQIEVTFRDLKSPAYGLGLRHSRTSSSERFDIMLLIALMLHYIVTASSIERTSAIRGTPVPLSTTPVYDDVARQDLYRDRSTMTSVGIYATNMSTGYRWGRERERDRKEKERKKKKADDNDIPPDEQKRQRLRRTRAQHXQQRNETATPTDWTATNDKGTQPTRDDDTSGGSRRTDGRSRDEHRRDRDRHRPGSRGTRTRTDTTNSGPRHGDDHSRDTGHQRRRRDDRPGTRPAPRRTPSTPHARVPTWASECDSRGQRKSQEETTQDRNNHRTERKAQHPTKDRNDTENKLSSGTRQHQTRTGTTTNEHAQTTPHNTSQHTPNLHSSPPCLCYHHQGQQESKHRDAQYSVEHNETDKKVNKREREDKIIRTRKYKQERLYIKSCIIDCFEKQSIPGISRKDSVSLELLGLQLEEHLQDNEANIMKSKAQEEVGCGKNENEHATAAAATEGELSNWERGTGNASKRERNTTRTREQERTEPTERER

SEQ ID NO: 32609 - protein, 536 aa, Homo sapiens
  DOMAIN (402)..(457): ELEMENT INSERTION TRANSPOSABLE SEQUENCE TRANSPOSASE FOR domain identified by eMATRIX, accession number PD02662D, p-value= 3.973e-10, raw score of 21.71
MNMNIKKIVKQATVLTFTTALLAGGATQAFAKENNQKAYKETYGVSHITRHDMLQIPKQQQNEKYQVPQFDQSTIKNIESAKGLDVWDSWPLQNADGTVAEYNGYHVVFALAGSPKDADDTSIYMFYQKVGDNSIDSWKNAGRVLMNPLMILVKIIKLSLTLACHALLDCKTLTLTELGRNLPTKARTKHNIKRIDRLLGNRHLHKERLAVYRWHASFICSGNTMPIVLVDWSDIREQKRLMVLRASVALHGRSVTLYEKAFPLSEQCSKKAHDQFLADLASILPSNTTPLIVSDAGFKVPWYKSVEKLGWYWLSRVRGKVQYADLGAENWKPISNLHDMSSSHSKTLGYKRLTKSNPISCQILLYKSRSKGRKNQRSTRTHCHHPSPKIYSASAKEPWVLATNLPVEIRTPKQLVNIYSKRMQIEETFRDLKSPAYGLGLRHSRTSSSERFDIMLLIALMLQLTCWLAGVHAQKQGWDKHFQANTVRNRNVLSTVRLGMEVLRHSGYTITREDLLVAATLLAQNLFTHGYALGKL

SEQ ID NO: 32610 - protein, 524 aa, Homo sapiens
  DOMAIN (268)..(323): ELEMENT INSERTION TRANSPOSABLE SEQUENCE TRANSPOSASE FOR domain identified by eMATRIX, accession number PD02662D, p-value= 3.491e-10, raw score of 21.71
MCELDILHDSLYQFCPELHLKRLNSLTLACHALLDCKTLTLTELGRNLPTKARTKHNIKRIDRLLGNRHLHKERLAVYRWHASFICSGNTMPIVLVDWSDIREQKRLMVLRASVALHGRSVTLYEKAFPLSEQCSKKAHDQFLADLASILPSNTTPLIVSDAGFKVPWYKSVEKLGWYWLSRVRGKVQYADLGAENWKPISNLHDMSSSHSKTLGYKRLTKSNPISCQILLYKSRSKGRKNQRSTRTHCHHPSPKIYSASAKEPWVLATNLPVEIRTPKQLVNIYSKRMQIEETFRDLKSPAYGLSLRHSRTSSSERFDIMLLIALMLQLTCWLAGVHAQKQGWDKHFQANTVRNRNGRLTRGCNPTSSKFIHTWLRFGEIMRGSLSKQQQNEKYQVPQFDQSTIKNIESAKGLDVWDSWPLQNADGTVAEYNGYHVVFALAGSPKDADDTSIYMFYQKVGDNSIDSWKNAGRVFKDSDKFDANDPILKDQTQEWSGSATFTSDGKIRLFLTLTIPVNITANKA

SEQ ID NO: 32611 - protein, 437 aa, Homo sapiens
  DOMAIN (268)..(323): ELEMENT INSERTION TRANSPOSABLE SEQUENCE TRANSPOSASE FOR domain identified by eMATRIX, accession number PD02662D, p-value= 3.973e-10, raw score of 21.71
MCELDILHDSLYQFCPELHLKRLNSLTLACHALLDCKTLTLTELGRNLPTKARTKHNIKRIDRLLGNRHLHKERLAVYRWHASFICSGNTMPIVLVDWSDIREQKRLMVLRASVALHGRSVTLYEKAFPLSEQCSKKAHDQFLADLASILPSNTTPLIVSDAGFKVPWYKSVEKLGWYWLSRVRGKVQYADLGAENWKPISNLHDMSSSHSKTLGYKRLTKSNPISCQILLYKSRSKGRKNQRSTRTHCHHPSPKIYSASAKEPWILATNLPVEIRTPKQLVNIYSKRMQIEETFRDLKSPAYGLGLRHSRTSSSERFDIMLLIALMLQLTCWLAGVHAQKQEQATPYHLLDSTIFLENSVWAYMVNTFHQRGNSKEWEENTATPHDSLKFNTMGMRKHVKKGYNDTGVKKKLFRQETLATTPDDNGFDVAFPHTNT

SEQ ID NO: 32612 - protein, 403 aa, Homo sapiens
MCELDILHDSLYQFCPELHLKRLNSLTLACHALLDCKTLTLTELGRNLPTKARTKHNIKRIDRLLGNRHLHKERLAVYRWHASFICSGNTMPIVLVDWSDIREQKRLMVLRASVALHGRSVTLYEKAFPLSEQCSKKAHDQFLADLASILPSNTTPLIVSDAGFKVPWYKSVEKLGWYWLSRPGGESIQIFHNPRVLVEPEPKSMRNLPSGVVPAVRQPLAEDKTLLPFFSNERVIRAAGGVGALSDWLLRHVTSCQWPNGDYHHTETVIHRYGTGAMVLCWHCDNQLRDQTSESLELLAQQNLTAWVIDVIRHAISGTQERELSLAELSWWAVCNQVVDALPEAVSRRSLGLPAEKICSVYRESDIVPGEQTATSILKQRTKNLAPLPYAHQQQKSPQEKTV

SEQ ID NO: 32613 - protein, 673 aa, Homo sapiens
  DOMAIN (268)..(323): ELEMENT INSERTION TRANSPOSABLE SEQUENCE TRANSPOSASE FOR domain identified by eMATRIX, accession number PD02662D, p-value= 4.938e-10, raw score of 21.71
MCELDIYTTLFTNSAPELHLKRLNSLTLACHALLDCQTLTLTELGRNLPTKARTKHNIKRIDRLLGNRHLHKERLAVYRWHASFICSGNTMPIVLVDWSDIREQKRLMVLRASVALHGRTVTLYEKAFPLSEQCSKKAHDQFLADLASILPSNTTPLIVSDAGFKVPWYKSVEKLGWYWLSRVRGKVQYADLGAENWKPISNLHDMSSSHSKTLGYKRLTKSNPISCQILLYKSRSKGRKNQRSTRTHCHHPSPKIYSASAKEPWVLATNLPVEIRTPKQLVNIYSKRMQIEETFRDLKIRLGMEVLRHSGYTITREDLLVAATLLAQIYSHMVTLWGNYEGISQRFGGKVINVINGKTDTLLEISVLPLDSYAKPDIEANYQGRLLARQSGFLDPVNYRNHFVTILGTIQGEQPGFINKVPYNFLEVNMQGIQVWHLREVVNTTYNLWDYGYGAFWPEPGWGAPYYTNALAKELAISSKNWASRLSLAAPLRAARAATGDVVIPPLPSASLYCHYSCACGVLDESERCDKERTVNTLLRSHCLQDSAPIPSFHIGTGNDTYVREFARQGTFWIQSEPPLVHRWMGRFLSSSPHNGVSFLFGPLQTSVGHSGSAGALFQKNASDAQLCTTLKLSGRKMLLVRQREEAAQALFALNDVRTERLRDRITQWQLFH

SEQ ID NO: 32614 - protein, 645 aa, Homo sapiens
  DOMAIN (268)..(323): ELEMENT INSERTION TRANSPOSABLE SEQUENCE TRANSPOSASE FOR domain identified by eMATRIX, accession number PD02662D, p-value= 3.973e-10, raw score of 21.71
MCELDILHDSLYQFCPELHLKRLNSLTLACHALLDCKTLTLTELGRNLPTKARTKHNIKRIDRLLGNRHLHKERLAVYRWHASFICSGNTMPIVLVDWSDIREQKRLMVLRASVALHGRSVTLYEKAFPLSEQCSKKAHDQFLADLASILPSNTTPLIVSDAGFKVPWYKSVEKLGWYWLSRVRGKVQYADLGAENWKPISNLHDMSSSHSKTLGYKRLTKSNPISCQILLYKSRSKGRKNQRSTRTHCHHPSPKIYSASAKEPWVLATNLPVEIRTPKQLVNIYSKRMQIEETFRDLKSPAYGLGLRHSRTSSSERFDIMLLIALMLQLTCWLAGVHAQKPGWDKHSRVKEVEIETPGDLEHGVFIGAAGDGKIASASRADYAGAAARVISEAGHEGKVYELAGDSAWTLTQLAAELTKQSGKQVTYQNLSEADFAAALKSVGLPDGLADMLADSDVGASKGDQWMPVMISGVLYALLAGLMWGLIFVGPLIVPEYPAMLQSMGRYLALGLIALPIAWLGRVRLRQLARRDWLTALMLTMMGNLIYYFCLASAIQRTVPSGATRCVRGVLVVITLCYEEVECEGEADVARGRGTPPTVKVLCGTVTGSVLIEARLGKEGRNHCWYYICEKHSHQIQEKWEEVVH

SEQ ID NO: 32615 - protein, 601 aa, Homo sapiens
  DOMAIN (268)..(323): ELEMENT INSERTION TRANSPOSABLE SEQUENCE TRANSPOSASE FOR domain identified by eMATRIX, accession number PD02662D, p-value= 3.973e-10, raw score of 21.71
MCELDILHDSLYQFCPELHLKRLNSLTLACHALLDCKTLTLTELGRNLPTKARTKHNIKRIDRLLGNRHLHKERLAVYRWHASFICSGNTMPIVLVDWSDIREQKRLMVLRASVALHGRSVTLYEKAFPLSEQCSKKAHDQFLADLASILPSNTTPLIVSDAGFKVPWYKSVEKLGWYWLSRVRGKVQYADLGAENWKPISNLHDMSSSHSKTLGYKRLTKSNPISCQILLYKSRSKGRKNQRSTRTHCHHPSPKIYSASAKEPWVLATNLPVEIRTPKQLVNIYSKRMQIEETFRDLKSPAYGLGLRHSRTSSSERFDIMLLIALMLQLTCWLAGVHAQKQGLDVWDSWPLQNADGTVAEYNGYHVVFALAGSPKDADDTSIYMFYQKVGDNSIDSWKNAGRVFKDSDKFDANDPILKDQTQEWSGSATFTSDGKIRLFYTDYSGKHYGKQSLTTAQVNVSKSDDTLKINGVEDHKTILDGDGKTYQNVQQFIDEGSITSGPPDSYEDDEDDDGGRGGEGEERKGEGREGEERGVGEEEGGGEGGGGDKEDDVGDDKDVGGDDNVDDDDERGRGEGKKEQEKRGKMMSVAVMMLLTMMIK

SEQ ID NO: 32616 - protein, 786 aa, Homo sapiens
  DOMAIN (268)..(323): ELEMENT INSERTION TRANSPOSABLE SEQUENCE TRANSPOSASE FOR domain identified by eMATRIX, accession number PD02662D, p-value= 3.973e-10, raw score of 21.71
MCELDILHDSLYQFCPELHLKRLNSLTLACHALLDCKTLTLTELGRNLPTKARTKHNIKRIDRLLGNRHLHKERLAVYRWHASFICSGNTMPIVLVDWSDIREQKRLMVLRASVALHGRSVTLYEKAFPLSEQCSKKAHDQFLADLASILPSNTTPLIVSDAGFKVPWYKSVEKLGWYWLSRVRGKVQYADLGAENWKPISNLHDMSSSHSKTLGYKRLTKSNPISCQILLYKSRSKGRKNQRSTRTHCHHPSPKIYSASAKEPWVLATNLPVEIRTPKQLVNIYSKRMQIEETFRDLKSPAYGLGLRHSRTSSSERFDIMLLIALMLQLTCWLAGVHAQKQGWDKHFQANTVRNRNLKIYSHMVTLWGNYEGISQYQVPQFDQSTIKNIESAKGLDVWDSWPLQNADGTVAEYNGYHVVFALAGSPKDADDTSIYMFYQKVGDNSIDSWKNAGRVFKDSDKFDANDPILKDQTQEWSGSATFTSDGKIRLFYTDYSGKHYGKQSLTTAQVNVSKSDDTLKINGVEDHKTIFDGDGKTYQNVQQFIDEGNYTSGDNHTLRDPHYVEDKGHKYLVFEANTGTENGYQGEESLFNKAYYGGGTNFFRKESQKLQQSAKKRDAELANGALGIIELNNDYTLKKVMKPLITSNTVTDEIERANVFKMNGKWYLFTDSRGSKMTIDGINSNDIYMLGYVSNSLTGPYKPLNKTGLVLQMGLDPNDVTFTYSHFAVPQAKGNNVVITSYMTNRGFFEDKKATFAPSFLMNIKGNKTSVVKNSILEQGQLTVN

SEQ ID NO: 32617 - protein, 1932 aa, Homo sapiens
  DOMAIN (374)..(388): SYNTHASE BIOSYNTHESIS TRANSFERASE domain identified by eMATRIX, accession number PD00787B, p-value=2.385e-12, raw score of 13.26
  DOMAIN (890)..(1020): Cyclophilin type peptidyl-prolyl cis- domain identified by PFam, accession name pro_isomerase, E-value=6.6e-72, PFam score of 250.3
MCELDILHDSLYQFCPELHLKRLNSLTLACHALLDCKTLTLTELGRNLPTKARTKHNIKRIDRLLGNRHLHKERLAVYRWHASFICSGNTMPIVLVDWSDIREQKRLMVLRASVALHGRSVTLYEKASSYGAEQYALVVGSDVLARTCDPTDRGTIIIFGDGAGAAVLAASEEPGIISTHLHADGSYGELLTLPNFFRVNPENSIHLTMAGNEVFKVAVTELAHIVDETLAANNLDRSQLDWLVPHQANLRIISATAKKLGMSMDNVVVTLDRHGNTSAASVPCALDEAVRDGRIKPGQLGSQTVGMLADMAASYPIVEETFAEASAALGYDLWALTQQGPAEELNKTWQTQPALLTASVALYRVWQQQGGKAPAMMAGHSLGEYSALVCAGVIDFADAVRLVEMRGKFMQEAYRKARALWRQSSVWMMRLLRKRVKKLQKVVIAGHKEAVERVALPVKRRRKTRAAVTMSVPSHCALMKPAADKLAVELAKITFNAPTVPVVNNVDVKCETNGDAIRDALFIIEGALVVVSHDRHLLRSTTDDLYLVHDRKVEPFDGDLEDYQQWLSDVQKQENQTDEAPKENANSAQARKDQKRREAELRAQTQPLRKEIARLEKEMEKLNAQLAQAEEKLGDSELYDQSRKAELTACLQQQASAKSGLEEPKQLMAQITTTDANEFSSSAEFIPMRGFSNCHLQTMLPRLFRRQVKFTPYWQRLELPDGRFVDLRGVKTLHRAHINLVCGDPNRMHRIYHSGETEDASWFLRWLQREFGHAPTAAVGYSLGGNMLACLLAKEGNDLPVDAAVIVSAPFMLEACSYHMEKGFSRVYQRYLLNLLKANAARKLAAYPGTLPINLAQLKSVRRIREFDDLITARIHGYADAIDYYPPCRCMFFDIAVDGEPLRCVSFEPFADKFPKTAENFHALSIGEKGFGYKGSCFQIIIPGFMCQGGDFTRHNGTGSKSIYREKFDDENFILMHTGPGILSMAKAGSNTNSSQFFICTAKTEWLDGKHMVFGKVKEGINGQAWWLTPVIPALWEDKVGGSQDNKMCELDILHDSLYQFCPELHLKRLNSLTLACHALLDCKTLTLTELGRNLPTKARTKHNIKRIDRLLGNRHLHKERLAVYRWHASFICSGNTMPIVLVDWSDIREQKRLMVLRASVALHGRSVTLYEKAFPLSEQCSKKAHDQFLADLASILPSNTTPLIVSDAGFKVPWYKSVEKLASAKEPWVLATNLPVEIRTPKQLVNIYSKRMQIEETFRDLKSPAYGLGLRHSRTSSSERFDIMLLIALMLQLTCWLAGVHEQKQGLNECLSLLFYGPGWPHWMLPYGCLATGDRSGLIEVVSTSETIADIQLNSSNVAAAAAFNKDALLNWLKEYNSGDTHRLKIKGWRKIYQANGKHKKAGVAILVSDKTDFKPTKIKRDKEGYFIMVKGSIQQEELTILNIYAPNTGAPRFIKQVLSDLQRDLDSHTLIMGDFNTPLSTLDRSTRQKVNKDTQELKSALHQADLIDIYRTLHPKSTEYTFFSAPHHTYSKIDHILGSKALLSKCKRTEIITNYLSDHRAIKLELRVKKLTQNRSTTWKLNNLLLNDYWVHNEMKAEIKMFFETNENKDTTYQNLWDAFKAVCRGKFIALNAHKRKQERSKIDTLTSQLKELEKQEQTHSKASRRQEITKIRAEMEEIETQKNLQKINESRSWFFERIKKIDKPLARLIKKKREKNLIDVIKNYKGDITTDPTEIQTTIREYYKHHYTNKLENLEEMDKFLDTYTLPRLNQEEVESLNRPITGSEIVAIINSLPTKKSPGPDGFTAEFYQSQAPCMKSNNALIVILGTVTLDAVGIGLVMPVLPGLLRDIVHSDSIASHYGVLLALYALMQFLCAPVLGALSDRFGRRPGLLASLLGATPIQPHDRHVQSVDTPPAGGDFPVSGSPDDP

SEQ ID NO: 32618 - protein, 1455 aa, Homo sapiens
  DOMAIN (127)..(140): DNA-POLYMERASE GAMMA (FAMILY A) SIGNATURE domain identified by eMATRIX, accession number PR00867A, p-value=7.375e-15, raw score of 12.55
MSRLLWRKVAGATVGPGPVPAPGRWVSSSVPASDPSDGQRRRQQQQQQQQQQQQQPQQPQVLSSEGGQLRHNPLDIQMLSRGLHEQIFGQGGEMPGEAAVRRSVEHLQKHGLWGQPAVPLPDVELRLPPLYGDNLDQHFRLLAQKQSLPYLEAANLLLQAQLPPKPPAWAWAEGWTRYGPEGEAVPVAIPEERALVFDVEVCLAEGTCPTLAVAISPSACLTLACHALLDCKTLTLTELGRNLPTKARTKHNIKRIDRLLGNRHLHKERLAVYRWHASFICSGNTMPIVLVDWSDIREQKRLMVLRASVALHGRSVTLYEKAFPLSEQCSKKAHDQFLADLASILPSNTTPLIVSDAGFKVPWYKSVEKLGRKNQRSTRTHCHHPSPKIYSASAKEPWVLATNLPVEIRTPKQLVNIYSKRMQIEETFRDLKSPAYGLGLRHSRTSSSERFDIMLLIALMLQLTCWLAGVHAQKQGWDKHFQANTVRNRNVLSTVRLGMEVLRHSGYTITREDLLVAATLLAQNLFTHVGEGKLMVIGNPHYNSILRCPNGYSWNGGVNKDGQCTLNSDPDDMKNFMENVLRYLSDDKWKPDAKASMTVGTNLDTVYFKRHGQVTGNSAAFDFHPDFAGISVEHLSSYGDLDPQEMPLLILNGFEYVTQVGNDPYAIPLRADTSKPKLTQQDVTDLIAYLNKGGSVLIMENVMSNLKEESASGFVRLLDAAGLSMALNKSVVNNDPQGYPNRVRQQRATGIWVYERYPAVDGALPYTIDSKTGEVKWKYQVENKPDDKPKLEVASWLEDVDGKQETRYAFIDEADHKTEDSLKAAKEKIFAAFPGLKECTNPAYHYEVNCLEYRPGTGVPVTGGMYVPQYTQLSLNADTAKAMVQAADLGTNIQRLYQHELYFRTNGRKGERLSSVDLERLYQNMSVWLWNDTSYRYEEGKNDELGFKTFTEFLNCYANDAYAGGTKCSADLKKSLVDNNMIYGDGSSKAGMMNPSYPLNYMEKPLTRLMLGRSWWDLNIKVDVEKYPGAVSEEGQNVTKGPVNKYNGHRIARTDKASMPTVYSESLFVEVTITFIKFAHMCELDILHDSLYQFCPELHLKRLNSLTLACHALLDCKTLTLTELGRNLPTKARTKHNIKRIDRLLGNRHLHKERLAVYRWHASFICSGNTMPIVLVDWSDIREQKRLMVLRASVALHGRSVTLYEKAFPLSEQCSKKAHDQFLADLASILPSNTTPLIVSDAGFKVPWYKSVEKLGWYWLSRVRGKVQYADLGAENWKPISNLHDMSSSHSKTLGYKRLTKSNPISCQILLYKSRSKGRKNQRSTRTHCHHPSPKIYSASAKEPWVLATNLPVEIRTPKQLVNIYSKRMQIEETFRDLKSPAYGLGLRHSRTSSSERFDIMLIPRVGYTIEQINHMRDVFGTRLRRAEDVFPPVIGVAAHKGSGSEGATCFARGR

SEQ ID NO: 32619 - protein, 168 aa, Homo sapiens
MPLTHPNHGPDTLQRWTSSQTPTSLSSKLNPEPEADAASILIATSILYKQSDPYLDILARVYGPPTAAEENLKCLKEQGQAHLRHFLLCKMAAPIAVVLTAAMFENWTHRRQWQVFEPGAREEEKSLKSPRFLALKVLRKGADFQRLRLYQANMGQAKLPLALFHPLC

SEQ ID NO: 32620 - protein, 66 aa, Homo sapiens
  misc_feature (1)...(66): Xaa = X or * as defined in Table 2
XCCRKGCRYEDAHLSPVCGTTTQWQGWARSSPTVKSHTEQRPGGKTPKRHRSNIRVSIPAAELACR

SEQ ID NO: 32621 - protein, 91 aa, Homo sapiens
  misc_feature (1)...(91): Xaa = X or * as defined in Table 2
MALPWFNSRRAIARRHCCLLKFLTLMSKLTGSERAEEAEENKPDTPTYGDSFPYAHSSSELVQSCQEVFGVHLNKVAAGQEAGLWVPPPVX

SEQ ID NO: 32622 - protein, 118 aa, Homo sapiens
  misc_feature (1)...(118): Xaa = X or * as defined in Table 2
MEGNRDEAEKCVEIAREALNAGNREKAQRFLQKAEKLYPLPSARESPGELLKNADAQLQIDLNEQKMIPRGVTHIRHDEPPSLAGSISTPGRETPGDSSLFGFLVLPTHNLIREISPX

SEQ ID NO: 32623 - protein, 219 aa, Homo sapiens
MNGLLNSQRSQLRQHTLAENAMQGFSNKPRVETATFKGSLRAAYWKDKNGTKGNWKLELLQSAWQARWLCRVSSPWQPLEQLPVRRPRVLIECIASVQCQVLDVLDSVPRGLERAMRRTLEGSWGWKVGGAPRDERDEEGANQQSGAVVLDPLSALGEGRQPLGGKLAAASAGSPRRLGVGGQALPGPIRARRKPGTLVFGLDELTGAGVADEASGQAA

SEQ ID NO: 32624 - protein, 67 aa, Homo sapiens
  misc_feature (1)...(67): Xaa = X or * as defined in Table 2
XNWKLELLQSAWQARWLCRVSSPWQPLEQLPVRRPRVLIECIASVQCQVLDVLDSVPRGLERAVRAV

SEQ ID NO: 32625 - protein, 343 aa, Homo sapiens
  DOMAIN (119)..(174): Domain present in ZO-1 and Unc5-like netrin receptors domain identified by eMATRIX, accession number PF00791B, p-value=8.679e- 09, raw score of 28.49
  DOMAIN (125)..(212): Ank repeat domain identified by PFam, accession name ank, E- value=2.4e-16, PFam score of 67.7
MTVFGGGHLGGMPGLTLVESRLIAHYRNIPHSPDWSNRRKRTRNDLTRAGQVPKPRTAKGAESGMVAGSIQRYPTTQMGTTATAKLEAPQFRLQRRSPGTRARLRQLAREQACTAVVPPPDFLGSGHLKVVQSLLNHGASVNNTTLTNSTPLRAACFDGHLEIVKYLVEHKADLEVSNRHGHTCLMISCYKGHKEIAQYLLEKGADVNRKSVKVTLELGNRQRLEEFGGLRRRQEDEGSLELPRDWLNGCDQNADSDMDSEIQAYQVSDGNEELIGNWSKGYSYALAKNLAILCPCPRDLWKFELENNNLGYLAEEISKKQSIQDAHGCFKQRMLRCRRKEIT

SEQ ID NO: 32626 - protein, 408 aa, Homo sapiens
MTEFRAGIWTRHIGTANWQQEKEAKNRPAGQRGCEIVVQSQRLAGFHVRTPTRVPGEERIRVTGAGVSGSAPSPPERLIPTSDPLRPFPLLFYLPRLLALLLLVPGPGGASEITFELPDNAKQCFYEDIAQGTKCTLEFQCRKPSEGYKQFSDMTRIFLVAALIITCAGSFRTSFIHTLTRSMFLKYQTTRNSLNKSLLYICTDTCEFNHGLVRNSNHTDQNDSVCKSTVYYCRQRLEEFGGLRRRQEDEGSLELPRDWLNGCDQNADSDMDSEIQAYQVSDGNEELIGNWSKGYSYALAKNLAILCPCPRDLWKFELENNNLGYLAEEISKKQSIQDAHGCFKQPLAQRTPDIVHAAASEGARCKPWQLPCGVKPVGTQNARVKAWQLLPRFQRMYEKAWCLGRSRL

SEQ ID NO: 32627 - protein, 89 aa, Homo sapiens
MWLLKFSSVLICWQPLHLNTGFHGRSSQGRQQGKFLLKCFCPQVTYAISVHISLAKVGHTAIPNVLMVTPKMRSKTRILLSSSNTTTTT

SEQ ID NO: 32628 - protein, 69 aa, Homo sapiens
NIQQVFGDKKKFWLIPIGSSPGDGHSFPMRSMNESQNPLLANEETWEDNEDDNQDYPEGSSSLAVETET

SEQ ID NO: 32629 - protein, 424 aa, Homo sapiens
  DOMAIN (71)..(103): GTP-binding elongation factors proteins domain identified by eMATRIX, accession number BL00301B, p-value=3.647e-20, raw score of 20.09
  DOMAIN (5)..(129): Elongation factor Tu family domain identified by PFam, accession name GTP_EFTU, E-value=6.5e-39, PFam score of 133.8
MSKEKAFINIIIIGHVDSGKSTTTGPLTNVGEGSFKYAWVLDKLRAERERRITIDISLWKFKTSTYYSIIIDAPGHRDFIMTMIRGTSQADCAVLFVAGGWAEAGIFKNPQTHELALLANWRDVTQLIVIFNEIDSTEPAYSGSRLQVITKEVSACIKKIGYNWLPGLQSISSWHGDSMLEPSTDASVARVGRDSRGGGERTTPRTHLPSTSRRCPGSSAGRVCSRKCLKEEPGLLSSGLKRRRIKKQDEEVTHICPNPDVNDSELTTSIRLQVLQFWNLDWLSLLLSLQMAYCGTLSSCDIMWDLVNSWESHSYGAKSDPRRSFTNKYSISEVDKGDWEEMSGCSWFITKNLWIQEKIPISGLSVPNPGKPGNSYGPRKLKTAFNPYLLSTCHAFNSALKDRDKERKCGHAVAKKLMPPSPPN

SEQ ID NO: 32630 - protein, 432 aa, Homo sapiens
  DOMAIN (209)..(261): Integrase core domain identified by PFam, accession name rve, E-value=0.0052, PFam score of 14.4
MRLHSSALGWSMGLGAVKRGRRSSGRLPPAQEPTEEGGEAQSWRAAGPDPCPAGRQLRPGEKSRAAPVIDFERVKNAQGNTLDLRENIQKYMNLKKYLPQGWNSDLEREGHRMEEKFTEFSNHNWFKVCWSRLAHKNLQARTDKLKASHSRTCGFRLLQKQILSLKFARLALNEGLISSRETTESVENQTQALIMTVAELQQKVHLARPLPSRKRQRFVLTEIDTYSRYGLAYSSCNASAKTTICGLTECLIHHHGIPHSIAPTNALTLRLKKIHRSRSQGVDVEVAPITNTPSDPLAKFLLPVPATLHSGGLEVLVPEGRTLQLGDTTVLLNWKLGLPPGQFGLLLPLDQPAKKEVTVLAGVSDLDYQDEISLLLQNRDSKFFSFGTWTGSPCSSVCSWPIVGPCDHVPTTRMDDLSLAKIGLNAPSLDAS

SEQ ID NO: 32631 - protein, 129 aa, Homo sapiens
MWLLKFSSVLIWLEPLHLNTGFHGRSSQGRQQGKFLLKCFCPHVTYAISVHISLAKVGHTAIPNVLMVTPKMRSKTRILLSSSNTTTTTRSQGPTIGRLQAEEQGETVRVPKLKNLESNIQGQETSRMG

SEQ ID NO: 32632 - protein, 99 aa, Homo sapiens
MRSMNESQNPLLANEETWEDNEDDNQEAFCTPVFTSGPEKNGFNLGFIKNIQQVFGDKKKFWLIPIGSSVEAAEEEILVVVVTKGRLLDSWRLYSREIQ

SEQ ID NO: 32633 - protein, 27 aa, Homo sapiens
MKAETAKASGSARGTPGPEWPSAGVQE

SEQ ID NO: 32634 - protein, 128 aa, Homo sapiens
MEAVNKLSLRLQRTLVACAGSSSDQYASGHGCPGPCSVVKQVLAAEAIEMETGRSAVDESHYLLSLTLFGLNKLPVFLTNRGRVGTEPQKSSLDFLLIGHWKFKRLTRKQFLYAESYLQQPQSLFGLA

SEQ ID NO: 32635 - protein, 86 aa, Homo sapiens
MLVLLPEERREPRRHGCSSSNLALDPKGLRKQKAAPPLPQAADLRTRWSCRPAQNPQEHRSLRAAVLRNCSPERQPATGLIPEEPN

SEQ ID NO: 32636 - protein, 203 aa, Homo sapiens; identical to SEQ ID NO: 32419

SEQ ID NO: 32637 - protein, 36 aa, Homo sapiens
MCRVSVDRFFKFSQAYDRFVPHKCVSFRGVSPNKRA

SEQ ID NO: 32638 - protein, 62 aa, Homo sapiens
MQTPRAAPPRPALLLLLLLLRGAHGLFPEEPPPLMRGPQGLPEPLSRVCGQRARTPDPRRKC

SEQ ID NO: 32639 - protein, 644 aa, Homo sapiens
  DOMAIN (174)..(485): Sema domain identified by PFam, accession name Sema, E-value= 3.5e-20, PFam score of 78.2
MTGSGVRQPQVAGVGAASEQAGAERLRQRLLEFHGEKQMVLGMGEAHRRRVTPDRGGKWARSLPNTSQKDELLNFSFGAPGPGLYPFWYCWGQQGGLCDEQNSEGERERRRGQGGDGAVVQGLLGHWEDLGFDPEKVGATEGFRDNLYRVELEPPTSRSCGTRGYNRAHTPQLVLGECRNFVKVLLLRDESTLFVCGSNAFNPASARPPPLAMAFPQAVSPPPGAFLDILSLPPPPELKRISAVQTRPVQGAGEAVALRALLCPCGGVGQPCLLFFREIAMEFNYLEKVVGPAWPECARTTWEAPPAAGEAVDVLPEGAAQLLVPGDSHFYFNVLQAVTACNRSAPTNGSKLGAFGGMERAKDILILCLWGEEQGGFLEEGTLELDFGCGSVFEGRFREQKSPESIWTPVPEDQVPRPRPLYENLYVRPDHTLVTPRPGCCAAPGMQYNASSALPDDILNFVKTHPLMDEAVPSLGHAPWILRTLMRCGRPGGGETGQRLLSLELDAASGGLLAAFPAAWSECLWLAASSTRGDEELYRQSGPLLRVGPRRLLHLPQPGHQVLRRGRAAFEQDVSGASTSGSAGRLGPGDPPRTQIPPAPAAGSGERRRRQPGLWAERALCRDDRKRRGGDSRTLGTPDRLPPG

SEQ ID NO: 32640 - protein, 49 aa, Homo sapiens
  DOMAIN (1)..(48): 60s Acidic ribosomal protein domain identified by PFam, accession name 60s_ribosomal, E-value=8.5e-12, PFam score of 40.7
  misc_feature (1)...(49): Xaa = X or * as defined in Table 2
MASLSELAYIYSALILHNDKINALIKAAGVNVEPFWPGVFAKALANVSX

SEQ ID NO: 32641 - protein, 198 aa, Homo sapiens
MGYATKNQLSKRRGNKYIKVGQKICSSVLSARTFCDNRNVLEQQQQRRAEAPAGTDRASCWTRSTSPYIAEEAPHVDFGQAFANKPGQKGSTFTPAALMRALILFSVTVTSSSCGMRASYTSSAHYPHAASDHLTGHCRYRTLTSLRNSWTALVQVDFLPPLPRKIARPTPPLHPPPQPTQPENNNEALYDDQLLLNA

SEQ ID NO: 32642 - protein, 85 aa, Homo sapiens
  DOMAIN (72)..(84): RIBOSOMAL PROTEIN P2 SIGNATURE domain identified by eMATRIX, accession number PR00456F, p-value=6.400e-12, raw score of 5.86
  DOMAIN (1)..(85): 60s Acidic ribosomal protein domain identified by PFam, accession name 60s_ribosomal, E-value=1.6e-27, PFam score of 90.7
MASVSELACIYSALILHDDEALANVNIGSLICNVGAGGPAPAAGAAPAGGPAPSTAAAPAEEKKVEAKKEESEESDDDMGFGLFD

SEQ ID NO: 32643 - protein, 52 aa, Homo sapiens
MAGLPRRIIKETQRLLAEPVPGIKAEPDESNARYFHVVIAGPQDSPFEGGTL

SEQ ID NO: 32644 - protein, 43 aa, Homo sapiens
  misc_feature (1)...(43): Xaa = X or * as defined in Table 2
XIHQGNPAFCWQNQFLASKAEPDESNARYFHVVIAGESKDSPL

SEQ ID NO: 32645 - protein, 142 aa, Homo sapiens
GFQQSGVTCSKLYLKGSFWLLGRERQDKQMARIEAGAVTIVKNNNENSSQGSNGKKWLESACVLKVELTEFADRLDEDYESKKVVKGDSEVFALSNYKIRIATYRVGKQWEEQCENELIHQYSIIVITDIVTKDQRGKAAYP

SEQ ID NO: 32646 - protein, 95 aa, Homo sapiens
MAFDTFSIGSVVQEIENPCRRALDPSHLGWEPFSGLCWGSCGSPQNEDSLQWDLGMESTSLDDVLYPYASFRNLVDPITHDLIISLARYIHCPKP

SEQ ID NO: 32647 - protein, 57 aa, Homo sapiens
MSSGYVRDCKQVTFKTCKTRHFDAELIFDMKKVFSIAIEQEYTYRYLGLGRHFNPLQ

SEQ ID NO: 32648 - protein, 64 aa, Homo sapiens
MNVDFISRTEMKSLRALLYVVCLPSLNMSFPKASALFVLCWILISQHGASASQSAGITGMNHHV

SEQ ID NO: 32649 - protein, 128 aa, Homo sapiens
MRFRHVGRAGLEVLTSGDSPTSASRRTGFTGMSHRSRPRRALRDFISVLLMKSTFIQGLLWKTSPKGEVLLCCPGWSAVVQSQLTAASASQVQAILLPQPPEQLGLQLLNRRLLRVSRNLPLCMVLLM

SEQ ID NO: 32650 - protein, 162 aa, Homo sapiens
MRTADVAGLKNKEGSERFHFCPADEVYVHSGPAVEDQPQRLRLAFEKQIWELINEAMRIDKAIKEAHWRKRKRSKESSATSKGSEKAQNKNYRSDGKMAFEKITEERASRHAVGYIAQRENLCILGSKSAVILGLCIGTQYSPITVENNTGQNSAGTQQGSI

SEQ ID NO: 32651 - protein, 67 aa, Homo sapiens
MKQQAASAQEFEVTGTRAEPECQRRSVHPFNYTLCAMFNRSLVYSFGTSSFVSPQALIMGPTERGPR

SEQ ID NO: 32652 - protein, 786 aa, Homo sapiens
  DOMAIN (581)..(626): kw TRANSCRIPTASE REVERSE II ORF2 domain identified by eMATRIX, accession number DM01354N, p-value=1.000e-40, raw score of 13.17
  DOMAIN (201)..(405): AP endonuclease family 1 domain identified by PFam, accession name AP_endonucleas1, E-value=6.1e-52, PFam score of 186.0
MRRRGEGDAGGGEKEKEEERRGIDEAVSHHSQQTNTGGENQMPHVLTHKWQLNRNSACDKLHKPHSVPGGVAAGDVGGKTISNPGVCAIEYQVDGSPHIWEDVNKGVYIEEDRAPLMERSSSPAMEQSWMENDFDELREEGFRRSNYSELREDIQTKGKEVENFEKSSEEYITRIANTQKCLKELMELKTKAPELREECRSLRSQCDQLEERASVIDTHSLKIKGWRKIYQANGKQKKAGVAILVSDKTDFKPTKIKRDKEGHYIMVKGSNQQEELTILNKYAPNTGAPRFIKQVLSDLQRDLDSHTLIMGDFNTPLSTLDRSTRQKVNKDTQELNSALHQADLIDIYRTLHPKSTEYTFFSAPHHTYFKTDHIVGSKVLLSKCKRTEIITNCLSDHSAIKLELRIKKLTQNHSTTWKLNNLLLNDYCVHNEMKAEIKMFFETNENKDTTYQNLWDAFKAVCRGKFIALNAHKRKQERSKIDTLTSQLKKLEKQEQTHSKASRRQEITKIRAELKEIETQKTLQKINESRSWFFERISKTDKPLARLIKKKREKNQIDAIKNDKGDITTDPTEIQTTIREYYKHLYANKLENLEEMDKFLDIYTLPRLNQEEVESLNRPITGAEIVAIINSLPTKKSPGPDGFTAEFYQRYKEELVPFLLKLFQSIEKEGILPNSFYEASIILIPKPGRDTTKKENFRPISLMNIDGKILNKILANRIQQHIKKLIHHDQVGFIPGIQGWFNIRKSINVIQHINRTKDKHHMIISIDAEKAFDKIQQPFMQKLSIN

SEQ ID NO: 32653 - protein, 754 aa, Homo sapiens
  DOMAIN (208)..(254): kw TRANSCRIPTASE REVERSE II ORF2 domain identified by eMATRIX, accession number DM01354O, p-value=1.000e-40, raw score of 8.73
  DOMAIN (241)..(418): Reverse transcriptase domain identified by PFam, accession name rvt, E-value=6.7e-11, PFam score of 49.6
MGDFNTPLSTLDRSTRQKVNKDTQELNSALHQADLIDIYRTLHPKSTEYTFFSAPHHTCSKTDHIVGKKQEQTHSKASRRQEITKIRAELKEIETQKTLQKINESRSWFFERINKIDRPLARLIKKKREKNQIDAIKNDKGDITTSPTEIQTTIREYYKHLYANKLEDLEELDKFLETYTLPRLNQEEGDSLNRPITGSEIVAIINSLPTKKSPGPDGFTAEFYQRYKEELVPFLLKRFQSIEKEGILPNSFYEANIILIPKSARDTTKKDNFRPISLMNLDAKASIKYWQTESSSISKSLSTMIKWASSLGCKAVLEVLARAIRQEKEIKGIQLGKEEVKLSLFADDMIVYLENPIVSAQNLLKLISNFSKVSGYKINVQKSQAFLYTNNRQTESQIMSELPFTIASKRIKYLGIQLTRDVKDLFKENYKPLLNEIKEDTNKWKNIPCSWVGRINIVKMAILPKVIYRFNAIPIKLPMTFFTELEKTTLKFIWNQKRSCIAKSILSQKNKAGGITLPDFKLYYKATVTKTAWYWYQNGDIDQWNRTEPSEITPHIYNYLIFDKPEKNKQWGKDSLFNKWCCENWLAIYRKLKLDPFFTPYTKINSRWTKDLNVRPKTIKTLEENLGITIQDIGMGKDFMSKTPKATAAKAQIDKWDLIKLKSFCTAKETTIRVNRQPTKWEEIFATYSSDKGLISRIYNELKQIYKKKTNNPIKKWAKDMNRHFSKQDIYAAKKHMKKCSSSLAIRECKSKPQ

SEQ ID NO: 32654 - protein, 755 aa, Homo sapiens
  DOMAIN (272)..(317): kw TRANSCRIPTASE REVERSE II ORF2 domain identified by eMATRIX, accession number DM01354N, p-value=1.000e-40, raw score of 13.17
  DOMAIN (356)..(595): Reverse transcriptase domain identified by PFam, accession name rvt, E-value=3.8e-65, PFam score of 229.8
MGDFNTPLSTLDRSTRQKANKDTQELNSALHQVDLIDIYRTLHPKSTEYTFFSAPHHTYSTTDHILGSKALLSKCRRTEIITNYLSDHSAIKLELRIKNLTQNRSTTWKLNNLLLNDYGVHNEMKAEIKMFFETNENKDTTYQNLWDTFKAVCRGKFIALNAHKRKQERSKIDTLTSQLKELEKQEQTHSKASRRQEITKIRAELKEIETQKTLQKINESRSWFFERINKIDRLLARLIKKKREKNQIDAIKNDKGDITTDPTEIQTTIREYYKHLYANKLENLEEMDKFLHTYTLPRLNQEEVESLNRPITGSEIVAIINSLPTKKSPGPDGFTAEFDQRYKEELVPFLLKLFQSIEKEGILPNSFYEASIILIRKPGRDTTKKENFRPISLMNTDAKILNKILAKRIQQHIKKLIHHDQVGFIPGMQGWFNIHKSINVIQHINRAKDKNHMIISIDAEKAFDKIQQPFMLKTLSKLGIDGTYFKIIRAIYDKPTANIILNGQKLEAFPLKTGTRQGCPLSPLLFNIVLEVLARAIRQEKEIKGNFSKVSGYKINVQKSQAFLYTNNRQAESQIMSELPFTIASKRIKYLGIQLTRDVKDLFEENYKPLLNEIKEDTNKWKNIPCSWVGRINIVKMAILPKCLPSHKLIFYFTFSSLYITASLPATSFSSGSFTCQVHPVDFHVESKSDAINDWSGRVCQWSYINCVYGECSSRLNSNVPALREESSTPQYYQDGAIAECCPRAARSANRNPNL

SEQ ID NO: 32655 - protein, 778 aa, Homo sapiens
  DOMAIN (218)..(264): kw TRANSCRIPTASE REVERSE II ORF2 domain identified by eMATRIX, accession number DM01354O, p-value=1.000e-40, raw score of 8.73
  DOMAIN (251)..(476): Reverse transcriptase domain identified by PFam, accession name rvt, E-value=4.4e-42, PFam score of 153.2
MELKAKARGLREECRSLRSRRDQLEERVSVMEDEMNEMKREGKFREKRIKRNEQSLQEIWDYVKRPNRRLIGVPEELEKQEQTHSKANRRQEITKIRAELKEIETQKTLQKINESRSWFFERINKIDRPLARLIKKKREKNQIDAIKNDKGDITTDPTEIQTTIREYHKHLYAKKLENLEEMDEFLDTYTLPRLNKEEVESLNRPITGSEIVAIINSLPTKKSPGPDGFTAEFYQRYKEELVPFLLKLFQSIEKEGILPNSFYEASIILIPKPGRDTTKKENFRPISLMNIDAKFLNKILANRIQQHIKKLIHHDQVGFIPGMQGWLNICKSINVIQYINRTKDKNHMIISIDAEKAFEKIQQPFMLKTLNKLVLEVLARAIRQKKEIKGIQLGKEEVKLSLFAHDMIVYLEKPIVSAQNLLKLISNFSKVSGYKINVQKSQAFLYTNHRETERQIMSELPFTIASKRIKYLGIQLTRDVKDLFKENYKPLLKEIKEDTNKWKNIPCLWVGRINIVKMAILPKVIYRFNAIPIKLPMTFFTELEKTTLKFIWHQKRARIAKSILSQKNKAGGITLPDFKLYYKETVTKTAWYWYQNRDIDQWNRTEPSEVMPPIYNYLIFDKPETNKQWGKDSLFNKWCWENWLAICRKLKLDPFLTPYTKINSRWIKDLNVRLKTIKTLEGNLGITIQDIGMGKDFVSKTPKAMATKAKIDKWDLIKLKSFCTAKETTNRVNRQPTKLGKIFTTYSSDKGLISRIYNELQQIYKKKTNNLSKSGWRT

SEQ ID NO: 32656 - protein, 731 aa, Homo sapiens
  DOMAIN (231)..(276): kw TRANSCRIPTASE REVERSE II ORF2 domain identified by eMATRIX, accession number DM01354N, p-value=1.000e-40, raw score of 13.17
  DOMAIN (315)..(590): Reverse transcriptase domain identified by PFam, accession name rvt, E-value=1.1e-87, PFam score of 304.7
MGDFNTPLSTLDRSTRQKVNKDTQELNSALHQVDLIDIYRTLHPKSTEYTFFSAPHNTYSKIDHIVGSKALLSKCKRTEIITNYLSDHSAIKLELRIKNLTQSHSTTWKLNNLLLNDYWVHKEMKAEIKMFFETNKNKDTTYQNLWDAFKAVCRGKFIALNAHKTKQERSKIDTLTSQLKELEKQEQTHSKASRRQEITKIRAELKELETQKPFKKSMNPGAEIQTTIREYYKHLYANKLENLEEMDTFLDTYTLPRLNQEEVESLNRPITGAEIVAIINSLPTKKSPGPDGFTAEFYQRYKEELVPFLLKLFQSIEKEGILPNSFYEASIILIPKPGRDTTKKENFRPISLMNIDAKILNKILANRIQQHIKKLIHHDQVGFIPGMQGWFNIHKSINVIPHINRAKDKNHMIISIDAEKAFDKIQQPFMLKTLNKLGIDGTYFKIIRAIYDKPTANIILNGQKLEAFPLKTGTRQGCPLSPLLFNIVLEVLARAIRQEKEIKGIQLGKEEVKLSLFADDMIVYLENPIVSAQNLLKLISNFSKVSGYKINVQKSQAFLYTNNRQTESQIMSELPFTIASKRIKYLGIQLTRDVKDLFKENYKPLLKEIKEDTNKWKNIPCSWVGRINIVKMAILPKVIYRFNAIPIKLPMTFFTELEKTTLKFIWNQKRARIAKSILSQKNKAGGITLPDFKLYYKATVTKTAWYWYQNRDVDQWNRTEPSEITPIPTTI

SEQ ID NO: 32657 - protein, 765 aa, Homo sapiens
  DOMAIN (149)..(194): kw TRANSCRIPTASE REVERSE II ORF2 domain identified by eMATRIX, accession number DM01354N, p-value=1.000e-40, raw score of 13.17
  DOMAIN (233)..(492): Reverse transcriptase domain identified by PFam, accession name rvt, E-value=4.4e-15, PFam score of 63.5
MKAEIKMFFETSKNKDTTYQNLWDAFKAVCRGKFIALNAHKRKQERSKIDTVTSQLKELEKQEQTHSKASRRQEITKIREEMKEIETQKTLQKINESRSWFFERINKIDRPLARLIKKKREKNQIDAIKNDKGDITTDPTEIQITIREYYKHLYANKLENLEEMDKFLDTYTLPRLNQEEVESLNRPITGSEIVAIINSLPTKKSPGPDGFTAEFYQRYKEELVPFLLKLFQSIEKEGILPNSFYEASIILIPKLGRDTTKKENFRPISLMNIDAKILNKILANRIQQYIKKLIHHDQVGFIPGMQGWFNIRKSINVIQHINRTKDKNHMIISIDVEKAFDKIQQPFMLKTLNKLENKITRNPTYKGCEAPLQGELQTTAQGNKRGYKQMEEHSMLMGRKNQYRENGHTAQELEKTTLKFIWNQKRACITKSILSQMNKAGGITLPDFKLSYKATVTKTAWYWYQNRDIDQWNRTEPSEITPHIYNYLIFDKPEKNKQWGKDSLFNKWCWENWLAICRKLKLDPFLTPYTKINSRWIKDLNILPKTIKTLEENLGITIQDIDMGKDFMSKTPKAMATKAKIDKWDLIKLKSFCTAKETTIRVNRQPTKWEKIFTTYSSDKGLISRIYNELKQIYKKKTNNPIKKWAKDINRHFSKEDIYAAKKHMKKCSSSLAIREMQIKTTMRYHLTPVRMAIIKKSGNNRIKVVKLQIVLQMKPQMQSMTKIHRGPLDRPASPCSDASDIEGTPPEEISTARPLLCASSAGNS

SEQ ID NO: 32658 - protein, 959 aa, Homo sapiens
  DOMAIN (154)..(195): kw TRANSCRIPTASE REVERSE II ORF2 domain identified by eMATRIX, accession number DM01354I, p-value=1.000e-40, raw score of 15.55
  DOMAIN (317)..(592): Reverse transcriptase domain identified by PFam, accession name rvt, E-value=3.7e-86, PFam score of 299.6
MVKGSIQQEELTILNIYAPNTGAPRFIKQVLSDLQRDLDSHTLIMGDFNTPLSTLDRSMRQKVHKDTQELNSALHQADLIDIYRTLHPKSTEYTFFSAPHHTYSKIDHIVGSKALLSKCKRTEIITNYLSDHSAIKLELRIKNLTQSRSTTWKLNNLLLNDYWVHNEMKAEIKMFFETNENKDTTYQNLWDAFKATTSKTNKEKKKNQIDIIKNDKGDITTDPTEIQTTIREYYKHLYANKLENLEEMDTFLDTYTLPRLNQEEVESLNRPITGSEIVAIINSLPTKKSPGPDGFTAEFYQRYKEELVPFLLKLFQSIEKEGILPNSFYEASIILIPKPGRDTTKKENFRLISLTNIDAKIFNKILANRIQQHIKKLIHHDQVGFIPGMQAWFNIRKSINVIQHINRAKDKNHMIISIDAEKAFDKIQQPFMLKTLNKLGIDGTYFKIIRAIYDKPTANIILNGQKLEAFPLKTGTRQGCPLSPLLFNIVLEVLARAIRQEKEIKGIELGKEEVKLSLFADDMIVCLENPIVSAQNLLKLISNFSKVSGYKINVQKSQAFLYTNNRQTESQIMSELPFTIASKRIKYLGIQLTRDVKDLFKENYKPLLKEIKEDTNKWKNIPCSWVGRINIVKMAILPKVIYRFNAIPIKLPMTFFTELEKTTLKFIWNQKRARIAKSILSQKNKAGGITLPDFKLYYKATVTKTAWYWYQNRDIDQCNRTEPSEIMPHIYNYLIFDKPERNKQWGKDSLFNKWCWENWLAICRKLKLDPFLTPYTKINSRWIKDLNVRPKTIKTLEENLGITIQDIGVGKDFMSKTPKAMATKDKIDKWDLIKLKSFCTAKETTIRVNRQPTTWEKIFATYSSDKGLISRIYNELKQIYKKKTNNPIKKWAKDMNRHFSKEDIYAAKKHMKKCSSSLAIRERQIKTTMRYHLTPVRMAIIKKSGNNRDMDEIGNHHSQ

SEQ ID NO: 32659 - protein, 853 aa, Homo sapiens
  DOMAIN (262)..(287): 7 kw REVERSE TRANSCRIPTASE RNA POLYMERASE domain identified by eMATRIX, accession number DM00895E, p-value=3.333e-11, raw score of 15.72
  DOMAIN (233)..(456): Reverse transcriptase domain identified by PFam, accession name rvt, E-value=1.8e-51, PFam score of 184.4
MKAEIKTFFETNENKDTTYQNLWDAFKAVCRGKFIALNAHKRKQERSKIDTLTSQLKELEKQEQTHSKASRKQEITKIRAELKEIETQNTLQKINESRSWFFERINKIDRPLARLIKKKREKNQIDTIKNDKGDITTHPTEIQTTIREYYKHLYTNKLENLEEMDKFLDTYTLPRLNQEEVESLNRPITGAEILAIINSLPTKKSPGPDGFTAEFYQRYKEELVPFLLKLFQSIEKEGILPNSFYEASIILIPKPGRDTTKKENFRPISLMNIDAKILNKILANRIQQHIKKLIHHDQVGFIPGMQGWFNIRKSINVIQHINRAKDKNHMIISIDAGKAFDKIQQSFMLKALNKLDIDGTAIRQEKEIKGIQLGKEEVKLSLFADDMIVYLENPIVSAQNLLKLISNFSKVSGYKINVQKSQAFLYTNNRQTESQIMSELPFTIASKRIKYLGIQLTRDVKDLFKENYKPLLKEIKEDINKWKNIPCSWVGRINIVKMAILPKNWKKTTLKFIWNQKRARITKAILSQKNKAGGITLPDFKLYYKATVTKTAWYWYQNRDIDQWNRTEPSEIMPHICNYLIFDKPEKNKQWGKDSLFNKWCWENWLAICRKLKLDPFLTPYTKINSRWIKDLNIRPKTIKTLEENLGITIRDIGMGKDFMSKTPKALATKAKIDKWDLIKLKSFCTAKETTIRVNRQPTKWEKIFATYSSDKGLISRIYNELKQIYKKKTNNPIKKWVKDMNRHFSKEDIYAAKKHMKKCSSSLAIREMQIKTTLPTGRLIETFQSNEHQSEVKLLKQDKKKWVGSWNENIHQQLKAQTSKGIFPHPLPLCCVMISNGSQSVACKILWFSNTP

SEQ ID NO: 32660 - protein, 944 aa, Homo sapiens
  DOMAIN (81)..(122): kw TRANSCRIPTASE REVERSE II ORF2 domain identified by eMATRIX, accession number DM01354I, p-value=1.000e-40, raw score of 15.55
  DOMAIN (327)..(577): Reverse transcriptase domain identified by PFam, accession name rvt, E-value=3.3e-77, PFam score of 269.9
MHQADLIDIYRTLHPKSTEYTFFSAPHHTYSKIDHIVGSKALLSKCNRTEIITNCLSDHSAIKLELRIKNLTQSRSTTWKLNNLLLNDYWVHNEMKAEIKMFFETNENKDTTYQNLWDAFKAVCRGKFIALNAHKRKQERSKIDTLTSQLKELEKQEQTHSKASRRQEITKIRAELKEIETQKTLQKINESRSWFFERINKIDRPLARLIKKKREKNQIDTIKNDKGDITTNPTEIQTTIREYYKHLYANKLENLEEMDTFLDTYTLPRLNQEEVESLNRPITGAEIVAIINSLPTKKSPGPDGFTAEFYQRYKEELVPFLLKLFQSIEKEGILPNSFYEASIILTPKPGRDTTKKENFRPISLMNIDAKILNKILANRIQQHIKKLIPHDQSQRQKHMIISIDAEKAFDKIQQHFMLKTLNKLGIDGTYFKIIRAIYDKPTANIILNGQKLEAFPLKTGTRQGCPLSPLLFNIVLEVLARAIRREKEIKGIQLGKEEVKLSLFADDMIVYLENPIVSAQNLLKLISNFSKVSGYKINVQKSQAFLYTNNRQTESQIMSELPVTIASKRIKYLGIQLTRDVKDLFKENYKPLLKEIKEDTNKWKNIPCSWVGRINIVKMAILPKVIYRFNAIPIKLPMTFFTELEKTTLKFIWNQKRARIAKSILSQKNKTGGITLPDFKLYYKATVTKTAWYWYQNRDIDQWNRTEPSEITPHIYNYLIFDKREKNKQWGKDSLFNKWCWENWLAICRKLKLDPFLTPYTKINSRWIKDLNVRPKTIKTLEENLGITIQDIGVGKDFMSKTPKAMATKAKIDKWDLIKLKSFCTAKETTIRVNRQPTTWEKIFATYSSDKGLISRIYNELKQIYKKKTNNPIKKWAKDMNRQFSKEDIYAAKKHMKKCSSSLAIREMQIKTTMRYHLTPVRMAIIKKSGNNRDMDEIGNHHSQ

SEQ ID NO: 32661 - protein, 723 aa, Homo sapiens
  DOMAIN (317)..(363): kw TRANSCRIPTASE REVERSE II ORF2 domain identified by eMATRIX, accession number DM01354O, p-value=1.000e-40, raw score of 8.73
  DOMAIN (352)..(625): Reverse transcriptase domain identified by PFam, accession name rvt, E-value=3.8e-86, PFam score of 299.6
MEDEMNEMKQEEKFREKRIKRNEQTLQEIWDYVKRPNLHLIGVPESDGENGTKLENTLQDIIQENFPNLARQANVQIQEIQRMPQRYSSRRATPRHIIVRFTKVEMKEKMLRAAREKDRSMRQKVNKDTQELNSALHQADLIDIYRTLHPKSTEYTFFSAPHHTYTKIDHILGSKALLRKCKRTEIITNYLSDHSAIKLELRIKNLTQNRSTTWKLNNLLLNDYWVHNKMKAEIKMFFETNENKDTTYQNLWDAFKAKYKLPSRNTTNTSMQINSKIWKKWINSWTHNTLPRLNQEEVESLNRPITGAEIVAIINSLPTKKSPGPDGFTAEFYQRYKEELVPFLLKLFQSIEKQGILPNSFYEASTILIPKPGRDTTEKENFRPISLMNIDAKILNKILAKRIQQHIKKLIHHDQVGFIPGMQGWFNIHKSINVIQHINRAKDKNHMIISIDAEKAFDKIQQRFMLKTLNKLGIDGTYFKIIRAIYDKPTANIILNGQKLEAIPLKAGTRQGCPLSPLLFNIVLEVLARVIRQEKEIKGIQLGKEEVKLSLFADDMIVYLENPIVTAQNLLKLISNFSKVSGYKINVQKSQAFLYTNNRQTESQIMSELPFTIASKRIKYLGIQLTRDVKDLFKENYKPLLKEIKEDTNKWKNIPCSWVGRINIMKMAILPKVIYRFNAIPIKLPMTFFTELEKTKVHMEPKKCPHHQGNPKPKEQSWRHHTT

SEQ ID NO: 32662 - protein, 614 aa, Homo sapiens
  DOMAIN (52)..(95): kw TRANSCRIPTASE REVERSE II ORF2 domain identified by eMATRIX, accession number DM01354T, p-value=1.000e-40, raw score of 9.48
  DOMAIN (3)..(174): Reverse transcriptase domain identified by PFam, accession name rvt, E-value=7.2e-09, PFam score of 42.9
  misc_feature (1)...(614): Xaa = X or * as defined in Table 2
XAEKAFDKIQQPFKLKTLNKLGIDGMYRKIIRAIYDKPTANIILNGQKLEAFPLKTGTRQGCPLSPLLFNIVLEVLASAIRQEKEIKGIQLGNEEVKLSLFADDMTVYLENPIVSAQNVLKVISNFSKVSGYKINVQKSQAFLYTNNRQTESQIMSELPFTIASKRIKYLGIQLTRNVKDLFQENYKPLLKEIKEDTNKWKNIPCSWVGRINIVKMAILPKVIYRFNAIPIKLPMTFFTELEKTTLKFIWNQKRARIAKSILSQKNKAGGITLPDFKLCYKATVTKTAWYWYQNRDIDQWNRTEPSEITPHIYNYLIFDKPDKNKKWGNDSLFNKWCWENWLAICRKLKLDPFLTPYTKINSRWIKDLNVRPKTIKTLEENLGITIQDIGTGKDFMSKTPKAMATKAKIDKWDLIKLKSFCTAKETTIRVNRQPTKWEKIFTTYSSDKGLISRIYNELQQIYKKKTNNPIKKWAKDMKRHFSKEDIYAAKKHMKKCSPSLAIREMQIKTTMRYHLTPVRMVIIKKSGNEKVGDEKASVPGLLLSHPWYETTAVLPLDTKGKCYQWNLMVRRKDNANLASLLKRYPQGTQLYGHLKDALKQNMSTPIRTPFHVHK

SEQ ID NO: 32663 - protein, 902 aa, Homo sapiens
  DOMAIN (246)..(291): kw TRANSCRIPTASE REVERSE II ORF2 domain identified by eMATRIX, accession number DM01354N, p-value=1.000e-40, raw score of 13.17
  DOMAIN (330)..(605): Reverse transcriptase domain identified by PFam, accession name rvt, E-value=5.1e-89, PFam score of 309.1
MGKKQNRKTGNSKKQSASPPPKECSSSPATEQSWTENDFDELREEGFRRSNYSELWEDIQTKGKEVENFEKNLEECITRITNTEKCLKELMELKTKARELREECRSLRSRCDQLEERVSAMEDEMNEMKREGKFREKRIKRNEQSLQEIWDYVKRPNLRLIGVPESDVENGTKLENTLQDIIQENFPNLARQANVQIQEIQRTPQRYSSRRATPRHIIVRFTKVEMKEKMLRAAREKEIQTTIREYYKHLYANKLENLEEMDTFLDTYTLPRLNQEEVESLNRPITGSEIVAIINSLPTKKSPGPDGFTAEFYQRYKEELVPFLLKLFQSIEKEGILPNSFYEASIILIPKPGRDTTKKENFRPISLMNIDAKILNKILANRIQQHIKKLIHHDQVGFIPGMQGWFNIRKSINVIQHINRAKDKNHMIISIDAEKAFDKIQQPFMLKTLNKLGIDGTYFKIIRAIYDKPTANIILNGQKLEAFPLKTGTRQGCPLSPLLFNIVLEVLARAIRQEKEIKGIQLGKEEVKLSLFADDMIVYLENPIVSAQNLLKLISNFSKVSGYKINVQKSQAFLYTNNRQTESQIMGELPFTIASKRIKYLGIQLIRDVKDLFKENYKPLLKEIKEDTNKWKNIPCSWVGRINIVKMAILPKVIYRFNAIPIKLPMTFFTELEKTTLKFIWNQKRACIAKSILSQKNKAGGITLPDFKLYDKATVTKTARYWYQNRDIDQWNRTEPSEITPHIYNYLIFDKPEKNKQWGKDSLFNKWCWENWLAICRKLKLDPFLTPYTKINSRWIKDLNVRPKTIKTLEENLGITIQDIGMGKDFMSKTPKAMATKAKIDKWDLIKLKSFCTAKETTIRVNRKLLEDVLQQHEGERARHGFQKAGTSTHEDNEGKSRLTAM

SEQ ID NO: 32664 - protein, 825 aa, Homo sapiens
  DOMAIN (149)..(194): kw TRANSCRIPTASE REVERSE II ORF2 domain identified by eMATRIX, accession number DM01354N, p-value=1.000e-40, raw score of 13.17
  DOMAIN (233)..(458): Reverse transcriptase domain identified by PFam, accession name rvt, E-value=4.8e-51, PFam score of 183.0
MKAEIKMFFETNENKDTAYQNLWDAFKAVCRGKCIALNAHKRKQERSKIDTLTSQLKVLEKQEQTHSKASRRQEITKIRAELKEIETQKTLQKINESRSCFFESINKIDRPLARLIKKKREKNQIDTIKNDKGDITTDPTDIQTTIREYYKHLYANKLENLEEMDKFLDTYTLPRLNQEEVESLNRPITGAEIVAIINSLPTKKSPGPDGFTAEFYQRYKEELVPFLLKLFQSIEKEGILPNSFYEASIILIPKPGRDTTKKENFRPISLMNIDAKILNKILANRIQQHIKKLIHHDQVGFISGMQGWFNIRKSINVIQHINRAKDKNHMIISIDAEKAFDKIQQPFMLKTLNKLVLEVLARAIRQEKEIKGIQLGKEEVKLSLFADDMIVYLEKPIVSAQNLLKLISNFSIVSGYKINVQKSQAFLYTNNRQTESQIMSELPFTIASKRIKYLGIQLTRDVKDLFKENYKPLLKEIKEDTNKWKNIPCSWVGRINVMKMAILPKVIYRFNAIPIKLPMTFFTELEKTTLKFIWNQKRARIAKSILSQKNKAGGITLPDFKLYYKSTVTKTAWYWYQNRDIDQWNRTEPSEITPHTYNYLIFDKPEKNKQWGKDSLFNKWCWENWLAICRKLKLDPFLTPYRKINSRWIKDLNVRPKTIKTLEENLGITIQDIGVGKDFMSKTPKAMATKAKIDKWDLIKLKSFCTAKETTIRVNRQPTKWENIFATYSSDKGLISRIYNELKQIYKKKTNNPIKKWVKDMNRHFSKEDIYAAKKYMKKCSSSLAIREMQIKTTMRYHLTPVRMAIIKKSGNNRCWRGCGEIGTL

SEQ ID NO: 32665 - protein, 915 aa, Homo sapiens
  DOMAIN (272)..(317): kw TRANSCRIPTASE REVERSE II ORF2 domain identified by eMATRIX, accession number DM01354N, p-value=1.000e-40, raw score of 13.17
  DOMAIN (356)..(757): Reverse transcriptase domain identified by PFam, accession name rvt, E-value=2.2e-13, PFam score of 57.9
MGDFNTPLSTLDRSTRQKVNKDTQELNSALHQADLIDIYRTLHPKSTEYTFFSAPHHTYSKIDHIVGSKALLSKCKRTEIITNYLSDHSAIKLELRIKNLTQSHSTTWKLNNLLLNDYWVHNEMKSEIKMFFETNENKDTTYQNLWDAFKAVCRGKFIALNAHKRKQERSKIDTLTSQLKELEKQEQTHSKASRRQEITKIRAELKEIETQKTLQKINESRSWFFERINKIDRPLARLIKKKREKNQIDTIKNDKGDITTDPTEIQTTIREYYKHLYANKLENLEEMDKFLDTYTLPRLNQEEVESLNRPITGAEIVAIINSLPTKKSPGPDGFTAEFYQRYKEELVPFLLKLFQSIEKEGILPNSFYEASIILIPKPGRDTTKKENFRPISLMNTDAKILNKILANRIQQHIKKLIHHDQVGFIPGMQGWFNIRKSINVIQHINRTKDKNHMIISIDAEKAFDKIQQPFMLKTLNKLELEKTTLNFIWNQKRARIAKSILSQKNKAGGITLPDFKLYYKATVTKTAWYWYQNRDIDQWNRTEPSEITPHTYNCLIFDKPEKNKKWGKDSLFNKWCWENWLAICRKLKLDPFLTPYTKINSRWIKDLNVRPKTIKTLEENLGITIQDIGMGKDFMSKTPKAMATKDKIDKWDLIKLKSFCTAKETTIRVNRQPTTWEKIFATYSSDKGLISRIYNELNQIYKKKTNNPIKKWAKDMNRHFSKEDIYAAKKHMKKCSSSLAIREMQIKTTMRYHLTPVRMAIIKKSGNNRCWRGCGEIRTLLHCWWDCKLVQPLWKSVWRFLRDLELEIPFDPAIPLLGIYPNDYKSCCYKDTCTRMFIAALFTIAKTWNQPKCPTMIDWIKKMWHIYTMEYYAAIKNDEFMSFVGTWMKLEIIILSKLSQEQKTKHRIFSLIGGN

SEQ ID NO: 32666 - protein, 784 aa, Homo sapiens
  DOMAIN (375)..(421): kw TRANSCRIPTASE REVERSE II ORF2 domain identified by eMATRIX, accession number DM01354O, p-value=1.000e-40, raw score of 8.73
  DOMAIN (408)..(683): Reverse transcriptase domain identified by PFam, accession name rvt, E-value=7.3e-82, PFam score of 285.4
MGKKQNRKTGNSKTQSTSPPPKERSSSPATDQSWMENDFDELREEGFRRSNYSELREDIQTKGKEVENFEKNLEECITRITNTEKCLKELMELKTKARELREECRSLRSQCDQLEERVSAMEDEMNEMKQEGKFREKRIKRNEQSLQEIWDYVKRPNLRLIGVPESDAENGTKLENTLQDIIQETFPNLARQANVQIQEIQRTPQRYSSRRATPRHIIVRFTKVEMKEKMLRAAREKGRVTLKGKPIRLTADLSAETLQARREWGPILNILKEKNFQPRISYPAKLSFISEGEIKYFTDKQMLTDFVTSRPALKELLKEALNMERNNRYQPLQNHAKMMDTFLDTYTLPRLNQEEVESLNRPITGAEIVAIINSLSTKKSPGPDGFTAEFYQRYKEELVPFFLKLFQSIEKEGILPNSFYEASIILIPKPGRDTTKKENFRPISLMNIDAKILNKILANQIQQHIKKLIHHDQVGFIPGMQGWFNIRKSINVIQHINRAKDKNHMIVSIDAEKAFDKIQQPFMLKTINKIGIDGMYFKIIRAIYDKTTANIILNGQKLEAFPLKTGTRQGCPLSPLLFNIVLEFLARAIRQEKEIKGIQLGKEEVKLSLFADDMIVDLENPIVSAQNLLKLISNFSKVSGYKINVQKSQAFLYTNNRQTESQIMSELPFTIASKRIKYLGIQLTRDVKDLFKENYKPLLNEIKEDTNKWKNIPCSWVGRINIMKMAILPKVIYRFNAIPIKLPMTFFTELEKTTLKFSYGNQKKSPHRQVNPKPKEQSWRHHTT

SEQ ID NO: 32667 - protein, 494 aa, Homo sapiens
  misc_feature (1)...(494): Xaa = X or * as defined in Table 2
MASMAAAIAASRSAVMSRNRPLHDRERKRFTYFSSLSPMARKIMQDKEKIREKYGPEWARLPPAQQDEIIDRCLVGPRAPAPRDPGDSEELTRFPGLRGPTGQKVVRFGDEPPNPILWRIWSCCWKNASQPAKGEEPVEPHVLDSCPGHASSKVPPLLRGSLPLCEVWWQNQWLTEFLSNSLVWLGAGPDTGAVHFGSSILDLKAYKIFIGEPQTGGGFSEAPLKQPRNHCDWRFPPASLALPTAALHSQMEFSISALSIQEPSNGTAASEPRPLSKASQGSQALKSSQGSRSSSLDALGPTRKEEEASFWKINAERSRGEGPEAKVPVADPMGSFWWVIEGDVISHDISMLGCDPGKTGPQRRSQPALAAVRGFSGQKPCLSHQCAQPPPSTPFPGEQTAGLARLRHDGPSPALTTTRSGRVEFAVNSAVPMETCVVSEQQHLLELVQTPRLPSGTTWSTSPREAAALRGCPAQWPLSRVSLQEASEQSLKPX

SEQ ID NO: 32668 - protein, 198 aa, Homo sapiens
MTNTVHKTLGTEPYKYSTHEYPVLPTTVITSIMVILSVIHFKDVIDYGLSNAPMNKISFGPNKPCEIDRASLLTLLYRAPSRRPCKAKVKCVLIGRDEETEAKGFCYLPGFTAHLEILNWHLPLSAITPDPTLFPLHQWFSIKGDFAFQGTFDNVWRRFWLSQFCVAVIHGLRIFEKLGSKQQNGFGCHNSLKLFCCG

SEQ ID NO: 32669 - protein, 44 aa, Homo sapiens
  misc_feature (1)...(44): Xaa = X or * as defined in Table 2
MWGSLSXXXXXXXXXXXXXXXXXXXXXXXXXXXXXXXXXXXXXX

SEQ ID NO: 32670 - protein, 123 aa, Homo sapiens [sequence omitted]

SEQ ID NO: 32671 - protein, 48 aa, Homo sapiens
MAEMYDNIRTLKAPTSSGRGKHFDMSGEEGAYGTRMEDKPREAGNAKS

SEQ ID NO: 32672 - protein, 173 aa, Homo sapiens
MFRIHAEFQLSEPPDFPFWFSPAQFTGHIILSKDATHVRDFRLFVPNHRSLNVDMEWLYGASESSNMEVDIGYIPQMELEATGPSVPSVILDEDGSMIDSHLPSGEPLQFVFEEIKWQQELSWEEAARRLEVAMYPFKKVSYLPFTEAFDRAKAENKLVHSILLWGALDDQSC

SEQ ID NO: 32673 - protein, 78 aa, Homo sapiens
  DOMAIN (38)..(55): GLYCOSYL HYDROLASE FAMILY 47 SIGNATURE domain identified by eMATRIX, accession number PR00747F, p-value=1.000e-15, raw score of 13.56
MTKSKDGFLGAIETYLLNVSPGGLTYIAEWRGGILDHKMGHLACFSGGMIALGAEDAKEEKRAHYRELAAQITKGILL

SEQ ID NO: 32674 - protein, 365 aa, Homo sapiens
  DOMAIN (10)..(25): WILM'S TUMOUR PROTEIN SIGNATURE domain identified by eMATRIX, accession number PR00049D, p-value=9.929e-10, raw score of 0.00
  misc_feature (1)...(365): Xaa = X or * as defined in Table 2
MGRARPGQRGPPSPGPAAQPPAPPRRRARSLALLGALLAAAAAAAVRGKEVIIHRLLSMFHPRPFVKTRFAPQGAVACLTAISDFYYTVMFRIHAEFQLSEPPDFPFWFSPAQFTGHIILSKDATHVRDFRLFVPNHRSLNVDMEWLYGASESTNMEVDIGYIPQVSAQEAPIQMELEATGPSVPSVILDEDGSMIDSHLPSGEPLQFVFEEIKWQQELSWEEAARRLEVAMYPFKKGSYLPFTEAFDRAKAENKLVHSILLSPILTLLNESFISTWSLVKELEELQNKQENSSHQKLAGLHLEKYSFPVEMMICLPNGTVVHHINANYFLDHHLREARGNREQFSSASHPPLKTRPRPPTCSSX

SEQ ID NO: 32675 - protein, 116 aa, Homo sapiens
  misc_feature (1)...(116): Xaa = X or * as defined in Table 2
XEMPRHLQTGPEKHGNGQSLSPEPVPVKLTACFCVGIQESERLELMNAELKTQIEELKQERQQLILMLNRHRPTCIVRTDSVKTPESEGNPLLEQLREEVTMGWETSEEEEEEKEK

SEQ ID NO: 32676 - protein, 925 aa, Homo sapiens
  DOMAIN (110)..(151): kw TRANSCRIPTASE REVERSE II ORF2 domain identified by eMATRIX, accession number DM01354I, p-value=1.000e-40, raw score of 15.55
  DOMAIN (242)..(423): Reverse transcriptase domain identified by PFam, accession name rvt, E-value=6.5e-26, PFam score of 99.5
MGDFNTPLSTVDRSMRQKVDKDTQELNSALHQADLIDIYRTLHPKSTEYTFFSAPHHTYSKIDNIIGSKALLSKCKGTEIITNSLSDHSAIKLELRIKKLTQNHSTTEKLNNLLLNDYWVHNEMKAEIKMFSETNENKDTTYQNLWDTFKAVCRGKFIALNAHKRKQERSKIDTLTSQLKELEKLNQEEVESLNRPITGAEIVAIINSLPTKKSPGPDGFTAKFYWRYKEELVPFLLKLFQSIEKEGILPNSCYEASIILIPKPGRDTTKKENFRPISLMNIDAKILNKILANRIQQHIKKLIHHDQVGFIPGMQGWFNICKSINVIQHINRTKDKNHMIISIDAEKAFDKIQQPFMLKTLNKLAQNLLKLISNFSKVSGYKINVQKSQAFLYTNNRQTESQIMSELPFTTALKRIKYLGIQLTRDVKDLFKENYKPLLKEIKEDTNKWKNIPCSWVGRINILKMATLPKVIYRFNAIPIKLLMTFFTELEKTTLKFIWNQKRARIAKSILNQKNKAGGITLPDFKLYYKATVTKTAWYWHQNRDRDQWNRTEPSETMLHIYNYLIFDKPDKNKQWGTDSLFNKWCWENWLAIWRKLKLDPFLTPYTKINSRWIKDLHIRAKTIKTLEENLGNTIQYIGMGKDFMSETPKAMATKAKIDEWDLIKLKSFCTAKETTIRVNRQPTKWEKIFATYSSDKGLISRIYNELKQIYKKKTNNPIKKWAKDMNRHFSKEDIYAAKKHMKKCSSSLAIREMQIKTTMRYHLTPVRMAIIKKSGNNRCWRGCGEIGTLLHCWWDCKLVQPLWKSVWRFLRDLELEIPFDPAIPLLGIYPKDYKSCCYKDTCTRMFIAALFTIAKTWNQAKCPTMIDRIKKMWHIYTMEYYAAIKNDEFMSFVGTWMKLEIIILSKLSQEQKTKHRIFSLLGGN

SEQ ID NO: 32677 - protein, 631 aa, Homo sapiens
  DOMAIN (231)..(271): kw TRANSCRIPTASE REVERSE II ORF2 domain identified by eMATRIX, accession number DM01354Y, p-value=3.475e-40, raw score of 10.69
MGKDFMSKTPKAMATKAKIDKWDLIKLKSFCMAKETTVRVNRQPTEWEKICAIYPSDKGLISRIYEELKQIYKKKANNPIKKDIDEAGNHHSQKTITRTENKTPHVLTHRWELNNEITWTQGRERHTLGPVRGWGAGGGITLGEIPNLREVKEQSCQPTLKPCLRWLSLSTADAWIFINPFLVGDYLFLDHPTKLEKTTLKFIWNQKRARIAKSILSQKNKAGGITLPDFKLYYKATVTKTAWYWYQNRDIDQWNRSEPSEITPHIYDCLIFDKPEKNKQWGKDSLFNKWCWENWLAICRKLKLDPFLTPYTKINSRWIKDLNVRPKTIKTLEENLGITIQDIGMGKDFMSKTPKAMAAKAKIDKWDLIKLKSFCTAKETTIRVNRQPTKWEKIFATYSSDKELISRIYNELKQIYKKKTNNLIKKWAKDMNRHFSKEDIYAAKKHVKKCSPSLAIREMQIKTTMRYHLTPVRMAIIKKSGNNRCWRGCGEIGTFYTVACHKGLCSPFGVSSAQSQDCSRARVKNRSPQTGTGQWPVRNKATQQEPDPNHLALTQQRWRRKRHISFVQGIRSGPNRRGCKVVSYELPPAFRKYMLQCPAGSLQNLDLTKGEGDQLAKEAGSTLKAPRERSR

SEQ ID NO: 32678 - protein, 611 aa, Homo sapiens
  DOMAIN (37)..(83): kw TRANSCRIPTASE REVERSE II ORF2 domain identified by eMATRIX, accession number DM01354O, p-value=1.000e-40, raw score of 8.73
  DOMAIN (70)..(295): Reverse transcriptase domain identified by PFam, accession name rvt, E-value=2e-46, PFam score of 167.7
MDKFLDTYTLPRLNQEEVESLNRPITGSEIEAIINSLPTRKSPGPDGFKVESYQRYKEELVPFLLKLFQSIEKEGILPNSFYEASIILIPKPGRDTIKKENFRRISLMNINVKILNKILANRIQQHIKKLIHHDQVSFIPGKQGWFNIHKSINVIHHINRTNDKDHMIISIDAKKAFNKIQQPFMLKTLNKLVLGVLARAIRQEKEIKRIQSGKEEVKLSLFADDMIVCLENPIVSAQNLLKLISNFSKVSEYKINVQKSQVFLYANKRQTESQIMSELPFTIATKRIKYLGIQLTRDVKDLFFKENYKPLFNEITEDTNKWKNIPCSWIGRINIMKMAILPKVIYRFNAIPIKLPMTFFTELEKTTLKFIWNRKRAHIAKTILSKKNKSRGITLPDFKLYYNANQNSMTKINSRWIKDLNVRPKTIKTLEENLGNTIQELGVGKDFMTKTPKAMATKAKIDKWDLIKRKSFCTAKETTIRVNRQPTEWEKIFAIYPSDKGLISRIYKELKQIYKKKTSNPIKKWAKDMNRHCSKEDIYVANGHMKKCSSSLVVREMQIQTTMRYHLTPVRMAIIKKSGNNRCWRGCGEIGTLLHCWWECKLVQPLWKTVW

SEQ ID NO: 32679 - protein, 820 aa, Homo sapiens
  DOMAIN (436)..(483): kw TRANSCRIPTASE REVERSE II ORF2 domain identified by eMATRIX, accession number DM01354V, p-value=1.000e-40, raw score of 12.97
  DOMAIN (160)..(449): Reverse transcriptase domain identified by PFam, accession name rvt, E-value=1.6e-05, PFam score of 8.7
MGDFNIPLSTSDRSTRQKVNKDTQELNSALHQADLIDIYRTLHPKSTEYTFFSAPHHTYSKIDHIVGSKALLSKCRRTEIITNCLSDHSAIKLEIRIKKLTQNCSTTWKLNNLLLNDYWVNNEMKAEIKMFFEINEDKDTTYQNRWDTFKAVCRGKFIALNAHKRKQERSKIDTLTSQLKELEKQEQTHSKASRRQEITEIRAELKEIETQKTLQKMNESRSWFFEKINNIDRLLARLIKKKREKNQIDAIKNHKGDITTNPTEIQTTIREYDKHLYANKLENLEETDKFLDTYILPRLNQEQVESLNRPITGAEIEAIINSLRTKKSPGTRWIHSRILPEVQRGAVLEVLARAIRQEKEIKGIQLGKEEVKLSLFADDMTVYLENPTVSAQNLLKLISNFSKVSGYKINVQNPQAFLYTNNRQTESQIMSELPFTIASKRIKYLGIQLTRDMKELFKENYKPLLSEIKEDINKWKNIPCSWVGRINIVKMAILPKVIYRFNAIPIKLPMTFFTELEKTTFKFIWNQKRARIAKSILSQKNKAGGITLADFKLYYKATVTKTAWYWYQDRHIDQWNRTESSEIMPHIYNYLIFDKPDKNKKWGKDSLFNKWCWENWLAICRKLKLDPFLTPYTKINSRWIKDLNVRPKTIKTLEENLGITIQDTGMGKDFMSETPKAMATKDKIDKWDLIKLKSFCTAKETTIRVNRQPTEREKSFASYSSDKGLISRIYNELQQIYKKKTNNPINKWAKDMNRHFSKEDIYAAKRHTKKCSSSLAIRGIQIKTTRRYHLKPVRMAIIKKSGNNRCWRGCGEIGTLLHCW

SEQ ID NO: 32680 - protein, 500 aa, Homo sapiens
  DOMAIN (10)..(65): kw TRANSCRIPTASE REVERSE II ORF2 domain identified by eMATRIX, accession number DM01354Q, p-value=1.000e-40, raw score of 9.23
  DOMAIN (1)..(144): Reverse transcriptase domain identified by PFam, accession name rvt, E-value=0.001, PFam score of -16.9
MNIDAKILNKILANRIQQHIKKLIHHDQVGFIPGMQGWFNICKSINVIQHINRTKDKNHMIISIDAEKAFDKIQQPFMLKTLNKLAQNLLKLISNFSKVSGYKINVQKSQAFLYTNNRQTESQIMSELPFTTALKRIKYLGIQLTRDVKDLFKENYKPLLKEIKEDTNKWKNIPCSWVGRINILKMATLPKVIYRFNAIPIKLLMTFFTELEKTTLKFIWNQKRARIAKSILNQKNKAGGITLPDFKLYYKATVTKTAWYWHQNRDRDQWNRTEPSETMLHIYNYLIFDKPDKNKQWGTDSLFNKWCWENWLAIWRKLKLDPFLTPYTKINSRWIKDLHIRAKTIKTLEENLGNTIQYIGMGKDFMSETPKAMATKAKIDEWDLIKLKSFCTAKETTIRVNRQPTKWEKIFATYSSDKGLISRIYNELKQIYKKKTNNPIKKWAKDMNRHFSKEDIYAAKKHMKKCSSSLAIREMQIKTTMRYHLTPVRMAIIKKSGNNS

SEQ ID NO: 32681 - protein, 954 aa, Homo sapiens
  DOMAIN (149)..(194): kw TRANSCRIPTASE REVERSE II ORF2 domain identified by eMATRIX, accession number DM01354N, p-value=1.000e-40, raw score of 13.17
  DOMAIN (198)..(472): Reverse transcriptase domain identified by PFam, accession name rvt, E-value=1.2e-65, PFam score of 231.5
  misc_feature (1)...(954): Xaa = X or * as defined in Table 2
MKAEIKVFFETNENKDTTYQNLWDTFKAVCRGKFIALNAHKRKQERSKIDTLTSQLKELEKQEQTHSKASRRQEITKIRAELKEIQTQKTLQKINESRSWFFERINKIDRSLARLIKKKREKNQIDTIKNDKGDITTDPTEIQTTIREYYKHLYANKLENLEEMDKFLDTYTLPRLNQEEVESLNRPITGAEIVAIINSLPTKKSPGPDGFTAEFYQSWAETQPKKENFRPISLMNIDAKILNKILAKRIQQHIKKLIHHDQVGFIPGMQGWFNIRKSINVTQHINRAKDKNHMIISIDAEKAFDKIQQPFMLKTLNKLGIDGTYFKIIRAIYDNPTANIILNGQKLEAFPLKTGTRQGCPLSPLLFNIVLEVLARAIRQEKEIKGIQLGKEEVKLSLFADNMIVYLENPIVSAQNLLKLISNFSKVSGYKINVQKSQAFLYTNNRQTESQIMSQLPFTIASKRIKYLGIQLTRDVKDLFKENYKPLLKEIKEDTNKWKNIPCSGGRKNQYRENGHTAQELEKTTLKFIWNQKRAHIAKSILNQKNKAGGITLPDFKLYYKATVTKTAWYWYQNRDIDQWNRTEPSEITQHIYSYLIFDKPEKNKQWGKDSLFNKWCWENWLAICRKLKLDPFLTPYTKINSRWIKDLNVRPKTIKTLEENLGITIQDIGMGKDFMSKTPKAMATKDKIDKWDLVKLKSFCTAKETTIRVNRQPTKWEKIFATYSSDKGLISRIYNELKQIYKKKTNNPIKKWAKDMNRHFSKEDIYAAKKHMKKCSSSLAIREMQIKTTMRYHLTPVRMAIIKKSGNNRCWRGCGETGTLLHCWWDCKLAQPLWKSVWRFLRDLELEIPFDPAIPLLGIYPNDYKSCCYKDTCTRMFIAALFTIAKTWNQPKCPTIIDWIKKMWHIYTMEYYAAIKNDEFVSFVGTWMKLEIIILSKLSQEQKTTHRIFSLIX

SEQ ID NO: 32682 - protein, 426 aa, Homo sapiens
MGKDFMSKTPKAMATKAKIDKWDLIKLKSFFCTAKETTIRVNRQPTEWEKIFATYSSDKGLISRIYKELKQIYKKKTNNPIKKWVKDMNRHFSKEDIYVAKMLIIMKKCSSSLAIREMQIKTIMRYHLTPVRMAIIKKSGNNRCWRGCGEIGTLLHCWWDYKLVQPLWKTVWRFLRDLEPEIPLDPAIPSLGVYPKDYKSCCYKDTCTCRWDHVMGPCQWSVSRSDTHHFQAEVVKEQVSLLALFFSCYCLHADELTDLGNSVLEMVKPEDGTSLVLQTLLGEQPLPFRNTYFGVHMSKKIPYFPCGKVIMVDQTTQPRTHLQRSTSKAAIARAEDRCRWMSQDSLLLTPHLATTHFNSREDWPFRRDRKISVRGIPQLQITIVGVQITTVGVQQADTGLYMLMREALSSSNMKMGQRGAESPEIF

SEQ ID NO: 32683 - protein, 391 aa, Homo sapiens
MGLVPNRDTDQWNRTEPSEIIPHIYNHLIFDKPDKNKKWGKDSLFNKWCWENWLAICRKLKLDPFLTPCTKINSRWIKDLHVTPKTIKTLEENLGNTIQDIGMDKDFMTKTPKALATKAKIDKWDLIKLKSFCTAKETTIRVNRQPTEWEKIFTIYSSDKGLISRIYKELKQIYKKKANNPIKKWAKDMIRHFSKEDIYADNGHMKKCSSSLVIRGMQIKTTMRYHLTPVRMAIIKKSGNNRCWRGCGEIGTLLHCWWECKLVQPLWKTVWQFLKDIELEIPFHPAIPLQECLPVEVGVLYLLLLHHEFIQLWIKNIQKKNFTKPNKNLLCTEYVQMAQVTFRSEDYPGEHDLITWVLQSREPSLADGKRGSHGNVKNKGDSMHNCWLEDG

SEQ ID NO: 32684 - protein, 476 aa, Homo sapiens
  DOMAIN (201)..(250): kw TRANSCRIPTASE REVERSE II ORF2 domain identified by eMATRIX, accession number DM01354Z, p-value=1.000e-40, raw score of 9.06
MGKDFMTKTPKAMATKAKIDKWDLIKLKSFCTAKETTIRVNSQPKEWEKIFVTYPSDKGLISRIHKECKQIYKKKTNNPIKKWAKDINKHFSKEDIYAANRHMKKCSSSLVIREMQIKTIMRYHLTPVRMAIIKKSGNNRCWRGCGETGMLLHCGWECKLVQPLWKTVWQFLKDLELEIPFDSAIPLLGIYPKDYKSCCYKDTCTRMLIVAVFTIAKTWNQPKGPSMIDWIKKMWHVYTMEYYAAIKKDEFMSFVGTWMKLETIMLSKLSQGQKTKHRMFSLTAAQKKFYLRVHQANGSFCAHILLEVGCGCPIKPQDCVMIIYKPQRNRKEVMSTGNMQKKRKTRGGGGGKGIMLPHLYPIMIHRAKWQYLCGAQVKLLGRDDHLSASHSIVRNNVLNPVKIKQAILKNLKASWASSLSLQLFKQCLEDLEKFLYPTLTYLMKEGTEDFKEPSKSCDPMRTSFNLTRSSKFGAHH

SEQ ID NO: 32685 - protein, 786 aa, Homo sapiens
  DOMAIN (37)..(83): kw TRANSCRIPTASE REVERSE II ORF2 domain identified by eMATRIX, accession number DM01354O, p-value=1.000e-40, raw score of 8.73
  DOMAIN (70)..(244): Reverse transcriptase domain identified by PFam, accession name rvt, E-value=2.2e-15, PFam score of 64.5
MDKFLDTYTLPRLNQEEVESLNRPITGAEIVAIINSLPTKKSPGPDGFTAEFYQRYKEELVPFLLKLFQSIEKEGILPNSFYEASIILIPKPGRDTTKKENFRPISLMNIDAKILNKILAKRIQQHIKKLIHHDQVGFIPGMQGWFNIRKSINVIQHINRAKDKNHMIISIDAEKAFDKIQQPFMLKTLNKLADKQLQQSFRIQNQCTKITSILIHQQQTNSQIVSELPFTIASKRIKYLGIQLTRDVKDLFEENYKPLLKEIKEDTNKWKNIPCSWVGRIKIVKMAILPKVIYRFNAIPIKLPMTFFTELEKTTLKFIWNQKRARIAKSILRQKNEAGGITLPDFKLYYKATVTKTAWYWYQNRDIDQWNRTEPSEITPHIYNYLIFDKPEKNKQWGKDSLFNKWCWENWLAICRKLKLDPFLTPYTKINSRWIKGLNVRPKTIKTLEENLGITIQDIGMGKDFMSKTPKEMATKDKIDKRDLIKLKSFCTAKETTIRVNRQPTKWEKIFATYSSDKGLISRIYNELKEIDKKKTNNPIKKWAKDMNRHFSKEDIYAAKKHMKKCSSSLAIREMQIKTTMRYHLTPVRMAIIKKSGNNRCWRGCGERGTLLHCWWDCKLVQPLWKSVWRFLRDLELEIPFDPAIPLLGIYTKDYKSCCYKDTCTPISDYMKALEQWKQVHALLRPSCSAAPAYPPALSTVPRAGAQLLNRQRGLESRAFRSASYLQFQSPTCQPVKHIHSPTKPKCFQFSLCPTVSKLDAFVHAVSDIWNHPPPGCAPAEFILKN

SEQ ID NO: 32686 - protein, 407 aa, Homo sapiens
  DOMAIN (56)..(103): HMG1/2 proteins domain identified by eMATRIX, accession number BL00353C, p-value=7.254e-09, raw score of 14.83
MGKDFMSKTPKAMAAKAKIDKWDLIKLKSFCTAKETTIRVNRQPTKWEKIFATYSSDKELISRIYNELKQIYKKKTNNLIKKWAKDMNRHFSKEDIYAAKKHVKKCSPSLAIREMQIKTTMRYHLTPVRMAIIKKSGNNRCWRGCGEIGTLLHCWWDCKLVQPLWKSVWRFLRDLELEIPSDPAIPLLVIYPKDYKPCCYKDTCTRSFEEAIPARKLKNFYPGVAEHKDISKLVLLLSSSVNSLRKAAHEALQDFQKYKTLWTEDRDVKVKEFLANNPSLTEIRSEILHYATFEQEIDELKPIIVVGALELHTEPMKLALSIEAKAWKMLLCRYLNEEYKKKMSYMIAFINEYLKKLSRPIRDLDDVRFAMEALSCIRDNEIQMDMTLGPIEMLSYDLSETAGKLMA

SEQ ID NO: 32687 - protein, 922 aa, Homo sapiens
  DOMAIN (402)..(449): kw TRANSCRIPTASE REVERSE II ORF2 domain identified by eMATRIX, accession number DM01354V, p-value=1.000e-40, raw score of 12.97
  DOMAIN (82)..(415): Reverse transcriptase domain identified by PFam, accession name rvt, E-value=0.00019, PFam score of -6.5
  misc_feature (1)...(922): Xaa = X or * as defined in Table 2
MKKQHALTLHTKQEHQGVFVCTHMHVSEHMSVYWRLEPAVPGSQEPVMHIFFQLHVQQLHVGSLKLTVMRVFMGLTFFFRKYLEGKAESKMLECREKRSEQPTHWQARLQEESPQDLGEVDPHLQAQEQDRCYPCLMGFSDGILKNGLLLCSNVLQKKKKNKQSCWYFRLDEEGKWALYAGLPEVFKDNRKGENSWMLISRWYYAYNRCSVDAVGGRCNNKSRTSSLAFPRIVMNGTAGAVSAKINWKQQLDVGISGTVTLHDASLATSGTVTLHDASLATSGTVTLHDASLAISGTITLHDTAHPVMVELLQSIKKATNFSASIEFAGNVNESWEVKLSLFADDMIVYLENPIVSAQNLLKLISNFSKVSGYKINVQKSQAFLYTNSRQTESQIMSELPFTIASKRIKYLGIHLTRDVKDLFKENYKPLLNEIKEDTNKWKNIPCSWVGRINIVKMAILPKVIYRFNAIPIKLPMTFFTELEKTTLKFIWNQKRTRIAKSILSQKNKAGGITLPDFKLYYKATVTKTAWYWYQNRDIDQWNRTEPSEIMPHIYNYLIFDKPEKNKQWGKDSLFNKWCWENSLAICRKLKLDPFLTPYTKINSRWIKDLNVRPKTIKTLEENLSITIQDIGTGKDFMSKTPIAMATKAKIDKWDLIKLNSFCTAKETTIRVNRQPTKWENIFATYSSDKGLISRIYNELKQIYKKKTNNPIKEWAKDMNRHFSKEDIYAAKKHMKKCSPSLAIREMQIKTTMRYHLTPVRMAIIKKSGNNRCLRGCGEIGTLLHCWWDCKLVRPLWKSVWRFLRDLELEIPFDPAIPLLDIHPKDYKSCCYKDTCTPSKLRQRATGNVAAAALKSKGTSTSLGPWNRGTSAISPVETAVTVPRSSRIVPLPPAASRPSTLHMHRVQRQLPGQQPHVCLNLAX

SEQ ID NO: 32688 - protein, 90 aa, Homo sapiens
MYGCGQGVQCTQGYITTMIMKFKLDKESPYVRLVSPFWTTVPECRKGGYLHNEGKTLGPPPRDWKPQSHVLCRVASGAHDVTADRHSNFE

SEQ ID NO: 32689 - protein, 1587 aa, Homo sapiens
  DOMAIN (677)..(722): kw TRANSCRIPTASE REVERSE II ORF2 domain identified by eMATRIX, accession number DM01354N, p-value=1.000e-40, raw score of 13.17
  DOMAIN (910)..(1179): Reverse transcriptase domain identified by PFam, accession name rvt, E-value=1.7e-06, PFam score of 22.4
MIVCLENPIVSAQNLLKLISNFSKVSEYKINVQKSQVFLYANKRQTESQIMSELPFTIATKRIKYLGIQLTRDVKDLFFKENYKPLFNEITEDTNKWKNIPCSWIGRINIMKMAILPKVIYRFNAIPIKLPMTFFTELEKTTLKFIWNRKRAHIAKTILSKKNKSRGITLPDFKLYYNANQNSMTKINSRWIKDLNVRPKTIKTLEENLGNTIQELGVGKDFMTKTPKAMATKAKIDKWDLIKRKSFCTAKETTIRVNRQPTEWEKIFAIYPSDKGLISRIYKELKQIYKKKTSNPIKKWAKDMNRHCSKEDIYVANGHMKKCSSSLVVREMQIQTTMRYHLTPVRMAIIKKSGNNRCWRGCGEIGTLLHCWWECKLVQPLWKSVWRFLRDLELEIPFDPAIPLLDRSTRQKINKDIQDLNSALDQVDLIDIYRTLHSKSTEYTFFSVPDGTYSKINHIIGSITLFSKYKITEIITNSLTDHTATKLEITIKKLTQNHTITWKLKNLLLHDSWENNEIKAEIKKFFDTNENKETTYQNLWYVKDTRISGMLWYVKAVCRGKFIALNAHKRKQERSKIDTLTSQLKELEKQEQTHSKTSRRQEITKIRAELKEIETQKTLQKINECRSWFFEKINKIDRPLARLIKKKREKNQIDAIKNDKGDIITDPTEIQTTIREYYKHLYGNKLENLEEMDKFLDTYTLPRLNQEEVESLNRPITGSEIEAIINSLPTKKSPGPDGFTAEFYQRYKEELRIKYLGIQLTRDVKDLFKENYKPLLNEIKEDTNKWKNIPCSWVGRINIMKMAILPKVIYRFNAIPIKLPMTFFTELEKTTLKFIWNQKRARIAKSILSQKNKAGGITLPDFKLYYKATVTKTAWYWYQNRDTDQWNRTEPSEIMLHIYNHLIFDKPDKNKQWGKDSLFNKWCWENWLAICRKLKLDPFLIPYTKINSRWIKDLNVRPKTIKSLEEDLGNTIQDIGMGKDFMSKTPKAMATKAKIDKWDLIKLKSFCTAKETTIRVNRQPTEWEKIFCNLFIMEYYAAIKNDEFMSFVGTWMKLETIILSKLSQGQKTKHCMFSLIVLEVLARAIRQEKEIKGIQLGKEEVKLSLFADDMIVYLENPIMSAPNLLKLISNFSKVSGYKINVQKSQAFLYTNIRQIESQIMSELPFTIATKRIKYLGIQLSRNVKELFKENYKPLLKEIKEDTNDWKNIPCSWIGRVNIVKMAMLPKVIYRFSAIPIKLPMTFFTELEKTTLKFIWNQKRACIAKTILSKKNKAGGITLPDFKLYCKATVTKTAWYWVPKQIYRPMEQNRDLRNNTTHLQPSDLSQTRQKQATRKGFPIMGKDFMSKIPKAMATKAKIDKWNLIELKSFCTAKETTISVNRQPTEWEKIFAICLSDKGLISRIYKELKQRHKKKTNNPIKKWAKDMNRHFSKEDIYAANRHMKKCSSSLAIREMPIKTTMRYHLTPVRMAIIKKSGNNRCWRGCGEIGTLSHCWWDCNLVQPLWKAVWRFLKDLELEIPFDPAISLLGYTQRIINHAAIKTHAHKALSHADNIFRYNCFIDHLLELANQSSKLPPLSLNRQCENIDIF

SEQ ID NO: 32690 - protein, 1026 aa, Homo sapiens
  DOMAIN (110)..(151): kw TRANSCRIPTASE REVERSE II ORF2 domain identified by eMATRIX, accession number DM01354I, p-value=1.000e-40, raw score of 15.55
  DOMAIN (356)..(550): Reverse transcriptase domain identified by PFam, accession name rvt, E-value=8.6e-35, PFam score of 129.0
MGDFHTPLSTLDRSTRQKVNKDIQELNSALHQEDLIDIYRTLHPKSTEYTFFSAPHHTYSKIDHIVGSKALLSKCKRTEIITNCLSDHSAIKLELRIKNLTQNRSTTWKLNNLLLNDYWVHNEMKAEIKMFFETNENKDTTYQNLWDTFKAVCRGKFIALNAHKRKQERSKIDTLTSQLKELEKQEQTHSKASRRQEITKIRAELKEIETQKTLQNINESRSWFFERINKIDRPLARLIKKKREKNQIDAIKNDKGDITTDPTEIQTTIREYYKHLYANKLENLEEMDKFLNTYTLPTLNQEEVESLNRPITGAEIVAIINSLPTKKSPGPDGFTAEFYQRYKEELVPFLLKPFQSIEKEGILPNSFYEASIILIPKPGRDTTKKENFRPISLMNIDAKILNKILAKRIQQHIKNLIHHDQVGFIPGMQGWFNIRKSINVIQHINRAKDKNHMIISIDAEKAFDKIQQPFMLKTLNKLDDMIVYLENPIVSAQNLLKLISNFSKVSGYKINIQKSQAFLYTNNRQTESQIMSELPFTIASKRIKYLGIQLTRDVKDLFKGEPQTTAQRNKRGYKQMEEHSMLMGRKNQYRENGHTAQGNLQINAIPIKLPMTFFTELEKTTLKFIWNQKRARIAKSILSQKNKAGGITLPDFKLYYKATVTKTAWYWYQNRDIDQWNRTEPSERTPHIYNYLIFDKREKNKQWGKDSLFNKWCWENWLAICRKLKLDPFLTPYTKINSRWIKDLNVRPKTIKTLEENLGFTIQDIGMGKDFISKTPKAMATKAKIDKWDLIKLKSFCTAKETTIRVNRQPTKWEKIFATYSSDKGLISRIYNELKQIYKKKTNNPIKKWAKDMNRHFSKEDIYAAKKHMKKCSPSLAIREMQIKTTMRYHLTPVRMAIIKKSGNNRCWRGCGEIGTLLHCWWDCKLVQPLWKAVWRFLRDLELEIPFDPAIPLLGIYPKDYKSCCYKDTCTRRKQLDCAEPVEPRKVGDGEWSLTKWTRPGSRALPWPPEQAKPYPPTLPTLAQDF

SEQ ID NO: 32691 - protein, 1065 aa, Homo sapiens
  DOMAIN (479)..(524): kw TRANSCRIPTASE REVERSE II ORF2 domain identified by eMATRIX, accession number DM01354N, p-value=1.000e-40, raw score of 13.17
  DOMAIN (563)..(838): Reverse transcriptase domain identified by PFam, accession name rvt, E-value=4.7e-88, PFam score of 306.0
  misc_feature (1)...(1065): Xaa = X or * as defined in Table 2
MELKTKARELREECRSLRSRRNQLEERVSAMEDEMNEMKREGKFREKRIKRNEQSLQEIWDYVKRPNLRLIGVPESDAENGTKLENTLQDIIQEDFPNLARQANVQIQEIQRTPQRYSSRRATPRHIIVRFTKVEMKQKMLRAAREKDFKPTKIKRDKEGHYIMVKGSIQQEELTILNIYAPNTGAPRFIKQVLSDLQRDLDSHTLIMGDFNTPLSTLDRSTRQKVNKDTQELNSALHQADLIDIYRTLHPKSTEYTFFSAPHHTYSKIDHIVGSKALLSKCKRTQIITNYLSDHSAIKLELRIKNLTQSRSTTWKLNNLLLNVYWVHNEMKAEIKMFFETNENKDTTYQNLWDTFKAVCRGKFIALNAHKRKQERSKIDTLTSQLKELEKQEQTHSKASRRQEITKIRAELKEIETQKTLQKLNESRSWFFERINKIDRPLARLIKKKREKNQIDTIKNDKGDITTDPTEIQTTIREYYKHLYAYKLENLEEMDTFLDTYTLPRLNQEEVESLNRPITGSEIVAIINSLPTKKSPGPDGFTAKFYQRYKEELVPFLLKLFQSIEKEGILPNSFYDASIILIPKPGRDTTKKENFRPISLMNIDAKILNKILANRIQQHIKKLIHHDQVGFIPGMQGWFNIRKSINVIQHINRAKDKNHMIISIDAEKAFDKIQQPFMLKTLNKLGIDGTYFKIIRAIYDKPTANIILNGQRLEAFPLKTGTRQGCPLSPLLFNIVLEVLARAIRQEKEIKGIQLGKEEVKLSLFADDMIVYLENPIVSAQNLLKLISNFSKVSGYKINVQKSQAFLYTNNRQTESQIMSELPFTIASKRIKYLGIQLTRDVKNLFKENYKPLLKEIKEDTNKWKNIPCSWVGRINIVKMAILPKVIYRFNAIPIKLPMTFFTELEKTTLKFIWNQKRARIAKSILSQKNKAGGITLPDFKLYYKATVTKTARPHDWYRTESKSSWTYEGFLSPFVDEFEWHWNKLWRKVASVFSENIINIVTLQHVSATGFPRAPSLGILLKLENYPPILGDLSDGLPRVALIGPVLGSTACNPLAFVNLRRVX

SEQ ID NO: 32692 - protein, 1096 aa, Homo sapiens
  DOMAIN (154)..(195): kw TRANSCRIPTASE REVERSE II ORF2 domain identified by eMATRIX, accession number DM01354I, p-value=1.000e-40, raw score of 15.55
  DOMAIN (256)..(527): Reverse transcriptase domain identified by PFam, accession name rvt, E-value=9.8e-24, PFam score of 92.3
MVKGSIQQEELTILNIYAPNTGAPRFIKQVLSDLQRDLDSHTLIMEDFNTPLSTLDRSTRQKVNKNTQELNSALHQADLIDIYRTLHPKSTEYTFFSAPHHTYSKIDHIVGSKALLSKCKRTEIITNYLSDHSAIKLELRIKNLTQSRSTTWKLNNLLLNDYWVHNEMKAEIKMFFETNENKDTTYQNLWDAFKAVCRGKFIALNAYKRKQERSKIDTLTSQLKELEKQEQTHSKASRRQEITKIRAELKEIETQKTLQKINESRSWFFERINKIDRPLARLIKKKREKNQIDTIKNDKGDITTDPTEIQTTIRESYKHLYANKLENLEEMDTFLDTYTLPRLNQEEVESLNRPITGSEIVAIINSLPTKKSPGPDGFTAEFYQRAIYDKPTDNIILNGQKLQAFPLKTGTRQGCPLSPLLFNIVLEVLARAISQEKEIKGIQLGKEEVKLSLFADDMIVYLENPIVSAQNLLKLISNFSKVSGYKINVQKSQAFLYTNNRQTESQIMSELPFTIASKRIKYLGIQLTRDVKDLFKENYKPLLKEIKEDTNKWKNIPCSWVGRINIVKMAILPKVIYRFNAIPIKLPMTFFTELEKTTLKFIWNQKRARIAKSILSQKNKAGGITLPDFKLYYKATVTKTAWYWYQNRDIDQWNRTEPSEIMPHIYNYLIFDKPEKNKQWGKDSLFNKWCWENWLAICRKLKLDPFLTPYTKINSRWIKDLNVRPKTIKTLEENLGITIEDIGVGKDFMSKTPKAMATKAKIDKWDLIKLKSFCTAKETTIRVNRQPTTWEKIFATYSSDKGLISRIYNELKQIYKKKTNNPIKKWAKDMNRHFSKEDIYAAKKHMKKCSSSLAIREMQIKTTMRYHLTPVRMAIIKKSGNNRRDRTAEETAERWKIFESVLSPPNLRRAFKEKQEEEVGFRRWVITNSSKLKQHVLTQCKEAKNLEKRLEEFLTRITSLEKNINDLMDLKNTARELLDAYTSINSQINQAEERLSETEDQLNQIKHEDKIRGKKMKRNKQSLQEIWDYVKRPNLRLIGVAESDRENGAKLENTLQYIIQENFPNLARQANTQIQETQRPPQRYSLRKATPRHIII

SEQ ID NO: 32693 - protein, 1340 aa, Homo sapiens
  DOMAIN (154)..(195): kw TRANSCRIPTASE REVERSE II ORF2 domain identified by eMATRIX, accession number DM01354I, p-value=1.000e-40, raw score of 15.55
  DOMAIN (400)..(675): Reverse transcriptase domain identified by PFam, accession name rvt, E-value=1.2e-87, PFam score of 304.6
MVKGSIQQEELTILNIYAPNTGAPRFIKQVLSDLQRDLDSHTLIMGDFNTPLSTLDRSTRQKVNKDTQELNSALHQADLIDIYRTLHPKSTEYTFFSAPHHTYSKIDHILGSKALLSKCKRTEIITNYLSDHSAIKLELRIKNLTQSRSTTWKLNNLLLNDYWVHNEMKAEIKMFFETNENKDTTYQNLWDAFKAVCRGKFIALNAYKRKQERSKIDTLTSQLKELEKQEQTHSKASRRQEITKIRAELKEIETQKTLQKINESRSWFFERINKIDRPLARLIKKKREKNQIDTIKNDKGDITTDPTEIQTTIREYYKHLYANKLENLEEMDTFLDTYTLPRLNQEEVESLNRPITGSEIVAIINSLPTKKSPGPDGFTAEFYQRYMEELVPFLLKLFQSIEKEGILPNSFYEASIILMPKPGRDTTKKENFRPISLMNIDAKILNKILANRIQQHIKKLIHHDQVGFIPGMQGWFNIRKSINVIQHINRAKDKNHMIISIDAEKAFDKIQQPFMLKTLNKLGIDGTYFKIIRAIYDKPTANIILNGQKLEAFPLKTGTRQGCPLSPLLFNIVLEVLDRAIRQEKEIKGIQLGKEEVKLSLFADDMIVYLENPIVSAQNLLKLISNFSKVSGYKINVQKSQAFLYTNNRQTESQIMGELPFTIASKRIKYLGIQLTRDVKDLFKENYKPLLKEIKEETNKWKNIPCSWVGRINIVKMAILPKVIYRFNAIPIKLPMTFFTELEKTTLKFIWNQKRTRIAKSILSQKNKAGGITLPDFKLYYKATVTKTAWYWYQNRDIDQWNRTEPSEIMPHIYNYLIFDKPEKNKQWGKDSLFNKWCWENWLAICRKLKLDPFLTPYTKINSRWIKDLNVKPKTIKTLEENLGITIQDIGMGKDFMSKTPKAMATKAKIDKWDLIKLKSFCTAKETTIRVNRQPTTWEKIFATYSSDKGLISRIYNELKQIYKKKTNNPIKKWAKDMNRHFSKEDIYAAKKHMKKCSSSLAIREMQIKTTMRYHLTPVRMAIIKKSGNNRCWRGCGEIGTLLHCWWDCKLVQPLWKSVWRFLRDLELEIPFDPAIPLLDIYPNEYKSCCYKDTCTQNKIPRNPTYKGCEGPLQGELQTTAQQNKRGHKQMEEHSMLMGRKNQHRENGHTAQAIWKKLKLDPFLTPYTKIHSRWIKDFNVRPKTIKTLEENLGNTIQDVGLGKDFISKTPKAMATKAKTDKWDLIKLKSFCTAKETTIRVNRQPTKWEKIFAIYSSDKGLISRIYKELKQTYKEKTNNLIKKWVKDMNRHFSKEDFYAAKRDMKKCSSSLAIREMQIKTTTRYHLTAVRMAIIKKSGNNS

SEQ ID NO: 32694 - protein, 1310 aa, Homo sapiens
  DOMAIN (200)..(246): kw TRANSCRIPTASE REVERSE II ORF2 domain identified by eMATRIX, accession number DM01354O, p-value=1.000e-40, raw score of 8.73
  DOMAIN (1043)..(1309): Beige/BEACH domain identified by PFam, accession name Beach, E-value=8.2e-203, PFam score of 687.2
  misc_feature (1)...(1310): Xaa = X or * as defined in Table 2
XRSRRQEVNKDTQELNSALHQADLIDIYRTLHPKSTEYTFFSATHHTYSKIDHIVGSKAVLSKCKRTEIITNYLSDHSAIKLELRIKKLTQNRSTTWKLNNLLLNDYCVHNEMKAEINMFFETNENKDTTYQNLWDTFKAKYKLPSENTTNNLYTNKLENLEEMDKFLDTYTLPRLNQEKVESLNRPITGSEIVAIINSLPTKKSPGPDGFTAEFYQRYKEELVPFLLKLFQSIEKEGILPNSFYEASIILIPKPGRDTTKKENFRPISLMNIDAKILNKILANRIQQHIKKLIHHDQVGFIPGMQGWFNICKSINVIQHINRTKDKNHMIISIDAEKAFDKIQQPFRLKTLNKLGVDGTYLKIIRAIYDKPTANIILNGQKLEAFPLKTGTRQGCPLSPLLFNIVLEVLARAIRQEKEIKGCEGPLQGELQTTAQGNKRGYKQMEEHSMLMGRKNQYHENGHTAQGFNVGRSAGGRSTVREINRDACHFPGFPVLQSFLPKHTNVPALYFLLMALFLQQPVSELPENLQVSVPVISCRSKQGCQPWQSEEEGSWLREYPVTLMQFFRYLYHNVPDLASMWMSPDFLCALAATVFPFNIRPYSEMVTDLDDEVGSPAEEFKAFAADTGMNRSQSEYCNVGTKTYLTNHPAKKFVFDFMRVLIIDNLCLTPASKQTPLIDLLLERQQNALKYVTEEWCQIECELLRERGLWGPPIGSHLDKWMLEMTEGPCRMRKKMVRNDMFYNHYPYVPETEQETNVASEIPSKQPETPDDIPQKKPARYRRAVSYDSKEYYMRLASGNPAIVQDAIVESSEGEAAQQEPEHGEDTIAKVKGLVKPPLKRSRSAPDGGDEENQEQLQDQIAEGSSIEEEEKTDNATLLRLLEEGEKIQHMYRCARVQGLDTSEGLLLFGKEHFYVIDGFTMTATREIRDIETLPPNMHEPIIPRGARQGPSQLKRTCSIFAYEDIKEVHKRRYLLQYSNITREHLGNEGGSSNKGPVDVDWFLAVVPSLTDSSESVSGQRPNTSVEQGSGLLSTLVGEKSVTQRWERGEISNFQYLMHLNTLAGRSYNDLMQYPVFPWILADYDSEEVDLTNPKTFRNLAKPMGAQTDERLAQYKKRYKDWEDPNGETPAYHYGTHYSSAMIVASYLVRMEPFTQIFLRLQGGHFDLADRMFHSVREAWYSASKHNMADVKELIPEFFYLPEFLFNSNNFDLGCKQNGTKLGDVILPPWAKGDPREFIRVHREALECDYVSAHLHEWIDLIFGYKQQGPAAVEAVNVFHHLFYEGQVDIYNINDPLKETATIGFINNFX

SEQ ID NO: 32695 - protein, 1177 aa, Homo sapiens
  DOMAIN (783)..(822): PROTEIN ZINC FINGER ZINC-FINGER METAL-BINDING NU domain identified by eMATRIX, accession number PD01066, p-value=3.250e-35, raw score of 19.43
  DOMAIN (893)..(1167): Zinc finger, C2H2 type domain identified by PFam, accession name zf-C2H2, E-value=9.4e-64, PFam score of 225.2
MVKGSIQQEELTILNTYAAHTGAPRLIKQVLSDLQRDLDSHTIIMGDFNTPLSTLDRSTRQKVNKDTQELKSALHQADLTDIYRTLHHKSTEYTFFSAPHHIYSKIDHILGSKALLSKCKRTEIITNYLSDHSAIKLELWIKNLTQNHSTTWELNNLLLNDYWVHNEMKAEIKMFFETNENKDTTYHNLWDTFKAVCRGKFIPLNAHKRKQERSKIDTLTSQLKELEKQEQTHSKASRRQEITKIRAELKEIETQKTLQKINESRSWFFERINKIDRLLARLIKKKREKNQIDAIKNDKGDITTDPTEIQTTIREYCKHLYANKLENLEEMDKFLDTYTLPRLNQEEVESLNRPITGAEIVAIINSLPTKKSPGPDGFTAKFYQRYKEELVPFLLKLFQSIEKEGILPNSFYEASIILIPKPGRDTTKKENFRPISLMNIDAKILNKKLAKRIQQHIKKLIHHDQVGFIPGMQGWFNIRKSINVIQHINRAKDKNHMIISIDAEKAFDKIQQPFMLKTLNKLENKIPRNPPYKGCEGPLQGELQTTAQGNKRGYKQMEEHSMLMGRKNQYRENGHTAQEHFDHPSASFSSPRTLHIDPTLATSTSWTVMTLRGEHNMPQHAFLEVHIGTAQHLNSSSAKLFSEYWSISLWSAPGKARAAGSSSTNSDRICPLPSGALLYQSEGLLARPHGKGSFQVGRQQHQAVRVGSAHASSAGYVCVSAFPFVFLRFCVGGGPGISRVYALFYGECNPTREWAVSSELSPSFQEQNKMNKVEQKSQESVSFKDVTVGFTQEEWQHLDPSQRALYRDVMLENYSNLVSVGYCVHKPEVIFRLQQGEEPWKQEEEFPSQSFPDYMFMSPQNSYVGALTPSVVVFGDMQPLAVHQRIHTGEKPYECNQCGKTFISNSVLTIHRKTYTGEKPYECNECGKSFSRSSYLTIHQRTHPGEKPYECKVCSKTFCHKSDATKHQKTHLGGKPYECTQCGKTFSRNSGLKVHQRTHAKEKPYEYTECGKSFSEKSVLTVHQRIHTGEKPYKCNARGKTFYNKSDLTKHQRTHTGEKPCECKECGKFFSRNSYLTIHQRMHTGDKPYVCKKCGKTFYHKADYTVHKRTHRGEKSYYCNKCGKTFICNSVLKSHQRTHTGEKPYGCNECGKSFSEKSVLTVHQRIHTGEKPYKCNE

SEQ ID NO: 32696 - protein, 1134 aa, Homo sapiens
  DOMAIN (351)..(392): kw TRANSCRIPTASE REVERSE II ORF2 domain identified by eMATRIX, accession number DM01354I, p-value=1.000e-40, raw score of 15.55
  DOMAIN (121)..(337): AP endonuclease family 1 domain identified by PFam, accession name AP_endonucleas1, E-value=3.1e-51, PFam score of 183.6
MELKAKARELHEECRSLRSQCNQLEERVSVMEDEMNEMKREGKFREKRIKRNKQSLQEIWDYVKRPNLRLIGVPESDGENGTKLENTLQDIIQENLPSLARQANIQIQEIQRMPQRYSSSRATPRHIIVRFTKVEMKEKNVKCSRRERDTHRLKIKGWRKIYQANGKQKKAGVAILVSDKTDFKPTKIKRDKEGLYIMVKGSIQQEELTILNIYAPNTGAPRFIKQVLRDLERDLDSHTIIMGDFNTPLSTLDRSTRRKVNKDIQELNSALHQEDLIDTYRTLLPKSTEYTFFSAPHHTYSKIDHIVGSKALLRKCKRTEILTNCLSDHSVIKLELRIKKLTQNRSTTWKMNNLLLNDYWVHNEMKAEIKMFFETNENKDTTYQNLWDTFKAVCRGKFIALNAHKRKQERSKIDTLTSQLKELEKQEQTHSKASRRQEITKIRAELKEIETQKTLQKINESRSWINKIDRPLARLIKKKREKNQMDAIKNDKGDINTDPTEIQTTIREYYKQLYANKLENLEEMDKFLDTYTLPRLNQEEVESLNRPITGSEIVPIINSLPTKKSPGPDGFTAEFYQRYKEELVPFLLKLFQSIEKEGILPNSFYEASIILIPKPGRDTTKKENFRQISLVNIDAKILNKILANRIQQYIKKLIHHDQVGFIPGMQGWFNIHKSINVIQRINRTKDKNHMMISIDAEKAFDKIQQRFMLKTLNKLVLEVLARAIRQEKEIKGIQLGKEEVKLSLFVDDMIVYLENPIVSAQNLLKLISNFSKVSGHKISVQKSQAFLYADNRQTESEIMSEVPFTIASKRIKYLGIQLTKDVKDLFKENYKPLLNEIKEDTNKWKNIPRSWVGRINIVKMAILPKVIYRFNAIPIKQPMTFFTELEKTTLKFIWNQKRASITKSILSLKNKAGGIMLPDFKLYYKATVTKTAWYWYQNRDIDQWNRIEPSEIMPHIYKYLIFDKPEKNKQWGKDSLLNKWCWENWLAVCRKLKLDLFLTPYTKINSRWIKDLNVTPKTIKTLEENLGITIQDIGKDFMSETPKAMATKAKIDKWDLIKLKSFCTAKETTIRVTRQPTKWEKIFATYSSDKGLISRIYNELQQIYKKKTNNPIKKWAKDMNRHFSKEDIYAAKYT

SEQ ID NO: 32697 - protein, 1184 aa, Homo sapiens
  DOMAIN (242)..(283): kw TRANSCRIPTASE REVERSE II ORF2 domain identified by eMATRIX, accession number DM01354I, p-value=1.000e-40, raw score of 15.55
  DOMAIN (16)..(228): AP endonuclease family 1 domain identified by PFam, accession name AP_endonucleas1, E-value=2.4e-58, PFam score of 207.2
MELKTKARELHEECRSLRSRCDQLEERVSAMEDEMNEMKDTHRLKIKGWRKIYQANGKQKKAGVAILVSDKTDFKPTKIKRDKEGHYLMVKGSIQQEELTILNIYAPNTGAPRFIKQVLTDLQRDLDSHTLIMGDFNTPLSTLDRSTRQKVNKDTQELNSALHQADLIDIYRTLHPKSTEYTFFSAPHHTYSKIDHILGSKALLSKCQRTEIITNYLSDHSAIKLELRIKNLTQNHSTTWKLNNLLLNDYWVHNEMKAEIKMFFETNENKDTTYQNLWDAFKAVCRGKFVALNAHKRKQERSKIDTLTSQLKELEKQEQTHSKASRRQQITKIGAELKEIETQKTLQKINESRSWFFERINKIDRPLARLIKKKREKNQIDAIKNDKGDITTDPTEIQTTIREYYKHLYANKLENLEEMDKFLNTYTLPRLNQEEVESLNRPITGSEIVAIINSLRTKKSPGPDGFTAEFYQRYKEELVPFLLKQFQSIEKEGILPNSFYEASIILIPKPGRDTTKKENFRPMSLMNIDAKILNKILANGIQQHIKKLIHHDQVGFIPGMQGWFNIRKSINVIQHINRAKDKNHMIISIDAEKAFDKIQQPFMLKTLNKLAQNLLKLISNFSKVSGYKINVQKSQVFLYTNNRQTESQIMSDLPFTIASKRVKYLGIQLTMDVKDLSKENYKPLLKEIKEDTNKWKNIPCSWVGRISIVKMAILPKVIYRFNAIPIKLPMTFFTELEKTTLKFIWNQKRACIAKSILSQKNKAGGITLPDFKLYYKATVTKTAWYWYQNRDIDQWNRTEPSEIMPHICNYLIFDKPEKNKQWGKDSLFNKWCWENWLAICRKLKLDPFLTPYTKISSRWIKDLNVRPKTIKTLEENLGITIQDIGMGKDFMSKTPKAMATKAKIDKWDLIKLKSFCTTKETTIRVNRQPTKWEKIFATYSSDKGLISRIYNELKQIYKKKTNNPIKKWAKDMKRHFSKEDIYAAKKHMKKCSSSLAIREMQIKTTMRYHLTPVRMAIIKKSGNNRCWRGCGEIGTLLHCWWDCKLVQPLWKSVWRFLRDLELEIPFDPAIPLLGIYPKDYKSCCYKDTCTRRPDFLDHEKGLDPVFQKQRLLRDKGKHCRRMVTKDGHTLVSGTCGYVVLHGKRNFRGGVKIIDINIWRLLSGLNVNVWAFKSGREGQSSKSER

SEQ ID NO: 32698 - protein, 1261 aa, Homo sapiens
  DOMAIN (275)..(320): kw TRANSCRIPTASE REVERSE II ORF2 domain identified by eMATRIX, accession number DM01354N, p-value=1.000e-40, raw score of 13.17
  DOMAIN (332)..(606): Reverse transcriptase domain identified by PFam, accession name rvt, E-value=2e-76, PFam score of 267.3
MVKGSIQQEELTILNIYAPNTGAPRFIKQVLSDLQRDLDSHTLIMGDFNNPLSTLDRSMRQKVNKDTQELNSALHQVDLIDIYRTLHHKSTEYRFFSAPHHTYSKIDHILGSKALLSKCKRTEIITNYLSGHSAIKLELKIKNLTQNRSTTWKLNNLLLNDYWIHNEMKAEIKMFFETNENKDTTYQNLWDAFKAVCRGKFIALNAHKRKQERSKIDTLTSQLKELEKQEQTHSKAGRKKEITKIRAQLKEIETQKTLKKLMNPGAEIQTTIREYYKHLYAKKLENLEEMDKFLDTYTLPRLNQEEVESLNRPITGAEIVAIINSLPTKKSRTRWIHSRILPEEASIILIPKPGRDTTKKENFRPISLMNIDAKILNKILAKRIQQHIKKLIHHDQVGFIPGMQGWFNIHKSINVIQHINRAKDKNHIIISIDAEKAFDKIQQPFMLKTLNKLGIDGTYFKIIRAIYDKPTANIILNGQKLEAFPLKTGTRQGCPLSPLLFNIVLEVLARAIRQEKEIKGIQLGKEEVQLSLFADEMIVYLENPIVSAQNLLKLISNFSKVSGYKINVQKSQAFLYTNNRQTESQIMSELPFTIASKRIKYLGIQLTRDVKDLFKENCKPLLNEIKEDTNKWKNIPCSWVGRINIMKMAILPKVIYRFNAIPTKPPMTFFTELEKTTLKFIWNQKRARIAKSILSQKNKAGGITLPDFKLYYKATVTKTAWYWYQNRDLDQWNRTEPSEITPHIYSYLIFDKPEKNKQWGKDSLFNKWCWENWLPICRKLKLDPFLTPYTKINSRWIKDLNVRPKTIKTLKENLGITIQDIGMGKDFMSKTPKAMATKDKIDKWDLIKLKSFCTAKETTIRVNRQPTKWEKIFATYSSDKGLISRIYNELKQIYKKKTNNPINKWVKDMNRHFSKEDIYAAKKHMKKCSSSLAIREMQIKTTMRYHLTPLRMAIIKKSGNNSASPTARNKTARNQRTKMIAVTAPRNRAPLELELILYRQNRQSKTHILETNNTSAELLVPFEEDYLIEIRTVSDGGDGSSSEEIRIPKMSMIDHILPKSIPEELQNGEGFGYIIMFRPVGSTTWSKEKVSSVESSRFVYRNESIIPLSPFEVKVGVYNNEGEGSLSTVTIVYSGEDDGYVFLWMVEPQLAPRGTSLQSFSASEMEVSWNAIAWNRNTGRVLGYEVLYWTDDSKESMIGKIRVSGNVTTKNITGLKANTIYFASVRAYNTAGTGPSSPPVNVTTKKSRYLITTAYLEVPEI

SEQ ID NO: 32699 - protein, 1137 aa, Homo sapiens
  DOMAIN (275)..(320): kw TRANSCRIPTASE REVERSE II ORF2 domain identified by eMATRIX, accession number DM01354N, p-value=1.000e-40, raw score of 13.17
  DOMAIN (349)..(622): Reverse transcriptase domain identified by PFam, accession name rvt, E-value=2.5e-83, PFam score of 290.3
MVKGSIQQEELTILNIYAPNTGAPRFIKQVLSDLQRDLDSHTLIMGDFNNPLSTLDRSMRQKVNKDTQELNSALHQVDLIDIYRTLHHKSTEYRFFSAPHHTYSKIDHILGSKALLSKCKRTEIITNYLSGHSAIKLELKIKNLTQNRSTTWKLNNLLLNDYWIHNEMKAEIKMFFETNENKDTTYQNLWDAFKAVCRGKFIALNAHKRKQERSKIDTLTSQLKELEKQEQTHSKAGRKKEITKIRAQLKEIETQKTLKKLMNPGAEIQTTIREYYKHLYAKKLENLEEMDKFLDTYTLPRLNQEEVESLNRPITGAEIVAIINSLPTKKSRTRWIHSRILPEVQGGTEKEGILPNSFYEASIILIPKPGRDTTKKENFRPISLMNIDAKILNKILAKRIQQHIKKLIHHDQVGFIPGMQGWFNIHKSINVIQHINRAKDKNHIIISIDAEKAFDKIQQPFMLKTLNKLGIDGTYFKIIRAIYDKPTANIILNGQKLEAFPLKTGTRQGCPLSPLLFNIVLEVLARAIRQEKEIKGIQLGKQEVQLSLFADEMIVYLENPIVSAQNLLKLISNFSKVSGYKINVQKSQAFLYTNNRQTESQIMSELPFTIASKRIKYLGIQLTRDVKDLFKENCKPLLNEIKEDTNKWKNIPCSWVGRINIMKMAILPKVIYRFNAIPTKPPMTFFTELEKTTLKFIWNQKRARIAKSILSQKNKAGGITLPDFKLYYKATVTKTAWYWYQNRDLDQWNRTEPSEITPHIYSYLIFDKPEKNKQWGKDSLFNKWCWENWLPICRKLKLDPFLTPYTKINSRWIKDLNVRPKTIKTLKENLGITIQDIGMGKDFMSKTPKAMATKDKIDKWDLIKLKSFCTAKETTIRVNRQPTKWEKIFATYSSDKGLISRIYNELKQIYKKKTNNPINKWVKDMNRHFSKEDIYAAKKHMKKCSSSLAIREMQIKTTMRYHLTPLRMAIIKKSGNNSASPTARNKTARNQRTKMIAVTAPRNRAPLELELILYRQNRQSKTHILETNNTSAELLVPFEEDYLIEIRTVSDGGDGSSSEEIRIPKMSTGGEEGMAAVFKNKCRCSWSRVVIAYHSSSGNQMGTNPEQDPGQHAIPLEGTLTHTRTHSDWDHLDTAMN

SEQ ID NO: 32700 - protein, 1709 aa, Homo sapiens
  DOMAIN (797)..(842): kw TRANSCRIPTASE REVERSE II ORF2 domain identified by eMATRIX, accession number DM01354N, p-value=1.000e-40, raw score of 13.17
  DOMAIN (391)..(621): AP endonuclease family 1 domain identified by PFam, accession name AP_endonucleas1, E-value=7e-83, PFam score of 288.8
MLFWAFDKIQQPFMLKTLNKLGIDGTYLKIIRAVYDKPTANIILNGQKLEAFPLKTGTRQGCPLSPLLFNIVLEVLARAIRQEKEIKGIQLGKEEVKLSLFADDMIVYLENPIISTQNLHKLISNFSKVSGYKNNVQKLQAFLYTNNRQTESQIMSELPFTIASKRIKYLGIQLTRDVKDLFKENYKPLLKEIKEDTNKWKNIPCSWIRRINIVKMAILPKRTPLLSLPSTLYEELWRLRSYFPLCPQLYNMEQNTTDWVIYKEQCIWLTALETGESKSTAPAFGKGYPMAEYIIWGRLTPHMAGYSSETKLPEERSGSNICCSPISAVLQPLLLIPRQTGSGVDLQQTPTDLQLRVLTVRRKTNKQKGHPHQNPICTSPSSKTKGSNSHITILTLNVNGLNAPIKRHRLANWIKSQDPSVCCIQETHLTCRDTHRIKIKGWREIYQANGKQKKAGVAILVSDKTDFKPTKIKRDKEGHYMMVKGSIQQEELTTLNIYAPNTGAPRFIKQVLRDLQRDLDSHTLIMGDFNTPLSTLDRSTRQKVNKDIQDLNSALHQVDLIDIYRTLHPKSTEYTFFSALHHIYSKIDHIVGSKALLSKYKTTEIITNCLSDHSAIKLELRIKKLTQNRSTTWKLNNLLLNDYWVHNKMKAEINTLFETNENKDTTYQNLWDTFKAVCRGKFIALNAHKRKQERSKIDTLTSQLKELEKQEQTHSKASRRQEITKIRAKLKEIETQKILQKINESRSWFFEKINKIDRPLARPIKKKREKNQIDAIKNDKGDITTDPTEIQTTIREYYKHLYANKLENLEEMDKFLNTYTLPRLNQEEVESLNKPITGSEIEAIINSLPIKKSPGPDGFIAKFHQRYKEELEASIILIPKPGRDTTKKENFRPIPLMNIDAKILNKILANRIQQHIKKLIHHDQVGFIPGMQGSFNICKSINVIQDINRTNDKNHMIISIDAEKAFDKIQQPFILKTLNKLGIDGTYLKIIRAIYDKPTANIILNGQKLEAFPLKTGTRQGCPLSPLLFNIVLEVLARAIRQEKEIKGIQLGQEEVKLSLFADDMIVYRENPIVSTQNLHKLISNFSKVSGYKINVQKSQAFLYTNNRQTESQIMSELPFTIASKRIKYLGIQLTRDVKDLFKENYKPLLKEIKEDTNKWKNIPCSWVGRINIVKMAILPKVIYRFNAIPIKLPMTFFTELEKTTLKFIWNQKRARIAKSILSQRNKAGGITLPDFKLYYKATVTKTAWYWYQNRDIDQWNRTEPSEIMPHIYNHLIFDKPDKNKKWGNDSLFNKWCWENWLAICRRKLKLDPFLTPYTKINSRWIKDLNVRPKTIKTLEENLGNTIQDIGMGKDFMSTTPKAMATKAKIDKWDLIKLKSFCTAKETTITVNRQPTEWEKIFTIYPSDKGLISRIYKELKQIYKKRTNNPINKWVKDMNRHFSKEDIYTAKRHMKKCSSSLAIREMQIKTTLRYHLIPVRMAIIKKSGNNRPSSNVFSVKLSEIQSLALIETRCLMNADEQGVPLIQEMLESWASICKVPKYPNAEAVRPEEQTPHLHPGEINSHVAHTKLVWWSLHTDTHEIWCRDSDRGTSLGRSIPCPPALCSVRKIHLRPQVLRPTSPRNISPISNPHTRTSKRLNRSGQAFLQNLLPQELATSARNLTTRPRNACSPGFLLSRVPSVRDPTGNWTVQLTWQPLSEPLELWPKAL

SEQ ID NO: 32701 - protein, 2747 aa, Homo sapiens
  DOMAIN (154)..(195): kw TRANSCRIPTASE REVERSE II ORF2 domain identified by eMATRIX, accession number DM01354I, p-value=1.000e-40, raw score of 15.55
  DOMAIN (400)..(2134): Reverse transcriptase domain identified by PFam, accession name rvt, E-value=1.7e-142, PFam score of 486.8
MVKGSIQQEELTILNIYAPNTGAPRFIKQVLSDIQRDLDSHTLIMGDFNTPLSTLDRSTRQKVNKDTQELNSALHQADLIDIYRTLHPKSTEYTFFSAPHHTYSKIDHIVGSKALLSKCKRTEIITNCLSDHGAIKLELRIKNLTQSRSTTWKLNNLLLNDYWVHNEMKAEIKMFFETNENKDTTYQNLWDAFKAVCRGKFIALNAYKRKQERSKIDTLTSQLKELEKQEQTHSNASRRQEITKIRAELKEIETQKTLQKINESRSWFFERINKIDRPLARLIKKKREKNQIDTIKNDKGDITTDPTEIQTTIREYYKHLYANKLENLEEMDTFLDTYTLPRLDQEEVESLNRPITGSEIVAIINSLPTKKSPGPDGFTAEFYQRYKEELVPFLLKLFQSIEKEGILPNSFYEASIILIPKPGRDTTKKENFRPISLMNIDAKILNKILAKRIQQHIKKLIHHDQVGFIPGMQGWFNICKSINVIQHINRAKDKNHMIISIDAEKAFDKIQQPFMLKTLNKLGIDGTYFKIIRAIYDKPTANIILNGQKLEAFPLKTGTRQGCPLSPLLFNIVLEVLARAIRQEKEIKGIQLGKEEVKLSLFADDMIVYLENPIVSAQNLLKLISNFSKVSGYKINVQKSQAFLYTNNRQTESQIMSELPFTIASKRIKYLGIQLTRDVKDLFKENYKPLLKEIKEDTNKWKNIPCSWVGRINIVKMAILPKVIYRFNAIPIKLPMTFFTELEKTTLKFIWNQKRARIAKSILSQKNKAGGITLPDFKLYYKATVTKTAWYWYQNRDIDEWNRTEPSEIMPHIYNYLIFDKPEKNKQWGKDSLFNKWCWENWLAICRKLKLDPFLTPYTKINSRWIKDLNVRPKTIKTLEENLDITIQDIGVGKDFMSKTPKAMATKDKIDKWDLIKLKSFCTAKETTIRVNRQPTTWEKIFATYSSDKGLISRIYNELKQIYKKKTNNPIKKWVKDMNRHFSREDIYAAKKHMKKCSSSLAIREMQIKTTMRFYWDLIMLIMMVGNLVIIPVGITFFTEQTTTPWIIFNVASDTVFLLDLIMNFRTGTVNEDSSEIILDPKVIKMNYLKSWFVVDFISSIPVDYIFLIVEKGMDSEVYKTARALRIVRFTKILSLLRLLRLSRLIRYIHQWEEERSSSPATEQSWTENDFDELREEGFRRSNYSELREDIQTKGKEVENFEKNLEECITRITNTEKCLKELMELKTKARELREECRSLRSQCDQLEERVSAMEDEMNEMKQEGKFREKRIKRNEQSLQEIWDYVKRPNLRLIGVPESDAENGTKLENTLQDIIQETFPNLARQANVQIQEIQRTPQRYSSRRATPRHIIVRFTKVEMKEKMLRAAREKGRVTLKGKPIRLTADLSAETLQARREWGPILNILKEKNFQPRISYPAKLSFISEGEIKYFTDKQMLTDFVTSRPALKELLKEALNMERNNRDTHRLKIKGWRKIYQANGKQKKAGVAILVSDKTDFKPTKIKRDKEGHYMMVKGSIQQEELTILNMYAPNTGAPRFIKQVLSDLQRDLDSHTLIMGDFNTPLSTLDRSTRQKVNKDTQELNSALHQADLIDIYRTLHPKSTEYTFFSAPHHSYSKIDHILGSEALLSKCKRTEIITNYLSDHSAIKLELRIKNLTQSRSTTWKLNNLLLNDYWVHNEMKAEIKMFFETNENKDTTYQNLWDAFKAVCRGKFIALNAHKRKQERSKIDTLTSQLKELEKQEQTHSKASRRQEITKIRAELKEIETQKTLQKINESRSWFFERINKIDRPLARLIKKKREKNQIDTIKNDKGDITTDPTEIQTTIREYYKHLYANKLENLEEMDTFLDTYTLPRLNQEEVESLNRPITGAEIVAIINSLSTKKSPGPDGFTAEFYQRYKEELVPFFLKLFQSIEKEGILPNSFYEASIILIPKPGRDTTKKENFRPISLMNIDAKILNKILANRIQQHIKKLIHHDQVGFIPGMQGWFNIRKSINVIQHINRAKDKNHMIVSIDAEKAFDKIQQPFMLKTLNKLVLEVLARAIRQEKEIKGIQLGKEEVKLSLFADDMIVYLENPIVSAQNLLKLISNFSKVSGYKINVQKSQAFLYTNNRQTESQIMSELPFTIASKRIKYLGIQLTRDVKDLFKENYKPLLKEIKEDTNKWKNIPCSWVGRINIVKMAILPKVIYRFNAIPIKLPMTFFTELGKTALKFIWNQKRARITKSILSQKNKAGGITLPDFQLYCKATVTKTAWYWYQNRDIDQWNRTEPSEITPLTYNYLIFDKLEKNKQWGKDSLFNKWCWENWLAICRKLKVDPFLTPYTKINSRWIKDLNVRPKTIKTLEENLGITIQDIGVGKDFMSKTPKAMATKAKIDKWDLIKLKSFCTAKETTIRVNRQPTTWETIFATYSSDKGLISRIYNELKQIYKKKTNNPIKKWVKDMNRHFSKEDIYAAKNHMKKCSSSLAIREMQIKTTMRYHLTPVRMAIIKKSGNNRCWRGCGEIGTLLHCWWDCKLVQPLWKSVWRFLRDLELEIPFDPAIPLLGIYPNDYKSCCYKDTCTHHDGDGDVEDGDGDDSNVNDGDSDGDVEDGDSDGDYGDVDDGGDGDDNVEDDDDGSGNGHGDVKDGDGDDDGDVEDGDVDVGDVDDDDGDGDVEDGDVDVGDADGDVEEDDGDDDGDVEDGDGDVEDGDVDVGDVDDDDGDGDVNMLMVMLKRMMVMLMVVMLKMVMLMLECIAQPYSQSQRHGIHLNAYQW

SEQ ID NO: 32702 - protein, 2664 aa, Homo sapiens
  DOMAIN (429)..(454): 7 kw REVERSE TRANSCRIPTASE RNA POLYMERASE domain identified by eMATRIX, accession number DM00895E, p-value=3.333e-11, raw score of 15.72
  DOMAIN (400)..(2072): Reverse transcriptase domain identified by PFam, accession name rvt, E-value=5.5e-169, PFam score of 574.8
MVKGSIQQEELTILNIYAPNTGAPRFIKQVLSDLQRDLDSHTLIMGDFNTPLSTLDRSTRQKVNKDTQELNSALHQADLIDIYRTLHPKSTEYTFFSAPHHTYSKIDHIVGSKALLSKCKRTEIITNYLSDHSAIKLELRIKNLTQSRSTTWKLNNLLLNDYWVHNEMKAEIKMFFETNENKDTTYQNLWDAFKAVCRGKFIALNAYKRKQERSKIDTLTSQLKELEKQEQTHSKASRRQEITKIRAELKEIETQKTLQKINESRSWFFERINKIDRPLARLIKKKREMNQIDTIKNDKGDITTDPTEIQTTIREYYKHLYANKLENLEEMDTFLDTYTLPRLNQEEVESLNRPITGSEIVAIINSLPTKKSPGPDGFTAEFYQRYKEELVPFLLKLFQSIEKEGILPNSFYEASIILIPKPGRDTTKKENFRPISLMNIDAKILNKILANRIQQHIKKLIHHDQVGFIPGMQGWFNIRKSINVIQHINRAKDKNHMIISIDAEKAFDKIQQRFMLKTLNKLGIDGTYFKIIRAIYDKPTANIILNGQKLEAFPLKTGTRQGCPLSPLLFNIVLEVLARAIRQEKEIKGIQLGKEEVKLSLFADDMIVYLENPIVSAQNLLKLISNFSKVSGYKINVQKSQAFLYTNNRQTESQIMSELPFTIASKRIKYLGIQLTRDVKDLFKENYKPLLKEIKEDTNKWKNIPCSWVGRINIVKMAILPKVIYRFNAIPIKLPMTFFTELEKTTLKFIWNQKRARIAKSILSQKNKAGGITLPDFKLYYKATVTKTAWYWYQNRDIDQWNRTEPSEIMPHIYNYLIFDKPEKNKQWGKDSLFNKWCWENWLAICRKLKLDPFLTPYTKINSRWIKDLNVRPKTIKTLEENLGITIQDIGVGKDFMSKTPKAMATKAKIDKWDLIKLKSFCTAKETTIRVNRQPTTWEKIFATYSSDKGLISRIYNELKQIYKKKTNNPIKKWAKDMNRHFSKEDIYAAKRPMKKFSSSLAIREMQIKTTMRYHLTPVRMAIIKKSGNNRHGRPTVSKTLSKVLWPGASQTSHWPPKIPQKPSKHSSLGPIPRSFDKRICMFNKPPSKRQLSGGFLPDVQGYVRLFVPYQPKQDRIKKFHIHVVCQGRVGGGRRTKNLNAPTRRINKEKAAPKQITAKLLKSSALKRVVALPERSVRSENGQTASLSGPLPPEYPNWETPPRHHHQRPKVDKTTKVGRIQSRKAENSKNQSASSPPKDHSSSPAMEQTWTENDFDELTEVGFRRSVITNFSELKKDVRTHCKEAKNLEKRLHEWLTRIKSVEKTLKDLMELKTMAQKLCDACTSFRSQSDQVEERVSVIKDQMNEMKDTHRLKVKGWRKIYQGNGKQKKAGVAILVSDKTDFKPTKIKRDKEGHYMMVKGSIQQEELTILNIYAPNTGAPRFIKQVLSDLQRDLDSHTLIMGDFNTPLSTLDRSTRQKVNNNTQELNSALHQADLIDIYRTLYPKSTEYTFFSAPHHTYSKIDHILGSKALLSKCKRTEIITNYLSDHSAMKLELRIKNLTQNCSTTWKLNNLLLNDYGVQNKMKAEIKMFFETNENKDTTYQNLWDAFKAVCRGKFIALNAHKRKQERSKIDTLTSQLKELEKQEQTHSKASRSQEITKIRAELKEIQTQKTFQKINESRSWFFERINKIDRPLARLIKKKREKNQIDAIKNDKGDITTDPTEIQTTIREYYKHLYANKLENLEEMDTFLDTCTLPRLNQEEVESPNRPITGSEIVAIINSLPTKKSPGPNGFTAEFYQRYKEELVPFLLKLFQSIEKEGILPNSFYEASITLIPKAGRDTTKKENFRPISLMNIDAKILNKILAHRVQQHIKKLIHHDQVGFIPGMQCWFNICKSINVIQHINRTKDKNHMIISIDAEKAFDKIQQPFILKTLNKLGIHGTYLKIIRATYDKPTDNIKLNGQKLEAFPLKTDTRQGCPLSPLLFNIVLEVLARAIRQEKEIKGIQLGKEEVKLSLFADDMIVYLENPIVSAQNLLKLISNFSKVSGYKINVQKSQAFLYTNKRQTQSQIMSELPFTIASKRRKYLGIQLTRDVKDLFKENYKPLLKEIKEDTNKWKNIPCSSVGRISFVKMAILPKVIYRFNAIPIKLPMPFFPELEKTTLKFIWNQKRARIAKSILSQKNKAGGITLPDFKLYYKATVTKTAWYWYQNRDIDQWNRTEPSEITPHIYNYLIFDKPEKNKQWGKDSLFNKWCWENWLAICRKLKLDPFLTPYTKINSRWIKDLNVRPKTIKTLEENLGITIQDIGMGKDFMSKTQKAMATKATIDKWDLIKLRSFCTAKETTIRVNRQPTKWEKIFVIYSSDKGLIFRIYNELKQIYKKKTNNSIKKRAKDMNRHFSKEDIYAAKNHMKKCSSSLAIREMQIKTTMRYHLTPVRMAIIKKSGNNRINKIDRPLVRLIKKKREKNQIDAIKNDKGDITTDSTEIQTTIREYYKHLYANKLENLEEMDKFLNTYTLPRLNQEEVESLNRPITGSEIVAIINSLPTKKSPGPDGFTAEFYQRYKEKLVPFLLKLFQSIEKEGILPNSFYEASIIVIPKPGRDTTKKENFRPISLMNIDAKILNKILANRIQQHIKKLIHHDQVGFILGMQGWFNICKSINVIQHINRTKDKKPHDYLNRCRKGL

SEQ ID NO: 32703 - protein, 659 aa, Homo sapiens
MRQRRAELLSKDKRVRTDGNNKCSPSAIGKRKERGTNDWIEGDNNQESQGLNCSDTLNRDLGPNTRGFLYAGLSGLDPDPSLPTPDMSSEVLEDNLDTLSLYSGKDSDSVKLLEEYADSESQASLQGRSRCWQHPHPAPLSYPPAASGSQLSLQGKFPSAKPPLLGGYTCTAQRTQWALTKRSLRATRESVSRQQGVYGLVGRKRTRHHRGVLGLLGIPSARPERPGTGSEAGPTRLPGAAVARRRPARPVRGRLGDPAPTAAQTSGPASLPPPPPPRSYGDPHQNGYPDPDPAPSASPDLPPAAGDTRGSGGRRKKRRTGTARLNTPGRKAHKTEGSGREKGARAPARATNPRTTEKTPHTTTQPDRQTAPPTQARGARPAARRSRRHSQPEHGGERRSGDRQAHGRGADTGRAGGERKGGPARQPPGILAHCNSASRHLMTPVCLLFLMSFLETVTELCNVACSSVMPGGGTNLELALHCLHEAQGNVQVALETLLLRGPHKPRTHLLADYRYTAMAVVPGQMAFPLLAVFFDRFRRLDPYEKRLFKKAFYAHKKDFYLIHKMPWGSATVKLDHFFPDVIILNALSYRLCLDLVKENKQAVAVPRGPWECDLAIGPAASFGKPSGSTSSFGLALPLTTKAQDHKILPGDEGVQTGAT

SEQ ID NO: 32704 - protein, 1422 aa, Homo sapiens
  DOMAIN (508)..(522): C2H2-TYPE ZINC FINGER SIGNATURE domain identified by eMATRIX, accession number PR00048A, p-value=6.478e-10, raw score of 10.52
  DOMAIN (484)..(1206): Zinc finger, C2H2 type domain identified by PFam, accession name zf-C2H2, E-value=2.3e-10, PFam score of 47.8
MDQYSLGDEGALPSEMHLPSFSESQGLNCSDTLNRDLGPNTRGFLYAGLSGLDPDPSLPTPDMSSEVLEDNLDTLSLYSGKDSDSVKLLEEYADSESQASLQGNQTDKTQKRTDTKEQQRTNERRTKKKRNETQHNREKKNSRDDTERTDDETRHRYACTQLHILQTLIGPPRGIAIFLPHRSPQSLKAQHRLFALEGFRECAHAGANKIRPGLPTVPKAFPALSPRGISKERQLSSPGLSKPFFAKSKYLGGQLDGLSLRPTGQCPNCEILVMMAFANVLPPPMPTSAADTAQRTQWALTKRSLRATRESVSRQQGVYGLVGRKRTRHHRGVLGLLGIPSARPERPGTGSEAGPTRLPGAAVARRRPARGTRPGRTVPPPQPDGVWERGSFSSPAQHPDQGSRQSTNYNRARAGAPLKPRDWGLGAGAAPARRAQSPDVRKTPIGSGSRRSAWRGRGLFRRTRAGDPEALLGAGGRHTAEDDDLCGKVFSSASSLSKHYLTHSQERKHVCKICSKAFKRQDHLYVGVWTGHMLTHQKTKPFVCIEQGCSKSYCDYRSLRRHYEVHHGLCILKEAPPEEEACGDSPHAHESAGQPPPSSLRSLVPPEARSPGSLLPHRDLLRRIVSSIVHQKTPSPGPAPAGASDSEGRNTACPCPASSGSSSCTPAGPHAAPAALDTELPEEPCLPQKEPATDVFTAPNSSAAENGAPDPPEPEPDTALLQARSTAECWPEGGSVPACLPLFRGQTVPASSQPSSHSFQWLRNLPGCPKSKGNNVFVVHKPSAVPSREGSESGPGPSSGSPSEESPPGPGGGLEDALPFPAALLRVPAEAPSDPRSASGEDDPCAPKKVKVDCDSFLCQNPGEPGLQEAQKAGGLPADASPLFRQLFLKSQEPLVSHEQMQVFQMITKSQRIFSHAQVAAVSSQLPAPEGKPAALRPLQGPWPQQPPPLAPAVDSLHAGPGNPEAEGSPARRRKTTPGVPREASPGSTRRDAKGGLKVAAVPTPLAAPSLDPSRNPDISSLAKQLRSSKGTLDLEDIFPSTGQRQTQLGGEEPPGASLPGKQAPAENGAASRITKGEKGPACSRGGGYRLLGNPRAPRFSGFRKEKAKMDMCCAASPSQVAMASFSSAGPPADPSKSKLTIFSRIQGGNIYRLPHPVKEENVAGRGNQQNGSPTDWTKPRSTFVCKNCSQMFYTEKGLSSHMCFHSDQWPSPRGKQEPQVFGTEFCKPLRQVLRPEGDRHSPPGTKKPLDPTAAAPLVVPQSIPVVPVTRHIGSMAMPVLEDPLLKKLLLDSGTQSVDLKGQEKDGEERDSKESSQQRKRKKRPPPSTAGEPGPAGCHQSRLRSPMFLVDCLLKGLFQCSPYTPPPMLSPIREGSGVYFNTLCSTSTQASPDQLISSMLAWAPTHLPSLFGFAYSGHAMLD

SEQ ID NO: 32705 - protein, 57 aa, Homo sapiens
  misc_feature (1)...(57): Xaa = X or * as defined in Table 2
MGATPWSNEKLQEEGSGDSQRKTDLLKVMQPAEVAFCMALEDGDLDRSVGPETGRDX

SEQ ID NO: 32706 - protein, 190 aa, Homo sapiens
MGATLWSNEKLQEEGSGDSQRKTDLLKVMQVIRQRGRGQTELEVLHFICQPYNCCLWGGKSSKPAWPALHQLGTPQKKVVPLSHFHKGTIWLAGGLWPAPHHYPPPTSRADPKPGELLISALRAGISSSVSGDSYCEPRDEITPACRCPPGLWPHAILPPPSRSCFCRPGCGVQRHLEGSGDGSGGSLSL

SEQ ID NO: 32707 - protein, 237 aa, Homo sapiens
MESSRKFKTMKDVYTGERLENILILSSKFSKPKSTPGSVIAQKLEEMHPKHQPLPESPGYTYQHISRDLSATVPSPPPMTVSMKPEGQWPEHFKSTATLTLRVTEFPGFVSLPTPVLPRKPHRQSVIETLVTENGNIESVPKQIPPRPPEGLTKTEKIESEIHVVRGEGFKTVAATRYETITAMTNLAIVNCQVYGRNALNLKDFAYIIHRVSSSSSCSYGQYSSPVTFQMVFKFSP

SEQ ID NO: 32708 - protein, 117 aa, Homo sapiens
MVVEDRETHRGNEGRDSNYAAVSHGMPKTLGEHQKLRRVPPPAEPAPFRNLSTVNGSDRRCLLTCQQNRLLGTWEWIRTAVKALGPRPAGGQAVREQGSTPAFECEKLLYCALLFLQ

SEQ ID NO: 32709 - protein, 307 aa, Homo sapiens
  DOMAIN (236)..(279): Ribosomal protein L10e proteins domain identified by eMATRIX, accession number BL01257A, p-value=1.087e-10, raw score of 11.15
MTLRFWDDLCLTQGCLGKGEQKQVEGAGLLNPIQPRFPAKPWDEDLRRLLPPTALRIAQKSGCWWHPHPSMACGTDHPAVLVTSRLCTCVLGYTAPALILQAGSWEVSRMGITLRIPTFHIYSVHPCTFLPPWSIQMVLLNTNRPGSQNNTPADLSQQSYIDTKLLLMGKLRPFSDSKLGKDLPSCKNVANLALQLRHHSSDKAVHGSHGYPAGPAQQRSVVPHLPAPSLPSPLTITSNISSVTSIVRRSHTHSYFCQGFPNAKIRLFDLGWKKAKVDEFLLCGHMVSDEYEQLSSGALEAALFVPC

SEQ ID NO: 32710 - protein, 459 aa, Homo sapiens
  DOMAIN (232)..(410): Ribosomal L10 domain identified by PFam, accession name Ribosomal_L10e, E-value=0.045, PFam score of -53.0
  misc_feature (1)...(459): Xaa = X or * as defined in Table 2
XSCSAHTICKRSLQTPGQQSYIDTKLLLMGKLRPFSDSKLGKDLPSCKNVANLALQLRHHSSDKAVHGSHGYPAGPAQQRSVVPHLPAPSLPSPLTITSNISSCQSLAPPSSSPSWTGVPAFQVGSQPPPLEVDLQPLVSAIPTSGCRLTGGFLGNQEEELQELNYNPPLRINQLVTMRAGQVPQALQFRVQHPGTPRNLARQLPDPPVGHWQIEDECENERLLRATVLGIARFHEHHVHGAPRVLGVQIQGFPNAKIRLFDLGWKKAKVDEFLLCGHMVSDEYEQLSSGALEAALFVPSCPTQNLSVIMEASDTSQRSRILQDAWLTTAEANKKEKSLRPGHRPEEPQEPRQPDVMWCPGRDPPWDPLAAKDRQLGTESPVLWHAWKVGSQKRQPERCAKEQGWESTHERKWAGETHRLLRALGDPPVHKRRAALTCQLLLRMRGDGVCATNQARAGX

SEQ ID NO: 32711 - protein, 186 aa, Homo sapiens
  DOMAIN (70)..(110): Ribosomal protein L10e proteins domain identified by eMATRIX, accession number BL01257B, p-value=1.000e-40, raw score of 12.56
  DOMAIN (10)..(184): Ribosomal L10 domain identified by PFam, accession name Ribosomal_L10e, E-value=7.2e-91, PFam score of 315.3
PLKILVSPWAAAPPSVTGIVRTSRTQSLASAEVSLMPRFAFLTWGGKKAKVDEFPLCGHMVSDEYEQLSSEALEAARICANKYMVKSCGKDGFHIRVRLHPFHVIRINKMLSCAGADRLQTGMRGAFGKPQGTVARVHIGQVIMSIRTKLQNKEHVIEALRRAKFKFPGRQKIHISKKWGFHQVQC

SEQ ID NO: 32712 - protein, 161 aa, Homo sapiens
MKRSTSPRPSGNGETVHADIETTLYPESGTLEMNVKDLRPRARTILKWNELNVGDVVNELVDARDVGLGAWFEAHIHSVTRASDGQSRGKTPLKNGSSCKRTNGNIKHKSKENTNKLDSVPSTSNSDCVAADEDVIYHIQYDECYLHLVVCFPEYPTDKMA

SEQ ID NO: 32713 - protein, 241 aa, Homo sapiens
MPDERNPVARIPVPVYVRGSLEGGRLNPLREIFRGQHYIRAKVYFPPIYPTPSLLQYQIALLLQRALGEACKDRGKDQKKVISGHKALEQLEDLGRVRRAAIHMRRLHPGGSAKQPSFLNWASGAGTCEMPAGSLHVEGSHSVHPWEWLSRTVGLPRSSTCSTEIHKFSSSRPYLLTVTSHVRRDKQAPLGPSYEGTHPMRVASTLKTKSPSEGSASWYHHLGVEDFNLSILDGDKCSDQG

SEQ ID NO: 32714 - protein, 138 aa, Homo sapiens
MNPPAEIPVHILSTKNLNLKETSKYTGPLYSNRSVTLRQQSLQQRKSLMLTGYQERNGVTPWGLDADPFALGKLGLPTEPAEVSGLVTSAPYNLLYLPSEGKIKHWFEQRESHELALWVLLCLALRELYTRQGTWVKI

SEQ ID NO: 32715 - protein, 134 aa, Homo sapiens
MYQVLFYALRDVAMNNANKVSAVMELSFKILTEIVDPYAVSNVHQDGSLLGHQSPWRSMQLFQTPTLPTSNTTTLTFQFTSSPGKKKNDEWRQMEKKGKKENRRMGSKRTRGRGDTENKKIKRDRVIAIGELIL

SEQ ID NO: 32716 - protein, 255 aa, Homo sapiens
  DOMAIN (153)..(163): w KINASE ALPHA ADHESION T-CELL domain identified by eMATRIX, accession number DM00179, p-value=2.957e-09, raw score of 13.97
  DOMAIN (97)..(162): Immunoglobulin domain identified by PFam, accession name ig, E-value=0.0034, PFam score of 15.4
MKVLATSFVLGSLGLAFYLPLVVTTPKTLAIPEKLQEAVGKVIINATTCTVTCGLGYKEETVCEVGPDGVRRKCQTRRLECLTNWICGMLHFTILIGKEFELSCLSSDILEFGQEAFRFTWRLARGVISTDDEVFKPFQANSHFVKFKYAQEYDSGTYRCDVQLVKNLRLVKRLYFGLRVLPPNLVNLNFHQSLTEDQKLIDEGLEVNLDSYSKPHHPKWKKKVASALGIGIAIGVVGGVLVRIVLCALRGGLQQ

SEQ ID NO: 32717 - protein, 69 aa, Homo sapiens
VSAPVKKKASCPADRDKECAHISGAEHPLLVKAGDSAGFWCRQCGHQMHGTQLAGMPGKCYYSDNSDSA

SEQ ID NO: 32718 - protein, 374 aa, Homo sapiens
  DOMAIN (252)..(299): kw TRANSCRIPTASE REVERSE II ORF2 domain identified by eMATRIX, accession number DM01354V, p-value=1.000e-40, raw score of 12.97
MPYSQYKFTVLICFHDADKDISETGKKKKFNWTYNFTWLMRHQNHGARQNALLTWQQQEKNEEEAKAETPDKPIRSFISMTNMKIQGTLFYTRIYFVYYTAVIQCNSWYMISSLFLDPLLVSWCDLSGVLKSLVCHITRIAFLAPSHLESPQEEIHRGLIHQISIVILNPGSSLHATLHPHYESHAQTVRTTAVTLQLSHSDAYLKAQNLMKLLSNFSKVSGYKINGQKSQACPYTNNRQTESQIMSELPFTIATKRIKYLGIQLTRDVKDLFKENYKPLLNKIKEDKKKWKNIQCSWIGRIIIMKMAILPMVICRFNAIPIKLPMTFFTELEKTTLTFIWNQKRACIAKKILSKENKAGGIMLPDFKLYYKAT

SEQ ID NO: 32719 - protein, 344 aa, Homo sapiens
MPYSQYKFTVLICFHDADKDISETGKKKKFNWTYNFTWLMRHQNHGARQNALLTWQQQEKNEEEAKAETPDKPIRSFISMTNMKIQGTLFYTRIYFVYYTAVIQCNSWYMISSLFLDPLLVSWCDLSGVLKSLVCHITRIAFLAPSHLGLSAMDTSTSSSRGKRRVKSTCSSGESPQEEIHRGLIHQISIVILNPGSSLHATLHPHYESHAQTVRTTAVTLQLSHSDAYLKAYSTHSYFRERRKSRPLLQAAICEDPALKDLHSSPLPPTTLRFHPSSHVVIVRTVRIEMPPLVIPRQTESGVELQQTPIDLQLRDLIVRRKMNKQKGIASTSTQRTSTPKPHL

SEQ ID NO: 32720 - protein, 102 aa, Homo sapiens
MVRGKRHFLHGGGKREMRKKQKRKPLINTSDLLNTTQREKGMNLMRAITEMGLKAITLSAKSQSQKIISLKNVSRSYVRGLEQQCQRGTLLLRKSHASKPVM

SEQ ID NO: 32721 - protein, 197 aa, Homo sapiens
WVNQNRMAYYSLKPLLPCSSVLTCGQASQDLLTSATLVTGQILSVYHAPNTILRTRETKRTVGPAFKEHMASGNRHSRKLEINKRKDHGKLANMWKLIPHVTVFGNRDFKEVTKNIHCDYPVNNPFKKGDNERHTAVIDWSIAILKIARSSYSGRRATTAQHPELALNPKALEMNDFVKIPLWECEEMGSKLKDSDP

SEQ ID NO: 32722 - protein, 166 aa, Homo sapiens
  DOMAIN (105)..(120): G-PROTEIN BETA WD-40 REPEAT SIGNATURE domain identified by eMATRIX, accession number PR00320C, p-value=9.609e-11, raw score of 13.01
  DOMAIN (80)..(118): WD domain, G-beta repeat domain identified by PFam, accession name WD40, E-value=4e-06, PFam score of 33.8
  misc_feature (1)...(166): Xaa = X or * as defined in Table 2
XELFIHQILVTSKGEGRTSSSEPGVCDYLQLGHRVGDQYRPRQVCELDVHAEREHAREALLHVLGFVSAITLLKLEQNTCSVITTLKGHEGSVACLWWDPIQRLLFSGASDNSIIMWDIGGRKGRTLLLQGHQCVTTCGGGERIRVSGELVKGINSLIPLSANPTF

SEQ ID NO: 32723 - protein, 211 aa, Homo sapiens
MKYWGGDGEEAVASRTVREAGLGVGSSLNIDVSGNYNGGCRELERAGTLRKAEGQGHIPREMSIFKEKPEDWEPKGETGRMGKVGGEPARTVQPRKLEGSEFQGGASGGHACGEQRAPPWREPVLSAVSGDDICSPFCSCSSSEPGVCDYLQLGHRVGDQYRPRQVCELDVHAEREHAREALLHVLGFVSAVSFRATDLSFPWPLLLSVWF

SEQ ID NO: 32724 - protein, 45 aa, Homo sapiens
MVGTPEGPGSRGKLLILSPKPLAAATLPSGHRVPPGYGLQSVGEA

SEQ ID NO: 32725 - protein, 176 aa, Homo sapiens
MKPRTLTVSVTVLKAARLELFVPPGGLVVSLASGVKLQIFVVSVTAHKSSVDTKTVGAPTVHAATQLRESEMDIVETTPTMTIHYGPKGKEKTVIGQKGQDLIFNRQLPYFLPLLPALGQSEKAKCAPHTNRALTKATYAKHQPSTWHVNKTQSLQLAGKARKTALHLQTKSSWWR

SEQ ID NO: 32726 - protein, 150 aa, Homo sapiens
GLPLCLAKNGCAHIRNILMKVLLLERDPNPDPKRGFLDLMQERIQVITCLLNTLRIVTRLGYARISHAELSDSEIQMAKFRIPDDPTNYRDNQKVVIDTEKFLRKFILTQAPTKEVSAAIWPFRFGYDNEGWSSLERSAHLLNETGSARV

SEQ ID NO: 32727 - protein, 100 aa, Homo sapiens
MQESPHAELSDSEIQMAKFRIPDDPTNYRDNQKVVIDHREVSEKIHFNPRFGSYKEGPNYENNHNFHMNTPQILFMKHLKQEVIGWENLRKKVCKIKRRD

SEQ ID NO: 32728 - protein, 245 aa, Homo sapiens
MSKEGSRDIQAIASETCEFVGRALCGLIFLDDMEEGLKRLMCFLIPSTPICPSLVGLAAVMTPENLHLFGEVLRPSGLSSTLCLIVIWLVPPPVRRMKIADTYSVCFSPEWWMLETLLRICGLTNVVSKSELPFAVFKNNCPTSPIIVSTHPSEMAHQVERCRKGMVSNELLVSSISMVINLLKLASIRQALQKDPPETSSFFYSGAIESLLHIAATIILFGLQVGSHQLTQIMALTSPCLEHST

SEQ ID NO: 32729 - protein, 96 aa, Homo sapiens
MGRPTRPVKEKYDDQNKNVFLEKKNWKHTIVTEQWLLCDPNSVLPSNWIYSNEPCHEVATAKTLLPGRSVDGLVVPSCSLSFCSLLFVLGGHIWGG

SEQ ID NO: 32730 - protein, 70 aa, Homo sapiens
  misc_feature (1)...(70): Xaa = X or * as defined in Table 2
LSATVEEVNLLDPADSYNEFCVDHQTKGLAGEDKGEAKHLEWQSDMAIWDQELGTADTKKQGQKRTHSCX

SEQ ID NO: 32731 - protein, 59 aa, Homo sapiens
MTQAIHRHSSENCTELSLVVTCKRLAWEISCGSCEELAHISLACYHKQAKGASSPYDIY

SEQ ID NO: 32732 - protein, 377 aa, Homo sapiens
MAEKKSIPAKGTDLAKALGQTVPSADVGSLTGARWLGLISAQIHWLTTKLSSHSLIREMQIKAITTTTRMAKIKKTDNPSVDKDMRKPESSQIAVWALDIPKNASMKGNVLSSVILSHKQIGLHVQPDSKSHRPSGRQQRVPANSRKDNTAREDGCLQADNAVSEHPNTFDTSRLHRGKSLGMNTGKLVTAWSSEGQHQRHLGAESLGPHSRAIESESVAQQGSQSCKQRMEISNCSIEGCCSADCLAQPGSSASLRHQGMPSPLLLLANAYTLIKTKLNDTASWKTSLSALLPPHPQPSARTLNLSIYSTKLIIKIANAYMVPDTYYGPGTVTSCHFIEVIGMLACFHKTIIRSETFIEYFATGVLGKVNKTVTVK

SEQ ID NO: 32733 - protein, 112 aa, Homo sapiens
MPMPASTFTIAVGCWTEMKMETWSSNDLATERPFSPSEANFRFVFGDLLGRKKKKHLRERYDAFLPSTGNVFPTSPAPLEFLLPPHPTEDQALPIITSHQGSPLPKNEIQTP

SEQ ID NO: 32734 - protein, 297 aa, Homo sapiens
MANWALAQPSRGLLDWQHLAYTSLDFVQRAQVAGSPPQDARSCTQELLSLIIEEHLHLGGFGDAKEGYGAAAEELQGWLPRAATGHRSAKQQSYSMTMDINSLTALCGSRSAPERGCFYCAVGIRSAAGIERHGSSHSVLLIRGLKQAHLEVADTSFIIAVFGEWSYPTLPQFLPAHSLPKPCCMASPLPTSLGTAFPHSLQVLWNFELERDDLGYLEGEFSKLQSIQEEAEHKSLENLQPDDVIEKKNTFSGEKFKPAAEICLITRSQMLITKTMGKMSPGHVRDFGSAPINVLEA

SEQ ID NO: 32735 - protein, 102 aa, Homo sapiens
MPGLGVKRQYAVPQGHAARRPSAARRRAGKPASWGCLDAGERVLDVSLRTRLGPSGLVKSESCTSPLRKRGGGLLSTLWGWSRQSFSSRRAKLFLTVCSRYF

SEQ ID NO: 32736 - protein, 406 aa, Homo sapiens
  misc_feature (1)...(406): Xaa = X or * as defined in Table 2
XDGGAAPQSRRRDLPGPLPAAHPQSPPSGRPGRDPRVCTGGRAGAEPRADQQQLKRCGRRLPADPAQLSECPAVVAEAGNRRPRRQVPRAQGAPATAGFQRVWPAREGGKAGPTSAAGWSAGARASPARALPAAKDNLPLFPDTWGVVYFLLRPAADRALLATRGGAEGCGTDTPGVCLCGSQDVVGGCRPPSRDLRLSEMTLVLSMNRFCEPIVSEGAAEIAGYQTLWEADSYGGPSPPGPAQAPLQGDRGAEWFMAQDCPYRKRPRMAKEECEKFHACCFYQECGGHYLNLPLSVNANVGSASTAASSPSASSSSSSSSSSPPLPLPSCSRQVDFDVGSASIYKSDGQIPANEIFVTNVRSLGVQEKAKLNDEKANDDTNRDGGPLSHEPVGNDLAFECKGPIL

SEQ ID NO: 32737 - protein, 85 aa, Homo sapiens
MICHCLPSHPYGTIYFQENKLRAPTVSTLWSHIPVMLTQEGTASLPAAFMAGVEHLWLFQVNGANCQWIYPSGVWRTVALFSQLH

SEQ ID NO: 32738 - protein, 137 aa, Homo sapiens
MSPIVNWACEGSRLHALYENLMPDDLSLSPITPDGTVQLQENKLRALTDSTLCQFHKGTKENKSKNSSKRQQFQRLKEHQPTKDSSPGMILNKGDMAGRTEIEFRIQIRTKIIEIQEKGKTQSKKSMESSKMTQTRK

SEQ ID NO: 32739 - protein, 23 aa, Homo sapiens
  misc_feature (1)...(23): Xaa = X or * as defined in Table 2
XYREMGQIRVLILSQEVEFQRLV

SEQ ID NO: 32740 - protein, 258 aa, Homo sapiens
MDSLNTNCVQIPTRAYRKTWRKLIGQAPEPGECLGPSQEGHIGDWPLGGAAAPVDFASRKVGKGQEDSKVIGTSQLSHSLGSAGTAGIPMLMQTSSMQKSETTGLYRNPSRHRMYNCAFSPSSTLPSHYLDLHSGQHQSSGHADPITRRGTYLALWGWSVEASAGLEDGTGTPHSSSLASRRRQAAIVGEGVDIKLVSHLARDFSILSTFQVSSAERGLNKQALTPAAKEGQEAAARCGNMNARHSGSRQSPRRAHFQ

SEQ ID NO: 32741 - protein, 70 aa, Homo sapiens
  misc_feature (1)...(70): Xaa = X or * as defined in Table 2
MFEVNDFRKMSEIHAGKSSALVLREASCSMERPTGQELMYLAKGQQRLEACQQLSEKVTRSNLEMTTAPX

SEQ ID NO: 32742 - protein, 189 aa, Homo sapiens
MATTSKVGLISLGGEEVTAAEPLTISVSGLECPATPSVCRSPGSVCLLTREKPGLGYLLLSVLSLAGSPAHSDQRPQALVTAAVRPVGVQLYQVYSVVCGERSASHDVFDYGVTLALVAQLALSTFSPIAIKDLHQYLPDPKTQIPVNPGYPHPSEFLIHESSNITLAFSLCILSVTAMRLEQRRYTRT

SEQ ID NO: 32743 - protein, 112 aa, Homo sapiens
LDYQVPKILSPLNGNRCHIHIGELSRFVFASQTLFPHGAAILRSQASQYKRRTRQALSRNVDCTTVTAKGGEDDGKEAYYTSIYSKSSFQQYIKFSYSVFGFGNRVMLYLIE

SEQ ID NO: 32744 - protein, 159 aa, Homo sapiens
MKVRYGSSEAPPGENLQNNSCPAIPFMGTNLKPPKNPQLFLCWSLPMVTMTGTSKIMTEGDALGSVTEGPMVVSFTESQPGLRRDHRQWMLSLTFPSCMLLGRLAPNPTGRISETTEFGAQRNSQKCGRSRNSYTIPVLEEATSTFKGSLCPIPLELSM

SEQ ID NO: 32745 - protein, 70 aa, Homo sapiens
MEKVILVDVNSARLSDMKLLLGPDLWQLASNDFENKKIKVLDSGLGLTETHILTLEDPVNVTDSPTWKER

SEQ ID NO: 32746 - protein, 42 aa, Homo sapiens
MKIAALLGCMMMAARCGTLSAMRDLSFSDENRRLAVGTAAAA

SEQ ID NO: 32747 - protein, 107 aa, Homo sapiens
  DOMAIN (36)..(89): Band 41 family domain proteins. domain identified by eMATRIX, accession number BL00660A, p-value=2.091e-16, raw score of 31.50
  DOMAIN (29)..(92): FERM domain (Band 4.1 family) domain identified by PFam, accession name Band_41, E-value=8e-15, PFam score of 48.6
MTLAAKLEDFELTLEHLLMDVFMTEGRRCQVHLLDDRKLELLVQPKLLAKELLDLVASHFNLKEKEYFGIAFTDETGHLNWLQLDRRVLEHDFPKKSGPVVLYFCVS

SEQ ID NO: 32748 - protein, 187 aa, Homo sapiens
MTLAAKLEDFELTLEHLLMDVFVVRQLKGLLDPRTTLRCPREGGCELLPFQDPPVCVSQLEKAMEGRAIVLLMLASQERVYEHPIPFLIWKENNTHHGIHNAGDLMNGNGEAALMAQSHSVTESRVGTPTSPPHSSMTVGRGSSSQWGSSDLQVEAGWKQSLPGKPSIAGTSRPEAVIREQDLLPGL

SEQ ID NO: 32749 - protein, 38 aa, Homo sapiens
MRFQQILLSVTWRLPWKLLKKATMEYSRPLGILVLHKP

SEQ ID NO: 32750 - protein, 89 aa, Homo sapiens
  DOMAIN (42)..(58): Ly-6 / u-PAR domain proteins domain identified by eMATRIX, accession number BL00983C, p-value=6.885e-09, raw score of 12.69
MRRMRAAEEGDSVAPGNFSVPVYIRTCHRPSCTTEGTTSPWTAIDLQGSCCEGYLCNRKSMTQPFTSASATTPPRALQVLALLLPVLLL

SEQ ID NO: 32751 - protein, 66 aa, Homo sapiens
MSRVHVALSPPHRPGFPAGLARALGPHEQADGLARLASGSALPQSPLRGRVCGQGCAKSTAPATAP

SEQ ID NO: 32752 - protein, 41 aa, Homo sapiens
  misc_feature (1)...(41): Xaa = X or * as defined in Table 2
XTHGWERLRERPLERLASSGVEAGVLLAEGGQYSTKENCSX

SEQ ID NO: 32753 - protein, 676 aa, Homo sapiens
MAEGEANTSFFTWRQVREVLNKAPYKTISSQCALHGRQYLEQSCELLGWSPEAVLSSPVFSTPMWPQAAECERVPTSPSESLGHTFCIASPAQKPPPKLPSAIWGLVQKRRHRVACGVPSERGPWVGHHSEDTRGSGPPRVHSPVPHSQLSALLGKKEKGLESEGTDGRGSGAGLSGAGTLPETGTLRLSTAPVHRPCCCPPENGRVALSSEHAECALQPPHAIKAGGCSATSSAGHTQASTASWGTLTKGDGFSEGCLSDGLHRYITHTRPVPMGFPAVHVLAQHGHPQDSSLLGPSEWVVPRAQSLPRLTCPLASGSDTDGDLLSWVVTPIFSPVGKETEAEGQPRDETSPTDAVGWSLAAQNNTDEMNATCTRFPETPTEATSSIIAATSSPHKLSKRPKKQAQEGDMASLGGRGGRQVAALGLVPTVSPLARAQLSLVGATVGQNTCECGLPGEGQWQWGCPSKLVASGGGQCQGEAVFITAFSPSSTGSRPVKRVAEKQEEPQRPSPRKHWGFHLTSGRFALGAAGPSPRPGQGQARILVADPSSRPGQEPNCQTFSSLSCLSAGTEDCGPQSPFARHVSNTRAWTALLSASGPGGRTPAGTPVPEPLPPSFDDHLACQEDLSCEESDSCALDEDCGRRAEPAAAWRDRGAPGNSLCSLDGELDIEQIEKN

SEQ ID NO: 32754 - protein, 508 aa, Homo sapiens
MPQPFIQTSAVIVSGPVPAVDWKLQLLNLGPSGLAQCSQNSPSAYVSRALGWPRGLWNEGDSRLAITGLAQKRAMTCLQVSKGPSGRCLREGHSGMRAEQGDCSGGFCSNRRSGGGHWHREVYMLQRKYSVQETRPHVSSACTCVKPERQADETRLPKYLLPRRTGICKGVERRPSPCRGCWLCAQHTPRDHLRGGSASPHLTENDRWRDLDRKCPLQIDQPSTSIWECLPEKDSSLWHREAVTACAVTSLIKDLSISDHNGNPSAPPSKRQCRSLSFSDEMSSCRTSWRPLGSKVWTPVEKRRCYSGGSVQRYSNGFSTMQRSSSFSLPSRANVLSSPCDQAGLHHRFGGQPCQGVPGSAPCGQAGDTWSPDLHPVGGGRLDLQRSLSCSHEQFSFVEYCPPSANSTPASTPELARRSSGLSRSRSQPCVLNDKKVGVKRRRPEEVQEQRPSLDLAKMAQKKYLATRPCHLDFILFVLELCLVLTLILDIDLNEMNLELILCHQERL

SEQ ID NO: 32755 - protein, 963 aa, Homo sapiens
  DOMAIN (65)..(103): Outer Capsid protein VP4 (Hemagglutinin) domain identified by eMATRIX, accession number PF00426S, p-value=8.663e-09, raw score of 15.67
MPVPVGIAWLAVPSTATLLLLNEHTPNTLTRTRFINTLTRSTSTLTRTLTRSISTLTLTLARSISTLTLTLTRSISTLTLTLTRSVNTLTLTLTLTRSISTLTRTLTRSISTLTRTLTRFISTLTLTLTRSISTLTCTRTRTRSTSTLTRTLTRSTSTLTLTLTRSTSTLTRTLTRSTSTLTRTLTRSISTLTRTHTRTRSISNPSKNNPLCTQQKCILTFTKGTFTKGTLLHTALVAIAKVKHWTNARQGEDGKTDHGRIAHWNTPQRLNLGGGSLMAAVMFLCVSPNSALRQPAVGTRPERLSSGVTTSRKTSTLHTESENDRWRDLDRKCPLQIDQPSTSIWECLPEKDSSLWHREAVTACAVTSLIKDLSISDHNGNPSAPPSKRQCRSLSFSDEMSSCRTSWRPLGSKVWTPVEKRRCYSGGSVQRYSNGFSTMQRSSSFSLPSRANVLSSPCDQAGLHHRFGGQPCQGVPGSAPCGQAGDTWSPDLHPVGGGRLDLQRSLSCSHEQFSFVEYCPPSANSTPASTPELARRSSGLSRSRSQPCVLNDKKVGVKRRRPEEVQEQRPSLDLAKMAQVCESLGLKLQRAFSVRPLEQLAILKSCSSPRGPDWGLEQILRSIPSPPSLLKWNFLYKASLGKSHLYDWFLCSRHRKHGSGGSSVVRPTPWSAGWPSESLVPCALCEELGVLCCCPRIQDTAAILQSIPATQMKTRSTSNTQASLHPVNTLLQRELARAFTPVFCLTVNLRPGSPGPVDHQAADPKECRHLGGPTWSTSHGEAVGYQALRALAACTTPSPAVLTTVSVELDCEPWRADGGGGRGQGQRQGELQGPQVSPMEAAGAPGVVQGTRSPGAGSSQRPCSWTLIENQARNSQGLQAPAVHSLQCSAQFHSPLSPLKGTKGVGIAFSYCPKLVYHLTGIGPFQRKRVYGSTKWEPRLTPNPPTLLYPYPKAPLSKATCSH

SEQ ID NO: 32756 - protein, 391 aa, Homo sapiens
MSQGPTLFSCGIMENDRWRDLDRKCPLQIDQPSTSIWECLPEKDSSLWHREAVTACAVTSLIKDLSISDHNGNPSAPPSKRQCRSLSFSDEMSSCRTSWRPLGSKVWTPVEKRRCYSGGSVQRYSNGFSTMQRSSSFSLPSRANVLSSPCDQAGLHHRFGGQPCQGVPGSAPCGQAGDTWSPDLHPVGGGRLDLQRSLSCSHEQFSFVEYCPPSANSTPASTPELARRSSGLSRSRSQPCVLNDKKVGVKRRRPEEVQEQRPSLDLAKMAQNCQTFSSLSCLSAGTEDCGPQSPFARHVSNTRAWTALLSASGPGGRTPAGTPVPEPLPPSFDDHLVCQEDLSCEESDSCALDEDCGRRAEPAAAWRDRGAPGNSLCSLDGELDIEQIEKN

SEQ ID NO: 32757 - protein, 150 aa, Homo sapiens
SAAKSDDERATPRSGARREPKTTRGGHKVYALLLFPRFSRGSRGQTRKTRSNSRVSNLADLLADFESSERGRRAKPKFSQSANPNTDRRWGPSALQLRPLVPKITGKEFNESVVRCRRHAYYGRKFERKLRTGRKTEEQPSTIGKVDDSG

SEQ ID NO: 32758 - protein, 115 aa, Homo sapiens
MRTSPQKHINIYETTERTAETPQLAAGPPPEVWLSGFPQLTKAPGSPERRWIASQGGGWSLSREAVANRAAPGEEPQRGKRKCGGKPLLEAPRTEGSGVSQHAHSVSRRSQRRAV

SEQ ID NO: 32759 - protein, 45 aa, Homo sapiens
FRKETSKQGEAQRALRTHAPVGSAGKGGRSNEANASSRRRRQCGW

SEQ ID NO: 32760 - protein, 117 aa, Homo sapiens
KHNENGVDVAGRQPCSPAGSGECVVRGIRTGGLEGTHRLGLHSRITAGVNQVTNGPKSEVNSIFLVARHQVGYLELPPRYCKTRGPELLLEGMVLQKSLLSCELQAHRNLINPYLKS

SEQ ID NO: 32761 - protein, 1089 aa, Homo sapiens
  DOMAIN (400)..(448): Intermediate filaments proteins domain identified by eMATRIX, accession number BL00226B, p-value=5.560e-11, raw score of 23.86
  DOMAIN (723)..(858): SAM domain (Sterile alpha motif) domain identified by PFam, accession name SAM, E-value=1.4e-10, PFam score of 48.6
MEGVGWVSAGCGAPRAFPKLGCLATAAASENYKSYIQHVANCAVLTFIALQCFGLNVYCKNLQLTFYQVILMLSRDAVRDNPRGKQKLPRSWVAKRGAQTFHLPSGDLMVLAFDLSEDLGWNLPLTNNKMMSDASDMLAAALEQMDGIIAGSKALEYSNGIFDCQSPTSPFMGSLRALHLVEDLRGLLEMMETDEKEGLRCQIPDSTAETLVEWLQSQMKLPVASHLTQSKNHSAYCGLQGLVGFAPHDFLTSSLVTHLLIRSTPSTVAFSLILKHARYCRWHIANSEFKEDLTDQALIEVDLKEWGKKKKGWEKTVSVLTDQVEAQGEKIRDLEFCLEEHREKVNATEEMLQQELLSRTSLETQKLDLMAEISNLKLKLTAVEKDRLDYEDKFRDTEGLIQEINDLRLKVSEMDSERLQYEKKLKSTKDELASLKEQLEEKESEVKRLQEKLVCKMKGEGVEIVDRDIEVQKMKKAVESLMAANEEKDRKIEDLRQCLNRYKKMQDTVVLAQGKDGEYEELLNSSSISSLLDAQGFSDLEKSPSPTPVMGSPSCDPFNTSVPEEDRAPAESRPFGTLPPRPPGQDTSMDDNPFGTRKVRSSFGRGFFKIKSNKRTASAPNLAETEKETAEHLDLAGASSRPKDSQRNSPFQIPPPSPDSKKKSRGIMKLFGKLRRSQSTTFNPDDMSEPEFKRGGTRATAGPRLGWSRDLGQSNSDLDMPFAKWTKEQVCNWLMEQGLGSYLNSGKHWIASGQTLLQASQQDLEKELGIKHSLHRKKLQLALQALGSEEETNHGKLDFNWVTRWLDDIGLPQYKTQFDEGRVDGRMLHYMTVDDLLSLKVVSVLHHLSIKRAIQVLRINNFEPNCLRRRPSDENTIAPSEVQKWTNHRVMEWLRSVDLAEYAPNLRGSGVHGGLMVLEPRFNVETMAQLLNIPPNKTLLRRHLATHFNLLIGAEAQHQKRDAMELPDYVLLTATAKVKPKKLAFSNFGNLRKKKQEDGEEYVCPMELGQASGSASKKGFKPGLDMRLYEEDDLDRLEQMEDSEGTVRQIGAFSEGINNLTHMLKEDDMFKDFAARSPSASITDEDSNV

SEQ ID NO: 32762 - protein, 94 aa, Homo sapiens
  misc_feature (1)...(94): Xaa = X or * as defined in Table 2
MSDASDILAATLEQMDGIIAEKPTWQGTERDPVNSHQGIQAPSPTTCDELNTANNHSRNHPCAATRIPPSPRSSARSVKCSCYDMVSPTGKLAX

SEQ ID NO: 32763 - protein, 944 aa, Homo sapiens
  DOMAIN (142)..(190): Intermediate filaments proteins domain identified by eMATRIX, accession number BL00226B, p-value=5.560e-11, raw score of 23.86
  DOMAIN (578)..(713): SAM domain (Sterile alpha motif) domain identified by PFam, accession name SAM, E-value=1.4e-10, PFam score of 48.6
METDEKEGLRCQIPDSTAETLVEWLQSQMTNGHLPGNGDVYQERLARLENDKESLVLQVSVLTDQVEAQGEKIRDLEFCLEEHREKLNATEEMLQQELLSRTSLETQKLDLMAEISNLKLKLTAVEKDRLDYEDKFRDTEGLIQEINDLRLKVSEMDSERLQYEKKLKSTKDELASLKEQLEEKESEVKRLQEKLVCKMKGEGVEIVDRDENFKKKLKEKNIEVQKMKKAVESLMAANEEKDRKIEDLRQCLNRYKKMQDTVVLAQGKKGKDGEYEELLNSSSISSLLDAQGFSDLEKSPSPTPVMGSPSCDPFNTSVPEEFHTTILQVSIPSLLPATVSMETSEKSKLTPKPETSFEENDGNIILGATVDTQLRDKLLTSSLQKSSSLGNLKKETSDGEKETIQKTSEDRAPAESRPFGTLPPRPPGQDTSMDDNPFGTRKVRSSFGRGFFKIKSNKRTASAPNLDRKRSASAPTLAETEKETAAHLDLAGASSRPKDSQRNSPFQIPPPSPDSKKKSRGIMKLFGKLRRSQSTTFNPDDMSEPEFKRGGTRATAGPRLGWSRDLGQSNSDLDMPFAKWTKEQVCNWLMEQGLGSYLNSGKHWIASGQTLLQASQQDLEKELGIKHSLHRKKLQLALQALGSEEETNHGKLDFNWVTRWLDDIGLPQYKTQFDEGRVDGRMLHYMTVDDLLSLKVVSVLHHLSIKRAIQVLRINNFEPNCLRRRPSDENTIAPSEVQKWTNHRVMEWLRSVDLAEYAPNLRGSGVHGGLMVLEPRFNVETMAQLLNIPPNKTLLRRHLATHFNLLIGAEAQHQKRDAMELPDYVLLTATAKVKPKKLAFSNFGNLRKKKQEDGEEYVCPMELGQASGSASKKGFKPGLDMRLYEEDDLDRLEQMEDSEGTVRQIGAFSEGINNLTHMLKEDDMFKDFAARSPSASITDEDSNV

SEQ ID NO: 32764 - protein, 93 aa, Homo sapiens
MLGTDRCVGEEWLSKFKALPDTQITSYAATLHRKKTLVPALYKVIQDSNNELLEPVCHQLFELYRSSEVRLKRFTLQFLPELMWVYLPVTGSR

SEQ ID NO: 32765 - protein, 945 aa, Homo sapiens
MYNGQWDLGQEVLDDIIYRAQLELFSQPLLVANAMKNSLPFDAPDSTQEGQKVLKVEVTPTVPRISRTAITTASIRRHRWRREDGFDFSNEADSSIPGSPIQHGSTDLGIKRVQEGEVLVRRTPEHGSPEPNSATATTEGAEGVNGGEESVNLNDADEGFSSGASLSSQPIGTKPSSSSQRGSLRKVATGRSAKDKETASAIKSSESPRDSVVRKQYVQQPTDLSVDSVELTPMKKHLSLPAGQVVPKINSLSLIRTASASSSKSFDYVNGSQASTSIGVGTEGGTNLAANNANRYSTVSLQEDRLGQAGEEHFLKIATRQTATTQPATVQTSSDPNNTSFSLPRKRKEERKGREIRCAARRLPIPQLASGAPYLPGGRARITGNWLFPLGPKVPSLRRRLSGVSFGRRDAAGSAPDGNLAVTVSEFCSCRMCSTLKGAKLKKERAQLLVNPKKIIKKPEYDLEEDDQEVLKDQNYVEIMGRDVQESLKNGSATGGGNKVYSFQNRKHSEKMAKLASELAKTPQKSVSFSLKNDPEITINVPQSSKGHSASDKVQPKNNDKSEFLSTAPRSLRKRLIVPRSHSDSESEYSASNSEDDEGVAQEHEEDTNAVIFSQKIQAQNRVVSAPVGKETPSKRMKRDKTSDLVEEYFEAHSSSKVLTSDRTLQKLKRAKLDQQTLRNLLSKVSPSFSAELKQLNQQYEKLFHKWMLQLHLGFNIVLYGLGSKRDLLERFRTTMLQDSIHVVINGFFPGISVKSVLNSITEEVLDHMGTFRSILDQLDWIVNKFKEDSSLELFLLIHNLDSQMLRGEKSQQIIGQLSSLHNIYLIASIDHLNAPLMWDHAKQSLFNWLWYETTTYSPYTEETSYENSLLVKQSGSLPLSSLTHVLRSLTPNASIQDLNLGRGGCPQLELFDQPGWYRLVLCSGPQVGENVPFIHYLSGDFLLE

SEQ ID NO: 32766 - protein, 60 aa, Homo sapiens
LLEPVCHQLFELYRSSEVRLKRFTLQFLPELMWVYLRLTVSRDRQSNGCIEALLLGIYNL

SEQ ID NO: 32767 - protein, 577 aa, Homo sapiens [sequence omitted]

SEQ ID NO: 32768 - protein, 164 aa, Homo sapiens
MLGTDRCVVEEWLSEFKALPDTQITSYAATLHRKKTLVPALYKVIQDSNNELLEPVCHQLFELYRSSEVRLKRFTLQFLPELIGKHSLPGGRARITGNWLFPLGPKVPSLRRRLSGVSFGRRDAAGSAPDGNLPAARGLENPYWWSAANWPEAGGAGQSPLRLE

SEQ ID NO: 32769 - protein, 98 aa, Homo sapiens
MLNSSEQRRPHGVLDSVWPGIHGALCAGRWLRTGQLSWDTRHMLARKMVSSSEPQRPPTSWSWCCLASTVRPLLVDGSGWGSCRGRPAACWKEDGQFF

SEQ ID NO: 32770 - protein, 123 aa, Homo sapiens
MVHPMLVDGLGRLYEQILLWILFPAWKAASVLKVQSECALTLALAQVCAVEAVAVGGVVTAGRKMLNSSEQRRPHGVLDSVWPGIHGALCAGRWLRTVSISLPSMLNEGVFRISKTRKEQFLS

SEQ ID NO: 32771 - protein, 9 aa, Homo sapiens
MTRHADRVR

SEQ ID NO: 32772 - protein, 61 aa, Homo sapiens
  misc_feature (1)...(61): Xaa = X or * as defined in Table 2
MPVWWRRRRLRARSWALRARPLSLPRAQRSGRLLRRPKGYAPGAPKAHELSPQAICAVAFX

SEQ ID NO: 32773 - protein, 103 aa, Homo sapiens
MLIFIICFCSCFLEHVFNFPSKMLHATPQYMPRDPSSFFTTFYKFLENICYDALSYTFTSKAFLHLAEPSLRARSLRRRHHTGMTNGFFALLPPSPVARDLEP

SEQ ID NO: 32774 - protein, 71 aa, Homo sapiens
MLNTCRVILVVFSQPSTSFWKTSVMMTFIHLHLKGFLAPRRAQLRRPQSPPPPPHRHELTALRASSSLAGR

SEQ ID NO: 32775 - protein, 55 aa, Homo sapiens
SPEQARVPAGYTARPVAWRARPGLPYAFWNQRQTQSKAPLEASGSSTGECLPTYQ

SEQ ID NO: 32776 - protein, 47 aa, Homo sapiens
PRQEKKSSHVSTRRSPKLLREKPEAAAGEAAAEAGLPMFARSRARSR

SEQ ID NO: 32777 - protein, 201 aa, Homo sapiens
MEGWVQGFLRRFFGDFLLFRFLPPPPTFYILAAPTFSCVAPPLAAVRGVRSQPEPELGLAVPRATTTSFGSGESYDQVRPARALELLNGQCGLSRAVSLQQLTYGNVSPIQTSASPLFRGRKRLSDEKNLPLDGKRQRFHSPHQEPTVVNQIVPLSGERRYSMPPLFHTHYVPDIVRCVPPFREIAFLEPREITLPEAKDK

SEQ ID NO: 32778 - protein, 34 aa, Homo sapiens
  misc_feature (1)...(34): Xaa = X or * as defined in Table 2
XHWKLITWSEDLTRRSLEEEEEERKGVRDGPYSX

SEQ ID NO: 32779 - protein, 71 aa, Homo sapiens
  misc_feature (1)...(71): Xaa = X or * as defined in Table 2
MKWAGALGKGGGXCAPLPLTPRSLFPELWRRDLPARLKPLSGLGAGISLGRQGAVFGSRNVSEVEGAVRSS

SEQ ID NO: 32780 - protein, 213 aa, Homo sapiens
  DOMAIN (26)..(43): RNase H domain identified by eMATRIX, accession number PF00075A, p-value=9.429e-09, raw score of 14.44
MSLDLKDPGVVIPTTSPLSSLIWPVQKAGGSWRMTVDYHKLNQVVPPMAAAVPDVVSLLEHITTSPAKHASFLFLGRACSCLKAFTWAVPLLELAGPSAAGLPLEERQGGERRSERPARQASPGLPQAAGSSPRLQDGRLYLLTKGTLHLNHFQIKKKNSSTPWKMYSSNMQTSYYKPSSECVAQGNQEKERQRATERRWKNQEREKKNEGDP

SEQ ID NO: 32781 - protein, 62 aa, Homo sapiens
AFTWAVPLLNSLAPQLQLPQTRKWIVRSKHHTMAYECSSVFISTCASPSPIRTPDARGSLRT

SEQ ID NO: 32782 - protein, 327 aa, Homo sapiens
  misc_feature (1)...(327): Xaa = X or * as defined in Table 2
XQGWVPWKYRVFLRDELCIKQEDSLFSEFCDVVRKAYGNHSLIKYWSTFCVPGWVRQGQEYQGKQAWTLKVQVWCGDSPPSILWLHSDTDEICMGELPHGVMVRVFPAVDCVKRLNLFFTPEVITMNITSSRVASHVGRCGCRSVWRMKSTRWSPLKLTFTWQNLEGNTKGMSRKCLIRVYPMFTAQHKDAVETHGKRQKCGLRRTQHKGSRGQEHSQDSPGTNTVGLNQSWAPPGPRASRNTLLNGLTAPDGQVQQGRPAAEAPAPGRAQTTTSTVLPGKTTGPEMHRYVLRRSGPVPPTRVHYSVRRRSGPGQKTWGALLTAQAQ

SEQ ID NO: 32783 - protein, 198 aa, Homo sapiens
  misc_feature (1)...(198): Xaa = X or * as defined in Table 2
MINDEVEMNVGSEVEGSVKNNSLVFGLQNWVDRGPHFSRYLRRAYYEPGTEFYGLRIEQWTRQNKAPAPIELHSSRETDNKHTNNDIFESLSLSPLILPPNTRRSGGAENRRSAREQEAGPAAFSRTGGGFCTCAVAVRLQLPPLCGQSGPAARSGRINALWVVCVRGGRLRLWALPGLTAQMCSCDEQKQGGMEPPX

SEQ ID NO: 32784 - protein, 165 aa, Homo sapiens
MGNTTSCCVSSSPKLRRNAHSRLESYRPDTDLSREDTGCNLQHISDRENIDGASTSTISSELPSKPMKSQRWSSTRNFPEKKVCSLMDKQIKALFALREQTDQSMHFECREKAICFVPRKHLSHSTAKIQLLANMMAEEDPCHPKLQADLDDRSHSEDGEAETAS

SEQ ID NO: 32785 - protein, 269 aa, Homo sapiens
MRWAKAKTVGFPAHCADNLAAVQNPGTCSWLRLERFPPHRVTYIEPYNLCGTGESILLAPPPQSGGKRYDLTCVDTTMRLLQAFSVKRATQLETMKRLTALSVTNGMAKRTDRDIRSPEVLKRHIHLTWYERATEGYTGVECLVGMSCQTAIIQASPENGPMFLGVWGGGHEAAGTFAQDETVPSERVMLGISQSLENVSGYYADARLEVGSTQLRTAGSCSHSFKRSFLGLWVIEKKEAVLFPSGKDGPDRGSENGMLQNGVCHMIPA

SEQ ID NO: 32786 - protein, 72 aa, Homo sapiens
  misc_feature (1)...(72): Xaa = X or * as defined in Table 2
XGHSKRAEEGECCNPLSSALQPIPDINSLKFSGLFPCTYHLHLLLSKKPQPGPGTELDVPKCLRTLHRMWLA

SEQ ID NO: 32787 - protein, 306 aa, Homo sapiens
MQTVIDFRGPRVSGGKATGTSARREKVLEQVVWDFKKKWRESEKNLSLSLHEPAIALIPPSFHCILQSIFVYDLPNTPVRDAEHLTDVHLDNLYCGLSWVTPIVPTSVIDASPGIFMEKKNLFIKSRNQPVPSISLGKVLPINSATFRCLTTPYTKLLVLPVGEKLKSEKNAGRENQFDKGVLAVNWLNITPTLGIHGFGLADAYYCVPLRPEFLNLSTTDILVQNILYHEGLSGGHSKRAEEGECCNPLSSALQPIPDINSLKFSGLFPCTYHLHLLLSKKPQPGPGTELDVPKCLRTLHRMWLA

SEQ ID NO: 32788 - protein, 56 aa, Homo sapiens
HPFVPSSGNLIHHHTISTNSQSLWIHMPGLSTQCIPSFGHSDDLRLDTFLVWTNEN

SEQ ID NO: 32789 - protein, 179 aa, Homo sapiens
MAHVAEKDGLDWASGCIPGLQTGICLFGSQLCFHLSWLYSWASQCGPTAPVIDKKSSPLLTELLDLVLIGPDEEGIQPQVIICGPGKMEYTKWDRPGMYPQRLRVGAGGCGWQMILPEEGTEWVLGRTKHQLSSSGLSSFPGCLHFPPSPCCPLPSAQSLITPGSWGVAFLRILPLGGT

SEQ ID NO: 32790 - protein, 104 aa, Homo sapiens
MQRAVVLGWTVELGTQEVSHSPEAAFSGSSGRERQDENPDLTATQPSHFADAKIQTQKGSLYKVAQWLLKGRTLPPYLDLSPEPLEPLWEATVYAAYSHFCIVL

SEQ ID NO: 32791 - protein, 67 aa, Homo sapiens
AAVMEVQTLRPSYWKFLLRLTKGKFAVMNRKVLDVFGTGASKHFQDFIPRLDPRYTTVTPELPTEFS

SEQ ID NO: 32792 - protein, 212 aa, Homo sapiens
MSLRQLQKEDGTCGQDRPQRGSARLPEYIRASSLQKATLNLPPTHCDTHFLQVICCSEETLDSGWAIIIKTGVKLQTFAVSVTAHKRSADLKSEQQQETMYFKGIEAGKVPYFPHADTIIYSISTAICFQAFSFIFTKRILKFNTQAVMEVQTLRPSYWKFLLRLTKGKFAVMNRKVLDVFGTGASKHFQDFIPRLDPRYTTVTPELPTEFS

SEQ ID NO: 32793 - protein, 271 aa, Homo sapiens
  DOMAIN (199)..(242): kw TRANSCRIPTASE REVERSE II ORF2 domain identified by eMATRIX, accession number DM01354T, p-value=8.759e-34, raw score of 9.48
  DOMAIN (84)..(268): Reverse transcriptase domain identified by PFam, accession name rvt, E-value=2e-05, PFam score of 7.3
MSQVKQASSRSWKRQGTNYLPGSPERTEHCQHLDFSPVKVISDFHPSERPQWNKTGNQLQKEPSKPCKYMEIYLLLNEHWVKNEIKIEIKKVFKLNDNSDTTYQNLWATAKVVLRGKSIALNAYIKKSERAQTDNLRIKNKNLMVISIDAEKTFGKIQHPFMIKTLSKIGMQGTSLNVIKAIYGKPTANILNGEKLKAFSLETGTRQGCPFSLLLFNLVLEVLARAISKEKEIKGIQIGKAKVKLLLFADDMIVYVENPKDSRKLLELRRE

SEQ ID NO: 32794 - protein, 119 aa, Homo sapiens
  misc_feature (1)...(119): Xaa = X or * as defined in Table 2
MSTKNSTDLVEYVDKSHAFLPIIPHTHRGPLEDRLNNQARTIAFLLEQAFRIKEDISACLQGTHGFRKEESLARKLLESHMQTITSIVKKLSQNIEILEDQIRARDQAATGTNFGSTRX

SEQ ID NO: 32795 - protein, 68 aa, Homo sapiens
MGIHLLHQRDLDVRPKVKGEHFGTLKFDCSAGFRTCVGPIAPLFWPISPLLNGCIYQIPVLLLYLGSN

SEQ ID NO: 32796 - protein, 137 aa, Homo sapiens
  DOMAIN (46)..(121): Immunoglobulin domain identified by PFam, accession name ig, E-value=3.5e-06, PFam score of 25.0
MAERGQHRAQAMASEGASLKPWQLPLGGIMGDAKTTQPNSMESNEEEPVHLPCNHSTISGTDYIHWYRQLPSQGPEYVIHGLTSNVNNRMASLAIAEDRKSSTLILHRATLRDAAVYYCILRDHSGTDGAAAVQYLP

SEQ ID NO: 32797 - protein, 104 aa, Homo sapiens
MLPTQPAELPTGLGGKSGFVGQPQGPRAVCSLGTWCPASQPLQLWLKGANVELRPWLQRVQASSLGSFHVVLSLAPTLCQTVQGTKERAMNEKDQEPTFVVLSE

SEQ ID NO: 32798 - protein, 16 aa, Homo sapiens
  misc_feature (1)...(16): Xaa = X or * as defined in Table 2
XRWTTKNALLLGYIHP

SEQ ID NO: 32799 - protein, 76 aa, Homo sapiens
  misc_feature (1)...(76): Xaa = X or * as defined in Table 2
MLKIYHFIKRSSTXIQLCNYHSTHRPVNKGSKKTTAHGSGDQGXLQRSPSGSQKPFGCWSRGSSWAEITAAAQQVW

SEQ ID NO: 32800 - protein, 178 aa, Homo sapiens
MRVEKLPLGYYAQYWDDRIICTPNLSIKQYTQSGRSAAGPLEFAGVPLQTLFAWVSPAEAAEQQILQNSKILLPDPSSGRLQLPRLIPDYCTSSEQGSMGVGPAEPGMGGNLLVCRLLKLWENTVFGQKCTIPPDHLQLQFESDVFYEVPDTAKSRGWVFVALMIVSQTLELLDFTKV

SEQ ID NO: 32801 - protein, 265 aa, Homo sapiens
MQTWTYKESAVGSGDRGKKCIERSHQLAESNKQTFEVESELKHLAPAFPPPGSLGKEGALWAEVQALLKSVATRSLAGMRTKLPEEGSGSNICRSEIFAVLQPPLVIPRQTGSGVDLQQTPTDLQEIQRTSQRYSSRRATPRHIIVRFTKVEMREKMLRAAREKGRVTHKGKRIRLTADLSVETLQARREWGPVFNVLKEKNFQPRISYPAKLSFISEGEIKSFTNKQMLRDFVTTRPALQELLKEALNMERNNWYQPLQKHAKL

SEQ ID NO: 32802 - protein, 286 aa, Homo sapiens
  DOMAIN (37)..(83): kw TRANSCRIPTASE REVERSE II ORF2 domain identified by eMATRIX, accession number DM01354O, p-value=5.091e-25, raw score of 8.73
MDKFLDTHTLPRLTEQDIESLNKPITSSKIDAVINSLPTKKSTRPDGFAAEFYQRYKKELVSFILKLFQTIEKSGPSAAGLLEFAGGPLQMLFAWVSPAEAAEQQILQKSKYCCLMLPLKALSQRGTGLYEDTPHNEFAGNISALADAENISRKIITRCINTAKLPKSVVALFSHPGELSARSGDALQKAFTDKEELLKQQASNLHEQKKAGVIFEAEEVITLLTSVLKTSSASRTSLSSRHQFAPGATVLYKGDKMVLNLDRSRVPTDCIEKIEAILKELEKPAP

SEQ ID NO: 32803 - protein, 122 aa, Homo sapiens
PPLVIPRQTGSGVELQQIPTDLQLRDLTDCSSSPATEQSWIENDFDELTEVGFRRLVITNFSELKEDVRIHCKEVKTVKNGIINAPISTLSKRTNQLSVKRTNQHPVKTDQSALCKMDQSAG

SEQ ID NO: 32804 - protein, 37 aa, Homo sapiens
MDLSAWVLPPCGPERAAGEPGERSRRERAFFGVGETR

SEQ ID NO: 32805 - protein, 151 aa, Homo sapiens
MVILNALQRRAFLCAANVKIPRLRIKVKTKEASAQVVKEECNKYLLFLLPVPSAGLLPSIMEIADPFSSFGSEDKCYTLTPPLPRHTEKSSDSQEKGHFEAGVEPKSRGSTPGQYPGIGCFARFREYQIGMRHLTTRPAMHRAQVLFPLSF

SEQ ID NO: 32806 - protein, 72 aa, Homo sapiens
MVNKRGYSCVRTASYEGKWSQGTLAQRAGPNSSAERVSPQKQTRIRNRHLGLALGVTRPSRHEGTLAQSEAQ

SEQ ID NO: 32807 - protein, 39 aa, Homo sapiens
  misc_feature (1)...(39): Xaa = X or * as defined in Table 2
XFEIDGSSPSMSGCCGEDCSYEILSRRTKFGDSHHSHAX

SEQ ID NO: 32808 - protein, 117 aa, Homo sapiens
  DOMAIN (78)..(114): Myosin head (motor domain) domain identified by PFam, accession name myosin_head, E-value=2.6e-10, PFam score of 37.3
  misc_feature (1)...(117): Xaa = X or * as defined in Table 2
XQGLRFWEVNIQHEDPEGGPLSLVALGEGNGILAHVGGSDPIFQGHCAKESSISDKNDWKTVSNAFSVIDFTEADLEVICPLTLELSVYARDAMAKAVYGRTFTWLVNKINSSLVNK

SEQ ID NO: 32809 - protein, 103 aa, Homo sapiens
MSLSINCACRSLLACMTQEAHGTLPQHAPLPLHSWKEDLFLLLPYSQDLAQNPTKEIFNELWRKPGPERHPGDPAAARCNFCPQQPQGLMDAAQWGRSDTQEA

SEQ ID NO: 32810 - protein, 402 aa, Homo sapiens
SWQTFQLLLAKLKNKRAQAREAVLTSIAAGGFHSFSSETTEKEPSLIRRAAQGLLRRQTLALRTQLPQKEASRKEEAKAEDRVEETALHLPASSGGYFAEQNGKMEKVCETLENCNTRETQVLMVLLCPGVGGWQVLPEGTEPASSDFHYFPVTCYLPVCGQAQPFPSKIEQSCKQGHPSAVESAFGSFTKVLIKIAKIHIFYSGIVSDVHVTERPARGASCWTTTTRDLSSSTQERAVALHHQAQLENLNWICNCLTRALEAITTLIAVPAVAGKMSLGETGEVTCCFVENVISLSQSLKMLSSAGLSCPEDPLETTQNIPEADTHSCPTPIVEGGLESFPSPTFQAAFPGPEKALIKEAERRVGDGHKVTPRKATVLALLKFTIMQSKNAAECLAYDRKQ

SEQ ID NO: 32811 - protein, 126 aa, Homo sapiens
  misc_feature (1)...(126): Xaa = X or * as defined in Table 2
XGTAIIFGERRRLTEIPSVLREELPSCGQHYWETTVTDCPAYRLGICSSSAVQAVGIVSDVHVTERPARVGILLDYNNQRLIFINAESEQLLFIIRHRFNEGVHPAFALEKPGKCTLHLGIEPPDS

SEQ ID NO: 32812 - protein, 638 aa, Homo sapiens
  DOMAIN (441)..(452): dUTPase domain identified by eMATRIX, accession number PF00692B, p-value=9.804e-09, raw score of 8.14
  DOMAIN (379)..(499): dUTPase domain identified by PFam, accession name dUTPase, E- value=0.016, PFam score of -7.8
  misc_feature (1)...(638): Xaa = X or * as defined in Table 2
MGEVVSELGWDHLQDTVKRGSQEECGQSGARSPEGSYHQSPKGSGLSVGQRYTFFYSGIVSDVHVTERPARVGILLDYNNQRLIFINAESEQLLFIIRHRFNEGVHPAFALEKPGKCTLHLGIEPPDSSSRKWIKYAFECRTAAADTYTPNPGXMGKKQNRKTGNSKTQSTSPPPKERSSSPATDQSWMENDFDELREEGFRRSNYSELREDIQTKGKEVENFEKNLEECITRITNTEKCLKELMELKTKARELREECRSLRSQCDQLEERVSAMEDEMNEMKQEGKFREKRIKRNEQSLQEIWDYVKRPNLRLIGVPESDAENGTKLENTLQDIIQETFPNLARQANVQIQEIQRTPQRYSSRRATPRHIIVRFTKVEMKEKMLRAAREKEVFVPEGGTLPRGNTTMIPLNWKLRLPPGLFGLLLALRQQAKNGVTVLAGVVDPDYQDEISLLLHNREILNVSTLQQSYSSGEKQVSFLISDCCASNQRDSVGVGPSEPGVGYSLMVHRFLSLSEKRSIRVGVTRFSRCVRHPFLRLRKGTPDPLRFPKIQKLLKLQCSHGASITWEAASKQHAALSETAPPRVRMALEAKRKDSNRNENLDKRTLCAAQGKSTVEVQGRVCAQGRATGLWADSRDA

SEQ ID NO: 32813 - protein, 150 aa, Homo sapiens
MVNAVAVHDFNFHDYYSLAVCQMDRIGSFLLYQLAKGTVPERSCMAGRVNQAALSAAGLGSKSNPASPNPKSLDTEQLLIQVHTSIKSGEDKWTMMQQVHSWWTYEFLFGEMSASSCSLTVLELHQLDLNNYQRHMHQRSTKQEARPPSS

SEQ ID NO: 32814 - protein, 77 aa, Homo sapiens
MARGRAQAGAVFPGLLLQLQQPPPPRSPAPAARGRSLPAALFGVSSAFEDYKLTFNVMGAEKGQKHKKSGNEGQELS

SEQ ID NO: 32815 - protein, 56 aa, Homo sapiens
MADVSLPIKLDHLRLTSYCCAGSKNFKPVVLSLLGSMGVGPIEQDNLVLWLLPAFQ

SEQ ID NO: 32816 - protein, 344 aa, Homo sapiens
MGPAVAGMVLLEAPGRCDQSGTGVSEAHVAEGYLSLRVASTVTKRDQGTTQAVTSEGASPKAWHLSRGVEPAGSQKSRIEVWERLPRFQRMYGNTWLSRQKFAAGAGLSWRTSARAVQKGNRIVGTAEPEGGDPPGRGFHYLVSRRSSCATSEPLRSIEEAPENTTYISYFQQLREATSAVVTDTTRRYLDMYQLCRYWLSSIRGPRTFLSQLSPVSVPELTNQGRDSRVSVQDFDPPQPTIRGLGGKNGFMPGPGSPCCVQSREFLVPCVPVASTVTKRDQVTTQALTSEVASPKACHLSRVVDPAGPQKSRIEFWERLPRFQRMYENTWLSRQNFAAGPGLS

SEQ ID NO: 32817 - protein, 187 aa, Homo sapiens
MVWVEAKRGVGPYEPSEDFPHTGGTGMLLESNLASGIKLWLDVAKEEESSKPGPALPVVVLSSGRSWCSAGSECPCFLCYFLKAVGDGQNMDLALEKLSEGRQIHEQFLPPAAGKRASGRIIVKAKRREESRVFHDYDHPRHHYTVTVITPTVASTTMTTSVTVHPTTVITLTNTRFPAQDTCSFCL

SEQ ID NO: 32818 - protein, 292 aa, Homo sapiens
MPDVCDEYALSSRNWLSQPNSSFQSTESTHDAVPGSLDFIVHVAVGEMSAISNHKLIPKKGQFAFSSGIKLRFFSCIRTVHITFGVGDTGSRGRELACMEHGRTDSWMEGFSHYCISHTEHLSSKELHTISYVPEVWLLTAPTRYITGADFPNMPTINVQVQEKTGFPSNATGEHSRRKKATCLSAAQRQHRQRQREEMSTSLIDHTSLPARPFSLGELVPIFTKLAADDTSAVVGSPHFTSLLPFVVLLSNSSSTRGTQARPQQDGDLLYPTNTQNCVVLIAGGTGPPTTG

SEQ ID NO: 32819 - protein, 68 aa, Homo sapiens
MNIPDNMPAFSGHGYTSIFDLKAKRRRGKKKEGEEEIEEEKEQPKGEELEVDSSCSQFERKRERNSPV

SEQ ID NO: 32820 - protein, 913 aa, Homo sapiens
MSWPRRLLLRYLFPALLLHVLPQVDGSHSSTGFVNLSGWARPVQLPRCTQSPSDPRILTVGMEGLQRAKREKLEGFVLAFLVGQLHRNLENKGPVAAFAILVHFENVMFHGLGPPALRSRSTVALHQLPPRRSHAYLGGFLAPEEEAGSPSLHVRDLTVEMAAQKINEGLEHLAKAEKYLKTGFLKWKPDYDSAASEYGKAGIFDYSPVAPEMQKLPEAVQLIEKASMMYLENGTPDTAAMALERAGKLIENVDPEKAVQLYQQTANVFEKTIAQVLVHLHRNDYVAAERCVRESYSIPGFNGSEDCAALEQLLEGYDQQDQDQVSDVCNSPLFKYMDNDEGESRRNHLQHHRPSLMVSLPRLLMKRKMNTQEDYASILLAEKKRETKVSSAPCLLLSGQNKGPQIPVIGERNSRWSCTSNVLLIPEISTFILILIQVVNHTVGNIRCRAWLAGEHPCRSGIGGATQAFAKENNQKAYKETYGVSHITRHDMLQIPKQQQNEKYQVPQFDQSTIKNIESAKGLDVWDSWPLQNADGTVAEYNGYHVVFALAGSPKDADDTSIYMFYQKVGDNSIDSWKNAGRVFKDSDKFDANDPILKDQTQEWSGSATFTSDGKIRLFYTDYSGKHYGKQSLTTAQVNVSKSDDTLKINGVEDHKTIFDGDGKTYQNVQQFIDEGNYTSGDNHTLRDPHYVEDKGHKYLVFEANTGTENGYQGEESLFNKAYYGGGTNFFRKESQKLQQSAKKRDAELANGALGIIELNNDYTLKKVMKPLITSNTVTDEIERANVFKMNGKWYLFTDSRGSKMTIDGINSNDIYMLGYVSNSLTGPYKPLNKTGLVLQMGLDPNDVTFTYSHFAVPQAKGNNVVITSYMTNRGFFEDKKATFAPSFLMNIKGNKTSVVKNSILEQGQLTVN

SEQ ID NO: 32821 - protein, 356 aa, Homo sapiens
MVEGKEEQVTSYMDGSRQRESEEDIKVETPDKTIRSWLPHATPIVEHQNDLIAGSVRMQNQPKGSTLQCIILMPQRPPGQTLEDMDYYYSCFSDEKNLGTKKLSSFPWSHSKEVKATFKGRYPGSHALNRHTTLPGTAWILLLGGELAFLTVKDGSPLALPSRPADGMRGRTSVMNLILEDPEVDAMKKQKRKKEELRTTASRTSLRFGETDLIWSSWVPEKKSSLQPQASHRLPSRRQRQRQSQGTLVQPASLVLFASRSQSIKHTWNSPFCGLFLLVRNTDNPGLLCNKNRFFWNVFPMAHPHGSTKAIPQRGTKETAMTSKANTTQNNTHKYHRATCAEYADLEALQEYRDWE

SEQ ID NO: 32822 - protein, 390 aa, Homo sapiens
  misc_feature (1)...(390): Xaa = X or * as defined in Table 2
XVPIYLERHHRHCWSHVSCCQSKLWRHKYHKKGVTQRHLPILPAAGEATPAATATPCSVLCFLRTNLGSLESETFNKSLLTFANVHIKRGPPFHVPLPSLPDHCSSPYQPYQCGAPTLQVGDSQTGTVPGWSHCHEPVLHRRECFLCLVSAGLSGTGNMPDVMSGPQNIGPTKALKLYIGDNPGLLCNKNRFFWNVFPMAHPHGSAKAIPQRGTKETAMTSKANTTQNNTHKYHRYSFIFKICKQEHINLHNIRVGAYDKVLRAPQRSQALGRDLNIYLNSDPSSKPYRGEHQMQGLAGWGASLQKRHRAFRVWALYICTGHLPVELPGLQHKVSEPDFSMWKPGVRGFSLGCVSSSSHEPPAYRRNEGNRAERAHCKSVEKQPQGVRHE

SEQ ID NO: 32823 - protein, 42 aa, Homo sapiens
MLSTRSYSVPTDSTRQQPVLYMKIPRDPKWHVLEQTQRRLAH

SEQ ID NO: 32824 - protein, 372 aa, Homo sapiens
MALAPHGLSPSIWPLPSVQALEKAAGEVSTTRKRESQFPEVLGWQLLESPSLGYRLPVLSDGGHVARPHKSPFENHYHPSSFQIGGLSLLKGPKAAMEKCPKALFASLGQSFLQALPASLLLQEVYQETGAQKEEFAEALANWKLNPGGQGLILPYTRVARLSRVLKNALVWYENEKQWLKNQSSMGKPSLLPSSSPKCEDVSTIIEQSQTAPSNVSGLPVEHPCGIRSEGELTEMHSMPVPPSTPEQRPADQGWGLFEGVEREGLRASSQALPSLKVQVQGPVPQREKGTLIKRHRTSLAALIWGLPVGAKTWFFRLHPWKEGTPVTGSSSFSPQKALSTVSCHLIADKPIQRENNKDEGLYDDPLPLNEE

SEQ ID NO: 32825 - protein, 83 aa, Homo sapiens
MYKAQFLAASPGRCLGLLAASNHHAKSIHGFRRLVKTMRNRLCSLCQPFPLPKHLLSLSWFGDQGHTSQYFTLSTQRNEAQLQ

SEQ ID NO: 32826 - protein, 167 aa, Homo sapiens
  misc_feature (1)...(167): Xaa = X or * as defined in Table 2
MNRHFSKEDIYAANKHMEKSSSSLVIREMQIERGSLESPKGLSSPRRSIQPAELNTRNCLNKLDSKYFMLWRPRGNIKAMMKXIQEVKTPEELETFMLKHGENIIDTLGAEVDRLEKELKVMATAGQQLPQSEGWAASRHALVFSEVLLIVSGLALRRQDTPLPLRI

SEQ ID NO: 32827 - protein, 78 aa, Homo sapiens
MAFKWATTTAKATHARTCQVPGEYQNCCLISEIEINFLSDSIPTATHSSPASSSQIILPPQECDGSRCYLLKMGIWVN

SEQ ID NO: 32828 - protein, 67 aa, Homo sapiens
  misc_feature (1)...(67): Xaa = X or * as defined in Table 2
XLCSQCRELEGESPSTVKSSDDSSPSSILIAASLPGVTDQPKQSVDLNPKGGLFALASSGLEQKAAL

SEQ ID NO: 32829 - protein, 197 aa, Homo sapiens
MESRFCQNSFCLDMTNVDLELLGPSGQKGCPGMKSKRWKKRKRGRRLGSWFEPPNPTVPEALSVSETEGNKFSLCLKPVKPVWAPDQNLWLILCKVGMRHHQRLRSGQNEATYGGGVAHALLLGLPFTHMQAYLPAPPAWPKNQFSEFSQDFQEPSTARVVVRAVGSDPTLPAIQVGCGALVLNPNGAWGWSNAQGS

SEQ ID NO: 32830 - protein, 59 aa, Homo sapiens
MKSLPRLPLSTQTQQPSDFSIFSPPFPPFYSTKPPLSSWPVLNELLGTPPRQGGGRAEG

SEQ ID NO: 32831 - protein, 775 aa, Homo sapiens
  DOMAIN (49)..(94): kw TRANSCRIPTASE REVERSE II ORF2 domain identified by eMATRIX, accession number DM01354N, p-value=1.000e-40, raw score of 13.17
  DOMAIN (133)..(408): Reverse transcriptase domain identified by PFam, accession name rvt, E-value=1.2e-86, PFam score of 301.3
MTLKEHAAFKHLFNKAHLAPPLIHLTLSGHSTCFRGHRVGEIQTTIREYYKHLYANKLENLEEMDKFLDTYTLPRLNQEEVESLNRPITGSQIVAVINSLPTKKSPGPDGFKAEFYQRYKEELVPFLLKLFQSIEKEGILPNSFYEARIILIPKPGRDTTKKENFRPISLMNIDAKILNKVLANRIQQHIKKLIHHDQVGFIPGMQGWFNIRKSINVIQHINRTKDKNHMIISIDAEKAFDKIQQPFMLKTLNKLGIDGTYLKILRAIYDKPTANIILNGQKLEAFPLKTGTRQGCPLSPLLFNIVLEVLARAIRQEKEIKGIQLGKEEVKLSLFADDMIVYLENPTVSAQNLLKLISNFSKVLGYKINVQKPQAFLYTNNRQTESQIMSELPFTIASKRIKYLGTQLTRDVKDLFKENYKPLLNEIKEDTNKWKNIPCSWVEESVIMKMAILPKVIYRFNAIPIKLPMTFFTELEKTTLKFIWNQKRARITKAILSQKHKAGGITLPDCKLYYKATVTKTAWYWYQNRDIDQWNRTEPSEITPHIYNYLIFDKPEKNKQWGKDSLLNKRCWENWLAICRKLKLDPFLTPYTKINSRWIKDLNVRPKTIKTLEENLGITIQDIGMGKDFMSKTPKAMATKAKMDKWDLTKLKSFCTAKETTIRVNRQPTKWEKIFATYSSDKGLISRIYKELKQIYKKKTNNPIKKWAKDMNRHFSKEDIYAAKRHMKKCSSSLAIREMQIKTIMRYHLTPIRMAIIKKSGNNRDMDEIGNHHSQ

SEQ ID NO: 32832 - protein, 307 aa, Homo sapiens
MTLNEHAAFKHLFNKAHLAPPLIHLTLSGHSTCFREHRVGEETASPSPVVARSPPRPMLPSAFPPLSEEINPALTEATVMASPEAATRQDNVDSPQYPPRTPLCASRPITRLKSQWAHRGITLVHYIDDITLIGSSEQEVANILDLLQRRTLSPQYGPSPQGVQPVIWWQVDYTGPLPLWKGQRARNHGSRNQGVELEVATLTITPSDPLTTYLLPVSVTLCSAGLEVLVSEGGMLPPGNIAMIQLNWKLRLPPGHFALLLPLHQQPKKGGHVKCTCFPFTFPDNCKFPEASPEAEAAMLPVQPVEP

SEQ ID NO: 32833 - protein, 900 aa, Homo sapiens
  DOMAIN (769)..(788): Cell cycle proteins ftsW / rodA / spoVE proteins domain identified by eMATRIX, accession number BL00428A, p-value=5.125e- 12, raw score of 14.30
  DOMAIN (327)..(544): Mur ligase family domain identified by PFam, accession name Mur_ligase, E-value=5.6e-23, PFam score of 89.8
MTLNEHAAFKHLFNKAHLAPPLIHLTLSGYSTCFREHRVGDTPQTERRKTRTKRKSHRQTTKTQTRKKQTNKKQTQNKTTGQTQREPQEERTKTTPHNSKEHRNRKAKGHEALTDSTKDGEAEKTERGRTSRHTGTACVTSRTGNAGQADTGDRERERADDERPNEQKTAEPKEGAKAPQAYPNQAVRAETEAVCLGEREKEVCRQLCLGSYYQHPPPLPATHNKSQYWVQLQTVKHKEKFLPYEGREKTGDSKERNFRFACNRFRQQRFTGTRRTDHQDAFRDLTAEFLEAARLAQILNQFSNFFFCFVAARNVSKGRFDLIFRQHARFALTKRHGTFATAALHLTHEEDPDTNQQQHREPGDEDRSQQAWFFRRFTDNLDVLGQQVTNEICGSSDILNVTEDHMDRYPFGLQQYRAAKLRIYENAKVCVVNADDALTMPIRGADERCVSFGVNMGDYHLNHQQGETWLRVKGEKVLNVKEMKLSGQHNYTNALAALALADAAGLPRASSLKALTTFTGLPHRFEVVLEHNGVRWINDSKATNVGSTEAALNGLHLGGDGKSADFSPLARYLNGDNVRLYCFGRDGAQLAALRPEVAEQTETMEQAMRLLAPRVQPGDMVLLSPACASLDQFKNFEQRGNEFARLAKELGFSILVWISTALKGWVMGSREKDTDSLIMYDRTLLWLTFGLAAIGFIMVTSASMPIGQRLTNDPFFFAKRDGVYLILAFILAIITLRLPMEFWQRYSATMLLGSIILLMIVLVVGSSVKGASRWIDLGLLRIQPARLQAVRYQIYVGTDEPVSTKNTKISQTCRQHKSRRLPFPTLGVPLLFAVFGHVSPSTKLRDFLGNLGFAWTGEYPGTHVSDFTHRVLCFSDGAVEFLFNDIASVLQDKKSYRDGW

SEQ ID NO: 32834 - protein, 297 aa, Homo sapiens
  misc_feature (1)...(297): Xaa = X or * as defined in Table 2
XQRNKSTQGGKRGLRFPRITSELPVLGKLPESTTGRPNQNLPPGANGRAHYKEPIPAPLSLLWSCQGAGVVVLGWSPPRRLWWGSLGAAQRPAVPVSGLARSLHVETRRPHRRASVRVAAAAASGSGPSRSLFYRGRLGVAARCSLRARPRPMPPLTGTSPLSPQQTRKKESPGYSEEYGLEGDKNDWGEGSLYTIIIMQTGVDGLHELATGGRNDLSGSIASPDVKLNLGGDFIKESTATTFLRQRGYGWLLEVEDDDPEDNKPLLEELDIDLKDIYYKIRCVLMPMPSLGFNRQV

SEQ ID NO: 32835 - protein, 196 aa, Homo sapiens
MGVLPIVYFFPHRHGNHPVFSIFSPTFPGLSIPQVPPLVILASSSMSCWVHLPDLVVGRAEGLLTSQTGQLPGGGAPHFSDGGGRAETLLTSQTGSRPGRGAPHIPDGAAGQRRSPHLRRWAAGQRRSSLPRRDGGREEALLTSQTGQLGRGAPHIPDDGRPGRDAPHFPEGVAAGQRLQSRHFGRPRQAAGRWRL

SEQ ID NO: 32836 - protein, 266 aa, Homo sapiens
  misc_feature (1)...(266): Xaa = X or * as defined in Table 2
MMIVASPTENGQVLRVIPPTQTGMAQVIIPQGQLVDVNSPRDVPEEKPRNRNLPTVRVDTLSNNTSNYILHPQTSFPLPKKTVIGMLEQPLLGPLQPLSSNTPIWACRLMSCEKIGDSYRGYCVSETELESVLTFHKQQTQSVWGTRQSPSPAKPATRLMWKSQYVPYDGIPFVNAGSRAVVMECQYGPRRKGFQLKKVSEQESRSCQLYKATCPARIYIKKVQKFPEYRVPTDPKIDKKIIRMEQEKAFNMLKKNLVDAGGVLRX

SEQ ID NO: 32837 - protein, 102 aa, Homo sapiens
MEACAGGFSSSVGYPGRQYYFNSSGSSGYQDYYPHGRPDHYEEAPRNYDTYTAGLSEEEQLERALQASLWDRGNTRNSPPPYGFHLSPEEMRRQRLHRFDSH

SEQ ID NO: 32838 - protein, 23 aa, Homo sapiens
MEEGSMKQIRDSEAEQGWRERKE

SEQ ID NO: 32839 - protein, 112 aa, Homo sapiens; identical to SEQ ID NO: 30904
  misc_feature (1)...(112): Xaa = X or * as defined in Table 2

SEQ ID NO: 32840 - protein, 106 aa, Homo sapiens; identical to SEQ ID NO: 31422

SEQ ID NO: 32841 - protein, 137 aa, Homo sapiens
  misc_feature (1)...(137): Xaa = X or * as defined in Table 2
XLYNKDAVIEFLLDKSAEKALGKAASHIKSIKNVTELKLSDNPAWEGDKGNTKGDKHDDLQRARFICPVVGLEMNGRHRFCFLRCCGCVFSERALKEIKAEVCHTCGAAFQEDDVIMLNGTKEDVDVLKTRMEERRL

SEQ ID NO: 32842 - protein, 214 aa, Homo sapiens
MAGTLPKSKFPDTIQAPALQVIALLTCYADTLLCAGTFQTKALTRKPCGAAFQEDDVIMLNGTKEDVDVLKTRMEERRLRATWEKENKETQGSRGLFQNQMSVQEAPGPSKVKTGKPEEASLDSREKKTNLAPKSTAMNESSSGKSWESLRVEPQRGPSLDSGRIGGLQVPLLPLHSSAKAPPREESGPLGFTPHVLLASESPHCHRLLPQKVV

SEQ ID NO: 32843 - protein, 52 aa, Homo sapiens
MAPQAAPAALHTGHSWVPDSGSPRTPLRLHSAMFLYKMAPEVARSRRGLSPR

SEQ ID NO: 32844 - protein, 85 aa, Homo sapiens [sequence omitted]

SEQ ID NO: 32845 - protein, 410 aa, Homo sapiens
  DOMAIN (205)..(258): Clathrin light chain proteins domain identified by eMATRIX, accession number BL00224B, p-value=7.750e-10, raw score of 16.94
MEYYAAIKKDEFMSFAGPSAAGLLEFAGGPLQTLFAWVSPAEAAEQQILQNSRCCCLILPLEALSLRDTWLFEVSVGPYWEFVNSTMEEAGLCGLREKADMLCNSESHDILQHQDSNCSATSNKHLLEDEEGRDFITKNRSWEEHMQQKKEEEEVLKEVTAHFQITLTETQAQLEQHEIHNAKLQQENMEMGEKLKKLTDQYALREEQINKAFKHKELRQQLVDARLQQTAQLIKEADERHQREREFLLKEATESRHKYEEMKQEEAQLKEQLFLYMDKFEEFQTTMAKTNELFTAFKQETEKKTIRDKNYKVFQIKLERLEKLYKALQIERNELSEKLGILKGQVSVKVADVDLAVPVTHSCADLDSSNMLNTSSKRAPGVHLEADPKGMNEVKCYSKALSTGSPLGID

SEQ ID NO: 32846 - protein, 841 aa, Homo sapiens
  DOMAIN (430)..(471): kw TRANSCRIPTASE REVERSE II ORF2 domain identified by eMATRIX, accession number DM01354I, p-value=1.000e-40, raw score of 15.55
  DOMAIN (668)..(700): Ank repeat domain identified by PFam, accession name ank, E- value=0.0011, PFam score of 25.6
MGYNLLVCPLLRPLEKLGIRVVVSRISRYLLSQLPFDRKGNSPTPCASRFVNSTMEEAGLCGLREKADMLCNSESHDILQHQDSNCSATSNKHLLEDEEGRDFITKNRSWEEHMQQKKEEEEVLKEVTAHFQITLTETQAQLEQHEIHNAKLQQENMEMGEKLKKLTDQYALREEQINKAFKHKELRQQLVDARLQQTAQLIKEADERHQREREFLLKEATESRHKYEEMKQEEAQLKEQLFLYMDKFEEFQTTMAKTNELFTAFKQETEKTPLRSTLSLPRFSAFLWQLFPSADFAGNCHVLDHGPYGRDDYFCPLRHSPGNKQHNSFKALKDEDLPVEKYLMERQPVGEPAADQVAMDVMHSPILQLERKHKVSSDSNQTETTAEKLPEDSFLKNKQKQVYIDHSAIKLELELRIKKLNKNCSTTRKLNNLLLNDYWVHNEMKAEIKMFFETNENKDTTYQNLWDTFKSVGRGKFIALNAHKTKQERSKIDTLMSQLKELEKQEQTHSKASRRLNQEEVESLNRPITGSEIEAIINSLPTKKIQDQMDSQPNSTRGPPPKNKVLSNNASSQKPTHSSCIPLLRLPDKQQKVNESIKTDMLCTDKEEECPAASLLQKYTNNKLMDVTPVPINSFNKFHIYTSLGPKAFDGTGDFEIVYVRMAVIVALDFWPLHGAVENDCLEIVRLLLSYGAGPTLATYSGRTIMKMTHSKVMEMFLTDYLNDLQGCSDSKLNSSWEFYGSSVCEPDNGGESNVLADPPGPEDQDDDNEACSDVFEFKFSDTPSYLVKTFKFHLCRDLEAFNLESNKLLDLLECTNELQILLGSSLECLNPRDVALEKDH

SEQ ID NO: 32847 - protein, 102 aa, Homo sapiens
MQQKKEEEEVLKEVTAHFQITLTETQAQLEQHEIHNAKLQQENMEMGEKLKKLTDQYALREEQINKAFKHKELRQQLVDARLQQTAQLIIEADERDGREREC

SEQ ID NO: 32848 - protein, 306 aa, Homo sapiens
  DOMAIN (10)..(65): kw TRANSCRIPTASE REVERSE II ORF2 domain identified by eMATRIX, accession number DM01354Q, p-value=8.516e-17, raw score of 9.23
MNINATILNKILANRIQQHIKKLIHHNQVGFIPRMQALKRVVVLPAWSLRSENEQTASSSGSLTPEKPNWEASPCRGRLTPHTARYPSETKLPQERSGSNICCSAIFTVLQPLLLIPRQTGSGVDLQQTPTDLQLRTENDFDELREEAFRRSNFSKLKEEVQTHCKEVKNLETRLDEWLTRITNAEKSLKDLMELKTMAGELRDACTRFSSRFNQLEERVTEIEDQMNEMKQEEKFREKRIKRNEQSLQEIWDYVKRPNLHWLGVPESDRENGTKLENTLQDIIQENFPNLARQTNIQIQEMQRMP

SEQ ID NO: 32849 - protein, 549 aa, Homo sapiens
  DOMAIN (253)..(294): kw TRANSCRIPTASE REVERSE II ORF2 domain identified by eMATRIX, accession number DM01354I, p-value=1.000e-40, raw score of 15.55
  DOMAIN (44)..(239): AP endonuclease family 1 domain identified by PFam, accession name AP_endonucleas1, E-value=1.4e-28, PFam score of 108.4
MAGYSSETKLPEERSGSNICYSPISTVLQPPLLIPRQTGSGVDVQQIPTDLQLRVLTVRRKPDKQKGHPHQNHICISPSSKTKDFKPTKIERDKEGHYIMVKGSIQQEELTILNIYAPNTGAPRFIKQVLSDPQRDLDSHTLIMGDFNTPLSTLDRSMRQKGNKGIQELNSALHQADQIDIYRTLHPKSTEYTIFSAPHHTYSKIDHIVGSKAFLSKCKRTEIITNCLSDHSAIKLELRIKKLIQNHSTTWKLNNLLLNHYWVHNEMKAEIKMFFETNENKDTTYQNLWDTLKAVCRGKFIALNAHKRKQERSKIDTLTSQLKELEKQEQIHSKASRRQEITKMREELKEIDTKNPSKKSVNPGAEIQTTIREYYKHLYANKQENLEEMDKFLDTYTLPTLNQEEVESLNRPITGSEIEAIINSLPTEKTPGPDGFTAEFYQKYKEELVPFLLKLFQSIEKEGILHNSFYENSIILILKPGRDTTKKENFRPISLKNIDAKILNKILANQIQQHIKKLIHHDQVGFIPGMQGWFNIHKSNKCNPAYKQN

SEQ ID NO: 32850 - protein, 502 aa, Homo sapiens
  DOMAIN (436)..(477): kw TRANSCRIPTASE REVERSE II ORF2 domain identified by eMATRIX, accession number DM01354I, p-value=1.000e-40, raw score of 15.55
  DOMAIN (212)..(422): AP endonuclease family 1 domain identified by PFam, accession name AP_endonucleas1, E-value=8.7e-07, PFam score of -13.2
MQKGNVGWEIPHRVPTGAPPSGAVRRGPPSSRPQNGRSTDSLHCVPGKAADTQHQPMKAAGREAVPCKATGLELPKTMETYLLHQCDLDGIAEQKAAETSADFPCLTALNSLTGRHPPVGGRLTPHTAGYPSETKLPEERSGSNICCSAIFTVWQPLLLTPRQTGSGVDLQQTPTDLQLRVLTVRRKTNKQKGHPHQNPICTSPSSKTKEKSLNDLMELKNMTQELRDECISFSSRFDQLGERVSVIEDQMNEMKPNLHRIGVSESDPESGTKLENTLQDIIQEKFPNLAKQANIQIQEIQRMPQRYSLRRATPRHIIVRFTKAEMKEKMLRAAREKDRSMRQKINKDIQELNSALHQADLIDIYRTLHSKSTEYTFFSAPHHTYSKTDHIVGSKALLGKCKRTEIVTNCLSDHSAIKLELRIKELTQNHSTTWKLNNLLLNDYWVHNEMKAEIKMFFETNKNKDTTYQNLWDTFKAVCRGKFIALNAHKRKQERSKINTLT

SEQ ID NO: 32851 - protein, 218 aa, Homo sapiens
MWESLEPPSDLLNGFDKNADSEINNKVQAEELVGNWSKGDSCCVLSKRLVAFCPCPRDLWNFGLERDNLGYLVEEISKQQSIRKISEDLWKHLDAQAKVCCSGGALMENLCQGSMEGKCGVGASTQSSTGVLPSGAVRRGPPSSGNQNDRSTDSLHCVPGKAADSKCHPKKASGRKAVPCKATEVELPKTLGIHILPQCDLDARPGVKRNHFGSLKFD

SEQ ID NO: 32852 - protein, 419 aa, Homo sapiens
MAGYSSETKLPEERSRSNICCSPVSAVLQTPLLIPRQTGSGVDLQQTPTDLQLRVLTVRRETNKQKGHPHKTPSVHHHHQRPKVDKTTKMGKKQSRKTGNSKKQSASPPPKECSSSAAMEQSWMENDFDELREEGFRRSNYSELMEEVRTHGKEVKNLEKKLDEWLTRITNAEKSLKDPMELKTMARELCDECTSLKRVSVMEDQMNEMKREEKLREKRIKRNKQSLQEIRDYVKRPNLHLIGVPESDGEKGTKLENTLQDIIQENFPNLARQANIQIQEIQRMPQRYSLRTATPRQIIVRFTKVEMKEKMLMAAREKGRVTHKGKPIRLTADLLAETLQARREWGPIFNIPKEKNFQPRTSYPAKLSFISEGEIKYFTDKQMLRDFVTTRPALKELLKEAVNMERNNRYQPLQKHAKL

SEQ ID NO: 32853 - protein, 253 aa, Homo sapiens; identical to SEQ ID NO: 31356

SEQ ID NO: 32854 - protein, 242 aa, Homo sapiens
MAGFSSETKLPEERSGSNICCSPISAGLQPLLLIPRQTGSGVDLQQTPTDLQLRVLTVRRKTNKQKGHPHRNPICMSPSSKTKGYYPGELPQSSKTGQHSDSGNTENTTKILLEKSNSKTHNCQIHKIEMKEKMLRAAREKGRVTHKVKPIRLTADLLAETLQARREWGLIFNILKEKNFQPRISYPAKLSFISEGEIKYFTDKQMLRDFVTTRPALKELLKETLNVERNNRYQPLQKHAKL

SEQ ID NO: 32855 - protein, 432 aa, Homo sapiens
  DOMAIN (157)..(202): kw TRANSCRIPTASE REVERSE II ORF2 domain identified by eMATRIX, accession number DM01354N, p-value=1.000e-40, raw score of 13.17
  DOMAIN (243)..(431): Reverse transcriptase domain identified by PFam, accession name rvt, E-value=1.6e-16, PFam score of 68.3
MAGYSSETKLPEERSGSNICCSPISAVLQPPLLIPRQTGSGVDLWQTPTDLQLRVLTVRRKINKQKGHPHQNPICTSPSSKTKGQIRAELKEIETQKALQKINESRNWVFEKINKIDRPPARLIKKKREKNQIDAIKNDRGDITIDPTEIQTTIREYYKHLYANKLENLEERDKFLNTYTLPRLNQEEVESLNRPITGSEIEAIINSLPTKKSPGPDGFTDAFYQRYKEDLVPFLLKLFQSIEKDRILSNSFYEASIFLIPKLGRDTTKKENFRPIFLMNIGAKILNKILANRIQQHIKKLIHHDQVGFIPGMQGWFNICKSINVIQHINRTNDKNHMIISIDAEKAFDKIQQRFMLKTHNKLGFDGTYLKIITAIYDKPTANIILNGQKLEAFPLKTGTRRECPLSLLLFNIVLEVLDRALRQEKKIKGIQ

SEQ ID NO: 32856 - protein, 294 aa, Homo sapiens
  DOMAIN (253)..(294): kw TRANSCRIPTASE REVERSE II ORF2 domain identified by eMATRIX, accession number DM01354I, p-value=1.000e-40, raw score of 15.55
  DOMAIN (44)..(239): AP endonuclease family 1 domain identified by PFam, accession name AP_endonucleas1, E-value=1.4e-28, PFam score of 108.4
MAGYSSETKLPEERSGSNICYSPISTVLQPPLLIPRQTGSGVDVQQIPTDLQLRVLTVRRKPDKQKGHPHQNHICISPSSKTKDFKPTKIERDKEGHYIMVKGSIQQEELTILNIYAPNTGAPRFIKQVLSDPQRDLDSHTLIMGDFNTPLSTLDRSMRQKGNKGIQELNSALHQADQIDIYRTLHPKSTEYTIFSAPHHTYSKIDHIVGSKAFLSKCKRTEIITNCLSDHSAIKLELRIKKLIQNHSTTWKLNNLLLNHYWVHNEMKAEIKMFFETNENKDTTYQNLWDTLKA

SEQ ID NO: 32857 - protein, 122 aa, Homo sapiens
MWPKGNYVVTRSVTLGSHFIPLETLKNNRREAILRGKSIGSLEGEKLEDGLVFPEELEEETGIIVIRTLSCRSVGVCWRSTPDPVCLGISSRGCRTADIGEQQMLLPDRSSGSFVSEEYLGM

SEQ ID NO: 32858 - protein, 173 aa, Homo sapiens
MGKSQILSYEEGGTEVPADQSKYVNSNSGFQQVFREYRLQTNPKLKGERSPPLYSSSSLVLIKALEVRTLSFSSVGICWRSTPDPVCLGISSRGCRTADTGEQQMLLPNHSSGSFFSEEYPAILDSAMEFAMGRIIPEYVDHIVDVNEVVTDGDNIHFTILKSSPNNKVPNMA

SEQ ID NO: 32859 - protein, 189 aa, Homo sapiens; identical to SEQ ID NO: 31363

SEQ ID NO: 32860 - protein, 791 aa, Homo sapiens
MRPGGGGGGSGSGSEGGRGSGSSGGVGCGGGGGGSRSRSDGGGIPETLRTILTPHPPAPQSRFPPTNQLRRREEPVSARRAAAREARNFAENTMNELLGWYGYDKVELKDGEDIEFRSYPTDGESRQHISVLKENSLPKPKLPEDSVISPYNISTGYSGLATGNGLSDSPAGSKDHGSVPIIVPLIPPPFIKPPAAAYRIVGVAYFWAWRTALLALPSLFSGEGELPCLGGYHSIDPALATHRQPLALGMVCDSTGITMEVAPRGLLLGRTGWSSEEGLGLLFCHDGLLVLPSSGDAYTCLLQSPRTSGSYDPSWSFIDYLDVCILGTVGGDRCPSKYFRNFPSVLDSHESYKGVVNLQFNCLESINALLIFFGHWSEDDVSNVQIMCAWCQKVGIKRYSLSMGSEVKSFCSEKCFAACRRAYFKRNKCLCSERVNESDEDTVITAGILMASVFPAVECRLHSEYMKDKCERKEEREFFINQNPVTWGSIHSAIDIYAGMLIFRHSTSLAILLVKANAVHLNQVFSHRNCRKETGVILPCPRDVWNFELERDDLGYLVEEISKQQSIQEEAEHKSLKKLQPDDAVEKKIPCSGEKFKPIAEIWISNEKPNANCQNNGENGSRTYQRPSGEPLPSQSHGLGGKNGFLSLVQGSPAVCSCWTWWKWCPASQPLQPWLKGAKIQLRLWLQRVQAASLGSFHVVLVLWVCRKQELRLGNLCLDFGGCMETPGCPGRNLLQKKGNVGSEPPPKVPTGALPNGAVRRGSPSSRHQNGRSIDNLNHVPGKAADTQRQP

SEQ ID NO: 32861 - protein, 261 aa, Homo sapiens
MDNKVQVEVISDGDEELVGNWSKGDSRYVLAKKLVASLPCPRDLWNFELERDDLGYLVEEISKQQSIQEKKNPFSEEKFKPAAETCISNREPNVKSPRQWGKMSPWRIRDLHGSLSHHRPRGLGENGFVGQGLGALHPNHSNHGFRGCKPKPWQLPRDVESASARKSRIEVWKPPPIFQKMYGNVWMPLQTFAAGAGSSWRTSARAVQKGNVGWEPPHRVPTRAPPSGALRRGPLSSRPQNGSSTDSLHHVPGNATLNASP

SEQ ID NO: 32862 - protein, 254 aa, Homo sapiens
  misc_feature (1)...(254): Xaa = X or * as defined in Table 2
MAGYSSEKKLPKERSGSNICCSPISAVLQPLLLIPRQTGSGVDLQQTPTDLQLRVLTVRRKTNKQKGHPHQNPICTSPSSKTKGPNCSDLKQPMYLGFEKDVFKTIADYYGHLKEPLLTFHLFDAFVSVLGRSWIFWAKFRVAAGPDFAEGALWPDGWRLQDLGLSGTRLQSRQVAWLAAQFAAAAFPQRACGGGINDPSTWDDAWQPIWGEEWLPGHGHGVLQPSIAIAVALCALSGLGCPDRWPFSAPGAPX

SEQ ID NO: 32863 - protein, 213 aa, Homo sapiens
MLGSLEPPGDLLNGFDKNADSGMNNKVHGAVVSDGDEELVGNWNKGDSCYVLAKRLVAFYSCPRDLWSFELERDDLGYLVEEIPKQQSIQKWSCEKRTTILQTPECPVSLHCAPGKAADTQRQPVKAARREAVPCKATGVELPKTMGTHLLQQCDLDNPVPFPSFRSFREDNVRKQNDVEDDEWQFPNVFLKKMNKKELFLIQPSNSWEKWMK

SEQ ID NO: 32864 - protein, 991 aa, Homo sapiens
  DOMAIN (337)..(383): kw TRANSCRIPTASE REVERSE II ORF2 domain identified by eMATRIX, accession number DM01354O, p-value=1.000e-40, raw score of 8.73
  DOMAIN (370)..(644): Reverse transcriptase domain identified by PFam, accession name rvt, E-value=3.5e-82, PFam score of 286.5
MPGTPAAKLDAKDKDQTLRMADKGTGRNLEVLGKSVAEAIWRTKPTHPGLRGVSGELFSACSLSLVLYLCMLHPMDLQILALTVICKETASKESLAMFDYDKSKDSGLPSQGLSFKYGDILHVINASDDEWWQARRVMLEGDSEEMGVIPSKRRVERKERARLKTVKFNAKPGVIDSKGPNWESPPSKGRLTPHMAEYSSETTLPEERSGSNICCSPISAVLQPLLLIPRQTGSGVDLRQTPTDLQLRVLTVRRKTNKQKGHPHQNPICTSPSSKTKETQTTIREYYKHLYANRLENLEEMDKFLDTYTLPRLNQEEVESLNRRITESDIEAIINSLPTKKSPGPDGFTAEFYQRYKEELVPFLLKLFQSIEKEGILPNSFYEASIILIPKLGRDTTKKENFRPISLMNIDAKILNKILANRIQQHIKKHIHGQVGFIPGMQGWFNIRKSINVIQHINRTNDKNHMIVSIDAEKAFDKIQQPFMLKTLNKLGIDGPYLKIIRAIYDKLTANIILNGQKLEAFPLKTGTRQGCLLSPLLFNIVLEVLARAIRQEKEIKGIQLGKEEVKLCLFADDMIVYLENPIVSAQNLLKLISNFSKVSGYKINVQKSQAFLYTNNRQTESQIMSELPFTIASKRIKYLGIQLTGDVKDFFKENYKPLLNEIKEDTDKWKNIPCSRVGRINIMKMAILPKVIYRFNAIPIKLPMTFFTELEKTTLKFIWNQKRARIAKSILSQKNKAGGITLPDFKLYYKATVTKTACHRVGRAQQHSISKWKWYIHDWSQVGPEGTNDSARYPDTTQKWTAAALQPLSRTSLKDSHEGKSSQWAELRAVHLVLRFAWKEKWPDVQLYTDSWAVASGLAGWSGTWKKHDWKIGDKEIWGRATPVIAQWAHEQRGHGGRDGDYAWAQQHGLPLTRDDLATATAECPICQQQRPTLSPQYGTIPQARIHGSRNQRVEVEAAPLTITPSDPLANFLLPPPTTLHSAGLDSLLA

SEQ ID NO: 32865 - protein, 341 aa, Homo sapiens
  misc_feature (1)...(341): Xaa = X or * as defined in Table 2
MLCSICWKPGTARFNAIAEIHYTSKSLKCRVENYLHRASAVGKGRHWNTSEGSEEDRKMWECLEPPRDLLNGFGKNTDSDMKNKVQAEVVSGGDEELVGNWSKGDCCYVLAKRLVAFCPYPRDLWDFELERDDLGYQAEGISKQKSIQKTPEYRSTDSLHHVPGKAADIQCQPMKAARMEGVPCKVTGVELPKTTGTHTSGISVTWRYYSRFGDSGVKKTNKILLQKELNLPEKEKVNQKVQRQAEDETSWIVPDGQRSALPESPSQDLYSGHVWNLTAYQKRAVYVRHLWEKQEDKTYLCGLVAIGVTHKAHRKHEHQVMERRLGTSATTVVLHEVLFPX

SEQ ID NO: 32866 - protein, 461 aa, Homo sapiens
  DOMAIN (348)..(395): kw TRANSCRIPTASE REVERSE II ORF2 domain identified by eMATRIX, accession number DM01354V, p-value=1.000e-40, raw score of 12.97
  DOMAIN (148)..(361): Reverse transcriptase domain identified by PFam, accession name rvt, E-value=0.00039, PFam score of -10.8
MTDIQYNNNIPMFEIRGGLTPHTARYSSETKLPEERSGSSICGSPISAVLQPLLLIPRQTGSGVDLQQTPTDLQLRVLSEEVQTNGKEVKSFEKKLDEWITRITNAEKSLKDLMELKTKARELRDECRSLSSQCDQLAERVSVMEDEMNEVKREEKFRAKRIKRSEQSLQEIWDYVKRPNLHLIGVPESDGENGTKLENTLQDIGKLPQSSKAGQHSNSGNTEDATKILLERATPRHIIVRFTKVEMKEKMLRAAREKVLEVLARAIRQEKEIKGIQLGKEEVKLSLFADNMIVYLENPIVSAQNLLKLISNFSKVSGYKIDVQKSQAFFYTNNRQTESQIMSELPFTIASKRIKYLGIQLTRDVKGLFKENYKPLLNEIKEDTNKWKNIPCSWVGRINIVKMAILPKVIYRFNAIPIKQPMTFFTELEKTTLKFIWNQKKSLHRRVNPKPKEQSWRHHAT

SEQ ID NO: 32867 - protein, 295 aa, Homo sapiens; identical to SEQ ID NO: 31752

SEQ ID NO: 32868 - protein, 579 aa, Homo sapiens
  DOMAIN (233)..(280): kw TRANSCRIPTASE REVERSE II ORF2 domain identified by eMATRIX, accession number DM01354V, p-value=1.000e-40, raw score of 12.97
  DOMAIN (48)..(246): Reverse transcriptase domain identified by PFam, accession name rvt, E-value=0.00011, PFam score of -2.9
MWCQSSETIFQAHGEKLAATSKPPEASKTIHFHFHSILSINFKFISNYGKNILCPRLTPHTAGYSSETKLPEERSGSSICCSPISVVLQPLLLIPRQTGSGVDLQQTPTDLQLRVLTVRRKTNKQKGHPHQNPIYMSPSSKTKVLEVLARAIRQEKEIKGIQLGKEEVKLSLFADDMIVYLENPIIPAQNLLKLISNFSKVSGYKINVQKSQAFLYTNNRQTDSQIMSELPFTIASKRRKYLGIQLTRDVKDLFKENYKPLLNEIKEDTNKWKNIPCSWVGRISIMKMAILPKVIYRFNAIPIKLPMTFFTELEKTKVHMEPKKSLHCQVNPKPIEQSWRYVKQSKKIAVYAERSRCSPGTEFAGTLILDFPSSRTAPSSRGRLTPHTARYPSETKLPEERSGSNICCSAIFAVLQPLLLISRQTGSGVDLQQTPTDLQLRERSSSPATEQSWMENDFDELREGFRRSNYSKLKEEVQTHCKEAKNLEKRLDEWITRITNVEKSLNDLMELKNMAKELRDERTSFSSEFNQLEERVSVIENQMNEMKREEKFREKRVKRNEQSLQEIWDYVKRPDEIYI

SEQ ID NO: 32869 - protein, 304 aa, Homo sapiens
MGTAPVYSSQCERRRRWVISAFPTEVPGSSHRGVSESRCRGRLTPHTAGYSSETKLPEERSGSNTCCSPISAVMQQPLLIPRQTGSGVDLQQTPTDLQLRVLTVRRKTNKQKGHLHQNPICTSPSSKTKEKSLKDLMELKTKAQELRDESTSLSSRFDQLEERVSVMEDQMNEMKLEEKFREKRIKRNKQSLQEIWDYVKRPYLRLIGVPESDGENGTKLENTLQDIIQENFPNLARQANIQIQEIHRIPPRYSSRRATPRNVIVRFTKVEMKEKMLRAAREKGWVTNKGKPIRLTAELLAETL

SEQ ID NO: 32870 - protein, 333 aa, Homo sapiens
MWKSLELPRDFLSSFDKSADSDINNKVQAEVVSDGDEELAGNWSKGDSRYVLAKRLAAFCPCPRDLWNFELERDDLGYLVEEISKQQSIQNVTWVLLKAFHFKRETEHKISENLQPADAAEKKSPFAEKKFKPAAEICISNEEPNVNGGNVSRTCQRSSQQPFPSQALRHRRKKWFHGQVLGSPCCAAPRELVPCVPATPAMAERGQCRAWAMASEGAVPKLWQLPHGIEPASAQKSRIEVWEPPPRFQRMYGNACVPRQKFAAEVGPSWRTSASAQPKGGAQEELLNEMTECITNVQTPESYKHYRSSLFLPVSLHILCKGIKCTVNRREGD

SEQ ID NO: 32871 - protein, 1557 aa, Homo sapiens
  DOMAIN (963)..(1008): kw TRANSCRIPTASE REVERSE II ORF2 domain identified by eMATRIX, accession number DM01354N, p-value=1.000e-40, raw score of 13.17
  DOMAIN (89)..(1300): Reverse transcriptase domain identified by PFam, accession name rvt, E-value=4.4e-101, PFam score of 349.2
MKVQKLLAATFSITVQPALGGRLTPHTAGYSSETKLPEERSGSSICCSPIFAVLQPQLLISRQTGSGVDLWQTPTDLQLRVLSVRRKTNKQKGHPPQKPICTSPSSKNKVAKLTAPYENSKGTPYVPSNKDLRPNRFVSIQEIEFFLLRGARIEVVADPYRSEFATDAEKAVDKIHHLFMIKTLSKMDIKGTYLKVIKIIYDKPTANIILNGEKFKAFPQRTGAKQGCPLSPLLFNIVLEVLARAIRQEKEIKGIQLGKEEVKLSLFADDMIVYLENPIISTQNLHKLISNFSKVSGYKNNVQKLQAFLYTNNRQTESQIMSELPFTIASKRIKYLGIQLTRDVKDLFKENYKPLLKEIKEDTNKWKNIPCSWIRRINIVKMAILPKRTPLLSLPSTLYEELWRLRSYFPLCPQLYNMEQNTTDWVIYKEQCIWLTALETGESKSTAPAFGKGYPMAEYIIWGRLTPHMAGYSSETKLPEERSGSNICCSPISAVLQPLLLIPRQTGSGVDLQQTPTDLQLRVLTVRRKTNKQKGHPHQNPICTSPSSKTKGSNSHITILTLNVNGLNAPIKRHRLANWIKSQDPSVCCIQETHLTCRDTHRIKIKGWREIYQANGKQKKAGVAILVSDKTDFKPTKIKRDKEGHYMMVKGSIQQEELTTLNIYAPNTGAPRFIKQVLRDLQRDLDSHTLIMGDFNTPLSTLDRSTRQKVNKDIQDLNSALHQVDLIDIYRTLHPKSTEYTFFSALHHIYSKIDHIVGSKALLSKYKTTEIITNCLSDHSAIKLELRIKKLTQNRSTTWKLNNLLLNDYWVHNKMKAEINTLFETNENKDTTYQNLWDTFKAVCRGKFIALNAHKRKQERSKIDTLTSQLKELEKQEQTHSKASRRQEITKIRAKLKEIETQKILQKINESRSWFFEKINKIDRPLARPIKKKREKNQIDAIKNDKGDITTDPTEIQTTIREYYKHLYANKLENLEEMDKFLNTYTLPRLNQEEVESLNKPITGSEIEAIINSLPIKKSPGPDGFIAKFHQRYKEELEASIILIPKPGRDTTKKENFRPIPLMNIDAKILNKILANRIQQHIKKLIHHDQVGFIPGMQGSFNICKSINVIQDINRTNDKNHMIISIDAEKAFDKIQQPFILKTLNKLGIDGTYLKIIRAIYDKPTANIILNGQKLEAFPLKTGTRQGCPLSPLLFNIVLEVLARAIRQEKEIKGIQLGQEEVKLSLFADDMIVYRENPIVSTQNLHKLISNFSKVSGYKINVQKSQAFLYTNNRQTESQIMSELPFTIASKRIKYLGIQLTRDVKDLFKENYKPLLKEIKEDTNKWKNIPCSWVGRINIVKMAILPKVIYRFNAIPIKLPMTFFTELEKTTLKFIWNQKRARIAKSILSQRNKAGGITLPDFKLYYKATVTKTAWYWYQNRDIDQWNRTEPSEIMPHIYNHLIFDKPDKNKKWGNDSLFNKWCWENWLAICRRKLKLDPFLTPYTKINSRWIKDLNVRPKTIKTLEENLGNTIQDIGMGKDFMSTTPKAMATKAKIDKWDLIKLKSFCTAKEKLPSQ

SEQ ID NO: 32872 - protein, 888 aa, Homo sapiens
  DOMAIN (342)..(387): kw TRANSCRIPTASE REVERSE II ORF2 domain identified by eMATRIX, accession number DM01354N, p-value=1.000e-40, raw score of 13.17
  DOMAIN (3)..(168): AP endonuclease family 1 domain identified by PFam, accession name AP_endonucleas1, E-value=0.00013, PFam score of -46.8
MAGYSSETKLPEERPGSNICCSPISAVLQPPLLIPRQTGSGVDLQQTPTDLQLRVLTVIKKTNKQKGHPHQNPICTSPSSKTKDRSTRQKVNKDIQELNSALHQADLIDIYRTLHPKSTEYTFFAAPHCTYSKIDHIVGSKALLSKCKRTEIITNCLLDHSAIKLELRIKKFTQNCSTTWKLNNLLLNDYWAHNEIKAEIKMFFETNENKDTTYQNFWDTFKAVCRGKFIALNAHKRKQERSKIDTLTSQLKELEKQEQTHSKASRRQEITKITAELKEIETQKTLQKINESRSWFFEKINKIETASKTNKKREKNPIDAIKNDKGDITTNPTEIQTTIREYYKHLYANKLENLEEMDKFLDTYTLPRLNQEEVESLNRPITGSEIEAIINSLPTKRSPGPDGFTAEFYQRLKQCRKAHLDPVSLTHRSGPGAREDRLSDSGDASRGCWNLSQHAAVTSPESEERRIRTLSCRSVGVCRRSTPDPVCLGISSGGCRTVNIGEQQMLLPDRSSGSFVSEGYRPCEVSAPTGGCPPVRCLMINTVSLIGVKFTEVFDSINISEHLELACLQDHNSLLAREQNWTEDEFDELTEVGFRRWVITNSSELKEEVRTHCKEAENLDKKLDEWLTRITNVEKALNDLMELKTMARELCDECTSFSSQFDQLEETVSVIEDQMNEIKREEKFREKRMKTNEQRLQEIWDYVKRPNLRLIGVPESDRENGTKLENTLQDIIQENFPNLARQANIQIQEIQRMPQRYSSRRATPRHITVTFTKVEMKENMSRAPREKGQVTHKGKPIRLTADLSAETLKARREWGPIFSILKEKNFQPRISYPAKLSFISDGEIKSFTDKQMLRDFVTTRPALQELLKEALNMERNNRYQPLQKHAKL

SEQ ID NO: 32873 - protein, 274 aa, Homo sapiens
MRALKLQRRKSFWIVVAWEAFVQLVNYECKVGEWKGLAHCVSQNNKYRTTYIIAGVPNPQEPGYTAGGQLKGNDLTVLHLLVIEGKWEAVRKFPFKKYIVNTAIVKEARKYWVEEGSSLAKATRSNPGYLQPYMRTGIPVFAPPKLPFGPPCPLSCTHINPKPQAPEADQQLPIHLAESHFHHSIKPRIHPSSPCVTRFFLDAERELGIQKAVPWSFTLVKKQKSLGLPSVQDFGSVYKMNIWSDVACCDPQLQQPAASAQTSAISQLSRVTES

SEQ ID NO: 32874 - protein, 244 aa, Homo sapiens
MLDVPRIALTTDTDHNQCIVLSYQHDEVYIQKKMLHPKLDTQPELKQSSLDWEISSPLYSCFLSYCHPKDICNGSLSEKEGEWVSVELRIEKGDKVIGQVVESQMSERLRQKWQTAYQQVRRYEASRLTAKRRSREREKRRDVWTPRDVWLGAVRAESSPWAAQLQGKITFPLHPSPPFQLPIHPAESHFHHSIKPRIHPSSPCVTRFFLDSGKELGIQKAVPWSFALVKKQKVFPDEDSLSNS

SEQ ID NO: 32875 - protein, 127 aa, Homo sapiens
  misc_feature (1)...(127): Xaa = X or * as defined in Table 2
XPELDHSEITDLRIQELRVFHKFTGVVADGSFRFQVRGFRNQGSMDSVYIMDFLPSESDQVVWTGYYGLVYNLVKISWELQGDEEQDGLRNMIWQTLQKTKDYEEDVRIQNAINIAQFSDQKYQEEG

SEQ ID NO: 32876 - protein, 129 aa, Homo sapiens
MEEPQEEEHGAASRGWEGVLADSQQGSVDSSPTTTRNPICQSQACVWKRAPSPEKLSAASLKGLCPVQVRLQIENLSMCKTQCVKVGRTGRGDKKIMIRYQQRPKSEECGSSTPPQMDDVNQGSVGSPL

SEQ ID NO: 32877 - protein, 71 aa, Homo sapiens
MGRSFQFQASPQARSFKQSLSLRLPCTWSRNHGSHSPVSYFPVLPTPHSPTIHFHFWMRILLYCFLTKNLF

SEQ ID NO: 32878 - protein, 124 aa, Homo sapiens
  misc_feature (1)...(124): Xaa = X or * as defined in Table 2
XRTERVHLRITPGDDSRKRSSASHYRVAGISRLTLSLDREQLYLEQSTEGPEQDKREGKSARSSSREPTGQPRTLLGGMRARKRKTLVLGPFPRVISGSNAKMDTLSPACACAFALYGIPKPAA

SEQ ID NO: 32879 - protein, 336 aa, Homo sapiens
MAKQEKCLWPGEPDPFHLHVNWGDTGDTISSPFYDEHLPAVRFTYCVADAMLGGPIPQFPQLVVMREVQPMGGAGRKVAGGASSSSSASFKACPMLASLPFGGRRRVLIPSSAKRALNPEYIFFLSEQQKPVKLLLAKPSSKYSEIKEEQTFACALSTLYTKRSRLNWNNLEKLFYNVYTPGPTPANEICTLNLKRTRYQYSLKSSPDDAASGIKSSKYIVQPINIDSDLVATCSPNIFFHSKSSRNYKKLISRFPIWPEGLSFSIRSPRGLRAIIMNEKRHFVFSPACSQTEGAGLVTYGGNAEIKTLVPATHLGQIKEDAGQQPDTQTEGQPSS

SEQ ID NO: 32880 - protein, 183 aa, Homo sapiens
MEASGECEQLPQPSPVLSFKGGKNRVRLLQKLRQNKLGIDCASYPQAQEKGAFIQQLLSSSGQGHTSWMSFRAALPAGALRSSLQRGVCSGCLAILENKKDTRIAEWIRIHQPTICCLQEAHLTHKESHKLKEERLKPSRKKITKKHTKKRTASLILHAMICCRSLNSSKTKIPSASIRSIND

SEQ ID NO: 32881 - protein, 159 aa, Homo sapiens
MQGTKSAGPPLYLGVTQASEKLIHRVQPEVAIPQNEESPGLEERQSQDAQLQPWSEEFSLVEDSGRHQARRVQVGGATPRGVEPAGGHDWVQKRNVIIQPSGSLEKVVTVSPGSGEPANCIQMELRFGSFTEMNLCELMRTISDEVAEMVSTEASTYGE

SEQ ID NO: 32882 - protein, 85 aa, Homo sapiens
  misc_feature (1)...(85): Xaa = X or * as defined in Table 2
XRGSVCLCPAQAPDPYSTLGHSSWKAAAMAGEMAAPAKCHRNHAWSPLHKQNHRFTWLKSFAGPKKRVDFGYFCASEGSGKALRF

SEQ ID NO: 32883 - protein, 167 aa, Homo sapiens
MAEEGTAAAGVMDVNTALHEDGLARGIHKAGNFRQAPSPSFGEQKNVENCHKSKQKLQHQPNGQLGTREREEPRDPRLLTRRKKSKQASSPATHRAVPDSQAMDSRKLLKDVLYKMEAGNQEEGKENRKIGDSTQKTGQGNPLNDGVGNPWEATAPSQEGYQITTEH

SEQ ID NO: 32884 - protein, 79 aa, Homo sapiens
  misc_feature (1)...(79): Xaa = X or * as defined in Table 2
MERSPSRRRRLEEAPKLPYKNPTHLAQQQEPWSRLNSTPTITSMRRDAYYFDPEIPKDDLDFRLAALYNHHTGTFKNKX

SEQ ID NO: 32885 - protein, 161 aa, Homo sapiens
MGDITTDTKEASLSEVNIRGSLSHAKKIKDVDTQEPRSNRYQDLQGSNAENELTTNELTSQLSSWRQWLQHQCLQVPLKSTGSDAAIPPLPFLLPSSASSLLPLQTDWLKGVSKWKKSKAERKGLFPKTLLLLSQGSSSPSWPSKVAGITHQETEDAGEQI

SEQ ID NO: 32886 - protein, 259 aa, Homo sapiens
  DOMAIN (22)..(75): 3-beta hydroxysteriod dehydrogenase/isomerase family domain identified by eMATRIX, accession number PF01073A, p-value=1.000e- 40, raw score of 18.01
  DOMAIN (2)..(247): 3-beta hydroxysteroid dehydrogenase/isomera domain identified by PFam, accession name 3Beta_HSD, E-value=7.3e-101, PFam score of 348.5
  misc_feature (1)...(259): Xaa = X or * as defined in Table 2
XSVPVFIYTSSIEVAGPNSYKEIIQNGHEEEPLENTWPAPYPHSKKLAEKAVLAANGWNLKNGGTLYTCALRPMYIYGEGSRFLSASINEALNNNGILSSVGKFSTVNPVYVGNVAWAHILALRALQDPKKAPSIRGQFYYISDDTPHQSYDNLNYTLSKEFGLRLDSRWSFPLSLMYWIGFLLEIVSFLLRPIYTYRPPFNRHIVTLSNSVFTFSYKKAQRDLAYKPLYSWEEAKQKTVEWVGSLVDRHKETLKSKTQ

SEQ ID NO: 32887 - protein, 54 aa, Homo sapiens
MPVLHLGFGHRKDNLSEHGSVGSLWLQRQIITLSGFRQTAKLPCISVGQRNQGL

SEQ ID NO: 32888 - protein, 220 aa, Homo sapiens
MDFGDSGERVGGKLIHVYGWIITGRLETFDFDAEYIDRARLSGFFVAPETNNYTFWIQADSQASLHFSWSEEPRTKVKVASISVGTADWFDSWEQNRDEGTWQQKTPKLELLGGAMYYLEAEHHGIAPSRGMRIGVQIHNTWLNPDVVTTYLREKHQIRVRAQRLPEVQIQTTIEELLAVKCKLEPLWSNILLRLGFERGAVRGFILIVFFIMVFFLSIK

SEQ ID NO: 32889 - protein, 61 aa, Homo sapiens
  misc_feature (1)...(61): Xaa = X or * as defined in Table 2
XSSHPWPTLLLAYMSGGVTRALITEDTEPLVTTLFSGRSCYICTFTSNWAGEYQETPQCSP

SEQ ID NO: 32890 - protein, 79 aa, Homo sapiens
MMSWALLGESIRCKWFIQYEVQAEPEIPRSYMSRWLRPPHHHYCFLSLSKYPCLWLQWRLPDEQLREEKKGQDGSQMGS

SEQ ID NO: 32891 - protein, 71 aa, Homo sapiens
  misc_feature (1)...(71): Xaa = X or * as defined in Table 2
XEIRKVHYRAHISIESPTQVYEEARDGINTAILQIKNLKYHKVKQLLQFMENQSSLRTTVSEPGLSNRNTI

SEQ ID NO: 32892 - protein, 394 aa, Homo sapiens
MNHFSLQWGELDSQDLPETDASLQVKSEGTAAKCPRSTVWLCRGEKRAGSSTEGPFPWEQALPPICSPRSLNIPQGLSGLSWFRHCCSEAGLIFHELKKLFNLVILQILDLQDGSINAIPSFFIDLCWRFDADVGSVMHFPNFPFKDEVLTPPAVKVLAAEDSAKSLFRHLLWLKRATHDELGSFSKYPCLWLQWRLPDEQLREEKKGQDGSQMGWLCKCTNVAATAREQCGDQGLSVLSDEGSSHPTRHVGQQKRGPRKAAELRFGPRLQSATLSGYIPFTISESVTSLIRGKVQQWLPGEWTSSMLVSLGIPVAAAGHTEHSGPRLGLSCQLQVSSLTYAIEPSDAYTIELSGTMGTCTSLTLFDPPKSLVRENSRYDRVHCIHEQTEMQTG

SEQ ID NO: 32893 - protein, 54 aa, Homo sapiens
MVRVPGPTSRERGRGWLELVGSGCGGTLASPQLAPKSAAPSSPWRSSALSPLQS

SEQ ID NO: 32894 - protein, 111 aa, Homo sapiens
MQSCPERAPVQGTVTAQGRDRTPGPAVSAAAILWLEELGPSWAKRTGAQIVELTTGRPESRHSRFPPVSTNPFPPRDGGPGTLTISRLPGGPGVLAVDLPIPAGHRATEAG

SEQ ID NO: 32895 - protein, 141 aa, Homo sapiens
MSQCPQVSSSQEEKLHKLGPEPSYMSQLPQWGALRYDRRVTSHRSWAKQYVAICAADKYFFEAGTTNISQCLLRAVRRQKVTSPWCCNQQYVTIFFAGRTIFLGFPRGPGILTVDLPIPTGHRDTEAGPLGAEDTEQRRKT

SEQ ID NO: 32896 - protein, 124 aa, Homo sapiens
MTLPEHLGGPMDHHGPRVTLKVEVPNPDHTWFIDGSSSRPNQFSPAKAGFPGGPGILAVDLPIPTGHRDTEAGPLGAEDTEQRRKDLELRLQPETKAAPNLESRPVHSSCVPDWMDPSPESLIG

SEQ ID NO: 32897 - protein, 104 aa, Homo sapiens
MSHNFTCMLNLEYHLYLRFSLIDCLHAHPLCRRPKECLSDHPQVGSNGSSSRLFGSNPYLNIHHLKMSRLQVCLSHQVWELAEAGRNSVSVHRAPGHQSAPVLF

SEQ ID NO: 32898 - protein, 159 aa, Homo sapiens
MQSCPERAPVQGTVTAQGRDRTPGPAVSAAAILWLEELGPSWAKRTGAQIVELTTGRPESRHSRFPPVSTNPFPPRDGGPGTLTISRLPGGPGVLAGDLPIPAGHRATEAGPLGEEDTDQGRRDLQLGLERETKYPPNPEATLSAPASCLIGRFPAQRP

SEQ ID NO: 32899 - protein, 62 aa, Homo sapiens
  misc_feature (1)...(62): Xaa = X or * as defined in Table 2
MHGGNWKRTSSNGFSQDIGISEDKDCVPETHRLSGVSGSTHMMSPRPVWMRWKFAVGEALAX

SEQ ID NO: 32900 - protein, 97 aa, Homo sapiens
MIIFHKTQMCQGGESTVLETSEILPKGTTGRQEVSPWSRIMGKTACSQTECFTGFCHRCCRCFAVSGPEISKEPRKCFTREEVSLNIYQSQRHKVTK

SEQ ID NO: 32901 - protein, 241 aa, Homo sapiens
  misc_feature (1)...(241): Xaa = X or * as defined in Table 2
XSKSNTNDKVRDDESHRAQLNLQNKGKHFGSTKLPLAPLAQGAPGPDIYAYPHRPPRAQLPSGKTPPCTPCGSSPYSSSPCSSSPLHPLQQLPTCSPCSSSPYSSSLLQQLPPAAAPSCSSSLLHPLHPPWKQLPLPTPQVTKRQVPQVLGDKFKSRESPQAHTLYMSTLESLTQSKPVKLHPRFPLDRKVRPAHLRNFWLIYENYKLHKSKNNRCLFVTDSILGAKQCLAIKGHCKVSDE

SEQ ID NO: 32902 - protein, 47 aa, Homo sapiens
MLAAWRYEGFSRLGKGIHQFGWLEGEFTLGRTVPLVLSEDSRSCLPC

SEQ ID NO: 32903 - protein, 243 aa, Homo sapiens
  DOMAIN (181)..(221): kw TRANSCRIPTASE REVERSE II ORF2 domain identified by eMATRIX, accession number DM01354Y, p-value=1.191e-35, raw score of 10.69
MLPDCLRSPVDHHGRRALGNSHSGRKVERTKGLLKTHLTKLSHQLKKDWTILLPLLLLRIQACPQNATRLGKFSWIISCRVFSKCFKENRIPRNPTYKGCEGPLQGELQTTAQRNKRGHKQMEELSMLVDRKNQYRENGHTAQELEKNYFKVHMEPKESPHCQVNPKQKNKGGSITLPDFKLYYKATVTKTACYWYQNRDTDQWNRTKPSEIIPHIYNNLTNLTKTRNGERIPYLINSGVESG

SEQ ID NO: 32904 - protein, 63 aa, Homo sapiens
MRLGPNKKEHPYRNLNGLYLVASRGQARIRRRASGKSIVQSFLSWWLSLVRCVFKRPLVHSGP

SEQ ID NO: 32905 - protein, 76 aa, Homo sapiens
MLTRYSPFKLLYRCSFLLGPSLIPDTWTNLDCAPKKTCHPYYFLSSHIPILHSQLLTHALLLFTLPVYTVSPSHHS

SEQ ID NO: 32906 - protein, 120 aa, Homo sapiens
MAPTNCKGSRKCGRPHEQMPHPYLPLLTLFSDSARLHPGEINSRVPHTKPVWWSLHTDAYEIWYHDSDWGDLPWEINPLSSCSLLHEKDPHTTSRKIHIRPQVLRPTSPRNISPISNPEK

SEQ ID NO: 32907 - protein, 72 aa, Homo sapiens
MVEGEEGAKSRLIWQQAKRACAGELPFLKPSNLMRLIHCHKNSMGETTPMIKLSPPGLNLNVGIITIQGALR

SEQ ID NO: 32908 - protein, 102 aa, Homo sapiens
MLDLHCDKIGPVDHIEFSSGPEFKKTLASKTISISEEVRFLTHMDEEDQSDKKETSEPEFSITENYSGQKTCVFPTADSAVSLSSSSDQNTTSPVFQYIRSR

SEQ ID NO: 32909 - protein, 140 aa, Homo sapiens
KKAGGAKAAVRKATQSPVTFQKGSNAPCHSLQHTKKHGSAGLAPQTKQVCVEYEREETVVSPWTIPSEIHKILHESHNSLLQDLSPTEEEEPEHPFGVGGVDSVSESTGSILSKLDWNAIEDMVASVEDQGLSVHWALDL

SEQ ID NO: 32910 - protein, 76 aa, Homo sapiens
MEQLLETMEGQGRPLLPPQLWQALGHLHKLHKESLMREEYSPNWELDLDKSLWASESSVDLRVWEYNPSNLARLDV

SEQ ID NO: 32911 - protein, 115 aa, Homo sapiens
MVFPWSWALSGSGSPPAAVAKLCIVLPVEGLPTCLCLLPVSVGVPFRRSFEGYYFYGFQFGDQSLLRRFESKRITCRKFDTVQASESLKSGIITSDVGDLTLSKRGLRTSFTFRK

SEQ ID NO: 32912 - protein, 322 aa, Homo sapiens
  misc_feature (1)...(322): Xaa = X or * as defined in Table 2
XLFHREDFHGIPRLADRGGSQLVKPVLVFSPSPLIIPLTLSPGTCDPASHLRQPPTTILTKHCPDMQLSGKSPTEKDPQTINSSSTEVSFAVQTPVILVASNPDEVGGLMKPGVPPYEDKCTQLSQELEQLEEDSREGGMLAGPADSHQQVRGRGKTRVPPYEAKSTHMTQELEQLEEVPGKAECLPTAFMPKAHSYMTEENSRPRNVQRQMLSSHEWHGLVHNCRVNASPDDLSDIAGRHGYCSVEEDLSEKPVYPPKRSVFRKVGGNFIFSFVEEGETHKAGKCTQQAPADLLLLNPGLHRLMGPFLNQSLEGAGVPTTG

SEQ ID NO: 32913 - protein, 105 aa, Homo sapiens
  misc_feature (1)...(105): Xaa = X or * as defined in Table 2
MEWIFHDHLVLILYKSKANPATFLMQNLVHAWCEHNEVGCRTIVAVPQYRAPFSVDSTLGGVCVNWSDTFLLNGQLKEYVLTDGGRRVSSGLDTTLYIPRTADKX

SEQ ID NO: 32914 - protein, 197 aa, Homo sapiens
MKNHYTPTRMTKNKNTETQNVGQDLQQPELSCTVGRIGSHNYKAKSHDRLSASWGREKLVVVQSKSESLKLERLTVQSSVCGQRTERPWKTNGASSRVQKPKNLEFDVQGQEEQKKASSTGERRQPEDSASQLIPPSSACFVLATLAADWMVSTHIEGGSSSPSPLTQMSISSSNTLTDTSRNNAYQLSWHPSIQST

SEQ ID NO: 32915 - protein, 28 aa, Homo sapiens
MVYTCSVLPICCLQGEPGCLRECGVLCS

SEQ ID NO: 32916 - protein, 146 aa, Homo sapiens
MLPAGSRGTTGIWGAEASIALLNILLCIGQSSFLPFPTTSYLVQNVDSSRIKPEDCGPSKEAIHSQEQSTPHSLRQPGSPCKQQMGSTEQGNRFFPLCSALVKLPVKLPCLLLVKAQLGLSPRTLYLEALNGTKGLGDEGDQSFFQ

SEQ ID NO: 32917 - protein, 154 aa, Homo sapiens
MSGWSDGYIPEANILLNFIRENKETNVLDDEIDSYFKESINLSTIVDVYTVEQLKGKALKNEGKADPSYGILYAYISTLNIDDETTKVVRNRCSSCGYIVNEASNMCTTCNKNSLDFKSVFLSFHVLIDLTDHTGTLHSCSLTGSVAEETLGCT

SEQ ID NO: 32918 - protein, 382 aa, Homo sapiens
  DOMAIN (170)..(337): Ribonuclease HII domain identified by PFam, accession name RNase_HII, E-value=4e-59, PFam score of 209.8
  misc_feature (1)...(382): Xaa = X or * as defined in Table 2
XLNAYITAGIENCHESYQLEEGRRKLQLGMSLMIREGSAARNLNALAPLINEFNSPQCMLCTDDRNPWEIAHEGHIDALIRRLIEQHNVPLHVAYRVASWSTARHFGLNHLGLLAPGKQADIVLLSDARKVTVQQVLVKGFLLLLWEIRKSSQQTTPTEMNAAEMAQLVAGVDEVGRGPLVGAVVTAAVILDPARPIAGLNDSKKLSEKRRLALYEEIKEKALSWSLGRAEPHEIDELNILHATMLAMQRAVAGLHIAPEYVLIDGNRCPKLPMPAMAVVKGDSRVPEISAASILAKVTRDAEGVLLVFFFFQLKEKLAFLKREYSKTLARLQRAQRAEKIKHSIKKTVEEHDCLSQQDLSPQLKHSGHHELPPVLHTTMLR

SEQ ID NO: 32919 - protein, 134 aa, Homo sapiens
MPGLRYHLKQEVATNPLVTVPGYYMGASGGSHQWAEHRDAQVGHWSGWVWQRLAIVAEFTYQARVQGQVTGHYDRCFVGAGNIKSNSPLLTFVSRTWFLLLLWEIRKSSQQTTPTEMNAAEMAQGPSQSAQGKQ

SEQ ID NO: 32920 - protein, 28 aa, Homo sapiens
  misc_feature (1)...(28): Xaa = X or * as defined in Table 2
XFLLLLWEIRKSSQQTTPTEMNAAEMAQ

SEQ ID NO: 32921 - protein, 47 aa, Homo sapiens
  misc_feature (1)...(47): Xaa = X or * as defined in Table 2
MGATRDQRPHPETGRISAKFTSMEPNDNTTDDQQTAMSTGKRIGPGX

SEQ ID NO: 32922 - protein, 40 aa, Homo sapiens
  DOMAIN (2)..(31): Ribosomal protein L20 proteins domain identified by eMATRIX, accession number BL00937B, p-value=7.494e-09, raw score of 16.58
MSHEDRNTHGRWPRGRWRERLNYGATSKGTLGATRSSKRR

SEQ ID NO: 32923 - protein, 49 aa, Homo sapiens
MRENGKIFVTLKALQGSSQSVFCFVFLSDRHNFFALCPWCMDWNLNSKY

SEQ ID NO: 32924 - protein, 327 aa, Homo sapiens
  DOMAIN (261)..(294): ESICULAR LUMEN DOMAIN domain identified by eMATRIX, accession number DM01292C, p-value=4.672e-09, raw score of 12.45
MKIPPNESFSEGVEVTQLAQLVSQPTRGDPEEDAAPREAKRRSATQEASEIPAKPPGGGEKPSRQAPATAHANIQDNSPFQAREFRGRRKRGDGRPTVPLTLPPGPANLFRTPCHTTSSSWKLPLAPQGGQVLRIIPVDIVEQLAHIHSQLLKHHYDYGHLPQPVLEQGSFLMRENRFCKSDNGEMNGSSGSRAEFQTQTSSLTRCNKEPRKVVGNQAPCMKSNNALIVILGTVTLDAVGIGLVMPVLPGLLRDIVHSDSIASHYGVLLALYALMQFLCAPVLGALSDRFGRRPVLLASLLGATIDYAIMATTPVLWIYPLVNSPSC

SEQ ID NO: 32925 - protein, 372 aa, Homo sapiens
  DOMAIN (223)..(278): kw TRANSCRIPTASE REVERSE II ORF2 domain identified by eMATRIX, accession number DM01354Q, p-value=1.000e-40, raw score of 9.23
  DOMAIN (180)..(369): Reverse transcriptase domain identified by PFam, accession name rvt, E-value=0.04, PFam score of -39.4
MKIPPNESFSEGVEVTQLAQLVSQPTRGDPEEDAAPREAKRRSATQEASEIPAKPPGGGEKPSRQAPATAHANIQDNSPFQAREFRGRRKRGDGRPTVPLTLPPGLPTFSEPPCHTTSSSWKLPLGSALRMPNSISQGTCQQLGLGFEEQSRCDWNRARPPCSTTVHSVAPSLPPRGARTREGTSSQIRGAEAPRRQPGRDTRKKENFGPISLMNIDVKILNKILVNRIQQHIKKLIHQDQVGFIPGVQGWYNIHKSINVIHQINRTKDENHMIISIAAEKAFDKIQQPIMLKTLSKLGKFLGFAPKLPRNVLVGLEKSCGVYTTCSKQAAPWWLTGEIATATPTFSNHHPDQLAASNIKTRRFTCKKIMTH

SEQ ID NO: 32926 - protein, 256 aa, Homo sapiens
MKIPPNESFSEGVEVTQLAQLVSQPTRGDPEEDAAPREAKRRSATQEASEIPAKPPGGGEKPSRQAPATAHANIQDNSPFQAREFRGRRKRGDGRPTVPLTLPPGLPTFSEPPCHTTSSSWKLPLGSALRMPNSISQGTCQQLGLGFEEQSRCDWNRARPPCSTTVHSVAPSLPPRGARTREGTSSQIRGAEAPRRQHLGHQDDVAQAAGCALRLRSLLFLVIQLGCIPQAFSRGDAKDYVKGIVEPQIRKARVLE

SEQ ID NO: 32927 - protein, 194 aa, Homo sapiens
MHINLLLPGSGILAMEKISFRVRKYVLGGCTPTEGVKRKIRSILHEALGEEWRPDELGRKNEVQEESPGQEPSRKKRLQKRRDWLTLRENIKETTLNYRGQVPPICGGHEGVGGSGNYIAQTQRHKHTISPCRGMGELDNEVEYVMAMGKCYLREKAGRPRLLQASGEPGGFPKASVISGDTADTTGYRPAGTD

SEQ ID NO: 32928 - protein, 31 aa, Homo sapiens
  misc_feature (1)...(31): Xaa = X or * as defined in Table 2
XPKPDLDSYVFLRVRERQENILVEPDTDEQS

SEQ ID NO: 32929 - protein, 126 aa, Homo sapiens
MMRKKEEEEKKKEGQGADNQGVADKYSSFLPSVSLYLSSMELVTNENLLTDFKLVSLPSQFHFSIPQLMISGANDNCVQVVKNGSFQSQTGIMGTRSERWDFWHVSNISRDFERDLARALFLSAAA

SEQ ID NO: 32930 - protein, 68 aa, Homo sapiens [sequence omitted]

SEQ ID NO: 32931 - protein, 65 aa, Homo sapiens
MLAKTQSSKACLSPGRCAHTTGSWHWLTLQNSPGAVDSEHLQLTSPHGLGLSWQGYHVPSRVSLG

SEQ ID NO: 32932 - protein, 31 aa, Homo sapiens
  misc_feature (1)...(31): Xaa = X or * as defined in Table 2
XMLEDSCGALPPGQMREAAQRDRDTSTVMQL

SEQ ID NO: 32933 - protein, 53 aa, Homo sapiens
  misc_feature (1)...(53): Xaa = X or * as defined in Table 2
MMSCTRGNKKWQEPPYWVDLAFSCLHLHINACRSGFSVCFLLEXKCFGGLFFS

SEQ ID NO: 32934 - protein, 168 aa, Homo sapiens
MATSQDFVESPPVRRPSPDVAPQPWISQPPTTSPIIRDNSLSTATTQLSFQPYPNPPSEAQNDLGIQEKGARRKPLGALGHNRFQANKHQMATDCGDFRKLLHENPKLFTGSITFTTLLTGSTGNLIGSRERIRTAASNEKLGLISLKCLPYPQQYGLGAEENQPQRS

SEQ ID NO: 32935 - protein, 88 aa, Homo sapiens
  misc_feature (1)...(88): Xaa = X or * as defined in Table 2
MVFTTHRPGDSFQCLHHQGPEFPAQNWEAIWADTELAAGXXXXXXXXXXXXXXYASGAWNTSKTKMFAPLERGLKPSSLARWVPPPQS

SEQ ID NO: 32936 - protein, 88 aa, Homo sapiens; identical to SEQ ID NO: 32935
  misc_feature (1)...(88): Xaa = X or * as defined in Table 2

SEQ ID NO: 32937 - protein, 240 aa, Homo sapiens
MLMAAAACLEWWLRRHQLQVGRRCLGFELHGAGNKKERREKERQLWPFGDPRPRSSPNQGCATLSEALQIPGISKLLGATAFPGASCGSCFRKIYQLGISGDTIVDFSGRKMCNSSFNRRENRVLIEIHEDKPVLKVLPPPSLSLPRVQTALLAARISSQWILACWDLWGGTHQARPLGLPGFSLLSTGVNGSVSWVFQVPLGYETNLLWLAWCLPKRLPSFVLETQGPGGIGTGGNLLV

SEQ ID NO: 32938 - protein, 76 aa, Homo sapiens
MLPALGPVLYVLILQAFSQLPINIITITKKFQNVVPTRGHTGRTEAAVAERRRPTRRPAAREQTAEPLARREFQHS

SEQ ID NO: 32939 - protein, 165 aa, Homo sapiens
MDLCQKNETDLENAENNEIQFTEETEPTYTCPDGKSEKNHVYCLLDVSDITLEQDEKAKEFIIGTGWEEAPPQRSSPAVGLRQPGLPGPHLLGPTGGRKGLGGTRHQGPEEEQRNAFGTAWTPETHPTRGHTGRTEAAVAGGDARPEGRLLGSRQLNRLPDAETQ

SEQ ID NO: 32940 - protein, 55 aa, Homo sapiens [sequence omitted]

SEQ ID NO: 32941 - protein, 62 aa, Homo sapiens
MHPDLSPHLHTEECNVLINLLKECHKNHNILKFFGYGNDVDRELRKCLKNEVLALSPKLECQ

SEQ ID NO: 32942 - protein, 57 aa, Homo sapiens
QPAFGSGVSAGYCRFSSPGVATSRILDISNVQVSYMGTLDDTEVWGTVDPIMQVALL

SEQ ID NO: 32943 - protein, 41 aa, Homo sapiens
MATRGSPARFLLPLVFPGALQNADVLLRPSGGARGALAEDE

SEQ ID NO: 32944 - protein, 356 aa, Homo sapiens
MQLGRLCDILDANVNVIYICSHHMNDELVLYYKKILSLHAAVKSGNLEDRSDLQDRFKIITPEAVNIFPVYGLEKRTPFNKNNMIFPQKHHMCLATHLMYSPKAIKRIKNLIRGTEAYIVSGLLHRDDLAVADMLDIPILGSEPELAHLYSTKSGGKRVFDSANVAVPPGIYDIYSQQQMIEQLSQLITDHLQIQRWLFKMDSEFRGNGTAFCDIPSYLKCYKWVLKESSRYGLEDWRKKWAQVLAFVTHTVCCPCGKLSAFQRFVGNANIPGTQRPLLSNFFPFLDNRRAGLLFPQGSKLGADSNPEHLSWCSPLYTLKRQQGRWGALTQESEAAREHLRPPSVTGEALVPSFVT

SEQ ID NO: 32945 - protein, 61 aa, Homo sapiens
QQQLPQLEPQPECQGPVEAEARQLKSCMKPVRRRPAEEELKTKNMDDNTFAMAEHPDVQES

SEQ ID NO: 32946 - protein, 250 aa, Homo sapiens
MGELNQGSWRQGHLPLDAANGIAIRVPRRRKDESRKNPTRKPHSWKPTKNFEDDVEVMKRSMSIRIEDTHSGPSAAGVLEFAGGPLQTLFAWVSPAEAAEQQRLLPVPSSGSFVPEGHLPDASQNSPSKLPSGFVYTVRGKLPTQASVVVDAPPATKLECPRSTSDCCAGSKNFKPVDLSLLASVGPRVNLQQESSHYGKISVTVAGHCPTHATGRILGKQALRWSPMCSMFIGRALGLVPVEGGLLQIA

SEQ ID NO: 32947 - protein, 757 aa, Homo sapiens
  DOMAIN (709)..(749): kw TRANSCRIPTASE REVERSE II ORF2 domain identified by eMATRIX, accession number DM01354H, p-value=4.375e-32, raw score of 18.00
  DOMAIN (519)..(735): AP endonuclease family 1 domain identified by PFam, accession name AP_endonucleas1, E-value=1.9e-05, PFam score of -33.9
MRGSVQMFTNGKGAEHHPSFLQAWPSLALQALTWLSTALPAWVMLLTCMGNLHPGILFVAPFIDMSSASTSAEARTQGEDAIYEPGNGSSPDTESAGSLLLDSLASRTFSGKPLPLPSLVSATQDLTTDVTPAAWLQRLKVDQRSTSPEILLYLLGKGDLFLLEFLSCYSGCLQCMSICSRMSRRQNSSDTELKKEGVYSAGGIGKTPVSKSQAPRAVINESPIPASIAEMFSSSLGKCLQHFLVSFPHNVSKPSPKLALGVGKNKVLSLGLGCLDPQWKILIVIVNGFLCGKQQVLDQTPGVSLAFPKIAERDSTWGKGQLWGSFSRLKRSCLSVLKIAVDPPAQCSSSAKGQTAFSSGSLIPMPPDWGTPPSRHLIQKSSRWHLASAPLGRSFQRKEQAAIFAVLQPPLVRQTARQTGSGVDLQQTPADLQSRGLTVRRKINKQKGIVSTSTKKNVHTKTPSEGSQLLTSKGTNSMENKFHELTEVGFRKITSLEKNINDLMELKNTARELREAYTSIKSRIDQAKESISEIEDQLNEIKCEDKVREKRMKSNKQNFQEIWDYVKRPNLRLTGVPESDRENGTKLENTLQEIIQENFPNLARQANIQIQEIQRTAQRQSSSRATPIHIIVRFAKFEIKEKMLRAAREKDISMRQKINKDIQDFNTVLDQVDLIHVYRTVHPKSSEYTFFSAPHHTYCKTGHIIGSKTLLSKCKRMEIITNTLSDYSAIKLELRIKKLTQNHTTTWKVNTLLVNEY

SEQ ID NO: 32948 - protein, 615 aa, Homo sapiens
  DOMAIN (577)..(615): RecR protein domain identified by eMATRIX, accession number BL01300B, p-value=7.253e-09, raw score of 23.13
MPLNGRMLNYIAKRKEWAGHVMCDCYNCHIRYKEDWIHLALYGTTLVRQTPIGGNAEALKLSIGVVAITGCMYADDGLLMGAGKLYEEWMLYELPFVIAEGRSGIVTRNMRVHAYQVLTCTLKTTRVDGFERRCPWREGAREGSRGCTNGKPERGEDKYSVRNCYASATVTGYAFSSRSRAASTCAFPTRCQPKFSRSIDPTGKAVQTADIRLSARATLWLGGSIEESPVLCSTLRLLLRRLPPPLTWTSPNRPTQPCTAQTQTNQSVGIAAPSAIRVIYPESVVLNAVIYLPGDPEVSGLPRAFKRRFSVEVRLDCGTFKLLLVYCTHPGDKKVNTCKTGISSEVYTLRLRFVLKVAKLTEALRSIFLSELQSGPSAAGLLEFAGGPLQTLFACVSPVEAAEQQRLLPVPSYGSFIPEGHLPDASRRAGRQERLTLLKLCLQPPLPPGALYQGDGSFTFKPLTGAVAFLSEMPCSERRKLERQSGYRGLPSYGENSPLSSSIVRHPVLRRDEDKSSTVPNSCTGHCIYSYPENYKQEVKELSQPRSSGDLSTGRELRGSEGPSGRWTHRGSTMLAMLALSVGVRDVGTASSCLRHSDECLCEVTSPYWKQQSQN

SEQ ID NO: 32949 - protein, 420 aa, Homo sapiens
MPGVRVLVKKNKYSASRMAVERPGLAQPSEPLKAVHPRLPQRPYILLPSRIFMEPFDLGIKVLYSSGTAFLGDKQGAEKKRTKLSQAICCSISSLAKRELFSMSIYGFPTTTISGAAWMGSTCPSRLAEENGRILHKPNLMRNRSKQKAEEVGNPKSSMGRRQCRSAVGAVAECEVQASSLCDTRDVSSNNSTGSPLSDEYSDKPLFTVSLRDSFLERLLASTGPVVSKTTPHALDFWYGSTPLWDLLAFAGGPPQTLFTWVSPAEPAEQQRLLPVPSSGSFVPEGHPPDASQSSLSWQSGMFKPAVAAPTAALSPGAVSQGDGNSIYKPLTGAAAFVSEMPCQESRNLERQSGYSSFVRVENTSIDVMQKTVIQQTQQLQWEFMSDEINFIEESDKDFTFDTFRNVKNEDMKTCQQDEQ

SEQ ID NO: 32950 - protein, 47 aa, Homo sapiens
MTGLTKAAEEKTAAVRPAEEELKTKNMDDNTFAMAEHPDVHESVGPL

SEQ ID NO: 32951 - protein, 160 aa, Homo sapiens
MVSPRFSSRAFMVLGLTFKSLIHLWSLMLVTFRWGFCVDVLFVDVDTTPFCLLVFLLTVRPLCCRSAGVCWSSTPDPVCLGITSRGCRTAKIAAFSFLWEASSQRGTRQMPARALLYEVSVDPYWEVSPSQDTWGSGTHLRRQLVPYQSSNAVLGDLLLS

SEQ ID NO: 32952 - protein, 94 aa, Homo sapiens
MGMAPQSNGAGTEAQEGEHADGQLQEPGQGLLGSSPMACAFTGFIAALQLPWPQPPRDPGHSGCGSQLRQLPAAGGTPFGISGCGSGCDPEQDF

SEQ ID NO: 32953 - protein, 192 aa, Homo sapiens
MELIGDLHRSSFNRVTGKGTCETTLQRLSQDNVFSKDTGIQSKYTVLTFFGNSHISNSIAEGQVSSPISCKVVYFKQYLKAVITPECLLILDYRNLNLEQWLFRELPSQLSGEGQLVTYPLPFEFRAIEALLQYWNRWLHFLLGVINEHQLAPAREMISSGSPVTKQGESRREKEDVNSGLLNPEAVPLETK

SEQ ID NO: 32954 - protein, 54 aa, Homo sapiens
MFGVHQSIQGLKDQWLQNAKFPLKGVDLDNNMTQYCRSASIALKLKRVKGYVTS

SEQ ID NO: 32955 - protein, 19 aa, Homo sapiens
  misc_feature (1)...(19): Xaa = X or * as defined in Table 2
XAGKTPTAVNKLADFFTKT

SEQ ID NO: 32956 - protein, 143 aa, Homo sapiens
AREPWGPLSVLRGKAKTWFLGWSAAQVTKLAHRHESGRHNFHEFGKDALRRNQFLLGLLNPSHRRGYHGPSGHTQDHCGLETHTCHSQHSSHIHIHDGAKSHLSPSVTTPQEKAAGYDMNDRCHAQGENFSPDTPEDQGPPPG

SEQ ID NO: 32957 - protein, 155 aa, Homo sapiens
MAHGFRSGQTDSPKDPLSDRGQLHRDLPDLDFPPRRGHSNIPNNADSWASTTTNARYCSLAWNIPLPLNSLCLITCHPHLKSQQKATFAWKPSLSPHAWGGEAFALPRLGSPCGQAPAIDADGSCVCIPVRNDCLQHRGWEEEEPGLSSGLRVSE

SEQ ID NO: 32958 - protein, 183 aa, Homo sapiens
MVALATAGRRRGCWLWLPRFHYPHGVCSPENLNNTTRDPVLQNAQGHVGSLQLLNVLPGTQAPVAYKQIHKRKKERTPSSARKRMTTESSPGQLSLEDFLEMTDEQVCETVEKYGANREECARLNASLSCLRNVHMSGQDETESTLGGKSETQEEAAWTWDLEAGRHQQGQLLDLNSCPRKTR

SEQ ID NO: 32959 - protein, 291 aa, Homo sapiens
  DOMAIN (97)..(112): WILM'S TUMOUR PROTEIN SIGNATURE domain identified by eMATRIX, accession number PR00049D, p-value=8.941e-11, raw score of 0.00
MDASWSEGPHKELTHERMQFPHPGDFLSLAPINQQPQFSNPLPSTIPLKAPAQNSLQLPDAPSSAPGPALAGSLTQGRFSRASPAPARQPGAPSRAGGPRQPPPPPAPPPGTMLPSQEASKLYHEHYMRNSRAIGVLWAIFTICFAIINVVVFIQPYWVGDSVSTPKPGYFGLFHYCVGSGLAGRELTCRGSFTDFSTIPSSAFKAAAFFVLLSMVLILGCITCFSLFFFCNTATVYKICAWMQLLAGRNYCLIGRIAQTPKRTILKKADVDILMGLFQIHLTQLNLDVDL

SEQ ID NO: 32960 - protein, 397 aa, Homo sapiens
  DOMAIN (268)..(302): Bacterial regulatory proteins lysR family proteins. domain identified by eMATRIX, accession number BL00044, p-value=5.622e-09, raw score of 19.03
LVWGPGALLSASHPPSRGFSSISDGSRRVGGEHPASPQAQAPSSAPQGSTEPPTSWEHARWATHIFTTVRMFANDHKGSASIDFGVTNEFQQAGKFANTECANRNSLREGTMSSCAQVYPWHLMSLTVSTSKATSSRASITLPGRNVPGGRAESQESAGVCINEGQICIPMVQAPPSLGLQGPVISNTRQGQTGAGRLGLKGRPSTCYFAKGRFQLPGHSVTLIRMGPKLGADSITAGMGEEEKSGNGAALPWALRWRAGAIRIEGLQFLNALLALGLFAGALSQQPAKLRSTLGSCPFNRQRKQRSEMTQPVQSLTGKGQAVIRTQVLLTLDVHALSSVNFGHPHLSNSLSLLTALRRTGGKMAQDLQVTKALLERSEVSSTTIADEQARNADPGL

SEQ ID NO: 32961 - protein, 73 aa, Homo sapiens
MVIPRFTGALYPKGKQYPYPKLVSVSVAQEDQILEDFLGNPEPWRLGTSRKPSYKKGTLLLATGRGTPDLMCS

SEQ ID NO: 32962 - protein, 214 aa, Homo sapiens
MEEGATRQKCGQTLEAGEGKEMESPWHFQKTHSSAHILILAHLQIIPQCSAGIQEHTFLASWHRADEPVSGRLWRDTDSRSSDQDKREQSTNRQMFCPLDSMRLEAHNHPEDSLHFSLSVCPGCANGTIGLGCFRLAHPLMMSKEDTDHAPRKGILLTKPPPQRVLIETYVHVTSVEAEWKKLVRNTHLLLLSLEQGKEEDAEEEEADMDMQAK

SEQ ID NO: 32963 - protein, 96 aa, Homo sapiens
MSYHYTKLCRGLHFPSRLYRLSVHQALRRKYEHYQLNPAYSKLVMFVQTEMRGKLSPSIIEKTMPSNLVNFILNAKDGIKAHRTPSRRGFHHNSHS

SEQ ID NO: 32964 - protein, 647 aa, Homo sapiens
MVEGKGEAGTFFTGQQENSMRETTPMIQLSPPGPALDMWGLQFKDTFICHTITQSFAVGSISPRDFIDLVYIKRYEGNMNIISYKLYRSASQALQAYIDDFDLGQIYPGASTGKINIDEDFTNMSQFCNYIYKPNNAFENLDHKKHSNFISCRRHTVNDIDSMSLTTDDLLRLPADGSFSYTYVGPSHPTSKKNKKCRGRLGSLDIEKNPHFQGPYTSMGKDNFVTPVIRSNINGKQCGRLKNPKLMNRTNNCISESSLSFPKKSSFKDSSEHSLEKNYPRWLTSQKSDLNVSGITSIPDFKYPVWLHNQDLLPDANSQRVYQIFKDDQCSPRHSHQAQGTSRLINKLDCFEYAFEPSNFSNSLSDDKELVNEYKCDFEHSQCQCENPLLPGQSTKPFSGDKIELLILKAKRNLEQCTEELPKSMKKDDSPCSLDKLEADRSWENIPVTFKSPVPVNSDDSPQQTSRAKSAKGVLEDFLNNDNQTCITRIQMGIKYTGERWPSKELSLHPQAGSSSNVYLFISGHQLLQIQSRDSMGVNVIFVVKPGTPVSLPTVLSGSLPKLPRRHSEAEAISLDDWNRWTSSHPVAWFLTLIVRNSNPTIFWVSREYSTPYSSHYELSGLREQPSQAELGPRAYFQLEKAPGEFP

SEQ ID NO: 32965 - protein, 36 aa, Homo sapiens
MMIFLGKNVFTALDLGEFFSPKASKRRIINPRMRWK

SEQ ID NO: 32966 - protein, 84 aa, Homo sapiens
MHSVVMKEPVYLCSKSGHPFPLSRGPAQEGPGLPSFCACRETKPHEPHPTLQEERGLDGKNLFCCFGKHTADLQTSCDGVSSDV

SEQ ID NO: 32967 - protein, 44 aa, Homo sapiens
  misc_feature (1)...(44): Xaa = X or * as defined in Table 2
XGRFGRKGVAINMVTEEDKRTLRDIETFYNTSIEEMPLNVADLI

SEQ ID NO: 32968 - protein, 202 aa, Homo sapiens
  DOMAIN (35)..(74): DEAD-box subfamily ATP-dependent helicases proteins domain identified by eMATRIX, accession number BL00039A, p-value=6.824e- 33, raw score of 18.44
  DOMAIN (29)..(199): DEAD/DEAH box helicase domain identified by PFam, accession name DEAD, E-value=7e-46, PFam score of 148.0
MEPEGVIESNWNEIVDSFDDMNLSESLLRGIYAYGFEKPSAIQQRAILPCIKGYDVIAQAQSGTGKTATFAISILQQIQKVVMALGDYMGASCHACIGGTNVRAEVQKLQMEAPHIIVGTPGRVFDMLNRRYLSPKYIKMFVLDEADEMLSRGFKDQIYDILQKLNSNTQVVVLSATMPSDVLEVTKKFMMDHIRILVKKGE

SEQ ID NO: 32969 - protein, 45 aa, Homo sapiens
  DOMAIN (21)..(39): DEAD/DEAH box helicase domain identified by PFam, accession name DEAD, E-value=0.00097, PFam score of 14.7
  misc_feature (1)...(45): Xaa = X or * as defined in Table 2
SNWNEIVDSFDDMNLSESLLRGIYAYGFEKPSAIQQRAILPCIKX

SEQ ID NO: 32970 - protein, 63 aa, Homo sapiens
  DOMAIN (24)..(32): Helicases conserved C-terminal domain proteins domain identified by eMATRIX, accession number PF00271, p-value=1.000e-08, raw score of 7.99
ATGIDVQQVSLVINYDLPTNRENYIHRIGRGGRFGRKGVAINMGTEEDKRTLRDIETFYNTSI

SEQ ID NO: 32971 - protein, 77 aa, Homo sapiens
  DOMAIN (27)..(35): Helicases conserved C-terminal domain proteins domain identified by eMATRIX, accession number PF00271, p-value=1.000e-08, raw score of 7.99
MAPMGLEPEGVNREVINYDLPTNRENYIHRIGRGGRFGRKGVAINMVTEEDKRTLRDIETFYNTSIEEMPLNVADLI

SEQ ID NO: 32972 - protein, 28 aa, Homo sapiens
MDEERALYIVRAGEAGAIERVLRDYSDK

SEQ ID NO: 32973 - protein, 390 aa, Homo sapiens
MLKHNLKKQQGSEPDKARMSELSDQEFKTTVINLLRVLIDRLDSLQEQMDHVSREIEILRKNQKEMLKIKNTVTEIKSDFDGFAVNEVQRQVTCQGHNCSEEEPRFAYKQFKFRTSTLNYHTDLVLESMKLCEGIFKVLIKDIPTTCQVSCLEVLRILSRDKKVLVPVTTKENMQILLRLAKLNELDDSLEKVSEFPVIVESLKCLCNIVFNSQMAQQLSLELNLAAKLCNLLRKCKDRKFINDIKCFDLRLLFLLSLLHTDIRSQLRYELQGLPLLTQILESAFSIKWTDEYESAIDHNGPPLSPQETDCAIEALKALFNVTVDSWKVHKERSPVLVIEVSRPNLRWNRNQSLWWQLLGQTLMLLMGAVVCTGSRELWSLTSCLESGPF

SEQ ID NO: 32974 - protein, 85 aa, Homo sapiens
DPLDSPCFAGPDDVEGALLIHGRRCGGAAAALRAQAAASSNRRLTAAPDKAQDSVEAWLADRGGVRPKALLALLRLPPSENCPVF

SEQ ID NO: 32975 - protein, 149 aa, Homo sapiens
MGTAQANGGDLRKSGEKPASAWPSHWLDSSVNLSFLLNPKHMSPEVFQTVGISSNPSSVCAEPPELTLLTGTCDLAPPEAQRTLTPSLKKLPTPHLHPAFQKPPRMTRRRGRVCHLLRTRTSGERGSSLCLSASTAFKMNILNDKPFRV

SEQ ID NO: 32976 - protein, 125 aa, Homo sapiens
MSAPFHHAVAAGTQGTKSLGCTQYGIPWHSPQNHVFFLGLWACDGRGWPEGLRHGLEPFSTPPHHPPPPPPVLEVNIRLLAAYANFCSQLEFLLKKKGFFFSTASSGCKFSKLLCSCFPFKTECF

SEQ ID NO: 32977 - protein, 218 aa, Homo sapiens; identical to SEQ ID NO: 32851

SEQ ID NO: 32978 - protein, 170 aa, Homo sapiens; identical to SEQ ID NO: 30522
  misc_feature (1)...(170): Xaa = X or * as defined in Table 2

SEQ ID NO: 32979 - protein, 332 aa, Homo sapiens
MDNKVQAEVVSDGDEELVGNWSKGDSCYVLAKRLVAFCPCPRDLWNFELERDDLGYLVEEISKQQSIQEVTWVLLKALSVIREAEHKSSENLQPDNGIEKKNPFSEEKFKLPAEICISNEEPNVNPQDNGENVSRACQRSSGSPSHRRPGCLGENGFLGLAQGPRAVCSLGIWCTASLPLQPWLKGDNVELEPWLQRVQAPSFGSFHVVGRSWRTSARAVQKGNVGSEPPHRVPTGALPSGALRRGPPSSRPQNGRSNNSLHYVPGKATDTQRQPVKAAGRVAVPCKAIGVELPKTMGTHLLHLHDLDVRPGVKGDNFGALRFTAPLDFRLA

SEQ ID NO: 32980 - protein, 251 aa, Homo sapiens
MWESLEPPRDLLNGFDKNADNDMNNKVQAEVVSDGDEEFGGNWIKALHFKREAGHQSSETLQPDDAVEKKNPFFEEEFKPAAEICISSKEPNINSHDHEENVSRPCQRPPWQPLPSQTRRPKRKKWFHELGPRSPCCLQPRDMVSYVPATPAVTERDQHRAQTVASEGGGPKRWQLPHGVEPAEVHGSQELRFGNLLLDFKICMETPGFPGKSLLQGGSPHGEPLLGQCQREMWGQTPHTESLLGHCLVEV

SEQ ID NO: 32981 - protein, 224 aa, Homo sapiens
MWKRLWNWVTGRGWESLEGSEEDTKMWESLEPPRDLLNGFDKNSDSDMNNKIKAEVVSDGDEELVGNRSKGDSCYVLAKRLESRDLVPCVPATPAMAERGQYTALAVASECGSPNPWQLPHGIKPAGAQKSRIEVWEPLPRFQKMYGNTWMPRQKFAAGAGPSWRTSASAMWKENVGLKPPHRVPTGALPSGALTRGPPSSRPQNGRSTDSFHHVLGKAADTQH

SEQ ID NO: 32982 - protein, 269 aa, Homo sapiens
MGKGDSGLQNGSDPPIACTVLMEKLQTLNASHESSRSGAVPYKATGMELSKAMVAHLLHQHDLDSGALLKRYQKMLNQFWNWITGRGWNSLEGSEEDKKMWESLELPRDLLNGFDKNADSDMNNKVQAEVVSDGDEELVGNWSKGDSCFVLAKRMATFCPCSKDLWNFEVERDYLEYLVEEISKQQSIQGVIWVLLKHSVLKGKQHKSLEIFHADDEIEKKKTLSEENSRRLHIFEVPNVPPQGMSEVFTAAPPIPGLEVSVEKMFFVG

SEQ ID NO: 32983 - protein, 112 aa, Homo sapiens
  misc_feature (1)...(112): Xaa = X or * as defined in Table 2
MWESLEPPRDLLNGFGKNADSDMKNKVQAELVSDRDKELVGNWSKGDSCYVLAKGLAAFCPCPRYLWSFQLERDDLGYLAEEISKQQSVQKGSFYLLNPSIRPVQCVSMLEX

SEQ ID NO: 32984 - protein, 261 aa, Homo sapiens
  misc_feature (1)...(261): Xaa = X or * as defined in Table 2
MNNEIQAEVVSDGDEELVGNWSKGDCYVLAKRLVAFFPYPRDLWNFELERDDLGHLVEEISKQQSIQDVTWVLLKAFSFIKEAEHKSSENLQSDNAIEKKNSFSEEKSKSAAEICVMSSQMLIPKTMRKMSLGHVRDLHGSPSHHRPGGLEGKSDFVGWAQGPHAVCSLGIWCPASQPLQLWLKGANVELRLWLPWMQAPSLGSVVLSLQNCGRMNCDCLKAASLWSFVIAATGHEYSPHLPPASILGTLVHVLRAKYYPX

SEQ ID NO: 32985 - protein, 46 aa, Homo sapiens
  misc_feature (1)...(46): Xaa = X or * as defined in Table 2
MWESLKLPRDLLNGFAQNADGDMDNKVQAEVVSDEDEELVGNWSKX

SEQ ID NO: 32986 - protein, 229 aa, Homo sapiens
MVRRGKEEVRRKKQGNVVCSKRTPIFISGTGQLHWSNSGKWIEFTAPNQSLATSKGTRCTHNFPGVTKPGWTPNSGQPRPLGLLEAHEIFQHEKPFQTSKLVREWGVAEKILKNVEATLELGNRQRLDSLESSEEDKKMWGSLEPPRDLLNGFDKNADSDMNNKVQAEVVSDGDEELVGDQSKGDSCYVLAKRLAAFYPCPGDLWNLELERDDLGYLAEEIPKQQSIQK

SEQ ID NO: 32987 - protein, 250 aa, Homo sapiens
MIEIDTEFWALVMSLLSGQAFQDPCIQGPQGTNRVTVVFPVVTAVPSIEPIHRKHICRRTESTQERRPHTPEDLRLSSTALEESVWTPGAKRLAAFCPCSRVLWNFELERDDLGYLVEEIAKQQSIQEEAEQKSLENLQPDNETEKKNSFSEEKFKPAAEICIMSKRVFMRSDGFIRGFSPFAQRFSFLPSPSCYHVKKGAFASPSAMTPRPPAAAASMNQQQQQQQKVGKQQLSEPEDVEMEAGDTDDP

SEQ ID NO: 32988 - protein, 333 aa, Homo sapiens
MGHNRDWVVPMTELKSRSHGVEGGDSQIQAFIWSLFESEDPENLDPLLALIPLGSVIWSDCHFLCGLLQCSPNPSASGLARRSNLFTGTALQSGSFPIALRGQAERLARIYEACRGWNSLESSEEDKKMWGSLEPPRDLLNGFDKNADSDMNNKVQAEVVSDGDEELVGDQSKGDSCYVLAKRLAAFYPCPGDLWNLELERDDLGYLAEEIPKQQSIQKVTWVLLKAFHLKRETEHESSENLQPDNAVEKKNPLSGEKFKPAAEICISSKEPNVNTQEHGEMSPGHVRDLHGSPSHHRPRGPEGKSGLGSLCCVQPRDFVPCVPATPAVAERG

SEQ ID NO: 32989 - protein, 151 aa, Homo sapiens
MWESLEALIDLLNGFDQKPDNDMNNKVQAKSLVAFCHRPRDLWNFELERGHLVYLVEEISKQQSIQDVTGAAKGIRFYKESKAKWFKSNSSSFDSKGSGTGHMGAQLGNISQTPLQLDADVTTCSEWNNEQRASSWMMKARRPTGDGGVES

SEQ ID NO: 32990 - protein, 56 aa, Homo sapiens
MAPASGEGFRKLLLVVQGEGGALSVEITWQERKKRGASVTQQSDVTGTNREFRDKW

SEQ ID NO: 32991 - protein, 261 aa, Homo sapiens; identical to SEQ ID NO: 32861

SEQ ID NO: 32992 - protein, 235 aa, Homo sapiens
  DOMAIN (101)..(115): 1 kw CHROMO BROMODOMAIN SHADOW GLOBAL domain identified by eMATRIX, accession number DM00547B, p-value=2.145e-13, raw score of 11.28
  DOMAIN (104)..(151): SNF2 and others N-terminal domain identified by PFam, accession name SNF2_N, E-value=2.6e-11, PFam score of 44.7
MLITKTMGKMSAGHVRGLHSSSSCHRPGGLEGKNGFMVWAQGPLALCSLRTWCLASQPLQPWLKGAKVQFEPLLQRVQAPRLGSVHLLLSLQVHRNQELRCMVADEMGLGKTIQAIGITYFYKEEWPLLIVVPSSLRYPWTEEIEKWIPELSPEEINVIQNKTDVSWISDCCASNERGSVGGGPSEPVNRSLEPHLSNLLVLFCLVDHKAAITVPDLASLRDAGRKEEDKTTCAN

SEQ ID NO: 32993 - protein, 150 aa, Homo sapiens
MVVVGRNIPVTLIDMDKALLYFIHVMDHIAVKEYVLVYFHTLTSEYNHLGLRLPEETLRMLLMSSTRGNFEGCLFCYIPHFVSKGVNMGFFTNFFCLRTEGQNPPCGPASTSCFLPYHQNRLTFLLLVLGIWMPGENGPYYTSYPPSPDL

SEQ ID NO: 32994 - protein, 37 aa, Homo sapiens
MGHRSIPSQFGVLWWLGSNAQALLKAEVGAGRGGSRL

SEQ ID NO: 32995 - protein, 61 aa, Homo sapiens
MKKHGSNNMGLSENLTDAAGNGVDELIPQRKSEKPENQQFPRTENEKYQRSKLLTLMLVDQ

SEQ ID NO: 32996 - protein, 126 aa, Homo sapiens
MPNAGEKIHISVLEKIQNAQFNMGVCGTGDAVDEAAVEKTQVIETRSVGLLSDHSTVFHTLISLFQDSSSLAAPTPACQAKQPPIKKAFKLNTHLSSSSLPLRLLQPPRAHPLLLSALMSCQSGAF

SEQ ID NO: 32997 - protein, 213 aa, Homo sapiens
MGKMSPGHVRDFHGSCHHNRPGGPGGKSGFMGQALGPGAVCSLGTWCSVSQPLQPWLKGANVELRLWLQRVEAPDLGSFHVVLSLQISEDIWKHLDAQVEICCRGGALVKNLCWGSVEGKCEVRVPTQSLYWGTASGAVRRGPPSSRNQNGRSTDSLHCMPGKDTQRQPMKAARREVAPCKATRAELPMTMRAHFLHQHDLDVRPESKIILEL

SEQ ID NO: 32998 - protein, 387 aa, Homo sapiens
  DOMAIN (299)..(346): kw TRANSCRIPTASE REVERSE II ORF2 domain identified by eMATRIX, accession number DM01354V, p-value=1.000e-40, raw score of 12.97
  DOMAIN (64)..(312): Reverse transcriptase domain identified by PFam, accession name rvt, E-value=4.1e-06, PFam score of 17.1
MAERGQYRAQAVATEGGSPKPWQLPCDVEPFSESLSSWGKKFLLGNKMDEYFKEEIVAAMGLRLKDGKINLLTAKIHGPAGLVSTSKRVDRQHVENQVTPTLILRFSNGLSKQHTRRLYTAAGLEGPTPMEPQSLPAQQSEIKLQGGSEAGGVVPTIAEARVGNRSGVDLQHTPTDLQLRVLTVRRKTNIQKGHPHQNPICTSPSSKTKVLEVLASAIRQEKEIKGIQLGKEEVKLSLFADDMIVYLENPIVSAQNLLKLISNFCKVSGYKINVKKSQAFLYTNNRQTESQIMSELPFTIASKRITYLGIQVTSDVKDLFKENYIPLLNEIKEDTNKWKNIPCSWVGRINIVKIAILPKIIYKFNAIPIKLPMTIFTELDKTTLKFM

SEQ ID NO: 32999 - protein, 156 aa, Homo sapiens
MWKQLWNWVTGKGWDGLQGSEEDRKMWESLESPRDLLNGFDKNADSDTNNKVQAVPAMAERGQCIAQAVASEGGNPKPWQLQRGVEPASAKKSGIEVWEPPLRFQMYGNSWMPRKATDTQCQPVKAPRRVTVPCKATGTELPKAMGTHLLQSATWM

SEQ ID NO: 33000 - protein, 323 aa, Homo sapiens
MIPPKQPRQPKGAVDDAIAFGGKTDQEAPNASQPTPPPLPKKMIIRANTEPISKDLQKSMESSLCVMANPTYDIDPNWDASSAGSSISYELKGLDIESYDSLERPLRKERPVPSAANSISSLTTLSIKDRFSNSMESLSSRRGPSCRQGRGIQKPQRQALYRGLENREEVVGKIRSLHTDALKKLAVKCEDLFMAGQKDQLRFGVDSWSDFRLTSDKPCCEAGDAVYYTASYAKDPLNNYAVKLAESHTISRSSPPLISIKELLMMIDLLSLVSSEVIKEKKAQRHMEAAKAWGLHPLKPQPELYSGPFQPWLEWLRYRAPSP

SEQ ID NO: 33001 - protein, 35 aa, Homo sapiens
MEVVIAVIHDQKPRSQGPWVRGAVPVPGGRSILVS

SEQ ID NO: 33002 - protein, 33 aa, Homo sapiens
MLEIHRKGTATCFPSGMETLSWVWTSTLHESEN

SEQ ID NO: 33003 - protein, 135 aa, Homo sapiens
MSYGQACGVWGHLDDGSWECALLESPDIKGHSDFAEPEQRRPCLKEEEGMFTSILGLYPLDASSTLLAPIPKFQQPKMSLDIAKSSLEFPRHLYADDSQAPDHSSNCGSDISIQMPQRHSSPICTKSTSRSTPMN

SEQ ID NO: 33004 - protein, 125 aa, Homo sapiens
MDVASMGSVMTSVDEKLQELRCFHVLGLWCKKVEDCWNCRFLTCSQGIAVKVPHGGVVVSRRDLKELLKDVLKTKGKFISEENLTLGMKEDKQKCYQSLFCQERLTVDYRQQQQSKNDYGRQRPY

SEQ ID NO: 33005 - protein, 178 aa, Homo sapiens
  misc_feature (1)...(178): Xaa = X or * as defined in Table 2
XIDSRYNEGCRELANYLLFGLYNQNTSDFEKTGFSEEVLDDVIILIKSDSVHLYCNPVNFRYLLPYVAHWRNLHFHCMTENEYEDEEAAEEFKITSFVDMVRDCSRIGIPYSSQGHLQIFDMFVVEKWPIVQAFALEGIGGDGFFTMKYECFEVWSSLAYRWALPVPSLLHSDGLMTA

SEQ ID NO: 33006 - protein, 172 aa, Homo sapiens
  misc_feature (1)...(172): Xaa = X or * as defined in Table 2
XHPPTDTHIRRPRQNTNSTIKARFPEQEKRTIHSREVEPRIPSSLHHIEDAYQDFPNNGDRDIIKYLQFTPKCSPSSFHLHMTFSSKTFLVLQVLGVALGSALKTLTLVKPQSSNDSQPRISNSPAPHVLTAHKAGAVNVLSTVISLNPHGSSRMQTVASHYPHFTFEETEA

SEQ ID NO: 33007 - protein, 293 aa, Homo sapiens
MADIEMTLSTQGAKLQETEALSDLQVNTRSCSGRQPDPGACRSLSPTQMVSQMWAFSCSTCKRNSPNRAPAAFRAKSVERTEGRLTARKAGLCRAEGMGPRSLSTSVGLWLKSGSTSALRPANRIPQTVLEGVPSPHYEQKSPLHCVIRGGKSRYDDGGIFEVDMRKFTLTNTAVHNGNGYFMRDQVTILCLAGNKVWLPQTQNILATLLHPLIFQVHLHKCARDEGDKDQVTSTTPDPPDSSPGGSLGPTVQKDTQVSLDDVANCKDQAQRHLDTNPSLRATWPVKRSGYRG

SEQ ID NO: 33008 - protein, 168 aa, Homo sapiens
MVQQGEQPGESMFAGDRPGFMRVQQAVTMSTACQDTVGKVVFRVRETCTQVSLSACQMKESASQAASRACRIWIREMYVRSPSIMLPSENRTHRMPRRSVMVDYQTTENLAELARSTESSSREPSLLPCPLTGLGATIQRYYNSWCSFLSLYLTTAAAAHGGSLGARH

SEQ ID NO: 33009 - protein, 32 aa, Homo sapiens
MKGTFLSLQTEIKTKVCCFLARRTGLMATDFP

SEQ ID NO: 33010 - protein, 65 aa, Homo sapiens
  misc_feature (1)...(65): Xaa = X or * as defined in Table 2
XLMFKTHTGPGGHEHGLTESHESRPYFSPGPYAAPPLAESCLRTFAPDVPSSTFALIGPPRALAL

SEQ ID NO: 33011 - protein, 34 aa, Homo sapiens
  misc_feature (1)...(34): Xaa = X or * as defined in Table 2
MALLRTAPPVTAPGKLTPIWMRSQALKPKQGFPX

SEQ ID NO: 33012 - protein, 34 aa, Homo sapiens; identical to SEQ ID NO: 33011
  misc_feature (1)...(34): Xaa = X or * as defined in Table 2

SEQ ID NO: 33013 - protein, 131 aa, Homo sapiens
MPLEVVVELQIRAISCPGVFLPGKQDVYLGVYLMNQYLETNSFPSAFPIMIQESMRFEKVFESAVDPGAVVDLLENGDPSKAETEAAGHREEYIGTGRTTRSLAGAVGREPGLPSGPTPGENHLPAGSPIC

SEQ ID NO: 33014 - protein, 483 aa, Homo sapiens
  DOMAIN (241)..(281): kw TRANSCRIPTASE REVERSE II ORF2 domain identified by eMATRIX, accession number DM01354Y, p-value=9.571e-24, raw score of 10.69
MEDRVGPSEERSQQKLSITPARLAGGDSLNPAGRTGDLLVETSPLLAAVFPAHDNSLCNKPYWLVQDLRLINQIVLPIHPMMLLGEISVTKALAGSLIKALAVFHTAESPGYALLDSYYLLQKGSVCISILQEEEAFSWPGKGECRDKSWASLGLIPAFPQGGQWKQALGLLDHSCLCFGELGTRLAAPASFSTFPITNRERERKTDKLIPKFMWKCKGPRITKTILEKNEVGEFTLLDFKTYHKFAVIKTMWYWHKDRYIDQQNDIESPEINSYVYGQLIFDKDSARLHPGEINSLVAHTKPVWWSLHMDAHEIWCRDSDWGTSLGRSIPCPPALCSMRKIHLRPRVLRPTSPRNISPISNPFLPENYIKLSHPVPLDSYVLCQFLRLSLFLMTLTVLRSTSQGKTTAVLHHSGVLAVNAPALTVWDTAKPHHPKDSVQYAGQESLRLWVSTCASAWKAPLAAAGCPLQSPILSSLSQLQAA

SEQ ID NO: 33015 - protein, 27 aa, Homo sapiens
  misc_feature (1)...(27): Xaa = X or * as defined in Table 2
XRTFDSHGFDDSSPVGGLGVKKEKTLE

SEQ ID NO: 33016 - protein, 29 aa, Homo sapiens
MAKSMYMAMEPSSFQKYLQRIPFLESMMA

SEQ ID NO: 33017 - protein, 63 aa, Homo sapiens
MVYLPKLLNLVVGFSLLMKPLFLGLENQQNKKFSMSYLSQKLTLIMSRGWQVKYQCLSEINSY

SEQ ID NO: 33018 - protein, 515 aa, Homo sapiens
MATSSEEVLLIVKKVRQKKQDGALYLMAERIAWAPEGKDRFTISHMYADIKCQKISPEGKAKIQLQLVLHAGDTTNFHFSNESTAVKERDAVKDLLQQLLPKFKRKANKELEEKNRMLQEDPVLFQLYKDLVVSQVISAEEFWANRLNVNATDSSSTSNHKQDVGISAAFLADVRPQTDGCNGLRYNLTSDIIESIFRTYPAVKMKYAENVPHNMTEKEFWTRFFQDRLNTGSKDLFAECAKIDEKGLKTMVSLGVKNPLLDLTALEDKPLDEGYGISSVPSASNSKSIKENSNAAIIKRFNHHSAMVLAAGLRKQEAQNEQTSEPSNMDGNSGDADCFQPAVKRAKLQESIEYEDLGKNNSVKTIALNLKKSDRYYHGPTPIQSLQYATSQDIINSFQSIRQEMEAYTPKLTQVLSSSAASSTITALSPGGALMQGGTQQAINQMVPNDIQSELKHLYVAVGELLRHFWSCFPVNTPFLEEKVVKMKSNLERFQVTKLCPFQEKIRRQYLSTNL

SEQ ID NO: 33019 - protein, 102 aa, Homo sapiens
MGKAMLQLLIRAHWTVFPCEHEDNAASVSVTLCSDLAGGEVVSAVLTGQSVVQTEKEIDRSSKPPACLVAPQVVFCSEVLRVDESYHRKYPVQLRPVHIAAK

SEQ ID NO: 33020 - protein, 125 aa, Homo sapiens
MLADVALTKARHTAKTRFSVGGDDTRDALPQEEESREAVWLQQLCLAVVPSGFVYPVREKPPTQASVMVDVPSLTKFEHPRSTSECCAGSENFKPMDLSLLGSMGVGSAELDHLAPWLQAPFPGE

SEQ ID NO: 33021 - protein, 396 aa, Homo sapiens
MVPQYTCPLIPDTCEYGTLHGKRDFAAPVSLDVDPAPELSTDDILILALRDEAQKPAEPHGPSAICGKLWGTRNAHRRVVFGSATICLGHAMSSMQTKGQRSPQCSVLCAPAEGGTDMPEDEATNWEWGRERTVAEQEFPRDLQKGRVGRTEINNARVLCHKRWTVSTADKAYGERSPSPAASGGKLTRSTLLSDPGFPSSAPVHPRVGPASKEKSNRQEEGRHKEPPQAQRTGKSPQMQKFECEFNFQCIKKSFSTRKIASLTGTDWQQGTLTGSSIMGHNLLISDKRPFSVELSWINVFCSYLWSTGSRSFLRERPFPIGCDFAPYGIFGKFGDVVTTWVRIQWIEAKGPVKHTTVHRTVSQQGIIQPTISSVLRLRTLKPNRSVSEHREGCTF

SEQ ID NO: 33022 - protein, 260 aa, Homo sapiens
MGRFYCPDMNRECALSCFPDRHRANTQGQLTPSFHGQRSVVKTRKRSATKLDGTLSSGQGKREETGINKEYGSPHQVQGLTWEQEGAAEETVQGQRREGYTFVSSAAWMKVTIRVEKFGHAPGLTVRGAAPAGPVGLEAAAGSEPHPGPRTQGARGRSPEALGPGRGWFCSPLRSAFRRWEERAAMRTGNLIGEEAGGPRRAARAGGRGGRLREATGPPGRQPSEEAGTVYKCSGSEAPRERASFTEHQELTTVEFAQIP

SEQ ID NO: 33023 - protein, 310 aa, Homo sapiens
MAKPGGICSRDFYPHFGFSAVRKLTRSTLLSDPGFPSSAPVHPRVGPASKEKSNRQEEGRHKEPPQAQRTGKSPQMQKFECEFNFQCIKKSFSTRKIASLTGTDWQQGTLTGSSIMGHNLLISDKRPFSVELSWINVFCSYLWSTGSRSFLRERPFPIGCDFAPYGIFGKFGDVVTTCVCVQGFPVRIAARSSHLLNAERSGEQNHPRPGPSASGDRPRAPCVRGPGCGSEPAAASSPTGPAGAAPRTEGAQCEAHGRYLLEMQIGKRCFTMLSPQKIDKDKVVFAKVLPDKGIPSFVGFLRAHTGTPDV

SEQ ID NO: 33024 - protein, 80 aa, Homo sapiens
MRGVSCGLFSKCWGLTHLPPLVLLWAVGTRPLLLKAKVNVILTPAGRGNGVWGEEAQTPQLQQERVQALNYYSQPPCPFL

SEQ ID NO: 33025 - protein, 41 aa, Homo sapiens
  misc_feature (1)...(41): Xaa = X or * as defined in Table 2
XVKYDIDLPNKKVCIESEHSMDTLLATLKKTGKTVSYLGLE

SEQ ID NO: 33026 - protein, 39 aa, Homo sapiens
  DOMAIN (7)..(30): Heavy-metal-associated domain proteins domain identified by eMATRIX, accession number BL01047A, p-value=7.000e-12, raw score of 13.50
  DOMAIN (4)..(31): Heavy-metal-associated domain identified by PFam, accession name HMA, E-value=0.026, PFam score of 13.4
MPKHEFSVDMTCGGCAEAVSRVLNKLGGVKYDIDLPNKK

SEQ ID NO: 33027 - protein, 77 aa, Homo sapiens
EIEAFSLSEDTSSGLPEDRVVSVSFRVLYPIVITSLGVFYDANDVGFQRNITVKLYQAEQEEALFIARFSPPSCGVQ

SEQ ID NO: 33028 - protein, 365 aa, Homo sapiens
MRNWLVLLCPCVLGAALHLWLRLRSPPPACASGAGPAGLVSDVRRRPFARERNLVCPSAASAFCFGSSGSEVVFFPPKLLVFLGQDWGFSAVDNVYQLALFPQWKSTHYDVVVGVLSARNNHELRNVIRSTWMRHLLQHPTLSQRVLVKFIIGAHGCEVPVEDREDPYSCKLLNITNPVLNQEIEAFSLSEDTSSGLPEDRVVSVSFRVLYPIVITSLGVFYDANDVGFQRNITVKLYQAEQEEALFIARFSPPSCGVQVNKLWYKPVEQFILPEAIVKPSPTFSFGYQTLGFICCFKFKVGVRASVTALSGTTELLSDSVERMLLPGPYLAWRVWLRAHLCSGLAKVRNLEKTWCDGLSLLSAV

SEQ ID NO: 33029 - protein, 105 aa, Homo sapiens
MFSNTSRTHIWDHKYTAETIHNYNHRSIRQKGTIFKGQKSTEVMQAAGSRKENECQVNGEALIKPSDLMRTHLLSGERMGETSPMIQLSPPGPSMTRGDYGNNSR

SEQ ID NO: 33030 - protein, 60 aa, Homo sapiens
MNTSVEEDTSGWSSRASWQKSTQTATSSSVLVIHPLLSDVVPSALAHRILCAMGIFQSAP

SEQ ID NO: 33031 - protein, 80 aa, Homo sapiens
  misc_feature (1)...(80): Xaa = X or * as defined in Table 2
MQKSEGSGGTQLKNRATGNYDQRTSSSTQLKHRNAVQGSKSSLSTSSPESARKLHPRPSDKLNPXTINPVHSDDEVFERG

SEQ ID NO: 33032 - protein, 107 aa, Homo sapiens
  misc_feature (1)...(107): Xaa = X or * as defined in Table 2
XCSCNKLNDKLQLALRICGFHIYRFDPTTDTESRLEDFGMGGFGYLKETAVHGSGDPFLPRLSPAAIRTPAAPHRGGLMTGTRSANNRGYRHRAPEFGEMRLRAARP

SEQ ID NO: 33033 - protein, 60 aa, Homo sapiens
MRICFPELHSCVLTVCLMMSFDHSYLLLCFFTCVPPEPSDFCIASLSLQFQLRLTKATLD

SEQ ID NO: 33034 - protein, 78 aa, Homo sapiens
MAPPICSHFWACRLWQLLGLLSSVLNTRLLGAHLTSLSFSGKTQSLSALRRKHGTALLSPLATLDSAGEKRDSLHLFL

SEQ ID NO: 33035 - protein, 57 aa, Homo sapiens
MSQPIIICPPPPNMVHSCHMHIIGRLQEMILQSCPWKPGLITATNHTLGDADAKHES

SEQ ID NO: 33036 - protein, 761 aa, Homo sapiens
MLPNRLGSSETITDAELRVTLTVEELNGLRAVQDMFVKQILKAARSLRVITIPNLKYPGTQTLRKAAAPDPNTTGLIFLEKLCEIAAAIASYVAVPSLEINHRKKANPNLLLRRSGSGSVSLQLLAEKIWEGVREPWARVLVLWEWLPDQNPLSGLTKSNSTSRHELPHGRAIQLHLSGWELWSEPSNLLDLVVTGDIENTSLAPEDPTFLTMPSGSHCPESPSDGPGLSSLVALVWFLVEDWLSRKRLESEPAELPLGKAGEVVFDTLPLPSRRTHFSGFLGHFCYSFSDGYSTNRAAPDGSSTKAEKHGSCRKQPPYTLQCRDKAGLRVHGNSPVSAYGWLFSEERPGKPTRTPFSWEGDPPGLLTADETSLVVHLELPVFPSFLKRAGNSRHSGMGSPLEAEEAYSTVVMADVSQYPVNEPLVAAVVCQEPERAQPDVHFFQACASGATQEELQRDRCPPLRPRPCSAARQSAHDQHRRAGRGPRTTPGEPIPEAEEAQRPEPDILNHVFDDVESFDRGCRSRRRRPGCWSTGTRPQEPAPGGWGGLADAAGKPPSEAEYTDVLQKIKTPSACWPGCAATSPTPPLRAVALPFRASADDCEPSGGPEFASSVRRPHLTRMPWRCCGTTSLHVKTALDLAGGLVDPPRAGAVPGGGTPIQPEFFSGWEPPVTDPQSAPGRTQLRNSYSTSGGAAAKRPPGRCQWRWSFFRVIPGEKGRHYRPVAVWQWDSKMAQVGPLSLSVKPRLGTKKDVDKVLDEK

SEQ ID NO: 33037 - protein, 341 aa, Homo sapiens
  DOMAIN (40)..(57): Adenylate kinase proteins domain identified by eMATRIX, accession number BL00113A, p-value=1.000e-10, raw score of 12.74
  DOMAIN (41)..(63): NB-ARC domain identified by PFam, accession name NB-ARC, E- value=0.051, PFam score of 10.7
MWKSWPGDSKEVQVMAERYKMLIPFSNPRVLPGPFSYTVVLYGPAGLGKTTLAQKLMLDWAEDNLIHKFKYAFYLSCRELSRLGPCSFAELVFRDWPELQDDIPHILAQARKILFVIDGFDELGAAPGALIEDICGDWEKKKPVPVLLGSLLNRVPLCIENKLGVGGEDWGDQLRVYWWNPSKREGGSGWSHGSEDANQSLKHLRLSANVLLDEGAMLLYKTMTRPKHFLQMLSPWETTLAQIIMLDWAEETSSDKLKYAFYCSCRELSRLCPCNFEELVFRDWPELQDDIPHILAQARKILFVIDGFDPLGGRTLWTLTRGHLRELGNRRKRCPSSWGVC

SEQ ID NO: 33038 - protein, 87 aa, Homo sapiens
  misc_feature (1)...(87): Xaa = X or * as defined in Table 2
MREEQNSQAIGLDLNMGTGVHISERFHTAKSGMTIARLWPQIESTAALEERRDLRQPLQKALGVSQSCVQQLSTLIQKLIVGEVYAX

SEQ ID NO: 33039 - protein, 399 aa, Homo sapiens
MGLSVLPLHPNASSGRFLSPSSCRITAHLSLFVGSMRRCTMAGSLPGAVLAPSVHGLQVAIIVRVTPIISPLLYIRLVRQYLITVLQLAGVDSNPSSTNSEASRYISPTLKGGGRTVGSTGSCLPDQVIPNTPSSHLVWHRKETKASLGGRGLLFESIEVFPETSASSSATASTENPVVVDGLDELKVPPGALIQDICGDWEKKKPVPVLLGSLLKRKMLPRAALLVTTRPRALRDLQLLAQQPTTIFALFASGQISVSLQLKQQPQVSGSETNFLSDSSVRILCDHVTRAPVICRKWSWEVTVPPRSSGLNLLCPQSQPVPEAPASLANVLLDEGAMLLYKTMNAQNTSCRCCRWKTVVLRSQLQGPCCCLGCQQEVTHLCLAKNPIGDTGVNFCVRA

SEQ ID NO: 33040 - protein, 71 aa, Homo sapiens
MEVLHHYRLLPEPSSPSSSFTKELSRRLQGSEPPNWPAPAQHNTLAVAEELADVFRKVLRWTQTECPGPRG

SEQ ID NO: 33041 - protein, 22 aa, Homo sapiens
  misc_feature (1)...(22): Xaa = X or * as defined in Table 2
XMYQWQQKGKENDTVEMEKGPP

SEQ ID NO: 33042 - protein, 105 aa, Homo sapiens
MAPEGVTFSEGYRNVKSTNTSGAQPLFCGFYLHKNPAERTGENIVEDQCEFKNWQLGASRSGILAVAPRSSCSSQMKTLEDSDPKADMRTWGDALAETLLDTTSL

SEQ ID NO: 33043 - protein, 357 aa, Homo sapiens
PPSALESDGEGPPPRVGFVDSTIKSLDEKLRTLLYQEHVPTSSASAGTPVEVGDRDFTLEPLRGDQPRSEVCGGDLALPPVPKEAVSGRVQLPQPLVEKSELAPTRGAVMEQGTSSSMTESSPRSMLGYDRDGRQVASDSHVVPSVPQDVPAFVRPAHHQDVSSPAKTVGRFSVVSTQDEWTLASPHSLRYSAPPDVYLDEAPSSPDVKLAVRRAQTASSIEVGVGEPVSSDSGDEGPRARPPVQKQASLPVSGSVAGDFVKKATASCRGLLGPASLGPETPSRVGMKVPTISVTSFHSQSSYISSDNDSELEDADIKKELQSLREKHLKEISELQSQQKQEIEALYRRLGKPLPPN

SEQ ID NO: 33044 - protein, 60 aa, Homo sapiens
MEAQAGWAAPGEARAMTAPRAGVGMPRLPPAPGPLSTTVIPGAAPTLSVPTPDPESEKPD

SEQ ID NO: 33045 - protein, 1013 aa, Homo sapiens
KLARGSLVGGGRQRPPQTPLRLLVDADNCLHRLYGGFYTDWVSGGQWNHMLGYLAALAKACFGGNIELFVFFNGALEKARLHEWVKRQGNERQTAQQIVSHVQNKGTPPPKVWFLPPVCMAHCIRLALIRFHVKVAQSIEDHHQEVIGFCRENGFHGLVAYDSDYALCNIPYYFSAHALKLSRNGKSLTTSQYLMHEVAKQLDLNPNRFPIFAALLGNHILPDEDLASFHWSLLGPEHPLASLKVRAHQLVLPPCDVVIKAVADYVRNIQDTSDLDAIAKDVFQHSQSRTDDKVIRFKRAIGYYSATSKPMSFHPPHYLAARPGPFGMPGMVPPHVPPQMLNIPQTSLQAKPVAPQVPSPGGAPGQGPYPYSLSEPAPLTLDTSGKNLTEQNSYSNIPHEGKHTPLYERSSPINPAQSGSPNHVDSAYFPGSSTSSSSDNDEGSGGATNHISGNKIGWEKTGSHSEPQARGDPGDQTKAEGSNHMDITTPPLPPVAPEVLRVAEHRHKKGLMYPYIFHVLTKGEIKIAVSIEDEANKDLPPAALLYRPVRQYVYGVLFSLAESRKKTERLAFRKNRLPPEFSPVIIKEWAAYKGKSPQTPELVEALAFREWTCPNLKRLWLGKAVEDKNRRMRAFLACMRSDTPAMLNPANVPTHLMVLCCVLRYMVQWPGARILRRQELDAFLAQALSPKLYEPDQLQELKIENLDPRGIQLSALFMSGVDMALFANDACGQPIPWEHCCPWMYFDGKLFQSKLLKASREKTPLIDLCDGQADQAAKVEKMRQSVLEGLSFSRQSHTLPFPPPPALPFYPASAYPRHFGPVPPSQGRGRGFAGVCGFGGPYGETVATGPYRAFRVAAASGHCGAFSGSDSSRTSKSQGGVQPIPSQGGKLEIAGTVVGHWAGSRRGRGGRGPFPLQVVSVGGPARGRPRGVISTPVIRTFGRGGRYYGRGYKNQAAIQGRPPYAASAEEVAKELKSKSGESKSSAMSSDGSLAENGVIGRGEAGSPDEREHG

SEQ ID NO: 33046 - protein, 1022 aa, Homo sapiens
MVPPHVPPQMLNIPQTSLQAKPVAPQVPSPGGAPGQGPYPYSLSEPAPLTLDTSGKNLTEQNSYSNIPHEGKHTPLYERSLPINPAQSGSPNHVDSAYFPGSSTSSSSDNDEGSGGATNTALAASVTWTTLLCVTSQHTERLPETQTDALLLYRLEHLGMGAVSLATSQLPSPPLGPTVPPQPPSALESDGEGPPPRVGFVDSTIKSLDEKLRTLLYQEHVPTSSASAGTPVEVGDRDFTLEPLRGDQPRSEVCGGDLALPPVPKEAVSGRVQLPQPLVEKSELAPTRGAVMEQGTSSSMTGNSFLLNPAFTSPSNVSDVPIAESSPRSMLGYDRDGRQVASDSHVVPSVPQDVPAFVRPARVEPTDRDGGEAGESSAEPPPSDMGTVGGQASHPQTLGARALGSPRKRPEQQDVSSPAKTVGRFSVVSTQDEWTLASPHSLRYSAPPDVYLDEAPSSPDVKLAVRRAQTASSIEVGVGEPVSSDSGDEGPRARPPVQKQASLPVSGSVAGDFVKKATAFLQRPSRAGFAGPRDTQQGGHEGPHDQRDLLSIPSRPNISSDNDSELEDADIKKELQSLREKHLKEISELQSQQKQEIEALYRRLGKPLPPNVGFFHTAPPTGRRRKPSKSKLKAGKLLNPLVRQLKVVASSTGHCVDGWWLLPLTHFLGHLADSSRGPPAKDPAQASVGLTADSTGLSGKAVQTQQPCSVRASLSSDICSGLASDGGGARGQAEPDGAKHRVLPKSRGTAGGTRAQLSSWEFGLEEEILSSTLRGQQQLLNKVLSCPHHLCPDKSWMPPPPHRSLLFNIKGEPYEPVPWSGGRQRLPPSPTQPWPQAMMLGPQPALHVQAQVNNSNNKKGTFTDDLHKLVDEWTSKTVGAAQLKPTLNQLKQTQKLQDMEAQAGWARPGEARAMTAPRAGVGMPRLPPAPGPLSTTVIPGAAPTLSVPTPGTALSNLPTPPCALPLGQYRGLLPAPVSWGPWAGQVGQLGAQGSWNTPQVPVLPVFLQPPVVSMPGPRLRIT

SEQ ID NO: 33047 - protein, 91 aa, Homo sapiens
MMNTLDTPLGAPKMKAGVGSSGVRPKGSLPHAQGNEDSVRSSGVIPKGSLRHAKEVKDTNTCEVSASIATHKVQKFPGQPSPWSLWTGSAS

SEQ ID NO: 33048 - protein, 29 aa, Homo sapiens
MARAAPLLAALTALLAAAAAGGDAPPGKI

SEQ ID NO: 33049 - protein, 50 aa, Homo sapiens
MMGFFHMVVRKVAIFETVNVSKAEEQEVFHGVHSALEHRPLKPVSFYIRP

SEQ ID NO: 33050 - protein, 54 aa, Homo sapiens
MPFDAGAHHPDHMNVYAQVPFPDIPNISTFSGPGCHFGPCVTFTTTQCVLLITE

SEQ ID NO: 33051 - protein, 138 aa, Homo sapiens
  DOMAIN (83)..(112): CALCIUM-BINDING PRECURSOR SIGNAL R domain identified by eMATRIX, accession number PD00919F, p-value=5.019e-09, raw score of 11.63
MGTPDYSQGDSKHSLEPGGIPWNMDTEMRTAEAMTLTTGLFPLLLSTSPCCCHVKKDVFASRSAMIKHEVYCFVKSWLHYWTALNAGDDDDDDDDDDDDDDDDDDDDTKRSRRRGQLTCIEQSPSAGHSSRLYMHCLI

SEQ ID NO: 33052 - protein, 289 aa, Homo sapiens
ATGSARRQPRSLETLSLGGTLHLPELESGRCPKKVDEGNEQIKEPPLEEGRTGSERSSTVGVKALLTLDNSAWNASARKSGQGLFSLPSAVPTRLEFPDSRNCGLFRVDSRCNCALESGLLWPDGPDYPSSACWSSHGPWGYQENWGPARICFQYLETPEMSVRSLMAYGYFCVDVWMGAAQCWLPERIGPAPTLSHGKPIHGPLKGLAGERHAQQKGPSSVQSTPLGEVGVCPNGEKMLHMTENRGRGQPRFAEAVLGQGMVRSQKPGHEMVHPLLELDVVSEHPVLI

SEQ ID NO: 33053 - protein, 68 aa, Homo sapiens
MLTLPRTLPLVFALLGKLFPIHRRPLPLFIFRRCPLTPYVKWRLCARKHFLPSSICLPQVLFIPFVST

SEQ ID NO: 33054 - protein, 112 aa, Homo sapiens
MRDRHKPGEEEHRQRCRERDVSTEADSVYVRHAERLRVDRREQATRARPPRWFVDHSELERVLLSKRGVFTGLKKILEVGGSLQDPPGELAVTANSRMSASILLSKLFDDLN

SEQ ID NO: 33055 - protein, 133 aa, Homo sapiens
MLENVLASHRKMQGALEKVQIELGRRDSEIARLKKERDLNQQRVQKLEAEVDQWQARMLVMEDQHNSEIESLQKALGVARENNRKLAMSLEQALQTNNHLQTKLDHIQEPMESKELERQNLETFKDRMTEESK

SEQ ID NO: 33056 - protein, 161 aa, Homo sapiens
MLDKEAKPYKVDPFVIIIKFLLGYKWFKELWDVLLLPELDAVILTCQSMCFPLISLILFLFGTCTAYWSGLLSSASVRLLSSLWLALKRDLNQQRVQKLEAEVDQWQARMLVMEDQHNNNYMERLKFPPRITGPVGTKLASPGEKEKNCVPPCVIAIIPGL

SEQ ID NO: 33057 - protein, 118 aa, Homo sapiens
MPAGSLENSSSERTATSLKRTVGLGSADFIMMSDIRLPICLELSMEMGLGQETLRPQYRRTSALSREPLQMRPWLPRLRPPNHYEAPPHNSARATQGSAGTKEPREVVSAPRGGNERL

SEQ ID NO: 33058 - protein, 63 aa, Homo sapiens
MFEKGERKEAHKEFQYSDVTYRRKCRHERIIRQRIQRKIKNALYHESKERIMTQKRAWGKMAD

SEQ ID NO: 33059 - protein, 64 aa, Homo sapiens
MMSHSCAFMKAGPQETRNRKESHRLERTCFLSPTKFQKGEWGLRPHPQGVAKLGLGYYSHFEKE

SEQ ID NO: 33060 - protein, 48 aa, Homo sapiens
MYMKGHSVSLAGTGCVTCPRGPAHLPKSRRRPGLLSVMGCLVECETSI

SEQ ID NO: 33061 - protein, 122 aa, Homo sapiens
MAGFLDNFRWPECECIDWSERRNAVASVVAGWWIMIDAAVVYPKPEQLNHAFHTCGVFSTLAFFMINAVSNAQRLENIFLLLFRKRDNGHRVPDVILWTRKKQAPASTDSNENVPTEIRMTC

SEQ ID NO: 33062 - protein, 273 aa, Homo sapiens
  DOMAIN (31)..(77): RECEPTOR PRECURSOR TRANSMEMBRANE domain identified by eMATRIX, accession number PD02520A, p-value=8.054e-39, raw score of 24.85
  DOMAIN (140)..(230): Fibronectin type III domain identified by PFam, accession name fn3, E-value=0.07, PFam score of 16.3
MRPTLLWSLLLLLGVFAAAAAAPPDPLSQLPAPQHPKIRLYNAEQVLSWEPVALSNSTRPVVYQVQFKYTDSKWFTADIMSIGVNCTQITATECDFTAASPSAGFPMDFNVTLRLRAELGALHSAWVTMPWFQHYRNVTVGPPENIEVTPGEGSLIIRFSSPFDIADTSTAFFCYYVHYWEKGGIQQVKGPFRSNSISLDNLKPSRVYCLQVQAQLLWNKSNIFRVGHLSNISCYETMADASTELQQVILISVGTFSLLSVLAGALFLPGPEI

SEQ ID NO: 33063 - protein, 56 aa, Homo sapiens
PATGEHLGQRDGRLLVSCHSDGSYCQWPVSSEAQQPEPLRSLVPYGPFPSGVGAQG

SEQ ID NO: 33064 - protein, 36 aa, Homo sapiens
MPFPLNSCFFESGCSSGHLAASSAQPSTKCEPEGPP

SEQ ID NO: 33065 - protein, 108 aa, Homo sapiens
  DOMAIN (48)..(71): LETHAL(2) GIANT LARVAE PROTEIN SIGNATURE domain identified by eMATRIX, accession number PR00962B, p-value=4.086e-16, raw score of 11.98
GSRVLYHFLSSQQLENIWWQRDGRLLVSCHSDGSYCQWPVSSEAQQPEPLRSLGGMPRASYGDRHCISVIHDGQQTAFDFTSRVIGFTVLTEADPAASRRASGVGAQG

SEQ ID NO: 33066 - protein, 223 aa, Homo sapiens
  DOMAIN (84)..(107): LETHAL(2) GIANT LARVAE PROTEIN SIGNATURE domain identified by eMATRIX, accession number PR00962B, p-value=4.505e-09, raw score of 11.98
MVEALQEHPRDPNQILIATAEASLSSGTYRAAACSTTSSAASNWRTSGGSGTAACSSAVTLTQLLQWPVSSDQQPEPLRSLVLTLPFTIFQGIRASYGDRHCISVIHDASRRPSTSPPVSSASLSHRADPAASRRASGVGARVSCFFESGTQNSYQQNQILMGQLVFKETIWNDAFWQNPWDQGGLAVIILFITAVLLLILFAIVFGLLTSPENTQCEAGEEE

SEQ ID NO: 33067 - protein, 88 aa, Homo sapiens
MDSTVCRRLRAVSSATPYGFQGEAMYRVPEFYARRKRLGGQTPYLMDITIHLQEATLKVWPVSIQAHWELGSIKTFDDVEMFLVVTVG

SEQ ID NO: 33068 - protein, 816 aa, Homo sapiens
  DOMAIN (146)..(194): Tetrahydrofolate dehydrogenase/cyclohydrolase proteins domain identified by eMATRIX, accession number BL00766C, p-value=1.000e- 40, raw score of 25.86
  DOMAIN (316)..(815): Formate--tetrahydrofolate ligase domain identified by PFam, accession name FTHFS, E-value=0, PFam score of 1044.5
MAPAEILNGKEISAQIRARLKNQVTQLKEQVPGFTPRLAILQVGNRDDSNLYINVKLKAAEEIGIKATHIKLPRTTTESEVMKYITSLNEDSTVHGFLVQLPLDSENSINTEEVINAIAPEKDVDGLTSINAGRLARGDLNDCFIPCTPKGCLELIKETGVPIAGRHAVVVGRSKIVGAPMHDLLLWNNATVTTCHSKTAHLDEEVNKGDILVVATGQPEMVKGEWIKPGAIVIDCGINYVPDDKKPNGRKVVGDVAYDEAKERASFITPVPGGVGPMTVAMLMQSTVESAKRFLEKFKPGKWMIQYNNLNLKTPVPSDIDISRSCKPKPIGKLAREIGLLSEEVELYGETKAKVLLSALERLKHRPDGKYVVVTGITPTPLGEGKSTTTIGLVQALGAHLYQNVFACVRQPSQGPTFGIKGGAAGGGYSQVIPMEEFNLHLTGDIHAITAANNLVAAAIDARIFHELTQTDKALFNRLVPSVNGVRRFSDIQIRRLKRLGIEKTDPTTLTDEEINRFARLDIDPETITWQRVLDTNDRFLRKITIGQAPTEKGHTRTAQFDISVASEIMAVLALTTSLEDMRERLGKMVVASSKKGEPVSAEDLGVSGALTVLMKDAIKPNLMQTLEGTPVFVHAGPFANIAHGNSSIIADRIALKLVGPEGFVVTEAGFGADIGMEKFFNIKCRYSGLCPHVVVLVATVRALKMHGGGPTVTAGLPLPKAYIQENLELVEKGFSNLKKQIENARMFGIPVVVAVNAFKTDTESELDLISRLSREHGAFDAVKCTHWAEGGKGALALAQPRPESSTSTQQLPAPL

SEQ ID NO: 33069 - protein, 137 aa, Homo sapiens
MRERPDAQLAPRRASASLPSPSIPARGALAPARSVPAAVKRAVTRLRRKQNTSGKPDRRGEGQRPAKARLMERSQEEDAETRGEPGDCMRLRSCEVKPPFGGPQDGSWCQTVPPLISFPIFGNQTSIQDNINYATGC

SEQ ID NO: 33070 - protein, 85 aa, Homo sapiens
  DOMAIN (40)..(84): DHHC zinc finger domain identified by PFam, accession name zf -DHHC, E-value=4.9e-08, PFam score of 39.1
  misc_feature (1)...(85): Xaa = X or * as defined in Table 2
MGAIFAGHLVVHLTAVSIDPADANVRDKSYAGPLPIFNRSQHAHVIEDLHCNLCNVDVSARSKHCSACNKCVCGFDHHCKWLNNX

SEQ ID NO: 33071 - protein, 155 aa, Homo sapiens
  DOMAIN (15)..(155): ATP synthase (C/AC39) subunit domain identified by PFam, accession name vATP-synt_AC39, E-value=0.00061, PFam score of -80.9
MSIFPELYFNVDNGYLEGLVRGLKAGVLIQADYLNLEQGETLEDLKLHLQSTDYGNFLANEASPLTVSVIDDRLKEKMAVEFRHMRNHAYQPLASFLDFITYSYMIDNVILLITGTLHQRSIAELVPKCHPLGSFEQMEAVNIAQTPAELYNAIL

SEQ ID NO: 33072 - protein, 440 aa, Homo sapiens
  DOMAIN (52)..(66): LEUCINE-RICH REPEAT SIGNATURE domain identified by eMATRIX, accession number PR00019A, p-value=2.333e-09, raw score of 11.19
  DOMAIN (51)..(94): Leucine Rich Repeat domain identified by PFam, accession name LRR, E-value=0.0054, PFam score of 23.4
MAEQWELDEEGIRRLGALTLEQPELVESLSLQGSYAGKIHSIGDAFRNFKNLRSLDLSRNLITSLKGIQYLCSLQDLNLYYNNIPSLVEVSRLQPLPFLKELDLRLNPVVRKDTDYRLFAVYTLQTLEKLDDRTVREGERKAAKLHFSQLGNSENFLLEVEKSSREKTMKNCVTDLYATTHFNSDPAVLVNVEQQLSTSLDDLTPAHGSVPNNAVLGNRTTPLRTLLLSPGTSEHRKIFTKRSLSPSKRGFKWKDNILANLNLKHGFQDATGSEASVGLFVFVRETGQESLKQKLVRVLEENLILSEKIQQLEEGAAISIVSGQQSHTYDDLLHKNQQLTMQVACLNQELAQLKKLEKTVAILHESQRSLVVTNEYLLQQLNKEPKGYSGKALLPPEKGHHLGRSSPFGKSTLSSSSPVAHETEALTAIATSMVVCTHKD

SEQ ID NO: 33073 - protein, 1380 aa, Homo sapiens
  DOMAIN (1276)..(1290): LEUCINE-RICH REPEAT SIGNATURE domain identified by eMATRIX, accession number PR00019B, p-value=8.200e-09, raw score of 11.36
  misc_feature (1)...(1380): Xaa = X or * as defined in Table 2
MGMDGATRDARGDLSLSDDSPVTVLMVHACQSTDYGNFLANEASPLTVSVIDDRLKEKMVVEFRHMRNHAYEPLASFLDFITSAFIKLLEKLSGGKDLGICRLGEGTWTARGGHLDCTGRPECSGTFSAHCKLRIPGSSPWNPFLSVSAETILPQCMGAIFAGHLVVHLTAVSIDPADANVRDKSYAGPLPIFNRSQHAHVIEDLHCNLCNVDVPHSTTPTGRAAERGMSRANRRCAPSPCRSARSKHCSACNKCVCGFDHHCKWLNNCVGERNYRVASALLGVLLLVLVATYVFVEFFVNPTLLGHLLCFHIYLMWHKLTTYEYIVQHRPPQEAKGVHRELESCPPKMRPIQEMEFYMRTFRHMRPEPPGQAGPAAVNANPSQFLATRPRAPSRRSSSSTDSADASPVHAAGPAGAYHSASAESVDEIPVAQTRLGSAALAAPRGRGRQPTLARQARSPALCRGPGTQATGSRRKRAQSRPGGSIRYPVAQARLRAAPQTLAVGTVPGTGRQRARERGPIPDGDWAGNDAVRIINEWKFCGRELLRGERALGCVRQGPGAADHVGVRRVYGRGRQRQRQRRPGEHRLVPRGVPAGLAAAVVRSAKGTGMPVTLDNLKEGKHHLRVRPADLPVAERASLNYWRTWKCISKPSEFPIKSPAFTGLHDKAPLGLMDTPLLDTEEEVHYCFLPLDLVAKYPSLVTEDNLLWLAETVALIECECSEFRFIGDCSVRVNFLRSQKILLPDNFSNIDVLEAEVEILEIPALTEAVRWYRMNMGGCSPTTCSPLSPGKGARTASLESVKPLYTMALGLLVKYPDSALGQLRIESTLDGSRLYITGNGVLFQHVKNWLGTCRLPLTETISEVYELCAFLDKRDITYEPIKVALKTHLEPRTLAPMDVLNEWTAEITVYSPQQIIKVYVGSHWYATTLQTLLKYPELLSNPQRVYWITYGQTLLIHGDGQMFRHILNFLRLGKLFLPSEFKEWPLFCQEVEEYHIPSLSEALAQCEAYKSWTQEKESENEEAFSIRRLHVTTAYMPVDFEDCSDRTPWNKAKGNLVRSNQMDEAEQYTRPIQVSLCRNAKRAGNPSTYSHCRGLCTNPGHWGSHPESPPKKKCTTINLTQKSETKDPPATPMQKLISLVREWDMVNCKQWEFQPLTATRSSPLEEATLQLPLGSEAASQPSTSAAWKAHSTASEKDPGPQAGAGAGAKDKGPEPTFKPYLPPKRAGTLKDWSKQRTKERVIFYFYSCLLMSYEAPCNLACGCRDSRYGLLGIQYLCSLQDLNLYYNNIPSLVEVSRLQPLPFLKELDLRLNPVVRKDTDYRLFAVYTLQTLEKLDDRTVREGERKAAKLHFSQLGNSENFLLEVEKSSREKTMKNCVTX

SEQ ID NO: 33074 - protein, 168 aa, Homo sapiens
MTHFKFLFSSCPTSHQAGGPGHLLSRLPQPSSGNSLNAHHLKKKSRRSPHINGASFSHEISKLLGATNMNQCENSMQRDWRLPPRSTRKTSGVTEALMGLSYKAKGSHGAQDRTPPHILSPALPLTWGCGSHVVTAYSCILDQSLSRIFSYFKQNYVTDIIYVGTDTH

SEQ ID NO: 33075 - protein, 367 aa, Homo sapiens
MQTEHRQEKCRKQKLSPCLPSSAFLVILEIFSNVFPFLCCQNRKKESIVTESRSVGREDFRVTDIFCILIALLVTQGQHPGREEEDRDNNQQGPCKHTLLMDDSSDNHTGRLVWSLFVIQSIRPSASGPRHLSSALWHRGADCFGGQLPGSSRDPGQAATATDFLGSLSPCLQLSCFLCAAVDAYLPPMAHFFVTDRTLTGSRKRYSCRNLENLTDIGSRIIGLFETSYGLAMDISMWVGSIRQGSAQVPGIGSWVHDEQSDMEKAAAAGPSYMQVRAYVALTRCQTLFKVLCKYPIIDSYCNPMRIRIHKQQVQRLKEQGISAHKDEKESEQELWQLKSQGVFLPPNNHIISLATILNQTEIAEVT

SEQ ID NO: 33076 - protein, 84 aa, Homo sapiens
MKTRSDRGRGGGAGRPPRLPARRSSPAKRGREDSPRAGPRIIRRRGPGGGAPEGDASCLLSLASRRKFALNFRAGFAVGSTSRS

SEQ ID NO: 33077 - protein, 336 aa, Homo sapiens
MPGYVPIHPHQQVMLAAKQIHVQHKADVSCKLNVRPHLQTVLQPAEVQKLPFQLDSGQGEAARERKEETEDLKRFCRPQKLCDACPRSHPQEAPSLPTRAAQQSSPGGRARRDCGPRHRDHPVPWRARNEARSRSGSSAAGSSAADYPASSRLRMKGSSESGKQGGLRKPQGSCRSATRNRPSSSRSVEDISTGKGGEYYIKGTLHGTKKSEQQPSALDLPSDRAYPNEKETVKQPCKFKATNNFKRHEKAYYYKYKYLMPYKEAHVKKELSVAFSQQPTRTEANKEWNRANNHVVNLEANSSTADHWNYCNSDDTLMVACKKPEADNTDKQGPDS

SEQ ID NO: 33078 - protein, 955 aa, Homo sapiens
  DOMAIN (860)..(891): Bromovirus coat protein domain identified by eMATRIX, accession number PF01318B, p-value=9.724e-09, raw score of 15.62
MERFEGEKDGCDPNDNVFDKCVKITGRLVHGQAERKTATRRAQGRTTCYVTRACDCLVTVSRVGSARSEGRGGRAGARTRKVFAASLRGGVLPVSRGRVAIVAKARGFISLRFGRGKLAFGSEAGLDWPNPERNRAGVPGGVIRRAGSQGPRSWIQKVLEQIMDSPRQCVTPSEVVPVTVLAVQRYLLEDEPRDTVPKPPLYCYDVTISDGVYQEKCYLDPSLNSLVYQNILKVGIQMRISRVSCLYNEKRIGQGILCIDNVHCGETSDSISLETPFRNRAHQEKPERPLRGGKSHYLALWNNEDPYGDIWLTDKQPEEHNFSGLNHEIAIDVAFLPMYCPEDIRTSQIDTLLTSMNYSCAYPQDTTGNDRLPGPRAVAARVEIQERNGKRHQDDEPVNSQYFQTTSTNLSLSNKIRILQGPHANPVAVPQPGASVQTKGIKPGMPSIFNRRANINANLQGKARKTISDRWESQLWREKKFGLIDHLHYSRVYPESIPRKFMFEHRKFLSDQYNSQPAKYVPPEGRPPKLDDFKSARSLGHFEVTILEICLNLRDPPTNIIIIPEKQVKPEWRLPKLNHRFTTRSELDDMPENCICDVIGLLVFVGRVQRSKKKENREDFWSYRWIHIADGTSEQPFIVELFSTSQPEIFENIYPMAYFVCTQLKVVRNDNQVPKLLYLTTTNESGVFITVESLLTAISEVRKEIEDLQYREQKRIAIQGIITAIKYIPHSSATESASASETLRVWWLPLHLGSNPNSTGVWKAGRTAEDGELSVKSQTVNLFVFPDMISVTTIHFCHCIWKAATSDTKIISLSHLEMTWTNRRNFPALLVRILHKSKLRYYGKPDKKMIEPYQTFLEVADSSGTVSVIMWNALCPEWYKSLRVGLVLLLQDYSVKKSYPFRIQPVPVDPQIKLISTMEICLNLRDPPTNIIIIPEKQVKPEWKTAKAKSPIYHK

SEQ ID NO: 33079 - protein, 400 aa, Homo sapiens
MLSRPSLLLPEAHTIKILWHLEPGRNDRRGMRYPHFTDEEIGSEKKLTEGHTEGRVRDPLQALSYSSGHLLFTSHPIIKYKTKRSVDGCLMRAMQAAKKVIKRFIRKSGLDRLAGSSHLYLWSYRLNCILLLESCHKVLKEESEIGETAETLNSKTPTAKGLIILEYLASQSWRKAKVTSYMATGKRGNESQVKKEIPYKTNRSHKTYSLPREQNGENRPCDFSYLPPGPSYNTWEFWELQFKLWIKTKFRGQRPSKKLECVPDLQIGGEQSPPLLSSSIIIPSNALSPGYTEVHVGEWERDQDSVTHVCLRLFYVVPSKLSAFLASDTLLQVNDALICENSGAHRVKIFPNPRSLCYASMTQGGAKGLDLVTLPEDKTRGADESNCECSVPEKRGKNPF

SEQ ID NO: 33080 - protein, 93 aa, Homo sapiens
  DOMAIN (6)..(45): PROTEIN ZINC FINGER ZINC-FINGER METAL-BINDING NU domain identified by eMATRIX, accession number PD01066, p-value=5.500e-37, raw score of 19.43
  DOMAIN (4)..(66): KRAB box domain identified by PFam, accession name KRAB, E- value=1.5e-39, PFam score of 144.9
MGPLQFRDVAIEFSLEEWHCLDTAQRNLYRNVMLENYINLVFLGITVSKPDLITCLEQGRKPLTMKRNEMIAKPSVSFLQVSQGEAKALLCDL

SEQ ID NO: 33081 - protein, 230 aa, Homo sapiens
  DOMAIN (34)..(51): Zinc finger C2H2 type, domain proteins. domain identified by eMATRIX, accession number BL00028, p-value=2.588e-14, raw score of 16.07
  DOMAIN (32)..(222): Zinc finger, C2H2 type domain identified by PFam, accession name zf-C2H2, E-value=6.3e-55, PFam score of 195.9
  misc_feature (1)...(230): Xaa = X or * as defined in Table 2
MSKRRWLTGNGSDRENIRLDLGFLVSDEEKRYKCEDCGKAFNRSSNLTTHKKIHTGEKPYKCEECGKAFKRSSILTTHKRIHTGEKPYKCEECGKVFKYLSSLSTHKIIHTGEKPYKCEECGKAFNWSSHLTTHKRIHTGEKPYKCEECGKGFKYSSTLTKHKIIHTGEKPYKCEECGEAFKYSCSLTAHKIIHTGKKPYKCEECGKVFKHSSPLSKHKRIHTGEKPYKX

SEQ ID NO: 33082 - protein, 182 aa, Homo sapiens
MAQQGPGTTQATTSEDANLLEFLIKEISQEKEIKALETGNKEDPLDVFVVADTDVVYKSENGHVIKLNIETNATTLLLENTTFAVRTHSGLPACRRCCMLSVFTEVVPMITWHFSLTSRVLQEEGNKKASWCQNIETPVITHPLPMKTGKMPLAFEHQASKATSKPRTCLQTSSSSHSNPTD

SEQ ID NO: 33083 - protein, 483 aa, Homo sapiens
PTALDHGNSGCVATTAPALDPAGPPRGVAVTLVTLPPDILAATTNLRKNAWSSYTRTLKSHSPQVTLQWLQQPAARGACKTGNSEGGKPSSRFNSAMIPRNLPMTLRTEDLAPRSATVEHTHRIYPNGAANANTGPQLIEGGWNLFSEPNHYQLPAKTKILTFSIGFRQDAEFHNIIFKMPWINSKLLSMEKYNQQELELQDVLVEFSSLIQLLDLLEFQKRPPDLGSSRLSQTGSQPSWQQSDNGSTARLNFTAKDTPPLSYPNGQLTKNLKADGEQGWLDILQQQLANFFYKRGIKEPEPQGSEYGEEGMSMKDVSEKGERLSSFDDQLSMSCEGDKSHAGESGTVPRILLQNPRGMDAHSHGTLSFRSQPRTRSGLSQEGLWGPARDRYCSHVPPLNPCPNMHKAPRACAVSALRVLCTHPPTSAGLSPNCSHLQLSSENYPWATGPTSLDLLRAGRLMSLPISPSTTPNSDPGQPISNN

SEQ ID NO: 33084 - protein, 126 aa, Homo sapiens
MVSWIESWNRKRTLVEQLIQKEWSREHIIMERIQEHVSDLKIMRFLIEMSSTMDENRPTLRHTIEKVQNTENKEKGPTSFQSETKQNTTKQNKTKTWEALGEYLDGKKESEEDQSKSYKQKEESRL

SEQ ID NO: 33085 - protein, 54 aa, Homo sapiens
MQKRHNCKKVHALPPAVLGFQRASGCRFANKRSRITHFGGRRLSLTPASDSAGV

SEQ ID NO: 33086 - protein, 268 aa, Homo sapiens
  DOMAIN (149)..(192): kw TRANSCRIPTASE REVERSE II ORF2 domain identified by eMATRIX, accession number DM01354T, p-value=3.077e-29, raw score of 9.48
MLRTGTGRRASRSGLCAGRGAPGGWSILDAARAPRCAFRAEPPSAAPRFADKEVKATEEKWREKGRLTWGPKAQPDSRFGLGRCLAPRAQAEGAGAAQSRDSTYRGLETPLAARPPRCAPCCHRSERRRHAPRCLLVLAADIRIGLETFPARSGTQQECPLSPCVFNIVLEFLANAIRQEKEIKDMQFEKEEISEQGSAAITQTKQGSLCHSHVFTEQQERRGNNQVEVREEYSGGDSVLILSLGIKRPCLQLFTLLEHCPAAMNKPV

SEQ ID NO: 33087 - protein, 63 aa, Homo sapiens
MDSDSQAPSLTLRGSYSVSWGPKAQPDSRFGLGRCLAPRAQAQGAGAAQSRNSTYRGLETPHE

SEQ ID NO: 33088 - protein, 294 aa, Homo sapiens
  DOMAIN (178)..(225): kw TRANSCRIPTASE REVERSE II ORF2 domain identified by eMATRIX, accession number DM01354V, p-value=1.000e-40, raw score of 12.97
MLRTGTGRRASRSGLCAGRGAPGGWSILDAARAPRCAFRAEPPSAAPRFADKEVKATEEKWREKGRLTWGPKAQPDSRFGLGRCLAPRAQAEGAGAAQSRDSTYRGLETPLAARPPRCAPCCHRSERRRHAPRCLLVLLISNFSKVSGYKINVQKSQAFLYTNNRQTESQIMSELPFTIASKRIKYLGIQLTRDVKDLFKENYKPLLKEIKEDTNKWKNIPCSWVGRITIVKMAILPKVIYRFNAIPIKLPMPFFTELEKTTLKFIWNQKRARIAKSILSQKNKAGGITLPTSN

SEQ ID NO: 33089 - protein, 71 aa, Homo sapiens
MKRTQIIIKSSSFTRLGLAVQQTNFRGWGSLGLARGGTPEKDRWENISLGENWRGLGCLHRPGGGRPRPRG

SEQ ID NO: 33090 - protein, 383 aa, Homo sapiens
MEYYAAIKKDEFMSFVGTWMKLETIILSKLSQGQKTKHRMFSLIAWKASQKPELMKASDVPIPFSGRKKQVSQTKIRVISTILFILAGCIVFVTIPAVIFKYIEGWTALESIYFVVVTLTTVGFGDFVAGGNAGINYREWYKPLVWFWILVGLAYFAAVLSMIGDWLRVLSKKTKEEVGEIKAHAAEWKANVTAEFRETRRRLSVEIHDKLQRAATIRSMERRRLGLDQRAHSLDMLSPEKRSVFAALDTGRFKASSQESINNRPNNLRLKGPEQLNKHGQGASEDNIINKFGSTSRLTKRKNKDLKKTLPEDVQKIYKTFRNYSLDEEKKEEETEKMCNSDNSSTAMLTDCIQQHAELENGMIPTDTKDREPENNSLLEDRN

SEQ ID NO: 33091 - protein, 294 aa, Homo sapiens
MDVGDADLDVSLRKFPVGHPSLRSAVGIPNLKAARYAFICSLPKGSRYFYHFRFSSWEADTESTEAECRDYCLSSRHSRSYRNCVLTLPEKGIGTSEAFINSGFWEAFQAEATRTQLAGGPIRVKGEIPQCYNTSGHTRNKVTAEGEEMKRTQIIIKSSSFTRLGLAVQQNNFRGWGSLGLARGGTPEKDRRPVPAMSLLFWDRSASAALSPPGEARSQGTAWSLPQLPAAGLGPLVVGWKGGLREARGPPEESGVAKTRQLPEAAAPGSWDQQGRCEGTQTCSRKGAKPGAFV

SEQ ID NO: 33092 - protein, 91 aa, Homo sapiens
  DOMAIN (10)..(91): Tubulin/FtsZ family domain identified by PFam, accession name tubulin, E-value=3.6e-46, PFam score of 166.8
MGTLLISKGSDTVVEPYNATLSIHQLVENTDETYCIDNEALYDICFRTLKLATPTYGDLNHLVSATMSGVTTSLRFPGQLNADLRKLAVNM

SEQ ID NO: 33093 - protein, 116 aa, Homo sapiens
  DOMAIN (35)..(90): Tubulin subunits alpha beta, and gamma proteins. domain identified by eMATRIX, accession number BL00227B, p-value=1.000e- 40, raw score of 19.29
  DOMAIN (1)..(116): Tubulin/FtsZ family domain identified by PFam, accession name tubulin, E-value=4.6e-54, PFam score of 193.0
IGAKFWEVISDEHGIDPSGNYVGDSDLQLERISVYYNEASSHKYVPRAILVDLEPGTMDSVRSGAFGHLFRPDNFIFGQSGAGNNWAKGHLHGGGGLGLDSVLDVVRKECENCDHL

SEQ ID NO: 33094 - protein, 368 aa, Homo sapiens
  DOMAIN (174)..(228): Tubulin subunits alpha beta, and gamma proteins. domain identified by eMATRIX, accession number BL00227D, p-value=5.576e- 22, raw score of 18.46
  DOMAIN (10)..(351): Tubulin/FtsZ family domain identified by PFam, accession name tubulin, E-value=2e-63, PFam score of 224.1
  misc_feature (1)...(368): Xaa = X or * as defined in Table 2
XRPVRATRSGLKFWEVISDEHGIDPSGNYVGDSDLQLERISVYYNEASSHKPDNFIFGQSGAGNNWAKGHYTEGAELVDSVLDVVRKECENCDCLQGFPADPTRWGGGTGSGIGHVAHQQALGPHPRCQDTVVEPYNATLSIQPAGGGTRMRPTASTTRRSTTSASAPSSLPTPTYGDLNHLVSATMSGVTTSLRFPGQLNADLRKLARQHARGKPAVPGPGPLPELTQQMFDAKNMMGRLRPAPRPLPDRGRRVPRAGMSHEGGWTSRLLPIQSKTSSYFVEVDPNQREGMSSTFHRETARPIQDFFKRISEQFTAMFPAQGLTCTGTRARGMDEMEFTEAESKMNDLVVRVPAVPRTPRPRKEGEM

SEQ ID NO: 33095 - protein, 289 aa, Homo sapiens
MEPSKTFMRNLPITPGYSGFVPFLSCQGMSKEDDMNHCVKTFQEKTQRYKEQLRELCCAVATAPKLKPVNSEETVLQALHQYNLQYHPLILGSSALKPFPLTPECKYVKKPLQEPPIPGWAGYLPRAKVTEFGCGTRYTVMAKNCYKDFLEITERAKKAHLKPYEEIYGVSSTKTSAPSPKVLQHEELLPKYPDFSIPDDHTSSPAMVLNQIEMAEMSDIEFRIWMARKLNETQEKVETQSKENNKMIQGLKDDITILRKNQNELLEIENLQEFHNTIGSINNNWNRPT

SEQ ID NO: 33096 - protein, 255 aa, Homo sapiens
MEPSKTFMRNLPITPGYSGFVPFLSCQGMSKEDDMNHCVKTFQEKTQRYKEQLRELCCAVATAPKLKPVNSEETVLQALHQYNLQYHPLILGSSALKPFPLTPECKYVKKPLQEPPIPGWAGYLPRAKVTEFGCGTRYTVMAKNCYKDFLEITERAKKAHLKPYEEIYGVSSTKACAPSPKVLQHEELLPKYPDFSIPDGRCPCPWKALERGPQNSVDMWLCSEAKYTMQWEDVSRATVLRKVCRRLEAQSLPRR

SEQ ID NO: 33097 - protein, 105 aa, Homo sapiens
MGGCRCRALPHSEAAEARQEFEPRAGGPAVMRNSAHTPQRLALGAKPVTAQGLWRQPDRSECRAALRVPRAASVPACASPSTPPRKQREQAPALASPQTGSHSAA

SEQ ID NO: 33098 - protein, 116 aa, Homo sapiens
MGRTQLLTPVIPALWEAEDSHNCHLSWFQRIRRIEDKWEKNIDKLQEPATATAQTTAGELANNSRQMLEEVPPPSYSGAAEAKSGAFRRGTAASCAAPPTGQAAGKRRATQTTGAE

SEQ ID NO: 33099 - protein, 131 aa, Homo sapiens
MLMLMLMLLVWSTYFETTALMESVVTRPSSQLEGGTSSSICRKYWQVPLQLFGLSLWLVRGVRPAMERSGPSEGGFMRRVRAGDRLNASGPDPQLAVTMGFTGSCALASGTPIVRLSVARGRRFRPTGYGA

SEQ ID NO: 33100 - protein, 113 aa, Homo sapiens
MPRPEFLGRRLSVPVAGSGVCGHPWSCSVPSEVTGSNASGPDPQLAVTMGFTGFGKKARTFDLEAMFEQTRRTAVERSRKTLEAREKEEEMNREKELRRQNEDIEPTSSRSNV

SEQ ID NO: 33101 - protein, 136 aa, Homo sapiens
MASHIYDQIDLSFQMFSKTSDCHRDEAFSSISLDPLLSGPRSGSVQQWKAGERMPTLCVAVWSRLRDQWDLLFWAEGDVTEAPSGSRQSVSQNLQGSLPGLSHQMLRGYLGCQNLMFLLFVVLDGCKGVTAVQAGF

SEQ ID NO: 33102 - protein, 339 aa, Homo sapiens
MRRHVKEAMGLPVASRCPSETKLPDEGSGSNICRSAIFAVLQPPLVIPRQTGSGVDLQQTPTDLQLREGSSSPAMEQSCTENDFDELREEGFRQSALTNFSELKEDGQTHCKEAKNLEKRLDEWLTRINSMEKILNDLMELKTMAQELRDACTSFSSRFDQVKERVSVMEDQMNEMNDGENGTKLEDTLQDIIQENFPNLARQANIQIQEIQKTPQRYSSRRATPRHRIVKFTKIEMKEKMLRAVREKGRVSHKGKPIRLTADLSAETPQARREWGPIFNILKEKNVQPRISHPAKLSFISEREIKYFTDKQMLRDFVTIRPALQELLKEALNIERNNR

SEQ ID NO: 33103 - protein, 96 aa, Homo sapiens; identical to SEQ ID NO: 31360

SEQ ID NO: 33104 - protein, 176 aa, Homo sapiens
  misc_feature (1)...(176): Xaa = X or * as defined in Table 2
MLFPRNCVTNGSEDPAHEPTPLEPSVPTLEHTDSQQPLSWNLFKPTELLGRGVTSTTAVISCCVSLFELLGCSSDTPDLSGYEVSGTVFGVADMVSSTMIEQDRTAAKGVRWYSPHGEIPDEPPRYVRSWFLLVVHGLADFKNEAAGFHGPSAAGLLEFAGGPLQTLFAWVSPAEX

SEQ ID NO: 33105 - protein, 410 aa, Homo sapiens
MDPVLMDHSPGKRKHRIGELKVTTDYFLTVHMGSKNHVFTQTSSSLEKLSFSPTELKGMGVAPDKKVANSHCSSPNSSAADKSDDILVAIFSVNKSACLPALERAADLPAQRTGQRTTEENIPLGPPVNENVSLAISGRYLSAGVDRHLIQEISGWHLLGAPLGRSFQRKEKEAIFAVLQPPLVIPRQTGSGVDHQQTPADLQQRGLTVRRKTNQQKGIASTSTKRMSTQKPHLKVTNIKAREQNWTENEFDKLTEAGFRRWVITNSSKLKQLVLTQYKEAKNLEKRLDELLTRITSLEKDINDLMELKNTARERCEAYTSIDSRINQAKERTSDTADQLNEIKCEGKVREKRMKRNEQSLQEIREYVKRPNLHLIGVCESDGDNGTKLENTLRDIIQENFPNLERQANI

SEQ ID NO: 33106 - protein, 520 aa, Homo sapiens
MDPNQDKIFEMPDTEFKRLIIKLLKEIPEKGAPQGRSFQRKEQAAIIAVLQPPLVIPRQTGSGVDLQQTAADLQKRGLVVRRKTKNQKRIASTSTKKMSTQKPHLKLINIKDQRITTPHQQGSKTGWKNEIDELTEVGFRRVGNNKILLKEELKEHVLTQGKEANNLERRLDKLLTRINSLEKNINDLMELKNTARELHEECRSLRSQCDQLKERTAEDLQAQCSSPAKGQTASSSGSLTAVSPDWETPPSRGRQTPHTARCPSERKLPEEGSGSNICCFAIFAVLQPPLVIPRQTGSGVDLQQTPTDLQLRDLTVRRKTNKQKEIASTLTKSTPMQKTYPKCTKLNREEYDELTEVGRRWVIITNSFELKEHVLTQWKEAKNLDKRLQEGLTRITSLEKKINDLMVLKNTARELHEAYTSINSRIDQAEERISEIEDQLNEIKLEDKITEKRMIRKGQSLQEIWDYVKRPNLRLIGVPESDEENVTELENTLQDIIQENFPNLARQANIQIQEIQTLLR

SEQ ID NO: 33107 - protein, 81 aa, Homo sapiens
MASHIYDQIDLSFQMFSKTSDCHSLSDEMRSTPTTTLLPIKAQRSWRKAAVQLFGLQAELATFLVAHYLHVTYRQTTVVQA

SEQ ID NO: 33108 - protein, 248 aa, Homo sapiens
MGYSYRLKMWTDGLREEGQCESSSPSVKRGEAGNVWSAICLQRATKLQAHYDSSPSGRHGNQGGDSYKISYQVLHKHHHQHGRCWPGELARGSAALSFAMHKPSIYWMGRPRAVCSTGDGEKLVRDFWLLQYLAKGKSQPENVTPGEPGASVTAEGQSPGDAGTLEKAWEDVRRQTPGTPKDQAQSHAADVASSERQTHSWVDVVYDQPCQERRRNMYPNVFTEDSKLTQTYLKLSGNQIIYSNQKQL

SEQ ID NO: 33109 - protein, 286 aa, Homo sapiens
  DOMAIN (189)..(229): kw TRANSCRIPTASE REVERSE II ORF2 domain identified by eMATRIX, accession number DM01354H, p-value=6.268e-31, raw score of 18.00
MYLVPCNRTEPEYGFIESEIYKANIDSQSGATIHNANFRKLLCLELQSSPASHTQENKQQQNRVGSKDTGERPGITSCRQNSSDTELKKEGFYSAEGIGKTPVSRAERVRRLGPDLRPRIHWLKKLNSQEEGPCNPMTNDHSSLPAMEQSWMENDFDEFTEVGFRRSVITNFSELKEHVLTYCKEAKNVEKSKCKKTEITTNCLSDHSAIKLELRIKKLTQNHTTTWKLNNLLQNDYWDSTITQKHTTVIKRKQQPHTSAYTMQGLPINRCKLQWGKLHQNKLRTG

SEQ ID NO: 33110 - protein, 425 aa, Homo sapiens
MPYRVLVCSSSSDLVVVRTFTWQPRAPKASVLGNKEEAVSPFMTKPWTSATLLVNAVSSLLTFKWVSWEPALADGEEPHYLKTTHSGDVLYVIGLPCENPWLFFQALLGKICVCGLSPEHTLVFSGGKHSQGRKRFCNVDSVRCSSLRNLSTQPPLHPGEINSLVALHMDACDTSQGWRVCNTESRDYSRHLNRTASQDGLFLLSYASIIGSKLVQTLGSLDTMNSESEPFILSCSRTTRRQNSSDTELKKEGVYLAGASARLLSQELSFPIQLFGASYHVHFQFKVRLRQPLARLVPHMIPTSQVPASRSNLWTELAKVHEITVANRGEVKARGSILGTVLGFKVGIRAGLLVKGGGQQAQRAQVALGKPGEGCEVPSLRQAREGHMVCGEKWRRKTEQTRLRSGSTAEKEVRRARCNGSSGEQ

SEQ ID NO: 33111 - protein, 209 aa, Homo sapiens
MTQHFCIIPPQPVQQGQAQEALPQTSPTLAQPHGGPPGLGHCVLTPRLQLDPVTSRFCIYNSPNCSSGHPAIRICWGAFPECGCQSHPGLLDRNPKPKALPQRASSKSLAQRKNSKSFVGHSVRASGLPTTPWYNKKMAVLEKFDSMELHYHMLTVCVSIGHVWKNIETSSVNEQVHFMYDCTCESTVKTDAQSDLPNEEDAIGYSNWS

SEQ ID NO: 33112 - protein, 41 aa, Homo sapiens
MVFPVTLAINELPPLPQLQLYYSARVFQACRLCQAWRDLQK

SEQ ID NO: 33113 - protein, 49 aa, Homo sapiens
MNMSVLTLQEYEFEKQFNENEAIQWMQENWRSYFTVLLFLPLLRRMPPF

SEQ ID NO: 33114 - protein, 42 aa, Homo sapiens
  misc_feature (1)...(42): Xaa = X or * as defined in Table 2
XVKLQTFAVSVTAPKAARLELFVPPGGFVVLLASGVKLQTFA

SEQ ID NO: 33115 - protein, 758 aa, Homo sapiens
  DOMAIN (262)..(280): FAD-dependent glycerol-3-phosphate dehydrogenase proteins domain identified by eMATRIX, accession number BL00977C, p-value= 1.000e-22, raw score of 12.84
  DOMAIN (7)..(450): FAD-dependent glycerol-3-phosphate dehyd domain identified by PFam, accession name FAD_Gly3P_dh, E-value=7.8e-160, PFam score of 544.4
MLKPLMGGGAHRRAAAGARKWDGTAIIASTSGLEVLWVTTSRSKTVESVGLAKPGQHNDARMNLAIALTAARYGAATANYMEVVSLLKKTDPQTGKVRVSGARCKDVLTGQEFDVRAKCVINATGPFTDSVRKMDDKDAAAICQPSAGVHIVMPGYYSPESMGLLDPATSDGRVIFFLPWQKMTIAGTTDTPTDVTHHPIPSEEDINFILNEVRNYLSCDVEVRRGDVLAAWSGIRPLVTDPKSADTQSISRNHVVDISESGLITIAGGKWTTYRSMAEDTINAAVKTHNLKAGPSRTVGLFLQGGKDWSPTLYIRLVQDYGLESEVAQHLAATYGDKAFEVAKMASVTGKRWPIVGVRLVSEFPYIEAEVKYGIKEYACTAVDMISRRTRLAFLNVQAAEEALPRIVELMGRELNWDDYKKQEQLETARKFLYYEMGYKSRSEQLTDRSEISLLPSDIDRYKRRCHKFDADQRGFMTVVEVQRVLESINVQMDENTLHEILNEVDLNKNGQVELNEFLQLMSAIQKGRVSGSRLAILMKTAEENLDRRVPIPVDRSCGGLYFCVRNWWVLGLTDFKNEAADPSGVKLQTFTVSVTARKGSVDPKNSGAQLASPSGSRTGAAGGAACQSRALRLHSSALGWSMGLGAVEHGAVLIGEARAAQEPMEGVGGSGMAGCRSQVLPRGKAAKTPRNHLRFLGAASTQLLKLKMLTSAKIYFFIPISSAKIDYTIQGFSLNANTQGLCTDLADTSSVHAALEV

SEQ ID NO: 33116 - protein, 68 aa, Homo sapiens
MKPRTLAVSVTALKVARLEFVPSDVRMCLEFLPSGGFVVSLALGVKLQTFATQEPSWLHPVDPSLGLQ

SEQ ID NO: 33117 - protein, 148 aa, Homo sapiens; identical to SEQ ID NO: 30426

SEQ ID NO: 33118 - protein, 272 aa, Homo sapiens
MWESLTLSRDFLNGFDQNADSGIDNKVQVEVASDEDEELVGNWNKERENPFSGEKLKPAAEICISYKEPNANHQDNGENVARACQRPLQHPLPSQAQRPRRKQRFPGPGSGPTWDLVPCIPGAPALTKRGQGNQNHGILKARDMNLRHLASHWDRICFTTNALLLKPYKLPPSRPRDYCGRAAFPRGRVRDLQPAMPEPPTHSMGSCAARASPMSTTPCSTAPSPIDHPRAEECEHTAQDWQAAPPAAPVRDPLGEASWAPESGGDVESLYV

SEQ ID NO: 33119 - protein, 239 aa, Homo sapiens
MGCKHWMTCGRARKEGKDDSYMQTQWLHRAFAAPPETCPFPLRDHIQTGRDLYILGTFEKCVFWGGAEREVWRERHQREPGLRAAFAGQLEFPAGVGLAGPALGAAGQPCWPRGNEGLSTRASGCGGCTGSSSSASPPVLCSISHQALAAFLRGRSRDLQRAMPEPPTPSMGSCAAGASPTSTTPCSKEPSPIDHPRAEECECTARDWQAAPPAALVRDPLGEASWAPESGGDMESLYI

SEQ ID NO: 33120 - protein, 147 aa, Homo sapiens
MAEGKGEAGTFFTGWQTGPPERQIVVGICSMAKKSKSKPMKEILERISLFKYITVVVFEEEGRARDLQPAMPEPPTHSMGSCAARASPTSTTPCSTAPSPIDHPRAEECEHTARDWQAAPPAALVRDPLGEASWAPESGGEVESPYV

SEQ ID NO: 33121 - protein, 172 aa, Homo sapiens
MGLGAVEQGAALVGEAWAAQEPMEGVGGSGMAGCRSRALPRGKAAKARREMERSASGPALLGDPVHPPQPLARCSGGLKGSSSVTKVGAQAEEVPRASEGCEDCQHAVTSPNHLDSVIWFGCVPTEISSSVVAPIIPTCHGKELVGVGGAAQAMHAQAHRTAQAMRAEQMNT

SEQ ID NO: 33122 - protein, 287 aa, Homo sapiens
MGHPDGDSKYTVVDTDVELRMKEKKHTLKVVDVLASTPACTNMREVLIDSCVLDTWCCEITDEIRHRLVVAAATVTLYSILLDVCEWPSPLVTQPGKKPVSTYIFFIHRSARVRSLQGGVEGEARAGTGAVCSTCGPAGVTGGRGLGGPHTRSSWPALLAPGNEGLSTRASGCRGCTGSPSSASPPALRSISHRALAAFLQGRARDLQPTMPEPPTHSMGSCAARASPTSTTRCSTAPSPIDHPRAEECECTARDWQAALPAVPVQDPLGEASWAPESGGDVESLYV

SEQ ID NO: 33123 - protein, 217 aa, Homo sapiens; identical to SEQ ID NO: 30995

SEQ ID NO: 33124 - protein, 258 aa, Homo sapiens
  misc_feature (1)...(258): Xaa = X or * as defined in Table 2
MRALTASWWYQVSTKKNSRSSNASNKQMTPFLYGRVSREIKKENWKLKEEQNPVSGSHGPNLTKTAVWNVLSYLWSVKKKAHLTFTLRTSFVKWTKGGVEGEARAGTGAACGACGPAGVPGGRGLGGPRTRSSQQALLAPGNGGLSTRASGCGGCTESPSSAGPPALCSISRWALAAFPRGRARDLQPAMPEPPTHSMGSCAARASPRSTTPYSTAPSPIDHPRAEECERTAQDWQAAPPAVPVRDPLGEASWTPESX

SEQ ID NO: 33125 - protein, 309 aa, Homo sapiens
MRKFCRGRDIEKHSIQFYPLLGPSFTVFVKHLLHITCGLQHLAKIFLHSLPGRLHSLAGKVKAIKDPENVTRAPQKPASARTTTQAAGCRADSPFLKGLSLWDRKSSTVCLSLVVEDHSQKRGLRLAHSQIPAQHVHRPTSAQSEPKVGAGERACLKRESHLHEQTLTCSINAKSSQPALLARGNGGLSTRASGCGGCTGSPSSAGPPALCSISRRALAAFPRGRARDLQPAMPEPPTHSMGSCAARASPTSTTPYSTAPSPIDHPRAEECERTAQDWQAASPAAPVRDPLGEASWAPESDGDVENLCI

SEQ ID NO: 33126 - protein, 1197 aa, Homo sapiens
  DOMAIN (393)..(425): Nuclear hormones receptors DNA-binding region proteins domain identified by eMATRIX, accession number BL00031B, p-value=3.893e- 25, raw score of 22.25
  DOMAIN (188)..(432): Zinc finger, C4 type (two domains) domain identified by PFam, accession name zf-C4, E-value=6.8e-38, PFam score of 130.3
MREWRRGSGRCNREGGKTKEVSCQDPWCGGGQLDATGSSTENCQQRVAVNKLRMVMQFQGLENPIQISPHCSCTPSGFFMEMMSMKPAKGVLTEQVAGPLGQNLEVEPYSQYSNVQFPQVQPQISSSSYYSNLGFYPQQPEEWYSPGIYELRRMPAETLYQGETEVAEMPVTKKPRMGASAGRIKGDELCVVCGDRASGYHYNALTCEGCKGLREGCGGIGHWGVGLWPHSCGAGWGLVPQLLTQSEICWSAVVFGLQSPVGKVSVTPSWGTEHTLPSRLALAVSFIQLRDPIGATHSPDGNANPVYLSCITSKALFLSEFPFHSFSNDFSDMSIVEYAQERGRVQALVASQLYYGNSLLSLVSNTRSTFTLLRGASQHTGFFRRSITKNAVYKCKNGGNCVMDMYMRRKCQECRLRKCKEMGMLAECMYTGIHFKQLHFTKNLLRRQMSGLLTEIQCKSKRLRKNVKQHADQTVNEDSEGRDLRQVTSTTKSCRLKEEFSAEENFLILTEMATNHVQVLVEFTKKLPGFQTLDHEDQIALLKGSAVEAMFLRSAEIFNKKLPSGHSDLLEERIRNSGLAKAGAHSLSLQGGVEGETRAGTGAACSACRPAGIPGGRGLGGPLTRSSRPALLAPGNKGLSTRASGCGGCTGSPSSASPPALRWISHRALAAFPRGRARDLQPAMPEPPTHSMGSCAAQASPTSTTPCSTAPSPIDHPRAEECERRAHDWQTAPPAALVPDPLGEASWAPESGISDEYITPMFSFYKSIGELKMTQEEYALLTAIVILSPAWATERHPVFKKRERKKPSNCLEGVIKAAAELAVGLPWNLGKFHTGDGTSAGLQGIAPNSVGPGQPAPEWMWGWERLLTDQDKTQGSAFSCTATFQDAQKQLLQARFIHLSGLWEQQDGLWLSNWLSLKGQIGGPALTEPLRLSVNRGTWPPKLRDARRRSAGRADRRAPTGRVLPGSPGAGPQTTPPPYDWSLRNRRRPAATDPEAQAAAAAAAVGQGRVGPAQIEPSCRPAGRSDPPAPGPEAEVCWVSRLREPVRSAFAWLRQSRALIGSWGRQGDVAPAFTCPPNAERGATGVRGGWGCWCGRAQLGRRDPAATRPALNPERYQSPKSMQGLERPHVRNWGIELETLRDAFRPQPSVWRTARGEAGKRKGRLVECLGSQRKVLEGVLLYAVTRGSFPNLFTPRD

SEQ ID NO: 33127 - protein, 217 aa, Homo sapiens; identical to SEQ ID NO: 32291

SEQ ID NO: 33128 - protein, 147 aa, Homo sapiens
MEYYAAIKKDEFMSFVGTWMKLETIILSKLSQGQKNQTPHVLTHSPWVVDGTGRRGAGGGAHRGGLAAQEPTEWVGGSGMAGCRSRALPRGKAAKARREIEHSAAFNPYKQLRKSYVYKQLPVPIPLLRATPLLRHHRPYGNTEVLC

SEQ ID NO: 33129 - protein, 385 aa, Homo sapiens
MPEPPTHSMGSCAARASPMSTTPCSTAPSPIDHPRAEECERTAQDWQAAPPAAPVWDPLGEASWAPESGTNISITPGNATFVTRVQGQAWFASCITGHDMSSLKTSSVVVLRRQSEALLPANLTCNWQDSSALATLESALSQVRHKRFTFTLMVFTGSAIDIMATVSIAVVSITESVQTTAFVDNLAKNICDELLLQDMDEAGNQHSQQNNTRTENQTPHVLTHKWELNNENIRIQGGEHYILGPVGGRDEKTLLLRTYCLKSQEGADTKCRNKHNKETQKQSKSLVYSSTLNPEKLLVCKRLSLELTRPENTLRCTNIGKLKAVAGGMSAASGIYLETDTQPYPLKQELKEIKECVGKNSVVDKHNKETQKQSKPLTNSPVLNP

SEQ ID NO: 33130 - protein, 536 aa, Homo sapiens
  DOMAIN (146)..(166): kw SKI2W SKI2 NUCLEOLAR HELICASE domain identified by eMATRIX, accession number DM01537A, p-value=9.886e-09, raw score of 15.14
MRWHSSALGWSMGLGAVEQRVVLVGEARAAQEPMEWVGGSGMAGCRSRALPRGKAAKARREIERSAAGPAGCSECAARQAHVHPELQLASKRCTQPRFPLVENELIYEEVSEWTKPGAMDSKDVEVSSIQTTLAHIIASNSKKHSIRFVTLSATNAKTNDVRDVIKQAQNEKSFFKRKTILFIDEIHRFNKSQQVNAALLSRCRVIVLEKLPVEAMVTILMRAINSLGIHVLDSSRPTDPLSHSSNSSSEPAMFIEDKAVDTLAYLSDGDARAGLNGLQLAVLARLSSRKMFCKKSGQSYSPSRVLITENDVKEGLQRSHILYDRAGEEHYNCISALHKSMRGSDQNASLYWLARMLEGGEDPLYVARRLVRFASEDIGLADPSALTQAVAAYQGCHFIGMPECEVLLAQCVVYFARAPKSIEVYSAYNNVKACLRNHQGPLPPVPLHLRNAPTRLMKDLGYGKGYKYNPMYSEPVDQEYLPEELRGLHVVHMPTRMAPSGSRFSSCRCVIPPGVLLPCLEGCRLLAWDVLCLYSE

SEQ ID NO: 33131 - protein, 744 aa, Homo sapiens
  DOMAIN (446)..(493): kw TRANSCRIPTASE REVERSE II ORF2 domain identified by eMATRIX, accession number DM01354V, p-value=1.000e-40, raw score of 12.97
  DOMAIN (222)..(459): Reverse transcriptase domain identified by PFam, accession name rvt, E-value=0.0047, PFam score of -26.3
MGPALRLISRRALPAFPWGRARDLQPAMPEPPTHSMGSCAARASPMSTTPCSTAPSPIDHPRAEECERTAQDWQAAPPAAPVWDPLGEASWAPESGTNISITPGNATFVTRVQGQAWFASCITGHDMSSLKTSSVVVLRRQSEALLPANLTCNWQDSSALATLESALSQVRHKRFTFTLMVFTGSAIVIMATVSIAVVSITESVQTTAFVDNLAKNICDELLLQDMDEAGNQHSQQNNTRTENQTPHVLTHKWELNNENIRIQGGEHYILGPVGGRLPTSKLAVDCQLLLLAAAQHALCWCQNTLPPNPANFWNCPRGFPTLASELAYVSPNLALVIQLSQRKKFELFWGGLQRTIFFPFSVLRILTVDEQANDVSVAAARTLQIFRDDMIVYLENPIVSAQNLLKLISNFSKISGYKINVQKSQAFLYTNNRQTESQIMSELPFTTASKRIKYLGIQLTRDVKDLFKENYKSLLKEIKEDTNKWKNIPCSWVGKINIVKMAILPKVIYRFSAIPIKLPMTFFTELEKTTLKFIWNQKRAHTAKSILSQKNKAGGITLPDFKLYYKATVTKTAWYWYQNRDIDQWNRTEPSEITLLIYNYLIFDKPEKNKQWGKDSLFNKWCWENWLAICRKLKLDPFLIPYTKINSRWIKDLNVRPKTIKTLEENLGITIQDIGMGKDFLSKTPKAMATKDKIDKWDLIKLKSFCTAKETTIRVNRQPTKWEKIFATYSCEKGLISRIYNELK

SEQ ID NO: 33132 - protein, 203 aa, Homo sapiens
PQCGIHWVKPTGLLSLVGTWRTFMSSSELVNIPIGTRYLAQAVTLTVKVCSFTAEASETTSPPGGTNNSRRAALRAVTLTAKVCSFTPEPARPRTHQKEETPNTSEHQKEQTPDTSAFKNCNTHGEGLQLHSLSPGRPPTPPGRPNNWRNPGLKSWNTYPGKVRNFHWLFSKKEIEDIRNTTLRDVLVAVINIDPSALQPNVF

SEQ ID NO: 33133 - protein, 74 aa, Homo sapiens
  misc_feature (1)...(74): Xaa = X or * as defined in Table 2
XAFPWSKVRDLQPAMPEPPTHSMGSCAAGASLTSTAPCSTAPSPIDHLRAKECERTAQDWQAAPPAALVRDPLX

SEQ ID NO: 33134 - protein, 232 aa, Homo sapiens
  misc_feature (1)...(232): Xaa = X or * as defined in Table 2
MVIIKSQETTDAGEAVDKQECFDTVGENLALGSNRNENHMVSHKDLTEPEFRLVSVPAMCQQKGEGLEFIRAGRGWGSLKACKEPWDMIHLQISQPRIPLPVPVEAFSEKSNCRYGGNTKITTIMEPEAITKFQKSCEIHSGAQLASPSGSRTGAAGGAACQSCAVRSHSSALGWSMGLGAVEQGVVLVGEALAAQEPMEWVGGSGMAGCRSRALPRGKAAKARREIERSAX

SEQ ID NO: 33135 - protein, 54 aa, Homo sapiens
MPEPPTHSMGSCAARASPRSTTPCSTAPSPIDHPRAEECERTARDWQAAPPAAL

SEQ ID NO: 33136 - protein, 306 aa, Homo sapiens
  misc_feature (1)...(306): Xaa = X or * as defined in Table 2
MDRPETWVHKGRPDAYVCKYLPTSVEAGLILGSTGGYLALGLALSLSLQEIVSYWDGSDVQDYRGQPSAGEVPEAGLLRGPGQGRLDSGLTTALYMLRKRQSRKFTTWQSVFTKPEFGFVVASLELIYKEVMNSEEKTKNGVVKGQPSPSACREVWRERHEREPGLRAALAGQLELQVGVGLAGPRTRDSQPALLAPGSEGLSTRASGCGRCTGSPSSAGPPALCSISRRAVAAFLRGKAQDLQPAMPEPPTHSMGSCAARASPTSTTPCSMAPSPSDHPRAEECERTAQDWQAAPPAALVRDPLX

SEQ ID NO: 33137 - protein, 201 aa, Homo sapiens
  misc_feature (1)...(201): Xaa = X or * as defined in Table 2
XVKLQTFAVSVTALKAGRLELVVPPFGLVVLLGSGVKLQIFAVSVTALNALRLELFVPPGVKLQIFTVSVTAHKSSVDPKTLGWSMGLGAVEQGAALVRGGSGCTEAHGGEQYEAIRYPGGDGILLSQQEKATGRGAGFATGMSAGHTSGVQLHGAKTVVITFLDNSASVRGAFSFPFLCSLNQESSISISISISISICSA

SEQ ID NO: 33138 - protein, 46 aa, Homo sapiens
MSGVVRRGIWLRYVVSLGSRHLSTHSVQWAVPQKAGARGRSRVESL

SEQ ID NO: 33139 - protein, 115 aa, Homo sapiens
MSGSRKAKVRFVDVQGPLMIEVTRGRFGALSLAVPPTAITGYSDLVKGLHNHGGAKGAFWLTCHIRAEGSFSVHHLGKEIERGESHNQHTFMKITPTAVWQVIKKEQDQRRAGKL

SEQ ID NO: 33140 - protein, 63 aa, Homo sapiens
MPEVGTTPDFPPHDSRQPGKTLTTQTPLRGEGVLRRVWLPSQPLRSRRSAPSYMQELLGRTGA

SEQ ID NO: 33141 - protein, 103 aa, Homo sapiens
MVDTPPSTKLKHSRLTSDCCAGSENVKPADLSLLVSMGVGSAELDDSAPWLQSPFQGSEWFSLAGVPGHPWVVKKKLLQLAQCLPKWPPSFVLETQGPGGVGT

SEQ ID NO: 33142 - protein, 47 aa, Homo sapiens
MRETSALGGYELKLEQTLGQSQFELIGMKSTDVITSNARLTEEYKPS

SEQ ID NO: 33143 - protein, 330 aa, Homo sapiens
MEKLESLCTVGENVKGCSCYGKQLVSFVGGRASAWVLSCQSWSGTSHGPTVESNMLLAILSLRKKHPEPAVHTVSLGQPPLMTDTHSLLLGIPGIILCLHEPVEGTAKGLAPVTQGLVHSEGCGKKCLQLLGRGSEEIKLLQSFLFEEQLKEDDVECIVNQDELAINYQEQASSPCSPPARLGLDQKASPQTPGKENIYEGDLGLGGYELKLEQTLGVAYGWVCPALNAAPLSSLVGPFQENQVSSPHTTLCLKNKPSRPCLHLLYSECQLKQALKANVWDMQGSCGPETANRLARQVTEGMKRAGMDWGGVPEKGNLSQAEGHRCRLSH

SEQ ID NO: 33144 - protein, 107 aa, Homo sapiens; identical to SEQ ID NO: 31114

SEQ ID NO: 33145 - protein, 106 aa, Homo sapiens
MKKTPILEFPPSCCGKCIADEAHSLVHNPHISRSRKRQSESQRKKCSRTSRRQNPSDTELKKEGLYSAGSFGKTHVSKNRAPRHLDVNPVLLLLNAAEYTLNRWDL

SEQ ID NO: 33146 - protein, 58 aa, Homo sapiens; identical to SEQ ID NO: 31115

SEQ ID NO: 33147 - protein, 198 aa, Homo sapiens
  misc_feature (1)...(198): Xaa = X or * as defined in Table 2
XCERNCRPVNASKDILLRVTMGEDSPVAMFSWYLDNTPTEQAEPLPDACRLRGFWPRSLTLLQSNTSTLLLNSSFLQSRGEVIRIRATALTRHAYGEDTYVISTVPPREVPACTIAPEEGTVLTSFAIFCNASTALGPLEFCFCLESVCHVFSIQGIWCTASVEILRLLGKRARAFLDPHLTNLGTANQLGVPISDKA

SEQ ID NO: 33148 - protein, 56 aa, Homo sapiens
MLSIDLQTLYKKSTVKIRVLFCSVLITGACSPQSRTPCLLSRSRPSHADPLRAVSP

SEQ ID NO: 33149 - protein, 58 aa, Homo sapiens
MSVKKPVNRLPNHEKRKDHMRKKQQASAAVNPPEPMLVEQPLSPRCQLSLVQPASLTV

SEQ ID NO: 33150 - protein, 391 aa, Homo sapiens
MQVTQAAPPAGAEGSAHLAPPWDVRSSVPARSRPSECEPGASNATPRALAGSPPCGSEPAGCCHGIRQWWYKTVNRSGCAWAGPEGSVLEGSVFALPFWAWDEALSGVWRGRGADRVDLLADLQRAIVGRTSPTQRRGSCNVRQGENPNIKGQKQLRSETKTLERAVEGWRKESEKSLSAVMSTLSLALLSSMSLLTKSPQTYSCLEVNMHNAGLFFLPVRLTFRVLSFHSEAQVYMFTLRFLAPRKFFPLSSFNFITQSPPPNEERKPAVWVSSSQVYHWSSQLWLWRRGIEQWGAMMGSGIYSKGGTGWITSDLLVRSTPRLRTLTADYDNPLSHNLNALSTVPTRLHYPSIKHDSATHTTTQSTKHTAIFAPTVSDTATDIYTQTSYR

SEQ ID NO: 33151 - protein, 102 aa, Homo sapiens
  DOMAIN (25)..(41): SH3 DOMAIN SIGNATURE domain identified by eMATRIX, accession number PR00452B, p-value=7.097e-10, raw score of 11.65
  DOMAIN (11)..(70): SH3 domain identified by PFam, accession name SH3, E-value= 1.2e-10, PFam score of 48.9
  misc_feature (1)...(102): Xaa = X or * as defined in Table 2
MVSRDQAHLGPKYVGLWDFKSRTDEELSFRAGDVFHVARKEEQWWWATLLDEAGGAVAQGYVPHNYLAERETVESEPAGHAGCAALQDLAACRGPAAPERGX

SEQ ID NO: 33152 - protein, 341 aa, Homo sapiens
MEAEDRGAPLCVYALYLPPSGTSPGSFIKGLRQLCSSPAAAPLALRKDIRNRQPRLIVARLRGREMSPDTAAAALASREPTRHGLGAPPAAAVAPLRLPFFSSYHSPAHLRLSAQNVAETLRYYQSKETEIAAAIDLINQLDMNKLEQIVADVNKAKSDSQAAQNQAELARDDAVRSKDAASVSAQEAKDAANSINAENLLTKDGNLAGLEDKKESRKNIGLGENDAVNFLTINTTGAIGAGRNSWDGSNWGSKTMLSSLMIMSPDGISSPGIYGNAYTADSGAENYQSLIAGSCDTRGLGYVGGVAFGMMTTGLWLQGKYLTLDRKGLEVSNRFRHLTEI

SEQ ID NO: 33153 - protein, 347 aa, Homo sapiens
MPNCKAYKVTNGGHRPFLTILYKPWKANLSTTLKLNPDQRCSTTLIFFFRDALLCTCFSLVVQKKPSYCVLLRGNRRLYQQKGLAGVVWAERPSRKPPHPNAIRLTIVWGFSSILNLFFGQKYLNDSESFPIKDELPGGLHHGAGRVMLTPLIVVLKTINHLLLDRATPEVLGYVGGVAFGMMTTGNNEWPRAQISVGTQDRDGSGNIGLQMHFRFMASGQISYAGPQGAGSFQQVPASDRNIKHSIKDDESSIAYNNIKSMRFRNFIFNDDEQERVRRGVIAQEIEEIDNLYVKRRVYESHELNGPKVERLELDTTPLLLDTMRALQDTIKKVEELQEEIKMLKSK

SEQ ID NO: 33154 - protein, 524 aa, Homo sapiens; identical to SEQ ID NO: 31053

SEQ ID NO: 33155 - protein, 451 aa, Homo sapiens
  DOMAIN (177)..(217): kw TRANSCRIPTASE REVERSE II ORF2 domain identified by eMATRIX, accession number DM01354Y, p-value=2.841e-12, raw score of 10.69
MGKDFMSKTPKAMVTEAKIDKWDLIKLKSFCTAKETTIRVKRQPTEWEKIFAIYSSDKGLISRIYKDLNQIYKKKTNNPIKKWVKDMNRHFSKEDIYTSNRHMKKCSSSLVIREIQIKTTIRYHLTPVRMAIIKKSGNNRTKKNYFKFHTEPKRARIAKTILNKKNKAGGITLPDFKLYYKATVTKTAWKWYTESKNTDVNAFIMLTYPTAIIHTHNKGNAYTADSGAENYQSLIAGSCDTRGLGYVGGVAFGMMTTGKDVKPKMLTGFDHGHAVCLLLYLQLFTMRAIFQYAYFRILYIALYKNQEKSRRCTTDQFACVPGQQCIPALSLCLHSGSRQIALMMFIWIFTTANTRIFGVFLILLDVALIFADLIFTDSKVYIPLEYRSISLAIALFFLMDVLLRVFVEGHQRTSASINTVRENMTSPNELNKTPEANPGETEIRDLSDKSK

SEQ ID NO: 33156 - protein, 1241 aa, Homo sapiens
  DOMAIN (1152)..(1190): Elongation factor 1 beta/beta'/delta chain proteins domain identified by eMATRIX, accession number BL00824C, p-value=9.419e- 35, raw score of 14.58
  DOMAIN (399)..(918): Zinc finger, C2H2 type domain identified by PFam, accession name zf-C2H2, E-value=4.1e-128, PFam score of 439.0
MGKRLGQTNEGLIPVSMHRSWLAVNQALPVSNTHMKTSNLAPPKSGKACVNTAQLSLSQPGNVEGKKAIFRANFKKTSDICIKKKTSVNREHVTNGCTWVWGSGKTVDMDSYQYLDSSHTKSWGPGTVVGARYLIHITDVPFLLLLLPYEASPCPLDFWPCGLEEKNGFLGQLHGLPAVCILRTLLPASVQLQLQPWLKDAQPSHPCAMDVGQGFQKDDFGAVGLNDWPAAFWTFMYPGNAYTADSGAENYQSLIAGSCDTRGLGYVGGVAFGMMTTDGDIGFGPLQQRMSEEVSFQSEININLFTRDDPYSILEELWKDDEHTRKCGENQNKPLSRVVFINKKTLANDSIFEYKDIGEIVHKIHTRESLYLFSDYVNVFSPKSHAFAHESICAEEKQHECHECEAVFTQKSQLDGSQRVYAGICTEYEKDFSLKSNRQKTPYEGNYYKCSDYGRAFIQKSDLFRCQRIHSGEKPYEYSECEKNLPQNSNLNIHKKIHTGGKHFECTECGKAFTRKSTLSMHQKIHTGEKPYVCTECGKAFIRKSHFITHERIHTGEKPYECSDCGKSFIKKSQLHVHQRIHTGENPFICSECGKVFTHKTNLIIHQKIHTGERPYICTVCGKAFTDRSNLIKHQKIHTGEKPYKCSDCGKSFTWKSRLRIHQKCHTGERHYECSECGKAFIQKSTLSMHQRIHRGEKPYVCTECGKAFFHKSHFITHERIHTGEKPYECSICGKSFTKKSQLHVHQQIHTGEKPYRCAECGKAFTDRSNLFTHQKIHTGEKPYKCSDCGKAFTRKSGLHIHQQSHTGERHYECSECGKAFARKSTLIMHQRIHTGEKPYICNECGKSFIQKSHLNRHRRIHTGEKPYECSDCGKSFIKKSQLHEHHRIHTGEKPYICAECGKAFTIRSNLIKHQKIHTKQKPYKCSDLGKALNWKPQLSMPQKSDNGEVECSMPQLWCGDSEGVRKMATNFLVHEKIWFDKFKYDDAERRFYEQMNGPVAGASRQENDASVILRDIARARENIQKSLAGNSGPGASSGPSGDHSELVVRITSLKVENQSLRSVVQELQQVISKLEARLNVLEKNSPGHRATAPQTQHMSPMRQVEPLAKKPFTPAEDDDDDDTDLFGSDNEEEDKKAAQLQEERLQQYAEKKAKKPELVAKSSILLDFKPWDDETDMAQLEACVCSIQLEELLVPMGYGIRKLQIQCVVEDDKVGTDLLEEITKFEEHVQSVDIAAFNKI

SEQ ID NO: 33157 - protein, 139 aa, Homo sapiens
  DOMAIN (1)..(137): Elongation factor Tu family domain identified by PFam, accession name GTP_EFTU, E-value=9.5e-12, PFam score of 42.2
  misc_feature (1)...(139): Xaa = X or * as defined in Table 2
IVKEVSAYIKKIGYYPATVPFVPISGWHGDNMLEPSPNMPGFKGWKVERKEGNASGVSLLEALDTILSPTRPTDKPLRLPLQDGVQDLAALARCPWAVNITTEVKSVEMHHEALSEALPGDNVGFNVKNVSVKDIRRXN

SEQ ID NO: 33158 - protein, 451 aa, Homo sapiens
  DOMAIN (288)..(326): Receptor tyrosine kinase class III proteins domain identified by eMATRIX, accession number BL00240E, p-value=7.508e-23, raw score of 11.56
  DOMAIN (191)..(441): Eukaryotic protein kinase domain identified by PFam, accession name pkinase, E-value=8.6e-80, PFam score of 278.5
MVSRDQAHLGPKYVGLWDFKSRTDEELSFRAGDVFHVARKEEQWWWATLLDEAGGAVAQGYVPHNYLAERETVESEPWFFGCISRSEAVRRLQAEGNATGAFLIRVSEKPSADYVLSVRDTQAVRHYKIWRRAGGRLHLNEAVSFLSLPELVNYHRAQSLSHGLRLAAPCRKHEPEPLPHWDDWERPREEFTLCRKLGSGYFGEVFEGLWKDRVQVAIKVISRDNLLHQQMLQSEIQAMKKLRHKHILALYAVVSVGDPVYIITELMAKGSLLELLRDSDEKVLPVSELLDIAWQVAEGMCYLESQNYIHRDLAARNILVGENTLCKVGDFGLARLIKEDVYLSHDHNIPYKWTAPEALSRGHYSTKSDVWSFGILLHEMFSRGQVPYPGMSNHEAFLRVDAGYRMPCPLECPPSVHKLMLTCWCRDPEQRPCFKALRERLSSFTSYENPT

SEQ ID NO: 33159 - protein, 888 aa, Homo sapiens
MKGLWREAFQSVCGLPNGVFNKKHQPCPNCGGKDRFRWTDNLNTSGDGGAICNSCGNDSGIGWLMKLTGMPYSECINILGRFLGKVPQEYIVKANKKARRTPVSGVNVMMADHEAVMKVMERTEKRVNTPLSIFESLPTESFDVGVKRREDGGESVFHTIPCQLVHEDGLDDEFCNILIIDEEGRESFYAKKYTSCSVAVTGKTEKAIYLCLNWIDAQHIAFHTKQEVWACFTPENLEMVAYRYKGDREVRVACEPSDKDTLYMADDRQLKIIITNPGGYRSGMQAKLFSARVYTMALYRRGTASMDADGTVHGTDTKWKDQLALIRVGATIVFLEQPIKLAVISDIVSDTELKAISTDGQTAADGKYVILLNDSLTVNGLAQNVAETLRYYQSKETEIAAAIDLINQLDMNKLEQIVADVNKAKSDSQAAQNQAELARDDAVRSKDAASVSAQEAKDAANSINAENLLTKDGNLAGLEDKKESRKNIGLGENDAVNFLTINTTGAIGAGRNSWDGSNWGSKTMLSSLMIMSPDGISSPGIYVRKEHSDNGYAGTLLFYEGANYFETNNRFRANQFLCKKTTMSYNQMWSASCFQGNAYTADSGAENYQSLIAGSCDTRGLGYVGGVAFGMMTTGNNEWPRAQISVGTQDRDGSGNIGLQMHFRFMASGQISYAGPQGAGSFQQVPASDRNIKHSIKDDESSIAYNNIKSMRFRNFIFNDDEQERVRRGVIAQEIEEIDNLYVKRRVYESHELNGPKVERLELDTTPLLLDTMRALQDTIKKVEELQEEIKMLKALKDWSGEENCTFGVSLQDPRIKPQVYPFIHQLLRLVLWSHNTLYEANKELQTLAGREPTHTLARATAVMRRALQRLKNMGTEVAAANQDQQEA

SEQ ID NO: 33160 - protein, 925 aa, Homo sapiens
  DOMAIN (495)..(511): SH3 DOMAIN SIGNATURE domain identified by eMATRIX, accession number PR00452B, p-value=7.097e-10, raw score of 11.65
  DOMAIN (481)..(540): SH3 domain identified by PFam, accession name SH3, E-value=2e -09, PFam score of 44.7
MEAEDRGAPLCVYALYLPPSGTSPGSFIKGLRQLCSSPAAAPLALRKDIRNRQPRLIVARLRGREMSPDTAAAALASREPTRHGLGAPPAAAVAPLRLPFFSSYHSPAHLRLSAQNVAETLRYYQSKETEIAAAIDLINQLDMNKLEQIVADVNKAKSDSQAAQNQAELARDDAVRSKDAASVSAQEAKDAANSINAENLLTKDGNLAGLEDKKESRKNIGLGENDAVNFLTINTTGAIGAGRNSWDGSNWGSKTMLSSLMIMSPDGISSPGIYVRKEHSDNGYAGTLLFYEGANYFETNNRFRANQFLCKKTTMSYNQMWSASCFQGNAYTADSGAENYQSLIAGSCDTRGLGYVGGVAFGMMTTGNNEWPRAQISVGTQDRDGSGNIGLQMHFRFMASGQISYAGPQGAGSFQQVPASDRNIKHSIKDDESSIAYNNIKSMRFRNFIFNDDEQERLGHSLVLPLRPPAMVSRDQAHLGPKYVGLWDFKSRTDEELSFRAGDVFHVARKEEQWWWATLLDEAGGAVAHGYVPHNYLAERETVESEPRGISKNGQTREHALLAYTLEPAYSEKRYDEIVKKVSAYIKKIGYNPATVPFVPISGWHGDNMLEPSPNEGHQCLLLTSDSQTRAVLRGSSAGHTVGALADSTEAPSKKPMSSSPSRSAADIYIREYFHSHVSGGHPEATPLRVMYTDRPLSQTDPVTLQYCCLTDDRQAFRPPTRAELARHRVVVTTTSQARELRVPVGFFSHILIDEAAQMLECEALTPLAYASHGTRLVLAGDHMQVTPRLFSVARARAAEHTLLHRLFLCYQQETHEVARQSRLVFHENYRCTDAIVSFISRHFYVAKGNPIHARGKGPPHPRHYPLMFCHVAGSPDRDMSMASWLNLAEIAQVVEKVQEAYNTWPSCWGGREQRCICVVSHGAQ

SEQ ID NO: 33161 - protein, 188 aa, Homo sapiens
MFTEPQGVFPDGPMDLHAAGTRPLSNPTTVLLDEAVDAERGAVAESNLKNQRPELQTKLPSHLLGFEEPAFPAHSSPAVPTAGLSAKWAIFLFPSKQGLEGVELRQGCAGVSGKEPVLTTPHMEGMRLDHTRTSLPPEPGAAGLDAERFPSGPPRPCSEALPILEQADLAKFLYWKINHIEILFKTHR

SEQ ID NO: 33162 - protein, 27 aa, Homo sapiens
MLAQYYGIQGLSHMNQPGKPIPIAQEG

SEQ ID NO: 33163 - protein, 127 aa, Homo sapiens
MATAAGATYFQRGSLFWFTVITLSFGYYTRMVKSEASNAATAYFRPARPLPSLVTVLGLGYFAWVVFWPQSIPYQNLGPLGPFTQYLVDHHHTLLCNGYWLAWLIHVGESLYAIVLCKQNELRIRIK

SEQ ID NO: 33164 - protein, 111 aa, Homo sapiens
TDLETSIRRIADLQAALEEVASSDSDTESVQTAVDCGSSGRKEMDNVSILSSQPEGSLQSWLSCTLSLATDTMRTPSRQSATSSRILSPRINEEAGDTERTHSALALSRAR

SEQ ID NO: 33165 - protein, 205 aa, Homo sapiens
MEKCANHGAPTESDASLADGGWDAEGGKGAMVEGGRCQQHFPKLRLPKMSPDMTKCPLGGKITLRWAEYPLCVVVQIQSMALGSDALGAAPPAQEKYVEELAAVRQTLQTDLETSIRRIADLQAALEEVASSDSDTESVQTAVDCGSSGRKEIIRGHKSRVPVLKMIQIRDNVSILSSQPEGSLQSWLSCTLSLATDTMRTPSRH

SEQ ID NO: 33166 - protein, 85 aa, Homo sapiens
  misc_feature (1)...(85): Xaa = X or * as defined in Table 2
XPSLQPFDVISKGGYKSRLPRAPPAGDDPHGTFSGDCQPLPGVAACNPALATLPADSLNYYDKEPSQWNWLLWGPPDTCTLSCPX

SEQ ID NO: 33167 - protein, 352 aa, Homo sapiens
MTQAQSPQGTHSDRINEQFFLDLKIHLVTTLSREYLQYCGGSSVLIAQPHSVASLFCTDANGTQILWLVAEGECEQMGMGTGVNESWNNLAASAPVGSKFTHSDTLCSTPCGRQHTVKCRGEKEYSIAEWCDTVIVKINASGFRHLGSNLDFPSHLLCDLVQPPKLTFYLLIHAGKTIRSWLVGLFQRPSTTEGAMVSLRHQATARLRVSASAETLLNKHQENAFPQSSVECDGRKIANMPMMRMQTSAGPQKSSVAKPIFSSARRPHREICYLNGFTTAQVLALNLQAQKPDIPTQRTHPCLSVDTYKFTGIHETQDAYLLIYKEMLYHNLYHKLAISKWPKLHVTFLQED

SEQ ID NO: 33168 - protein, 45 aa, Homo sapiens
MNLSVLRNQYTYLSRYSLTRRVKCAYIRAIGLSLPSIKESCLLRR

SEQ ID NO: 33169 - protein, 101 aa, Homo sapiens
MQLGAGGNAFSEHGNGSHFLEMSGAISSGFLEELHFSIKTLDLSRKAGREISRHPFSLDWSLGEESALESCLLFCSHMEYEHAFPGTLTWMETPEKYSLRT

SEQ ID NO: 33170 - protein, 875 aa, Homo sapiens
  misc_feature (1)...(875): Xaa = X or * as defined in Table 2
XSQYRLHRKSQYLKMAAANLTFSQEVVWQRGLPSIPYSQYSFDHLYNTNDIIHTPQIRKARPQKPVSFKFLGSSSPLTGDTSLAVKTESSANPEKKLKKSKPASTVREAPRPLIHHPCMHPDMLGRPPSLDVNLEEREAWLLPPEKEARAWEATVLEKLNERTARWIQSKRPRRPGASPNKWQSFLRQQYDWSHIRDELTSASDLELLKQLEAEETAEFEDQSVILPPQEKKKPELLLPVYYRLPSYFQQAETVEIMPGNKSTEDIHEKTSLSQPQTQSYFRQVTPRAGKFAYSTDNTFEQEIYFDEVQIIHQIGAKRDQIVLENLNRYNKQLSKVFPETPEKWSAQAIPEASYRPVQGALRWTALPTPAKDMLLQVGEKDVPIKTRRLKKQAKSLQEDVTWELVVLRRMLKEWKTAWALIIEWHHETVENLLQSLGDLHDDVRIKAITTCATAALERPRIATSQRDSDKTIQDLPEVLLPALEAALCDKNAHVRMAAAICQYAIQSHNPLARNIMQTALLKGNSVDSWAAAQCLALEGTATYPVIKRILHQLFTKKNEDTEEQSYILLSYLSEKTDAISECNFKVLVSLKVIVNIHTSLPFPQTLIHTMLAVELNSCQWKNRIVACQAFSRISGNVCLDMKHKLIQLMWNDWNKEVRRAAAQALGQMSLGKEVHDIIRVKLGQGNSQERVEALYLIGELKLMTAKLLPSFLHCFSDDFTAVRRAACLAAGALQIRDKMVLECLLNLMQRDPYWKIKAFAIRALGQIGQVSPELTDLLLWAIHYEESPGVRLEACRSILALKLQGDRVRDTFLDVLLLENHDAVLKEMYQTMKILNLGNEGNQEMLQEIKNRIKTLSQKDLLTHKILKLEMVMGK

SEQ ID NO: 33171 - protein, 24 aa, Homo sapiens
MRKWHKARSPEQLNFYPRASLSRN

SEQ ID NO: 33172 - protein, 642 aa, Homo sapiens
MHDTEGHVNDVPLGQRRGPKPARYSFIHSSIPPILSTYYVPDNVLDAENTVFNIPVVCVINGASETEELGRVACFLHSAAPVSAVIGFQPHSGRMSGVRAHRGATHSVLAHRQFLAPLAPSAGLPFPPGPPLRSDPVVPELLGWQQRVQDEKLTYVNVSLSEMHREQSEQLSLGPDFVAKWNSFKCVQVLRAQLQVVGHKDADRIATVPSAYRIIPFLLQVQANLPCALQKQQVSKSSPSTEPTSPLPMEENCRLRKPISPSFSFSKQQGWDADGNSIWWGQQQLCHREGDLVNCTMALHASAPPTDIQLNKSASQRLRKVGSGIRQADLDEALQCYLGWARIGNPHRLPGAELYANPRLRAGPAPRRRLPKAKVVAVCTPALGPSASVSLYVPWGVGGGSALPEPGSVGHTGPAEEAFSGAQGIGNRNQILDFQWTPGLLLPRVPRGLRMEITEEKSHVLRAGGVSRCSATRAIFRVQFRGPAEPSLRAAWQVWKLPPSYLVPGETGSGVEIELLRTSCFVPLSHLAQTSVLSVLRCHFARNFGRLPCATGSGMLMSLEHSGDDTPKGSGNCSPTGVRRYKPKLAKTMSGKLTNFQAIYPEQQTEIKELREVRDAISQGDGPQCPARKPKNRNMAQEATCH

SEQ ID NO: 33173 - protein, 146 aa, Homo sapiens
MKSMDPASGYSNNILTIDQMLKKKQTCIVADATTIKQHVKRATDTYNLGIALEHRKEMLNLWQKIRGDLIGIDSRNEAFYDTFSTYTWSWNVCQELLSPKDLRLYDAYVNRNSSHNCRSSSSSDTSECDTDSGRKRKRKGLKGFQQ

SEQ ID NO: 33174 - protein, 104 aa, Homo sapiens
  misc_feature (1)...(104): Xaa = X or * as defined in Table 2
MSVDPMTYEAQFFGFTPQTCMLRIYIAFQDYLFEVMQAVEQVILKKLDGIPDCDISPVQIRKCTEKFLCFMKGHFDNLFSKMEQLFLQLILRIPSNILLREDKX

SEQ ID NO: 33175 - protein, 42 aa, Homo sapiens
MMSLSFFGCCNSSEQILGLTLCAGSGHWAWQVRKCREGSGKG

SEQ ID NO: 33176 - protein, 53 aa, Homo sapiens
  misc_feature (1)...(53): Xaa = X or * as defined in Table 2
MGLGFKGXSGKTSSKRXSIKLHRNSQTSXHQESCIHLIXIGDRLGSVAPXLLS

SEQ ID NO: 33177 - protein, 73 aa, Homo sapiens
  misc_feature (1)...(73): Xaa = X or * as defined in Table 2
MHWKIPHQPESLKGLYTHMSTHRDLDXLGXPHPRCPLSPXNIPXQYLSEVFLVPPFCLCSLKPNPMPELWXPS

SEQ ID NO: 33178 - protein, 90 aa, Homo sapiens
MQLSWCLDVCEFLWSLILLLLLLVFPESPYHLTCCYIMFDLLQIPHQPESLKGLYTHMSTHRDLDDLGIPHPRCPLSPRNIPHQYLSEVF

SEQ ID NO: 33179 - protein, 68 aa, Homo sapiens
MHWKVDFHISSQLRVWEIGLVKAQIPHQPESLKGLYTHMSTHRDLDDLGIPHPRCPLSPRQHPPPIPF

SEQ ID NO: 33180 - protein, 168 aa, Homo sapiens
MDDCQAQKVPGFRGGILGAAGLLTGPLPRLLAQFTVHSPVAPLNPCRFPHHRLPLDWSPTSQNRGREETSAMMQARNAKLPDIMWLTQGHPTMALAFLSAWFDLLIPPGENVTVKGGVQEASGTQRAVVLEAALGGNGLFGFLTSGGPATAASPSAGSFLADFTGPSG

SEQ ID NO: 33181 - protein, 85 aa, Homo sapiens
MWRKEHYSLECPQLSNCDRLCLAQLQLDLNKCSRRGAVMGPLRLLYSNLRSIAVEVPSFQQGVDGLDFLWKNSGQAVHFCEIDLV

SEQ ID NO: 33182 - protein, 54 aa, Homo sapiens
MIRYFTSNPASSVISNFVSYVGKVATGRYGPSLGASGAIMTVLAAVCTKIPEGR

SEQ ID NO: 33183 - protein, 121 aa, Homo sapiens
MFLGISVYGEYLLCSGPLSRYFHIGFQPQRSFVLQCWLSTIQSLLLYFTWEANMYVLWELLFQHSGTFWGQEQFLGSGTYLAGGYFPILVQFTWVKLPQEDMDHQLGLGSRHHDDPRSCPH

SEQ ID NO: 33184 - protein, 89 aa, Homo sapiens
  misc_feature (1)...(89): Xaa = X or * as defined in Table 2
MLGTLPSMLKISGGVHQPSACPDQLTLXKQKRGLEFNGQCPVLCEAAQISAECETLRVTFCDAAERHSAQRHCVLGGGDGKDPVWPGAS

SEQ ID NO: 33185 - protein, 198 aa, Homo sapiens
  DOMAIN (38)..(62): Dehydrogenase E1 component domain identified by eMATRIX, accession number PF00676C, p-value=1.514e-17, raw score of 16.88
  DOMAIN (1)..(158): Dehydrogenase E1 component domain identified by PFam, accession name E1_dehydrog, E-value=1.4e-06, PFam score of -59.6
MPGLSPALWSLCRLCQIGFTTDPRMARSSPYPTDVARVVNAPIFHVNSDDPEAVMYVCKVAAEWRSTFHKDVVVDLVCYRRNGHNEMDEPMFTQPLMYKQIRKQKPVLQKYAELLVSQGVVNQPEYEGEPAGTLAQTERHRVQSTFSRWSQGKDPEQGKLRNRTAPKQPGSPGRLCRIHNDGFAGEGLQVVVITPPVQ

SEQ ID NO: 33186 - protein, 187 aa, Homo sapiens
MKGGHLVPLQVLFVQPGAPVGREDSPLSNQTAGEAITSSSTWVRGAGSEVPSPVEQADALTSSLDISDPEVPFLYPEKRKDVGSDVGTHSTWHWLVVMLPSEEPWAMLQSDNRTNPGTQAGTLAQTERHRVQSTFSRWSQGKDPEQGKLRNRTAPKQPGSPGRLCRIHNDGFAGEGLQVVVITPPVQ

SEQ ID NO: 33187 - protein, 122 aa, Homo sapiens
  misc_feature (1)...(122): Xaa = X or * as defined in Table 2
MERPSHGFSEDSFLAELGVGGVEHIFSFEVQRAVNPLQLPCKLMGTPGASWGWSEGVLAGMAAASRLPQVTVQSSGLVHITAMVMIIRFNAITYKFRDARNDIEVAINYTAFCRPTPELESX

SEQ ID NO: 33188 - protein, 105 aa, Homo sapiens [sequence omitted]

SEQ ID NO: 33189 - protein, 204 aa, Homo sapiens
MHSIFNSSSALGQDWQTNSFIKRLEREGTEPHSVPERVPKLLVRGVAVRVEEEGTDWSTAGSTMQTFGPTEGLTCPEDTQQGTDEVGAQEALRERASRRKPQPADSELSCSQLSHGSRPFKGPLEMKGVFVNWEAQYSVQDSPDSQGALQQTQPQGPDGKPPAEALQKAQAMPAAKAGEGAGVSDRMTFPTRQRKGKVKQNTSL

SEQ ID NO: 33190 - protein, 105 aa, Homo sapiens
MFTSTEFHNILTKPRKARDYITFILWMQKTAQKGDTLETFFLAGFEQSSNVERSTWQGAEDLQPKASKKARPPVLQVQGNEFPDEPLDENSVLAKTLIIALQSPS

SEQ ID NO: 33191 - protein, 34 aa, Homo sapiens
MQKTAQKGKLFTWISLRKTCGPYSSVFIGWWNTG

SEQ ID NO: 33192 - protein, 193 aa, Homo sapiens
MRRNVCLCRTPSGERVGSELGATTLYAVRLGGRLEGLGCPALFTGLFSDLLHVSTPTQKFVKSSEEHFPVASLFAHLQVLVSVNHLSLPDTEPDPSQDSPGVSRHPALGQLLQDIAEDKSPPHSGSTICSLWLSSSRAPCDRCTSRPSSKVQGYLCQQDSRSRTRAGWKTPTVVGRHVPVKIEKESIRPANFG

SEQ ID NO: 33193 - protein, 180 aa, Homo sapiens
MAVVGWACGHVLQPLGSWCDVADGSGTVGATYRNPCSPCYVGGDCDRLGRPVLMGFSCGDIGRLSQPDLRPQQEGSGANGGRLSLGIFRLMGWMLEYLGDGTKLDNLSSGPLVVHSGAAYASEIPLPTGLTLYCRSHTGAGFGPQVPFIMKILNSLSRRGMNKHLRDTKNRAKCRKDCRR

SEQ ID NO: 33194 - protein, 507 aa, Homo sapiens
  DOMAIN (361)..(403): Neuregulin family domain identified by PFam, accession name Neuregulin, E-value=0.057, PFam score of 8.1
MLVGNRVTCATCGLCPLTRPALRRKEQLVLHRDLSLDSTNVEEAFKNILTDGYLGGPRLCPVPAAGGARSPSSPYSVETPYGFHLDLDFLNQAPGHPASPWPVTTVETGHTLPGRALGAPDAAVSPRAPVRNPRVEHTLRRPAGGWSWRRHTSARPPRPRGPAQPTRVRPQQPAPNLAPASPRPCPTAAVREQMAAALRRLRELETRRERCPSCRSRASPRLTAQTAWLQGAARARSGPRRGGRESRWDAPDPEVAAEAVPETREAGAQACRRPGRPAWRLPPRPWGGRVGDRGAAGAACGRQRELELLRASLEHQRGVVSFCGAGCGSWRKPARHPQIHHEEERRHTWCQPSSGPKSLQFVGVLNEISSSLNGNGHTHIADSRTSPQGRFSRHLPPCPRYESSSSEDASDSDGTARTVAPSPRRGDIRDPEPEAEAEPQQWHRGAPPHGAAWTIADVILAPVPCRAQSPRGPGVVSSVQPAALSAEPVARMLEGVRRLGPNCWRTW

SEQ ID NO: 33195 - protein, 197 aa, Homo sapiens
  DOMAIN (12)..(56): GTP-binding nuclear protein ran proteins domain identified by eMATRIX, accession number BL01115A, p-value=2.688e-14, raw score of 10.22
  DOMAIN (13)..(197): Ras family domain identified by PFam, accession name ras, E- value=4.1e-59, PFam score of 209.8
MGTRDDEYDYLFKVVLIGDSGVGKSNLLSRFTRNEFNLESKSTIGVEFATRSIQVDGKTIKAQIWDTAGQERYRAITSRRTTVVQSCGTHADSNIVIMLVGNKSDLRHLRAVPTDEARAFAEKINLSFIETSALDSTNVEESIQEHPHRDLPHRVTGNRSQIRAAHDESPGNNVVDISVPPTTDGQKPNKLQCCQNL

SEQ ID NO: 33196 - protein, 35 aa, Homo sapiens; identical to SEQ ID NO: 30852

SEQ ID NO: 33197 - protein, 69 aa, Homo sapiens; identical to SEQ ID NO: 30854

SEQ ID NO: 33198 - protein, 30 aa, Homo sapiens; identical to SEQ ID NO: 30855

SEQ ID NO: 33199 - protein, 177 aa, Homo sapiens; identical to SEQ ID NO: 30856
  misc_feature (1)...(177): Xaa = X or * as defined in Table 2

SEQ ID NO: 33200 - protein, 367 aa, Homo sapiens; identical to SEQ ID NO: 30857

SEQ ID NO: 33201 - protein, 54 aa, Homo sapiens; identical to SEQ ID NO: 30859
  DOMAIN (1)..(46): RNA polymerases L / 13 to 16 kDa subunit domain identified by PFam, accession name RNA_pol_L, E-value=7.8e-05, PFam score of 15.6
  misc_feature (1)...(54): Xaa = X or * as defined in Table 2

SEQ ID NO: 33202 - protein, 723 aa, Homo sapiens; identical to SEQ ID NO: 30860

SEQ ID NO: 33203 - protein, 445 aa, Homo sapiens; identical to SEQ ID NO: 30861

SEQ ID NO: 33204 - protein, 76 aa, Homo sapiens; identical to SEQ ID NO: 30863

SEQ ID NO: 33205 - protein, 378 aa, Homo sapiens
  DOMAIN (218)..(269): DNA mismatch repair proteins mutL / hexB / PMS1 proteins domain identified by eMATRIX, accession number BL00058A, p-value= 1.000e-40, raw score of 20.73
  DOMAIN (208)..(377): DNA mismatch repair protein domain identified by PFam, accession name DNA_mis_repair, E-value=6.2e-14, PFam score of -1.2
MLQAWSMQAEPCISSGITAAKAQLEQVQMQIGNSWLMDCSQSHPSQLALSPEASTSQQSGNDQPSPTTKDLLQYSDLFPQVGKDHRAPYGEDSRTAGAPFSDKNIDLNGIIQYPRKPSWFPEYFKHMGETYCSENKIPFKILLLSDKAPGHPRALALQPLRCPLPWPLVSFSLILTLIDIFVQTQLEGNSYQGGHQFHSFDTEPAKAIKPIDRKSVHQICSGPVVLSLSTAVKELVENSLDAGATNIDLKLKDYGVDLIEVSDNGCGVEEENFEGLISFSSETSHIDVTISTCHASAKVGTRLVFDHDGKIIQKTPYPHPRGTTVSVKQLFSTLPVHHKEFQRNIKKGLGMEVMLLLRLHAEQGTESPKVKGMKLLGF

SEQ ID NO: 33206 - protein, 417 aa, Homo sapiens; identical to SEQ ID NO: 30864

SEQ ID NO: 33207 - protein, 80 aa, Homo sapiens [sequence omitted]

SEQ ID NO: 33208 - protein, 482 aa, Homo sapiens
  DOMAIN (135)..(186): DNA mismatch repair proteins mutL / hexB / PMS1 proteins domain identified by eMATRIX, accession number BL00058A, p-value= 5.125e-33, raw score of 20.73
  DOMAIN (262)..(482): DNA mismatch repair protein domain identified by PFam, accession name DNA_mis_repair, E-value=3.4e-32, PFam score of 120.4
  misc_feature (1)...(482): Xaa = X or * as defined in Table 2
XASAKCWAAAPAVHVGEPVHAGGLHTERGADPVIGLYLVHRHGATKAREGGACQTPTVGNRQTPTVGNRQDTNARKPPDTNARKPPDTKARNTRQTTTEGDHLPSDPAAGVRKKNAVRTEPAKAIKPIDRKSVHQICSGPVVLSLSTAVKKIVGNSLDAGATNIDLKLKDYGMDLIEVSGNGCGVEEENFEGLSWDSTEGPTVSVKQLFSTLPVRHKEFQRNIKKKRACFPFAFCRDCQFLEGSPAMLPVQPAKLTEPAKAIKPIDRKSVHQICSGPVVLSLSTAVKKIVGNSLDAGATNIDLKLKDYGMDLIEVSGNGCGVEEENFEGLSLSALKHHTSKIREFADLTRVETFGFQGKALSSLCALSDVTISTCHVSAKVGTRLVFDHDGKIIKKTPYPHPRGTTVSVKQLFSTLPVRHKEFQRNIKKKRACFPFAFCRDCQFLEGSPAMLPVQPAKLTVTGELRACRSWKTREGITEAVG

SEQ ID NO: 33209 - protein, 33 aa, Homo sapiens
  misc_feature (1)...(33): Xaa = X or * as defined in Table 2
MARNVPASPSPSAVIVSFLRAPQPCFLYSLQNX

SEQ ID NO: 33210 - protein, 1012 aa, Homo sapiens; identical to SEQ ID NO: 30868
  DOMAIN (152)..(203): DNA mismatch repair proteins mutL / hexB / PMS1 proteins domain identified by eMATRIX, accession number BL00058A, p-value= 5.615e-39, raw score of 20.73
  DOMAIN (142)..(412): DNA mismatch repair protein domain identified by PFam, accession name DNA_mis_repair, E-value=1.5e-43, PFam score of 158.1

SEQ ID NO: 33211 - protein, 62 aa, Homo sapiens
MICTNGFLSFCLVSAISIGNKVPAENPHLPLGSGVLGSERDNVTLQGGSSLDRKVIHVPCQV

SEQ ID NO: 33212 - protein, 1058 aa, Homo sapiens
  DOMAIN (282)..(321): DNA mismatch repair proteins mutL / hexB / PMS1 proteins domain identified by eMATRIX, accession number BL00058B, p-value= 2.385e-37, raw score of 16.83
  DOMAIN (211)..(530): DNA mismatch repair protein domain identified by PFam, accession name DNA_mis_repair, E-value=7.3e-53, PFam score of 189.0
MWLWISLFDLWWQLDPDEKIAYGDVMLENYSHLVSVGYDYHQAKHHHGVEVKEVEQGEEPWIMEALKHHTCKIQEFADLTEVETFGFQGEALSSLCALSDVTISTCHASVKVGTRLVFDHDGKIIQETPYPPPQRDHQSAMAQPKQERTPTVGIRQTPTVGNRQDTNARKPPDTKARNTRQTTTEGDHLPSDPAAGVRKKNAVRTEPAKAIKPIDRKSVHQICSGPVVLSLSTAVKKIVGNSLDAGATNIDLKLKDYGMDLIEVSGNGCGVEEENFEGLTLKHHTSKIQEFADLTRVETFGFRGEALSSLCALSDVTISTCHVSAKVGTRLVFDHDGKIIQKTPYPHPRGTTVSVKQLFSTLPVRHKEFQRNIKKAQRLRQELQMLMTECLTWARNGSSKHPLSLAQKPEFLFHQLQSRDNAICPIAEQKAEGKFSSRYRNHDSAENRRDGSMTRPRTDWTLKRACTEKRRPQHASSFEWRGHSLCWDREQRDAETLKMLLDSGLSVQKKTKDRTETRFGEMGQILGKIMMSHQPQPQEEQSPQRSTSGYPLQEVVDDEVSGPSAPGVDPSPPRRSLGWKRKRECLDESDDEPEKELAPEPEETWVAETLCGLKMKAKRRRVSLVLPEYYEAFNRLLEDPVIKRLLAWDKDLRVSDKIPSEPTILGASPKTLPPASRICIRPSNTPPPRNFHMSTVTPMLSYLANDMEEDDEAPKQNIFYFLYEETRSHIPLLRELWFQLCRYMNPRARKNCSQIALFRKYRFHFFCSMRCRAWVSLEELEENTGPRGDVDFQQELYSSANGRHQEGGEEPFVQIIMSEPPANDLFNAAKAAKSDMQHREVRVKCVKALKGLYGNRDLTARLELFTGCFKDWMVSMIMDREYSVAVEAVRLLILILKNMEGVLMDVDCESVYPIVLFYPECEIRTMGGREQRQSPGAQRTFFQLLLSFFVESKLHDHAAYLVDNLWDCAGTQLKDWEGLTSLLLEKDQSTCHMEPGPGTFHLLGESPGISAIVQGAIEKSGERSSPPPKRIGSMKEGPMVLPLALDTQCWFPVEVPLD

SEQ ID NO: 33213 - protein, 163 aa, Homo sapiens
  misc_feature (1)...(163): Xaa = X or * as defined in Table 2
XGQCRVLGRRSSRCMWGSQYMQVGSTRRGARSPEIGLFMVPRAGACQTPTSRKPPDTNARNPRQATTEGDYLPSDPAAGVRKKRSPVCSDWSRLFDVTDSTFDRATRRKGETGSIFSAPPGKGGAQRRKQPLGAQEAGRLWEPWRELSQVPEAGSGCCILEAS

SEQ ID NO: 33214 - protein, 26 aa, Homo sapiens
MWAASVGAEVPHSRPLPSRRLYIENG

SEQ ID NO: 33215 - protein, 85 aa, Homo sapiens [sequence omitted]

SEQ ID NO: 33216 - protein, 269 aa, Homo sapiens
MATWRNLTSLSSLFSLHLIVVWIRHKAQRAAQIHAALLLSDGWEPLLLHSMETSSSTASQRATPKEMFATPRCLLGHIIQRPGGLLSLKKQMHHQIWEMIFPGISSYHQFTGDRCQNSFALQQCGNVCPRTPLKLLCRMSVESTGHSPMDSLEINLENEKHIAELKNSLEALSSRMTRQRKELRAASFLPPREKTAVHEPGSGPSPDSNLPAPSSWTSPPPEWQLGDVITSAEREPVLRDQAICMKPHDGASASGVILGQKLMEVDTCS

SEQ ID NO: 33217 - protein, 217 aa, Homo sapiens
  misc_feature (1)...(217): Xaa = X or * as defined in Table 2
MAASQLLRSRGVLVFLLPTQKGKRSKQQKLMAVCISHKFAAQAAEQTEKTRHEAVSSLGQHGRVDSIGEIHAALLLSDGWEPLLLHSMETSSSTASQRATPKEMFATPRCLLGHIIQRPGGLLSLKKANASPNLGNEIPWYFFLSPVHRRQDSEKLKKEDLVGAGRPAEAGQLGDVITSAEREPVLRDQAICRKPQDGASASGVILGQKLMEVDTSX

SEQ ID NO: 33218 - protein, 242 aa, Homo sapiens
MATWRNLTSLSSLFSLHLIVVWIRHKAQRAAQIHAALLLSDGWEPLLLHSMETSSSTASQRATPKEMFATPRCLLGHIIQRPGGLLSLKKANASPNLGNEIPWTPLKLLCRMSVESTGHSPMDSLEINLENEKHIAELKNSLEALSSRMTRQRKELRAASFLPPREKTAVHEPGSGPSPDSNLPAPSSWTSPPPEWQLGDVITSAEREPVLRDQAICMKPHDGASASGVILGQKLMEVDTCS

SEQ ID NO: 33219 - protein, 131 aa, Homo sapiens
MVPDTGDNEDESVTVTTHEPLKIEEEGLRVNHKDITMEEEAGEIPSMEGTRPATASFEDGGRGLASLVADLRTDSRDKTGSRDQLEGYCKEEMSRGAGGSGGAKMWHTRYSEGRAPDIIGLEYEKKILKDD

SEQ ID NO: 33220 - protein, 101 aa, Homo sapiens
MISKMRKQKLGYVSKHFQGPAANQWLTTSFLCLCCHPCHGLCQDSRRSLPSAPQLLCTNPECQTEVRRKEMMQLIADAEIQRPVPEYPWILSTRGWTVETI

SEQ ID NO: 33221 - protein, 225 aa, Homo sapiens
MKTLLARASRFLALPRTSFNALSKSHNLLGFKDIRSNVEALAQKTQPSVFPKESVQVTPVCYTKGDRESVQKCPLIFRSHSATEQVSIRRGVIVRVAKWRGESHIHGGPDVPGLVLDTSYETSPLIHTPALRVYYIGEDIAMEQVTNLAFPLLYSNSHRVSEPGELGFWGPGESVMPADAVSVPCTCHPGSYGVQPLVLRIQGYSGTGRWISASAMSCIISDRNG

SEQ ID NO: 33222 - protein, 81 aa, Homo sapiens
MENTDHDKLGDLLEDDRKDLLIENLSLNLPKLEKGSWLYGEAQKAASSCESFENCMDVITCTISLHMFVACVTLLPCIKSA

SEQ ID NO: 33223 - protein, 91 aa, Homo sapiens
MQAVWAILQPSLPCPALRRHVGSTCHCDGDAGSLQPSWALCDFSPGPLDKETPPCHAWMVHQGVLEATMLPTVRSFLSTARQGCFPLPMVL

SEQ ID NO: 33224 - protein, 100 aa, Homo sapiens
MKESKAFYFSFSYPTSILERYVSGLIPGSEEATAGKKTIHGPIITEIILQCFSSAPYSCLGKGEHVSGPKEWLGKALSKSRTATAMLQQCGNRPEEKTST

SEQ ID NO: 33225 - protein, 90 aa, Homo sapiens
MLVNAHQCLDIEELDIYRSVHSVGLFVPILLGKTLQGCELPQTPDGSRDAIQEQDLDPETLEIYLVLYPTAVKLAPKPQDSPSHSSFPFP

SEQ ID NO: 33226 - protein, 32 aa, Homo sapiens
  misc_feature (1)...(32): Xaa = X or * as defined in Table 2
XLCQRLLLAEPNEKPGSLGNVMAVARIEIGIX

SEQ ID NO: 33227 - protein, 293 aa, Homo sapiens
MPPSEQVTDVKPPGTRKKGTATDYEDSCVNQFSVNFCKSKRMTTTSTNNITTTNNLPPKKDYETLIFHFAGLLKAFTSTSPHFHLHWSRRGTVFAARMKNHVGEKEEGKILPSRQHQCQHEQPGPDGSGGWIRSMAIWGKDPVYSLMADRCRSCDQWMKLAHATPAFSLDVVWVWNKPWQADTDLGAGELLEKAAGMGLHKRCSSLLLKQPTFKHEASFRIHGDVGISTLFRVKKGVLLTLISIAVDSHSNSSHGTLGATLAGISRVRTTLTDPHLWGSSCRPSVMTLVQFPG

SEQ ID NO: 33228 - protein, 81 aa, Homo sapiens
MVCYVLHQPLPLHTDQVEPNTHIPVGSPSLPRENRSTGGAPCWDYKQESPHSASVALLQVITCQPQAVALPLTGHDVTAGM

SEQ ID NO: 33229 - protein, 212 aa, Homo sapiens
MENGKTPSAFQLPDKNERQMKRRQIEGEGEEIMSMTWGEKQRLERGVMFQDLHHRKKINKATDTSHYEKLTPIPVNRGKFRKMAARFINISNETLRSVERDSDTSRILNIKAEDSTKARPASRPVDTNGSNYITDFITKTNPNNVISNNQFTSEGENKLILREANLSSDAQDNKKSLPDCKSPLFPECRELKNLKEYFVLQERSEAEQGSHE

SEQ ID NO: 33230 - protein, 136 aa, Homo sapiens
MRHTTLYEKRKSCYPNILAHQPRQRPRQLSQCNGWRLAPSPGMPNGGARKLVVMGPPSSRKVEWTEGLLKTHLTKLSHQKGLDNTFITFPSQNSGLSSECYKMQATVQWNLEAQTCSTEGDVNLSCLQDPDCVTGV

SEQ ID NO: 33231 - protein, 31 aa, Homo sapiens
MLLFIRPQSHSRHQTNLDCAPKNLSSLLSSV

SEQ ID NO: 33232 - protein, 222 aa, Homo sapiens
MRENVSLLAALVIATCLPQNRSSMDEQTEKCVRRLVTETDQGNDECMGPIGECIGPQAERMEFQVSQAKVQHKEVGTSDWKLKQFLWSLAAEASPEDQGDFTPSWKYRTSLILDFCQLSLTQPSTHQVVEKSKEGLSYSSSLFTWDHTGNLVQKCWEGQQDFVPYSRDFVLHSGVLLMMCGSAQGSVLRPSDCSTSVQTLQVHSRKHTLNLDEDLIPLLYSV

SEQ ID NO: 33233 - protein, 12 aa, Homo sapiens
MAATVKPWAAIR

SEQ ID NO: 33234 - protein, 79 aa, Homo sapiens
  misc_feature (1)...(79): Xaa = X or * as defined in Table 2
XNPESFKEKFVRKTRENPVVPIGCLGHGGRPSPYGLLLLSTGGNSQALFSFIDCGTRIRRPGVFTVRSHFCWGLAVTAY

SEQ ID NO: 33235 - protein, 187 aa, Homo sapiens
MEYYVAMKKNEFTSFAGTWMQLETIILSKLSEGQKTKHRMFSLIGKGFVAILTSGGLSIELVGWLNVYSPAHSNVRLTTTTTNGNPDGMGNLRITEKGLKLEGDSEFLQPLYAKEIQSRPSSQRKEQTAVLAVLQTPLVTPPGAGKDPGVAPQQTAAAVQKRGLTVKSEQKATTTSTKKYPQNPIQS

SEQ ID NO: 33236 - protein, 265 aa, Homo sapiens
MMEVAFDLGLIGFDALWGTKGKEKYFLAENTVSKGKDMGKPSPTQQSVKAITTSLGSAVLPCNTLAQNKELSRVSQQIRGNCRAIPNQKSQAPLHSLLRSEPADYVIYVCEFRTLEGKSQHFGEWIAKAIHFAKNRTNRIRAPVQHLRDQHPEIRLSVDMRFPYDDGINAPVGYIYVAMKEAQEIHKTGSYVIENSLKFRFRWNLQPVSKKLECLVMYLWTKGSECKSMVIKLALTGCTSRPQAHTGSNVCSENGMRVTEFNEIK

SEQ ID NO: 33237 - protein, 114 aa, Homo sapiens
  misc_feature (1)...(114): Xaa = X or * as defined in Table 2
MPLFEAEEGVLSRTQIFPTTIKVIDPEFLEEPPALAFLYKDLYEEAVGEKKKEEETASEGDSVNSEASFPSRNSDTDDGTGIYFEKYILKDDILHDTSLTQKDQGQGLEEKRVX

SEQ ID NO: 33238 - protein, 47 aa, Homo sapiens
  misc_feature (1)...(47): Xaa = X or * as defined in Table 2
MKSPHKFPEGKIHNDKEHDRIVQEFLAETGPKVTRFNEQCRFRPRIX

SEQ ID NO: 33239 - protein, 83 aa, Homo sapiens
  misc_feature (1)...(83): Xaa = X or * as defined in Table 2
MPIFHHQASRXVVLSKIKTAHPQSRDLKDYARMSGRKFLEESMLVTQGLVYQGYLAANSRFGSLPKVALAGSLGDLALERYHT

SEQ ID NO: 33240 - protein, 73 aa, Homo sapiens [sequence omitted]

SEQ ID NO: 33241 - protein, 82 aa, Homo sapiens
MASASARGNQDKECPFSTTKASRACCFVQNQNCTSTEPEISKIMRECQEESFWKRALPFSLVSMLVYPRDLVLPKVIWQPNS

SEQ ID NO: 33242 - protein, 75 aa, Homo sapiens
MKAADGTMKGRRWQQPSPLIKGALLTLLRMLPSAVVELGSDLKPSFIFSCAMSGSRNKFSRLSGSRPHKDKSPSL

SEQ ID NO: 33243 - protein, 71 aa, Homo sapiens
MIGASNDEKIPHLQVYNVTGEFNLSPPRILLHLSQPWQLIVSLSGQNKNYNMKHLTISWVPPLRACDKLSA

SEQ ID NO: 33244 - protein, 101 aa, Homo sapiens
MHNYLQSSLGICGELVPAPPHCNTKIHTSSSPQWAFWNPRIQKVTHTYRRGFTSHAIQIHVVQVWRFLFDLMKAADGTMKGRRWQQQRASIPKCCSVCPNS

SEQ ID NO: 33245 - protein, 256 aa, Homo sapiens
  misc_feature (1)...(256): Xaa = X or * as defined in Table 2
MPNVNEDVEQIELVFIAVENRPAHGMVQTQVRLAKKNFDKLKMDVCQKVDLLGASRCNLLSHMLATYQTTLLHFWEKTSHTMAAIHESFKGYQPYEFTTLKSLQDPMKKLVEKEEKKKINQQESTDAAVQEPSQLISLEEENQRKESSSFKRPIDELLDMKSEEGACLGPVAGTPEPEGADKDDLLLLSEIFNASSLEEGEFSKEWAAVFGDGQVKEPVPTMALGEPDPKAQTGSGFLPSQLLDQNMKDLQASLQX

SEQ ID NO: 33246 - protein, 247 aa, Homo sapiens
MSGHKCSYPWDLQDRYAQDKSVVNKMQQKYWETKQAFIKATGKKEDEHVVASDADLDAKLELFHSIQRTCLDLSKAIVLYQKRICFLSQEENELGKFLRSQGFQDKTRAGKMMQATGKALCFSSQQRLALRNPLCRFHQEVETFRHRAISDTWLTVNRMEQCRTEYRGALLWMKDVSQELDPDLYKQMEKFRKLLDQNMKDLQASLQEPAKAASDLTAWFSLFADLDPLSNPDAVGKTDKEHELLNA

SEQ ID NO: 33247 - protein, 91 aa, Homo sapiens
  misc_feature (1)...(91): Xaa = X or * as defined in Table 2
XCLGPVAGTPEPEGADKDDLLLLSEIFNASSLEEGEFSNEWAAVFGDGQVKEPVPTMALGEPDPKAQTGSGFLPSQLLDQNMKDLQASLQX

SEQ ID NO: 33248 - protein, 372 aa, Homo sapiens
MMQATGKALCFSSQQRLALRNPLCRFHQEVETFRHRAISDTWLTVNRMEQCRTEYRGALLWMKDVSQELDPDLYKQMEKFRKVQTQVRLAKKNFDKLKMDVCQKVDLLGASRCNLLSHMLATYQTTLLHFWEKTSHTMAAIHESFKGYQPYEFTTLKSLQDPMKKLVEKEEKKKINQQESTDAAVQEPSQLISLEEENQRKESSSFKTEDGKSILSALDKGSTHTACSGPIDELLDMKSEEGACLGPVAGTPEPEGADKDDLLLLSEIFNASSLEEGEFSKEWAAVFGDGQVKEPVPTMALGEPDPKAQTGSGFLPSQLLDQNMKDLQASLQEPAKAASDLTAWFSLFADLDPLSNPDAVGKTDKEHELLNA

SEQ ID NO: 33249 - protein, 32 aa, Homo sapiens
  misc_feature (1)...(32): Xaa = X or * as defined in Table 2
XPAKAASDLTAWFSLFADLDPLSNPDAVGKTR

SEQ ID NO: 33250 - protein, 674 aa, Homo sapiens
  DOMAIN (109)..(124): WILM'S TUMOUR PROTEIN SIGNATURE domain identified by eMATRIX, accession number PR00049D, p-value=5.119e-09, raw score of 0.00
MATWNTCRRAGAGSLWAADPSGGYPGDGGRGETPGSRERETHSPSPRPSPSKASRLLGSRIPVRNRISPFPSPPPSGLGRSGGCARRESVRQPRGSGREAFRAPAPALGAPAPMPAHPTHPPRASPSRRLRPQDPELPGGQGLASRVDLLTSSPAAAPGQLLKITELKLLREMNINHYVNLAVLRGYSVMWVKHTPQCLRSGSSSISGNSLSQCKPTEWPWTSLIICDSGGLDALISVSTGLILNIRCMVVEVVEGPQKEEFESADGKRSLVLDVLNLKCLWNNPGEDYHLEVEMWIWCPGEVVISKLETCFPLIYSSLGLCFFEQILIIGATALSSLRKQFNCETQTFMRSSCADCDNILALTVHQHLVTCPSLLISQALHSRDEADLIVVDKLFDVLLDSVCQYFIEDFHTDVYQGYSSYPWDLQDRYAQDKSVVNKMQQKYWETKQAFIKATGKKEDEHVVASDADLDAKLEGESTSEEAKCHSGACGLAAGVCSGPPLYHYVVLSQEENELGKFLRSQGFQDKTRAGKMMQATGKALCFSSQQRLALRNPLCRFHQEVETFRHRAISDTWLTVNRMEQCRTEYRGALLWMKDVSQELDPDLYKQMEKFRKVQTQVRLAKKNFDKIEDGCVSKSGSSWSEQMQSLVSHASNIPDHSASFLGENFSHYGSHP

SEQ ID NO: 33251 - protein, 106 aa, Homo sapiens
MASTVLGKSLQRLSPLPLVCFSFPGFLFAVCTGGENEPKRLKKHLPQILKLLKPDDRILIVGTTRRPFDAELQSFCKVYQKIILVPRPDYASRYGKYPQPLPMHDS

SEQ ID NO: 33252 - protein, 183 aa, Homo sapiens
MELAGLEDAQSIQSLSQHLLITKLFDQPVLLITKLLISQYLWITNLLISQHLLITKLFDQPALIDHQAIDQPGLIDHQAIDHPALTDHQTGTELGDTVEGLWSLVTLISGDNGDMYLLAYVKKTSAVYRWPIITTLTQILCDLCFGAHHHLAASLRLYVENPETTLRLKNYYLCLSEAHHTKP

SEQ ID NO: 33253 - protein, 200 aa, Homo sapiens
MDPNQEEISELPEKEIRTLIIKLIKEAPEKEEISKQQSIQEKTTDDFDHDTNTYLGKNPEDLQGPSTRSSIFRFKAESMVMGNNLVKSLHYKPRSSNVMSSVSVHSHTAIKILHETRNYGYLLSCMERKSLKVGQKWIHAWILRAWFTQWSQKQTSIGWSQRRKPGVKDVLANRSLIVMDEKKKEMGEAHCITNCNGNSL

SEQ ID NO: 33254 - protein, 95 aa, Homo sapiens
MWSSLHFFRMDWRVLVKSDTYQRHSTHLDEEVALFHVAILQLVGFVWIIHSIHQLRDFYQIVFIGILTSFWSPPSASFIITIYSLILLPSSSSTK

SEQ ID NO: 33255 - protein, 58 aa, Homo sapiens
  misc_feature (1)...(58): Xaa = X or * as defined in Table 2
XPLVNLDASVNGCRRQTKQLVHGVASLLHTVNHFPMLQRHSTHLDDEVALFHVAILQL

SEQ ID NO: 33256 - protein, 313 aa, Homo sapiens
MHVKFHGGHGKTRSEVHNFKLLQKKMSKTSQSAQKKKEERKECGNGNTSRNHNELEYESSAGLSQLLSSSRGRLHPFEPAAFHPLLGGIMQSFLLQLKNPGRNATNIGKLKDGKKERLLGTSGLEEQHRGIMSARPIRELNFHYHTTAGRPSETVQGTLINISLPLCAHANWCSAIQLSHKPAEFMQILKVKGISTRPLSLQMPAAPQGSPVLLRRIKIRTSQVERHIGESWGVLSAEFPCLQPMKSEWVKSMCLPGSAVYAKGSGRKTEVNGDKYGNPSTGKDVGSKPLLPIDFGFEVDVESGELLSRQSLG

SEQ ID NO: 33257 - protein, 250 aa, Homo sapiens; identical to SEQ ID NO: 31235

SEQ ID NO: 33258 - protein, 32 aa, Homo sapiens
NLAVSFQPPVVGIPALSLHRRGDRGGGRSFMA

SEQ ID NO: 33259 - protein, 61 aa, Homo sapiens; identical to SEQ ID NO: 31233
  misc_feature (1)...(61): Xaa = X or * as defined in Table 2

SEQ ID NO: 33260 - protein, 212 aa, Homo sapiens
MTKVIWCPLGTRQDQVEALGTVTVTVTLHLLSDRPCGGAAIDLDCWAQDIIYKVKTVFNNEFDAAYKQKEFEIARVKERNVRIREIILDLELEEAVWQPEFEDCEKPERTLVVQDEEALPTFPNPKCSHSNVGWEAASGATWNVRSLSQYSSLILALSQDASTRLRALMDMMGGVLEVKKEDILRMVIPQPAFMAKPDAVWTEEEKKTIQRL

SEQ ID NO: 33261 - protein, 602 aa, Homo sapiens
MVYKWTEKHSLTYSATYGLECSVEQPEVYTMSLHLKLMECVGGDSSSMWEQCGPRASMEEGCHVPGLPLGAGFSAGLRFMERTPGQGEEKQLVQTDDEGEDQKSCLGVVEVSVALPQPKAPGYICHGLSPGGLSNGSREECYWGHVFWDQDLWMFPSILMFHPEAARAILEYRIRTLDGALENAQNLGYQGAKFAWESADSGLEVCPEDIYGVQEVHVNGAVVLAFELYYHTTQDLQLFREAGGWDVVRAVAEFWCSRVEWSPREEKYHLRGVMSPDEYHSGVNNSVYTNVLVQNSLRFAAALAQDLGLPIPSQWLAVADKIKVPFDVEQNFHPEFDGYEPDPRVCPGTPSSQRHLPVGEVVKQADVVLLGYPVPFSLSPDVRRKNLEIYEAVTSPQGPAMTWSMFAVGWMELKDAVRARGLLDRSFANMAEPFKVWTENADGSGAVNFLTGMGGFLQAVVFGCTGFRVTRAGVTFDPVCLSGISRVSVSGIFYQGNKLNFSFSEDSVTVEVTARAGPWAPHLEAELWPSQSRLSLLPGHKVSFPRSAGRIQMSPPKLPGSSSSEFPGRTFSDVRDPLQSPLWVTLGSSSPTESLTVDPASE

SEQ ID NO: 33262 - protein, 84 aa, Homo sapiens
MSLHLKLMECVGGDSSSMWEQCGPRASMEEGCHVPGLPLGAGFSAGLRDSWKEPQGKVRRSSWYRLIDEGEDQKSCLGVVEVSV

SEQ ID NO: 33263 - protein, 103 aa, Homo sapiens
MIPSFSSLPCDREKHLHPLRPQAQAFLSYDPAYNQQSCWLPFLKSLNLLTSLHFHGHLPCPSHCYNWQVTNASYWASQSLLPQPIFRAEANLVRFLWVLVGSA

SEQ ID NO: 33264 - protein, 76 aa, Homo sapiens
  misc_feature (1)...(76): Xaa = X or * as defined in Table 2
MARLGSAPRPIRSGGSGAGSRRAQSELESGAGVGAAAGRDRGESSAAGWVSRGQRSRLCRGDLSADAGDPADRGAX

SEQ ID NO: 33265 - protein, 323 aa, Homo sapiens
MATQPTRLAGVTVSLLHGPGSAPGDMEATHYRVVIKNGLPSPYPFPDLYQAALLTSDSWGRIERCPLGDQVGQRGGPKGVGGLQSNKGLPGINGVIALLPIAQRRRSHSQKTQMSEEMRLQLLATTILLSVFMNLTTPEKGKEGLSQGEISVQLEECQEVRPSKRRCPEQLHRASIILQSPPPWLISPSMAPGDDPVERLRKPICFCKAGWPQTTKYTPPEDTAKPRSGDHSNMSTHTADCQQQEGHVIAEGSLTSPCDSLHIKWKTLSPLRKRDVSRVNSSCHRACCPFPGTCSVNTNKDDEPTLRVVVTMFPWIALDLVFL

SEQ ID NO: 33266 - protein, 478 aa, Homo sapiens [sequence omitted]

SEQ ID NO: 33267 - protein, 65 aa, Homo sapiens
MLTGLCFSYAVSAPLSGCLPVPVRACNAHLCFLCITCDSRAVCQQYTKGICGLSQVQCDFIFWVV

SEQ ID NO: 33268 - protein, 327 aa, Homo sapiens
  DOMAIN (202)..(243): Synapsins proteins domain identified by eMATRIX, accession number BL00415F, p-value=3.957e-34, raw score of 2.05
  DOMAIN (80)..(252): Synapsin domain identified by PFam, accession name Synapsin, E-value=1.2e-79, PFam score of 278.0
MPFWCSHISRGEARHKHCTSHSYLFESIQLPEESSASQSGHEFLLWAGSRPAFGSDARVARLLWNSASQDALGDWKQIPWAKCFRGKKVLGDYDIKVEQAEFSELNLVAHADGTYAVDMQVLRNGTKVVLYWSFWPQDHCDCLQSYYLWPKEVVSKNWIGDRKGQTGGVWDLTTGNTSLSILKIKKEDRKRDVHPGGESFRPDFVLIRQHAFGMAENEDFRHLIIGMQYAGLPSINSLESIYNFCDKPWVVSEAPFPQVKGMIKLLERPEPSDNQGNSPTQVVTESYQVVQQPENEIYPHACESNTYELEVSWRSSKPNPNSDLNLS

SEQ ID NO: 33269 - protein, 434 aa, Homo sapiens
MVFVKRRLLGARSPALAGRWQDEALKLRPGLMNCLSICSGAACQREENKLPWNHKLYRENISEHYKHEQEQVNNQTEELTLHRKNTVQSALKERSNGTSGRGLMPSTTEGSQCIISNVGQEQLTMFSSQRIGIPREGYRRLCGIRAEPGPGLRAYSLWGLATMGSVSSHPEHPGMPNSTEVWPLWRHCQRLAWSQPTAGTHGQTERQSFPQEVGLIQTEFQTSLDQLQSLKLSKTPRVIGPVQRCLAGIGFQELGKESVPLPSKLIGLVSCYAESTGLSDQRSQGGRRELVKLKTPPDKLEKGAPEVPAGWKAEEGKTLSDSTLSSSPGVGPSHNLEPKKYPMGAVPESSGGTEGQVTQGPMAAHSLDLSMSGLEGDFISYLLQQPQSPALPFHHVPYKLLILLLLEHQQQCGSRMPFLSVREFTPYTGSKPVC

SEQ ID NO: 33270 - protein, 212 aa, Homo sapiens
MRPDIYQVPTRHEDNDVEMDELGTQWCDSGKLLSISNLYVFTGNTGIMMPYSGPESSVVTTEGDPYGRVAEWTDLHTSIAPGQTGLKLVCSKGNIAPQDHFTGCILSHPTEKFLLNSVSVNPKNASCLQNCERKNFSRFEPSSLWQFVMASVGNKQEKMENESALPKLRKIISTVENLVEVGDHEFMLAINVQQPRINCERIYASCQGIIQI

SEQ ID NO: 33271 - protein, 349 aa, Homo sapiens
MDSHIFTIIGLEEERLPISKRNYSALWISLAQVPAESEGKRGFWKAGKWMDPVERPDSFRAAEKEGSQPRSPASPLNNQGTPTPAQLTKSNAHVHTDVGSHMYTSSLATLTKYPVSRIRRLCDDLRERITLSGDKSLVEEVFPEIGDVMCNFISAGWNHDSTHIVRFPLSGYCHLNSVQVLERLQQRGFEIVGSSATALVQDNLTSCLTATELLLHSCSSVGCSPGGGGNGWNIHEDSWKKVEISWNCGATHLYTKYGDSQNRHNTDWHLVPVDFSGAQCKLSMELPFWCLDSGGPLLTAPVGSAPVETLCGDSDPTFPLPIVLVKVLHEGFTPAADFCLDIHAFPYIL

SEQ ID NO: 33272 - protein, 302 aa, Homo sapiens
  DOMAIN (80)..(100): POTASSIUM CHANNEL SIGNATURE domain identified by eMATRIX, accession number PR00169A, p-value=1.806e-11, raw score of 16.77
  DOMAIN (38)..(138): K+ channel tetramerisation domain identified by PFam, accession name K_tetra, E-value=1.7e-13, PFam score of 58.3
  misc_feature (1)...(302): Xaa = X or * as defined in Table 2
XTVGPICQDSLITRSPASPLNNQGIPTPAQLTKSNAPVHIDVGGHMYTSSLATLTKYPESRIGRLFDGTEPIVLDSLKQHYFIDRDGQMFRYILNFLRTSKLLIPDDFKDYTLLYEEAKYFQLQPMLLEMERWKQDRETGRFSRPCECLVVRVAPDLGERITLSGDKSLIEEVFPEIGDVMCNSVNAGWNHDSTHVIRFPLNGYCHLNSVQVLERLQQRGFEIVGSCGGGVDSSQFSEYVLRRELRRTPRVPSVIRIKQELLELNGNISYAKRKTHTTNNSNKKGTFMCSWDSKPSPGRKIE

SEQ ID NO: 33273 - protein, 235 aa, Homo sapiens
MDAAGGHYLKQINAETENHLLHVLTSPQRHMDLESRETGLRSQPSRVGTEFESQLDYLLGSKAHHMSEQFSILTHKSKALSNVEEDVIPKITTLTHSDTLTRNFIHICSITFQHSSDLPLSQCEVRVLRKRVPAVRLQLAVVLLLLIPQNESEGFLLTSHYKNSWSMSKTESVFGLEEGTHQTDMAKSEFNTPKPVLPASSILVKGSTQIPKDSIQEFTLFFLPAYSINSPTNSA

SEQ ID NO: 33274 - protein, 63 aa, Homo sapiens
  misc_feature (1)...(63): Xaa = X or * as defined in Table 2
MVRGEILPSAWILQPITVEGKEVTRVIYLAQVELGAPGFPPQLLSSFIKRQPLVIARLASFLX

SEQ ID NO: 33275 - protein, 318 aa, Homo sapiens
MGNRDLAKHVVDTSMADVMAACSDNLHNLFSCQATAGWNYQGEEQAVQLYYKVFSPTRHGFLGAGVVSQPLSRVWAAVSDPTVWPLYYKPIQTARLHQRVTNSISLVYLVCNTTLCALKQPRDFCCVCVEAKEVPALVVKMLWEELGLKCREKQSMWASGPLGEGGQIGAGARGHLSVMAAQSVYDTSMPRPSRKMVRGEILPSAWILQPITVEGKEVTRVIYLAQVELGAPGFPPQLLSSFIKRQPLVIARLASFLGWALPQVTGLVAPEKDQRICVNKKSQGTLKFAGLGTTFYKQLALEHGIQNKLDLKDKDKGL

SEQ ID NO: 33276 - protein, 52 aa, Homo sapiens
  misc_feature (1)...(52): Xaa = X or * as defined in Table 2
MNRKEMEMVLIHSSTPGNXXXXXXXXXXXXXXXXXXNNFIRSLTLCTAFSMT

SEQ ID NO: 33277 - protein, 82 aa, Homo sapiens
MAICIKRCLQLFLQIGTCTPITFNTAQVQGQMIKVLPSSTKCSARNNITFVPLAYNSQAPTKNTNLFLPNFWQQLGNTKSKF

SEQ ID NO: 33278 - protein, 156 aa, Homo sapiens
MKPGIFCKVRDTLKHERLEVSLAGKDECSSYWKDKQKVQREEDLEKTSILETGNGDWEATRGLPEECAGMRERDCAEAQAAGLPEEHISGGTHRQLNIQRNAPIGTSTPVGHRSAEAEGHGVWLGQLEESLGHQEPDSRGKPSPFWLPHLLRATST

SEQ ID NO: 33279 - protein, 141 aa, Homo sapiens
MAPEDLASGEGSSPASKMIPFCCVLTWQKGKKSKAGSLKPFYKGTIPIHGALGLQALAMEPGLSHTFKGLDSGALAYTMTFQLVSTHSVYTCSDSMDLQATLSILTKQTLTKWTKPCKDIEMNHISNCANGKQKDNGRVES

SEQ ID NO: 33280 - protein, 126 aa, Homo sapiens
MLTLLDGLPSGIIGLMSRLSPDVHLTHKYQPSVHQELPPWNAAGLYKKQNVLIPHVKCLPRNQVPIECSHCQGGGGSGDSVQEDDAGNPAGLLGGGVAWGEPAGPAGLEVFIMLSLLTRVVCPCPP

SEQ ID NO: 33281 - protein, 52 aa, Homo sapiens
MTEFLNALQKLNQDLLEHSWEEGNKQIPEGDNGGSRSLQPRSRGTDLGRELI

SEQ ID NO: 33282 - protein, 547 aa, Homo sapiens
MSRDHRLLCLLGLCCVADASKQPFRKSGIPRGYTLHLRPSGYNPNSGCGWRQSYYTMLPSKLHFIWNRCGWQAEPLNTAIQVNHADLLEHAGPRGGPHYRFPHSGDGENLICLRSTASVCKGPIQVQIGVLTRTVFGAAPLQTEPHGQALMGGQRTQDKSQTREMTEFLNALQKLNQDLLEHSWEEGNKQIPEGDNGGSRSLQPRCYSDMKPFTQIFLYNGVSPQSGHGSTVEDVEFAARHGVKQPHAQQSCRHYLAAATMIVDRTLLLAPGCFRCGIHDTLLSPTDPRNLARSDAVRGGKKILIDLFVPERQNWQRSHPKSPDNQDASTLQGANPVEILLHLLYRESQGFEVKQYSHDHAAQGHTDGISLPRNLKRARQTQRTLLQKLKRQIPETFRNGGIERNIRANTVGHWVEDEKSTERRPPQPTRRRKKLSQFHFMGPCDSYATVPIRETKQTSPGPTVSWHGPEALLIQRLIYIWYVSPHSPDQDLHWALRMSHWVLNSRSEHQLHEARTMTCLPGTWDRAQHNENTRYTRHFHESLCNCK

SEQ ID NO: 33283 - protein, 301 aa, Homo sapiens
MPPLSENGERVVLVIEDCFSYLFSTSFSYVKLKPDTGSLPTLLPRQLEAAKLDTAGSGWFRLSRAGTGADLGEVLGQLSGHWDNRPGKGRGISPEPQSQLRGRGVAWGFQRSRELWGLLSSHTLIWWVFLLSVSGSGNRPNQLGYFQVIYAQITEPFQAFQSIKFPVAESPGFREPDCEMMSLFPRTRKSGQHLTDACGASSSLSLHTIVIRLFLRPPSFQGIRKWRRLMGSDEYIRRWGKKVYLSAWKPEGDKGIKANPVQKKKEKKIGQMKKEDNVQIKELNMDTRNASSCKVKDQEPL

SEQ ID NO: 33284 - protein, 23 aa, Homo sapiens
MGFLSIRVQQVGQRRPMAAPSVN

SEQ ID NO: 33285 - protein, 90 aa, Homo sapiens
  misc_feature (1)...(90): Xaa = X or * as defined in Table 2
LQFIGNLMEFCGLIVSPSDASWLVSAVSLAFLYMWSLIPKEASLGFLSQSSKRKFKGSFYGRYRLDYEVLKQEVPFSTPLYGKVLEPPEX

SEQ ID NO: 33286 - protein, 50 aa, Homo sapiens
  misc_feature (1)...(50): Xaa = X or * as defined in Table 2
MWVLRCEVLCYSSXXXXXXXXXXXXXXXXXXXXXXXXXXXXXVVELSVVF

SEQ ID NO: 33287 - protein, 47 aa, Homo sapiens
  DOMAIN (14)..(42): kw TRANSCRIPTASE REVERSE II ORF2 domain identified by eMATRIX, accession number DM01354A, p-value=8.457e-15, raw score of 11.77
MMNVTIPHISILTLNVNGLNAPLKRYKTAEWIKKSTNQVSAVFKRLT

SEQ ID NO: 33288 - protein, 199 aa, Homo sapiens
MAPLPELVLAMASLLETQWPLGRRCTGRHGEAVPAADIPPQPPLPVEAAPGAGEKEATGLTCDTKAISIRLALLDLFWRDGNSWNRVRGSWKPNKETLMPPLVPSVPLTGSSGSPQSVVLNLTSSICIPGNSWEMHMPCPAESDTLVLSSLRLYKPSRGFRCMLKFEHHLNQWCIVPVPGFLLASSPFQTIFHRFSSYV

SEQ ID NO: 33289 - protein, 198 aa, Homo sapiens
MTEEEEWKPMDPSKMRCSFFQNGKESEKEKVPTRSLLAQVIIPLVNYRGDGSDATLQNADPFVGKAGLGFVDDSPLKEVRCQRGLMDNVHKSVCEKTKKGEAVPALCILILDNPSSCYQPFLAYPRYVKPSSEIPSILPWKENIELGKQATNNSFTEYMLNCAGLDPCHSMCGSRTKIIIITCELARNAESQAPPHTY

SEQ ID NO: 33290 - protein, 292 aa, Homo sapiens
MVAYDHILALNHLYMCIAGCQQMIHETQQTDALVGTGNRRIERHGGIRCKNQRAWAVDSGSNYDQGHEVQQIPRLGEIKAWFWHIDITFSKSRFSDSLQTYWIRPSKGGAQPSVLQGALQRPSLCVASGEFVGRGLHNWGLLRDSHPMTIWHSSELELPCIFSQEEEEGGTTPPSAQNIGIEWRHNKRLSPGSNHKMIKHFHSKCRTVILPLKIVPECSAEGLSSDPECKKAMVCLMEKIAVLDKPCSVIFPVSPSASMRWLHCGSLSNEVPAAAADNDDHKDNNTCTAPAF

SEQ ID NO: 33291 - protein, 120 aa, Homo sapiens
  misc_feature (1)...(120): Xaa = X or * as defined in Table 2
MLELPTIYRKVYDQPFHSSALEKEEALSNPGALDLPSLTSLLSEKAKEFLMENRVQSFYQQELEMVESLLSLANQPVIHSACSDQVNFKKDTTSKAIHSIFKNAIQLLQEKGLVFQKDDX

SEQ ID NO: 33292 - protein, 184 aa, Homo sapiens
  misc_feature (1)...(184): Xaa = X or * as defined in Table 2
XANKRTIEQKTKIEIGDTIRVKGSIRTYREEREIHATAYYKVDDPAWNIQIARMLELPTIYRKVYDQPFHSSALEKEEALSNPRALDLPSLTSLLSEKAKEFLMENRVQSFYQQELEMVESLLSLANQPVIHSACSDQAGTYQDLFDSAVKRPVGQIHEPVGLGVVLRCRKVNFRRDTHFQGNS

SEQ ID NO: 33293 - protein, 137 aa, Homo sapiens
MSESWITFGRGNLQIMVVTLLGRQEVEVGLPACVPGDGIVLQKTARVLYSLYRIRTRAGYPDLCDCQLSCKKHFTFTTWQAGGRRKGAGMSIRPLRGPSCDQPSFFLNHLEMVFIVRHVFVTMKASCLTQVEEMIQQ

SEQ ID NO: 33294 - protein, 68 aa, Homo sapiens
MAKHPSWICSLGSNTFPALTPFFFVVLAFLPENWLCLPTIATLLSDHSASFPWAYKGILCPSLYCVTL

SEQ ID NO: 33295 - protein, 116 aa, Homo sapiens
MRTARAQHSEEVRRRNTSITALGRNSTARAGGQQPPGKGQGSLDRARACQEAADNVNQADKAEESLVAFHNKGCYATHWDPKTEATQPLPLRRAVQFERQMRKQTMTVTHNKQKME

SEQ ID NO: 33296 - protein, 125 aa, Homo sapiens
MPSVIGFSTGPAKELCEGDTLDRAYFLALGTDPWSSDAHLKSGLSCPHGMRNVSRQKGLDLWGLLPFIPFILGEGPCQPPRSKRNVWAWENGKQLHLTLSLQLMILDEVKPPVSQFPYIKPQRSL

SEQ ID NO: 33297 - protein, 36 aa, Homo sapiens [sequence omitted]

SEQ ID NO: 33298 - protein, 102 aa, Homo sapiens
MTLIRNESEQYCNLDEDVDVDNTPISNALAKLQGIALKALHTLFKNILQPFRQRVGPSGASQKTEGFLLREVAIRTLKEVMLAHFIGKRIHHEEEKARRRLP

SEQ ID NO: 33299 - protein, 38 aa, Homo sapiens
MCPEAQLVGVLGCARTRHPRRRRQQQQEEEKDEEEEED

SEQ ID NO: 33300 - protein, 1 aa, Homo sapiens
M

SEQ ID NO: 33301 - protein, 334 aa, Homo sapiens
MAGEASRNFQSWQKVKGKQARLTWPEKEEERDAGGARRLRGAQSGAHRGRRQRAGERGEARAPAAASARLAGRGAGGVSPGGGIPRRLGRLPPDLAARCPALCTPLLRPSFPVLPPPALASESRLSPAPCSSGCLCRRLVSGLGALPGVPQGASARCGLGRRRRSASPPPPPRLSPPPAAAAAAAAVGAGSARTPTPPPAGPRGTELALSSRLGPGQKRGKFAGECPLCCVERGVGGRRLGASPPPAQGVPAWQAGARGKVQQREGRVSRDGSRGARAETRTRRFGPDAGSRRRGPRLPCPPPRPRRQEQSLAVSERLAGVQMVLKHLKLTGKG

SEQ ID NO: 33302 - protein, 125 aa, Homo sapiens
  misc_feature (1)...(125): Xaa = X or * as defined in Table 2
MIQAYLRPXXXXXXXXXXXXXXXXXXXXXXXXXXXXXXXXXXXXXXXXXXXXXXXXXXXXXXXXXXXPGAVIHVQFSCRQRSPQEAGSGCASRDLCRRRAVRGERPAFSGIGCHGGAQPSLVFSG

SEQ ID NO: 33303 - protein, 96 aa, Homo sapiens
ISPKGNGVVSSIGYRKKPGWAGRRHDNRYRKRRVVPPGQPYAGKGLEMQAALEVTARYCGRELEQYGQVCWAPSQNPGQRDCHYLKMSIAQCKILP

SEQ ID NO: 33304 - protein, 81 aa, Homo sapiens
  misc_feature (1)...(81): Xaa = X or * as defined in Table 2
MTYSNYFIFEDEEMEVQIREGCHHQLVSQLRASHHKPACFGVLVGGAAEIHTGYAFGCVYQPQPRLPWLKVAEAEGFDYSX

SEQ ID NO: 33305 - protein, 255 aa, Homo sapiens
MVSWAASELGALSPSCSSSWLKGVKVQLGLLLQRVQAPNLGSFHVVAGPAGAQKSRIEVWEPLSRFQRMYGNAWMSRPKSAAVEETSWRTSARALQKGNVGLDTAHPPESPLGHCLVELKGPENYHPATLPPLVPRCSPGTSRPLSGPICRVRAREPPPPLKPDPTNFSTNTIHSFFSGHSLRLHPGQLPPSHSWRLTKRARPLLSGGNSDTPTPDLALHPSRACARRARAPAHFPFAADTDTPLQLEPITVLGV

SEQ ID NO: 33306 - protein, 211 aa, Homo sapiens [sequence omitted]

SEQ ID NO: 33307 - protein, 22 aa, Homo sapiens
  misc_feature (1)...(22): Xaa = X or * as defined in Table 2
MDAELAEVRALQAEIVALRRAX

SEQ ID NO: 33308 - protein, 137 aa, Homo sapiens
MDAELAEVRALQAEIAALRRACEDPPAPWEEKSRVQKSFQAIHQFNLEGWKSSKDLKNQLGHLESELSFLSTLTGINIRNHSKQTEDLTSTEMTEKIQYEVQDHPAPRSIQMAVVPDDHNLMRGPEQGHPTEWLQNS

SEQ ID NO: 33309 - protein, 184 aa, Homo sapiens
MDAELAEVRALQAEIAALRRACEDPPAPWEEKSRVQKSFQAIHQFNLEGWKSSKDLKNQLGHLESELSFLSTLTGINIRNHSKQTEDLTSTEMTEKSIRKVLQRHRLSGNCHMVTFQLEFQILEIQPPQGSTDRTEARQWMSCHLGPATPAAVATLCLLTDSVGTDPDLNSILSQYSHPHVMKA

SEQ ID NO: 33310 - protein, 1124 aa, Homo sapiens
MHGLNSQSPSLKTGPRHRTVSMRGSNGAEAGARERPTSPGFGPQQRGGTPEPSGSSSMTHASDGEQRRALNAGSLRDSIAVPSLSPKLRPGEAKINGMHATAVPSQAEGRHQQSIMGNRLVSSLQPEGAVLGPVATSQINQNVEIQRGRLRDDIKEYKFREARLLQDYSELEEENISLQKQVSVLRQNQLLPRRGNTDQHVPALTLLTMALALTAALPQNPVCRKNKSLTKLLGVVSAEQLVVRNRAFSFPRMLAFQFDITDQALRDSQVLDEEKYPDAVYLSEGPSSCSMGIRSASRPGFQKAHNDMFYCFFRFELVIVWRIQIDEDGKVFPKLDLLTKVPQRASREECGVLVRSMPAENKRPKAATLKFLTRFNVFFIALELDKNRAIETAPLSFRTLNRDLISRPFSIVKICERVLSQTSQGRHDYAAAAVSKTGQKRIHSSGTRGSGAPHSPGCHWQDGHRHQQACLTGELTQGVHAQEGVWVLCSTAGLELRSRPKVSLSTTISTQTNNEKGKQKDMPYQFLMYLLNTPVQFAEFVMSSLREKKRHYKLNGNVQQVQQYRVAMTAKDCSIMIALSPCLQDARTFSVAIKEYLKLEESLPYVTLASPSNRHRQQPPHERSNSSKLKTTPGSVYLTVAPSHYRLPDHKGSGQDRTLGCPRRVMCRMHSKALKAGERGGRPRYNFHVDKTLMLLFPPTFELFQVEFEGLKHEIKRLEEETEYLNSQLEDAIRLKEISERQLEEALETLKTEREQKNSRNGELIYGCKDARSPVADWSELAHHLKPFFFPSNGLASGPHCTRAVIRELVHVITRVLLSGSDKGRAGTLSPGLGPQGPRVCEASPFSRSLRCQVPVQGAVLACGDARMAEPRMSPAVCAGLCLPPRSLIINMLSFSPDVLGKNTPERSGLPKGCLLYKTLQVQMLDLLDIEGLYPLYNRVERYLEEFPEERKTLQIDGPYDEAFYQKLLDLSTEDDGTVAFALTKDSEDGTEWVTVGCISREQVFASRLIYAPERKPQRHKDVGIMDECGLGVTNGCTWVWGSGKTVDMDSYQYLDSSHTKSWGPGTVVGARYLIHITDVPCLISYKSCAAQKALSHPMFAYCRKNITVLLLVLTANDHADLLT

SEQ ID NO: 33311 - protein, 216 aa, Homo sapiens
MDAELAEVRALQAEIAALRRACEDPPAPWEEKSRVQKSFQAIHQFNLEGWKSSKDLKNQLGHLESELSFLSTLTGINIRNHSKQTEDLTSTEMTEKSIRKVLQRHRLSGNCHMVTFQLEFQILEIQNKERLSSAVTDLNIIMEPTECSELSEFVSRAEERKDLFMFFRSLHFFVEWFEYRKRTFKPSQGKVPRCRVPLGGALLLLHGDPQPQPARV

SEQ ID NO: 33312 - protein, 137 aa, Homo sapiens
MVIIYLSAGITSKDSSEEDKKATLQVINEENSFLNNSVMILTYALMNDFLEPSGEPRTGVGTLDGVDGHKRPDGVTGLKELAFLRDLAETKSRESTVCQNGTALPVIKGSMMVLNQVEQPGDPQWAGSYTNLPQPDD

SEQ ID NO: 33313 - protein, 117 aa, Homo sapiens
MKNFLEEIKSRSEAAEEETSEFRDNLKNGNTEGNKRLQKAKKLLRDMWNNIKESNKMSSYGHVARSDESDVAERMRRSSEQVPSLYMFPPSCVLVLRRTRHARTTHQGWRSNKIEEA

SEQ ID NO: 33314 - protein, 158 aa, Homo sapiens
MAAAQTPSKAKVLAAFLFATKAKNKPREGRRPESGVPPGKKADLETALLGRSSELVIKYLRARKGSQEPGPEMSLESLFQHIIFTEHQAEESRRLMREASYGHVARSDESDVAERMRRSSEQVPSLYMFPPSCVLVLRRTRHARTTHQGWRSNKIEEA

SEQ ID NO: 33315 - protein, 119 aa, Homo sapiens
MGKGDSGLQNGSDPPIACTVLMEKLQTLNASHESSRSGAVPYKATGMELSKAMVAHLLHQHDLDSGALLKRYQKMLNQFWNWITGRGWNSLEGSEEDRKMDLLNGFDKNADSDKNNKVQ

SEQ ID NO: 33316 - protein, 71 aa, Homo sapiens
MATHPSLLVCQVGLLGAQVPSVRAGMPQSRRQTEGAQGMVRNEEGGSLRLSHHQACKATHTQQWTLEVTAQ

SEQ ID NO: 33317 - protein, 318 aa, Homo sapiens
MVLLVASDSFVVGTPSAAEDDPVAWPQDRTQAPQKGLETAANLREGNTHHRGPTIPCSPRRRKHPPPGTHDPLLSLEGTQEAAAAGRLCGNPETSGDGSGPGDRARPCLKKQQKKYQPHGDYLLLASSLNNYGDEESSDVPGLSPEVQTGWATLTLDLIMIPGVLFSGQVRKPGGEHALRSQGSQSQRLKGPCVRLQHNCRFSEKNLQLRPGSAQSSEWSGQQGMWLEEGHGHPPLPPRVPEYGVCENLRKLEITGVSCRDVYAKRINPRVKSGRFVKILPDYEHMAYRDVYTCRMYLLRALASAAASTAKNCMGRAL

SEQ ID NO: 33318 - protein, 315 aa, Homo sapiens
MADLEQLGLNPGLEGTHHLHHPGHMGAKLDKQHPHDRVPTRKSDPACGMGTAVAHHLAPGWLRAAVTQTPFKFCQWKLCSCVNIAGDSFSPWYGGISVAHPEPTVTASPTTQGSALPPGEENPSEVVLCAFSKREAQYEHSLRPLKEDRTVYRVGPNKRGKRRTVLKHMQWKLIKGAYRRGQLLANNQAEHKVVSRKINQDCFILEGGTAWKQHALSESSRHALAQFFIVMHLPAQPGALRAPLLLTLAALVHVGVQSRGSRSRFLGCLEPIERSFLGVLPRSWERSVLCLPVNSLQGACLRLPAAADSSIFKRS

SEQ ID NO: 33319 - protein, 88 aa, Homo sapiens
MSPASLHLIKQPFEANKAIFPFFVWSSQGKKTIVECMYIGSLIHFNGYGSNISNWVSSSSSLFLFFSLLFFFLLFVLVPLSTSLVDFA

SEQ ID NO: 33320 - protein, 31 aa, Homo sapiens
MYSQPQANLGSLEHKLGRLHIRILGHGSGRL

SEQ ID NO: 33321 - protein, 59 aa, Homo sapiens
MYSHPQANLGSLEHKLGRLHIRILGHGSGRLLRGEAEAGSGRVCDLEQHQGGEEQKWRR

SEQ ID NO: 33322 - protein, 170 aa, Homo sapiens
TGSGRNLGGRETWEATKPALRTTASTGFAGVECIRKELRRLPLELQDPALRLGSLEHKLGRLHIRVLGHGSGRLLCGEAEAGSGRVCDLEQHQGGEEKKWRQSKHSLTAELPRPQRAERCPHASAPSFPLEEPLRICASQKWGKLAQGAGADGGGTAGLAVEPPPARAAG

SEQ ID NO: 33323 - protein, 118 aa, Homo sapiens
  misc_feature (1)...(118): Xaa = X or * as defined in Table 2
XVWPHEDARINGSKKKKSKEKKRKREEDEETQLDIVGIWWTVTNFGEISGTIAIEMDKGTYIHALDNGLFTLGAPHKEVDEGPSPPEQFTAVKLSDSRIALKSGYGKYLGINSDGLGX

SEQ ID NO: 33324 - protein, 226 aa, Homo sapiens
  misc_feature (1)...(226): Xaa = X or * as defined in Table 2
XAANEEFGGFLTKSHFTESGVPRGPGGSFSLRERALLPGVCSGGFLAASQRGFAPGRFPAGTLSQRHPFHEPADLPYVTNPCNVTLSVTHSCNVRPSVTHPGNVDPNSPAFLLNALGQISNVHIILYVAHGDVIIMSGAKWKEVYRLNHNRAMTAAILQIGTWCQDTNTCADAASVVFKVHSRTRRFLPTRKRISRGYWRSRPTQYDLGEDARKMNCDDPLLLNEW

SEQ ID NO: 33325 - protein, 180 aa, Homo sapiens
MGPQIRRKDWKKNRFEKQGKFDVTIRHASGEIKQLPYLRRTPLAATTHYGLAPESKGVGPLARWLLRRRWSAEIWNRDGDVYTESEAKYFKQLEMLERDYTTKSESTEYFAETWTLPGGLGGGPVLGRCLSESQVRRIKRPDAVRLPVLGEDGPSLPRELCGIRKRWCSFAFTGLSEIRL

SEQ ID NO: 33326 - protein, 85 aa, Homo sapiens [sequence omitted]

SEQ ID NO: 33327 - protein, 93 aa, Homo sapiens
  DOMAIN (51)..(79): Granins proteins domain identified by eMATRIX, accession number BL00422C, p-value=8.054e-13, raw score of 16.18
MEMQDYLRLFEGLPGEVWDPVQNQICMRSQGLRVEYNTPLSSREEEEEEEEEEEEEEEEEEEEEEEEEEEEEEERKKECSKAQCKHFPLSEVL

SEQ ID NO: 33328 - protein, 209 aa, Homo sapiens
  misc_feature (1)...(209): Xaa = X or * as defined in Table 2
XEHTLPIISVSGHVSVYCIPYVRGNLDLKECPRDKLEVDLQIVVKKSFALLLITLSYPTNLSESQPVGNSMGYEIQLLLQATFNIKEEKKATLTEPKTQCWINIYRGGGLSSQCKNDTSPKKVQSLPFSAVRRSRRQQFWNIAAAKESIWDCREQFERVIERGDEKALTNGGGFAAGGPGVNGPAGSLFAITKPGLFVEHGGGDDFGGS

SEQ ID NO: 33329 - protein, 45 aa, Homo sapiens
  DOMAIN (13)..(41): Granins proteins domain identified by eMATRIX, accession number BL00422C, p-value=6.170e-10, raw score of 16.18
  misc_feature (1)...(45): Xaa = X or * as defined in Table 2
MKEERRRRREEEGEGEEEEEEEEEEEEEEEEEEEEEVVLLTPGTX

SEQ ID NO: 33330 - protein, 40 aa, Homo sapiens
  DOMAIN (4)..(39): Troponin domain identified by eMATRIX, accession number PF00992A, p-value=3.418e-11, raw score of 16.67
  misc_feature (1)...(40): Xaa = X or * as defined in Table 2
XEDEEEEEEEEEEEEEEEEEEEEEEEEEEEEEEEEEEEEI

SEQ ID NO: 33331 - protein, 155 aa, Homo sapiens
  misc_feature (1)...(155): Xaa = X or * as defined in Table 2
MQAICTGQARALICMGGNFALAMPDREASAVPLTQLDLAVHVATKLNRSHLLTARHSYILPVLGRSEIDMQKNGAQAVTVEDSMSMIHASRGVLKPAGVMLKSECAVVAGIAQAALPQSVVAWEYLVEDYDRIRNDIEAVLPEFADYNQRIRHPX

SEQ ID NO: 33332 - protein, 144 aa, Homo sapiens
  DOMAIN (82)..(109): Protamine P1 proteins domain identified by eMATRIX, accession number BL00048, p-value=9.723e-13, raw score of 6.39
MGEIGQNKGATGLIQIQNPIKQSNLKVLKSSFWLHVSHPGHVNARGHADARGGLPRLWQLCSFGSAEYSLFGAFTGWCLVPVAFPGRRRRRRRRRRRRLRRRRRRKEEEEEEEEEEEEEEEEEEEEEEEEEEEEKIFLGHRVGI

SEQ ID NO: 33333 - protein, 263 aa, Homo sapiens
MMKLGTLSMSTLMSLFARRNSFPIPSSGNIPSLTHAAISLSNFQEINPVLPEATVMASPEVVARQNNVDSPQEPPPTPPFASRPITRLKSWWAPRDLTVETTVTQLHNLNTVGIIESRGGRGHVAALNSQRQGESQQRLLGFWSKALPFSADNYSSFERQLLACYWALVETEHLTMGHQVTMQSELPIMNWVISDPSSHKHTMLLPKLPSVDSQNALSTVMVFHTALPLTKALTLWLKKCGSGLMLMEFTGVTLFPIILKQLD

SEQ ID NO: 33334 - protein, 164 aa, Homo sapiens
  DOMAIN (43)..(78): Matrix protein (MA) p15. domain identified by eMATRIX, accession number PF01140D, p-value=7.488e-09, raw score of 15.54
MAGKQGRSEGASSWRLSSVLQLNSQYFLQGAQQCTFLAATAWKKRKEEEEEEEEEEEEEEEEEEEEEEEEEEEEEEEEEEEEEEEEEEEEEEEEEEEEEGEPFLLLLVNGVLIPGVRSCLDSTSQFSLTGMLLQEKSEIFGLAVCSPLIKRKGGHIPVLNTVPG

SEQ ID NO: 33335 - protein, 471 aa, Homo sapiens
  DOMAIN (64)..(92): Granins proteins domain identified by eMATRIX, accession number BL00422C, p-value=2.029e-14, raw score of 16.18
  DOMAIN (402)..(471): Integrase core domain identified by PFam, accession name rve, E-value=0.008, PFam score of 13.8
MIIIKTQKLTDAAKVVEKKKHLYTVVGRPNGYKYQEEEGEEEEEEEEEEEEEEEEEEEEEEEEEEEEEEEEEEEKEEEEEEEEAEEKKKKKEEEEERKKKEEEEGEGEETGNKELQSRDRDDLGGEEKVQPVWPYGGQFSYENLKPCSLQIVCTFVIAHILPLPILFLPILFTARSDVFHVKHCNPVCFVVLVKFDSSVKSRVRNGRLPLDVAEVNTPHESRTAMDSCRQPIVGPSDCLQKQTLSLKSAKIALSESLISCRERAETVKKQTSSYHTSEWCTCKERCMHSLARRRLCNGYRLLCKLLPLGPYDPDPADPMELEVSVEDRDAVWSLWQAPKATPVIAQWAHEKRGRGGRDGGYTWAQQHELPFTKADLAMAPAECPICQQERPTLSPRYSTIPWGDQQATWWQVDHIQLLPSWKGQSLVLTEIDSYSGYGFACTACNASAKTAIGGLMECLIHTILPLTKALT

SEQ ID NO: 33336 - protein, 107 aa, Homo sapiens
MGPQSVYELTENEEENVDVIQLAEINQIRFSGTWQNDQATYEQHAEERGPQGQCQALSTRRNAGATWKPVALHSQAQTNRLSVKWTNQQDVGGARYERKSRLPEPAV

SEQ ID NO: 33337 - protein, 125 aa, Homo sapiens
MEPDCQGSSPVLGCVTLDQATYEQHAEERGPQGQCQALSTRRNAGATWKPVALHSQAQMPNSVLLLQSIETLTPTWNTQLGESEGVLKANSGATLHKNRRFGIYKEEEEKEEEEGKEEEKEEEKE

SEQ ID NO: 33338 - protein, 113 aa, Homo sapiens
  misc_feature (1)...(113): Xaa = X or * as defined in Table 2
MEGRHSRPYLTEDCAEICQLTQTAVTDSCTEEKESHQIQITSSQLPKQAWQIAQLTAASCQLNSFLTAMPWAQWIGPVREEPIRQLRGHPTGLANAASLTMSPDLHGQPGFAX

SEQ ID NO: 33339 - protein, 157 aa, Homo sapiens
MHDKCLIKMELNLRVEEMDRNVPTDCNQVRYSPSFRHPLGFSEFIPSGCGGHLNVPRFITVIKSSSQHATWILKAQPIMSFRSWSKCQLFTPIQQCPRLCKQAVNSENGTASDLLKQNKQDTETTEVENSAVQTGSRHIPHTAQYENAGIEEQVAED

SEQ ID NO: 33340 - protein, 210 aa, Homo sapiens
MVARNLRLRARLPKFKTCSTVAAPAGLLFGASTSSAENENRASQVVCSQNTSSMMYTARCPEKPAGIRSQCLLLNPGALWTGKNDLLLIKIQPVSDPPVKRLPVTCFHLPFAQQVIPLPELPKHSLHSHTQMRVQTSTSAHMNACTGFPQSVPYPVLPRCWRSRFPLCPSMDTLMQLGMSLETLTDQSDFWALSALQMEKASEFSMELQA

SEQ ID NO: 33341 - protein, 93 aa, Homo sapiens
MLLQLCSKETTRAVKIYRGSTPVWGRQGKRTKMMRMTLRSLFRADLKQPFGHAISFVEHSGLSICLSVYVSDYLSIYIFSFFTATYTFFSKFY

SEQ ID NO: 33342 - protein, 44 aa, Homo sapiens
MSGWSIILSLGKGSAKFSCKGPHRKYFRPFGLCHLCCYSTAFVA

SEQ ID NO: 33343 - protein, 78 aa, Homo sapiens
  misc_feature (1)...(78): Xaa = X or * as defined in Table 2
MRAKEINSASLPCLRKVAIFXPEGACFPLTLTLTMCLEEPFWALALAQPFFARGREGKGGRLSVPRAVQRLCXKVISS

SEQ ID NO: 33344 - protein, 122 aa, Homo sapiens
MYEETAYGTQRLNVNTTVAQTRIENTSPSASGAMSALPRASSKVFQQTGLSEKQLALGERGDDGRCHRPENQLPLGIGEMMNAVTVRREPKWPVKPQEWAYKGAAGGASESSQASLGMDHLL

SEQ ID NO: 33345 - protein, 158 aa, Homo sapiens
MSQEKLPYFHPGRGLFSSLLLYFNHVPGKEPFWGSLHLPQPFLLPGAEKEWERGVGLSVAQGPLQGAGLLFHPSAEGSPLALAPCLCSHLLSWKRMVPFVLKLCDKSHLQVRFCTCFLRNSAWGAFLEVTGGWGALFACRTSGRLICQAGWFYCFLNF

SEQ ID NO: 33346 - protein, 85 aa, Homo sapiens
MISSLGAGEVYIPYSVQFSKSFVCRTGSHLYIHTLWGKPRSSYTASWVYFPKHFLPPCNLPSTFCFPQLPLFNLVGHGRCCCRFR

SEQ ID NO: 33347 - protein, 51 aa, Homo sapiens; identical to SEQ ID NO: 31327

SEQ ID NO: 33348 - protein, 124 aa, Homo sapiens
MELGRAAQPLQGNSVALGGTAWALPSAWKPSVSSHSTFTYTPTSTLFNLCSHFAQQVRFSDGSFSISLPGPFPGTSMPELSSGPTHAPGTGGTVGSGTDHSPIVETAVKKQVSYITPGDAIAWC

SEQ ID NO: 33349 - protein, 113 aa, Homo sapiens [sequence omitted]

SEQ ID NO: 33350 - protein, 100 aa, Homo sapiens
MGTHYCASGYKSYLQKTVFIPAGSKMLPCEHWQQNRTQLEQGPPLQPSEDEARAGVFGKLLSPELPGTGSHRCTSRRPRDGWSSALSTAARGLDGSVNGA

SEQ ID NO: 33351 - protein, 56 aa, Homo sapiens
MLQGLELVRALNAAKTLSEEERRPGRKSIRGTTLTSLLLPPVSHQCSHWLKPTRSH

SEQ ID NO: 33352 - protein, 745 aa, Homo sapiens
MSFLYELLRLLKFAFLKKFKGIYMQYIEYGQQSRDPPVKMQGSITTPGSIALAQAQAQAQVPAKAPLAGQVSTMVTTSTTTTVAKTVTVTRPTGVSFKKDVPPSINTTNIDTLLVATDQTERIVEPPENIQEKIAFIFNNLSQSNMTQKEELVNNTELVQSYRQQIGNVVNQANLQLFWNMYNSRRDLDINRPGTVPNAKTLRCPVMLVVGDNAPAEDGVVECNSKLDPTTTTFLKMADSGGLPQVTQPGKLTEAFKYFLQGMGYMPSASMTRLARSRTASLTSASSVDGSRPQACTHSESSEGLGQLNLKFEIEVLCKNLALDINELKPGNLLKDKDRLKNLDEQLSAPKKDVKQPEELPPITTTTTSTTPATNSTCTATVPPQPQYSYHDINVYSLAGLVPHITLNPTAHPQLKQCVRQAIERAVQELVHPVVDRSIKIAMTTCEQIVRKDFALDSEESRMRIAAHHMMRNLTAGMAMITCRNLAHEHIYQLKKQFCLSPSYCFPTTKRNDGSGSCSNLSSGQLFSSFKVGGVDPKQLAVYEEFARNVPGFLPTNDLSQPTGFLAQPMKQAWATDDVAQIYDKCITELEQHLHAIPPTLAMNPQAQALRSLLEVVVLSRNSRDAIAALGLLQKSMENGLNYMAVAFAMQLVKILLVDERSVAHVTEADLFHTIETLMRINAHSRGNAPEGMDITTRQKVNKKREGFNDTINQPATPNRQSIEHLTQQEQNMQSSQMHMEHSPE

SEQ ID NO: 33353 - protein, 89 aa, Homo sapiens
MLYLFAEGNTEAIQEQITRVLLERLIVNRPHPWGLLITSIELIKNPAFKFWNHEFVHCAPEIEKLFQSVAQCCMGQKQAQQVMEGTGAS

SEQ ID NO: 33354 - protein, 251 aa, Homo sapiens
MSGSKYVIGIGVGAGAYVLAKFALIFPDLVEGLVLVNIDPNGKGWIDWAATKLSGLTSTLPDTVLSHLFSQEELVNNTELVQSYRQQIGNVVNQANLQLFWNMYNSRRDLDINRPGTVPNAKTLRCPVMLVVGDNAPAEDGVVECNSKLDPTTTTFLKMADSGGLPQVTQPGKLTEAFKYFLQGMGYIAYLKDRRLSGGAVPSASMTRLARSRTASLTSASSVDGSRPQACTHSESSEGLGQVNHTMEVSC

SEQ ID NO: 33355 - protein, 246 aa, Homo sapiens
MDASQRYKIPGSETKDFITHSKSTSQSCIGLLRFSDITQVPQRQCKGPMMESNTELGTFATSLASGKKPGLFLVGGVTASLMAAHGKYSPAKQPGEEQEMKASICVSPAERPAAGPLICPPTVLQAGVKRVTREAPRPRFKLSYDVSMSVMTEQEGEEPAPVSSSAERSEHATYFMRLNRRWKWSIQHRAWHMNSSSAPPPSPSTEYSTPFQQTLQQGPCGIAQMLSDKHLQVPGASAFGAKPNPE

SEQ ID NO: 33356 - protein, 334 aa, Homo sapiens
MAIGCPSGKASSLAAQGFSFGAPKPITQRYGGKNTPDQPVTEDNMLLPSPEHASLQVLPEPLFPKLTNGDKYTYPKIRLYGFNEVKCMQGLGTRSPESEDSCERPPVCWSGASIPHTATAKRNLWEEGERELEPVGRKTTSNNFTHSRAKLKCPSPESPYLYTLRNSRLLPDQAEEAPEVLYWAVPVAAGVGPWENPEDLYPVPCSSGLQCLFLYNGNSMHSPAFSYRLENVVTKSHIPAYAPGLRQCNDKGNPYTPGLRQYNDKGAESRVGEKCINNYQVRERRAVAAASAAEKPLFPLLGRRVCADKMADGELNVDSLITRLLEDVKAIQQS

SEQ ID NO: 33357 - protein, 230 aa, Homo sapiens
  DOMAIN (84)..(112): SERINE/THREONINE PHOSPHATASE FAMILY SIGNATURE domain identified by eMATRIX, accession number PR00114E, p-value=7.353e- 30, raw score of 17.75
  DOMAIN (84)..(203): Ser/Thr protein phosphatase domain identified by PFam, accession name STphosphatase, E-value=6.7e-40, PFam score of 141.1
  misc_feature (1)...(230): Xaa = X or * as defined in Table 2
VRERRAVYADFAAEKPLLPLLGRRVCADKMADGELNVDSLITRLLEVRGCRPGEIVQMTEAEQPLWMRRSSVVMEDCHQTCNLMEQIRRIMRPTDVPDTGLLCDLLWSDPDKDVQGWGENDRGVSFTFGADVVSKFLNRHDLPFRFVELIRSWKMDMNLLLNDCRQPYFQPQITCGEFDNAGEMMSVDETLMCSFQILKPSEKKAKYQYGGLNSGRPVTPPRTANPPKXK

SEQ ID NO: 33358 - protein, 512 aa, Homo sapiens
MVVGLDFGFRPLWTLAPTLWVAPGLAQPCEDACSSFAFCHYCKFPEASPAMLPVQPAELVSVALNPSTICAFCPPGSWARLPPNAGMPTTAVLLDAILPSPQASASLLLLWPSHISAWFLDTDAVISEGDDVTGSRFGVHVLRSQKETMSLAGGLVSMSSDLRRERCHQQQISEGDDVTGRWFGVHVLRSQKETMSPAGGLVSMSSDLRRRQCHRQVVGYPRPQISEGDDITGRWLGVHVLRSQKETMSPAGGLVSMSSDLRRRRCHRQVVGCPCPQISEEDDVTGRWLGIHVLRSQKGTMSLAGGLVFMSSDLRRRQCHRQVVWCPCPQISEGDNVTGRWLDIHVLRSQKGTISPAGGWVFMSSDLRRRRCHRQVVGCPCPQISEGDDVTGRWLGIHVLRSQKGTMSLAGGLVFMSSDLRRRQCHRQVVWCPCPQISEGDNVTGRWLDIHVLRSQKGTISPAGGWVFMSSDLRRRRCHRQVVGYPCPQISEGDDVTGSWLGVHVSACFHSQ

SEQ ID NO: 33359 - protein, 398 aa, Homo sapiens
MSPPAGLVSRSPRSPKGDDVTGRWFGVHVPRSSEGNDVTQQQVWVSMSSDLRRRRCHRQVVGYPCPQISEGHDVTGRWLGVHVLRSQKETMSPPGGLVSISSDLRRRRCHRQVAGYQCPQISEGDDVTGRWLGVHVLRSQKETMSPAGGLVSMSSDLRRRRCHRQVVGCPCPQISEEDDVTGRWLGIHVLRSQKGTMSLAGGLVFMSSDLRRRQCHQQVVWCPCPQISEGDNVTGRWLDIHVLRSQKGTISPAEAAIVVVVCVPISNERASEAVGEDWSQSQHMLNGGLIFGQAAEGKVQQTLSGPMASYPCCPISKGPVYLQAGFHQQAYDRIRPKANTHGSIQTNKKPVMMEERLTWQGLKLPANSHTYESPWKQIFLHQSNLRMTAAPASTSTTS

SEQ ID NO: 33360 - protein, 108 aa, Homo sapiens
  misc_feature (1)...(108): Xaa = X or * as defined in Table 2
MNKNQPGKGNSWGQGKGIFLKSVSRXGXGCPAWGPLPRSPPRARGLNSLGQREGQEKSFWRGLWLACCLLDFWTRSEGKCCLFLRLWTQCPMPSDRDTLAFENLLASF

SEQ ID NO: 33361 - protein, 172 aa, Homo sapiens
  misc_feature (1)...(172): Xaa = X or * as defined in Table 2
XTSKSWLHGSIFGDINSSPSEDNWLKGTRRLDTDHCNGNADDLDCSSLTDDWESGKMNAESVITSSSSHIISQPPGGNSHSLSLQSQLTASERFQENSSDHSETRLLQEVFFQAILLAVCLIISACARWFMGEILASVFTCSLMITVAYVKSLFLSLASYFKTTACARFVKI

SEQ ID NO: 33362 - protein, 53 aa, Homo sapiens
MVARHLLLQCPCPVLTVVMQALASSHWEYGDLCGDTTESFISILSSLSNAWHT

SEQ ID NO: 33363 - protein, 190 aa, Homo sapiens
  misc_feature (1)...(190): Xaa = X or * as defined in Table 2
XCSTELRGFLPSTAHAQLTRRLSSENIPCGGNLSVEEKPQPMEGTPECRREITGGSDCGFLRRCVYASGHLSLHPTLKPAMGQRLQLPSSLCRCAQATWETSVGSPAFTQPEIIPLPKGSPSANKVLFFETGTLRGRLGTGADCQTQQMGFIQASTVSRDDPRSHGRGPWSAGSVHVVSQPDVFGDSAKA

SEQ ID NO: 33364 - protein, 76 aa, Homo sapiens
MGRRLPWPYVVFINPSQSLFLNQPQALLTPPQHVLPKGPNRYNDLILTHQYYSSKIQIKNYNCNANIYFSRTRGST

SEQ ID NO: 33365 - protein, 34 aa, Homo sapiens
MASKLPKIVIQNLGTTLKVPHMDSLLPSSLYNWM

SEQ ID NO: 33366 - protein, 497 aa, Homo sapiens
  DOMAIN (235)..(278): 1 kw MIND INHIBITOR DIVISION CONTROL domain identified by eMATRIX, accession number DM01756B, p-value=4.822e-15, raw score of 22.91
  DOMAIN (200)..(307): ParA family ATPase domain identified by PFam, accession name ParA, E-value=6.5e-23, PFam score of 89.5
MKLMETLNQCINAGHEMTKAIAIAQFNDDSPEARKITRRWRIGEAADLVGVSSQAIRDAEKAGRLPHPDMEIRGRVEQRVGYTIEQINHMRDVFGTRLRRAEDVFPPVIGVAAHKGGVYKTSVSVHLAQDLALKGLRVLLVEGNDPQGTASMYHGWVPDLHIHAEDTLLPFYLGEKDDVTYAIKPTCWPGLDIIPSCLALHRIETELMGKFDEGKLPTDPHLMLRLAIETVAHDYDVIVIDSAPNLGIGTINVVCAADVLIVPTPAELFDYTSALQFFDMLRDLLKNVDLKGFEPDTSVSTVTLPSLTLTLNLLPPSYKDPCDYIGPTWTIQDNLPISRSLTLTTSPKFFLPSERLSSSWLDVRHIEKYVDQGKSGTRELLWSWAQKNKTIGDLLQVLQEMGHRRAIHLITNYVRHAVTKSATATATGYQEVLNSEQILDLTKAPEVFAIPIQGNRLRGVVLVVGRFGVSQLKEEHPLLGLCTECLDSEGTNKQKQA

SEQ ID NO: 33367 - protein, 111 aa, Homo sapiens
MPRGIFVVRHAVTKSATATATGYQEVLNSEQILDLTKAPEVFAIPIQVDSSMDQIKSEAPGDALRVSESWGHLNAGVCRWARRRDNSFNRMIIGCTLRKYGESYTDDEFVT

SEQ ID NO: 33368 - protein, 84 aa, Homo sapiens
MDGDLQGPRIPRRSVLVVHETGLRTLIMDHTARGDTGNPLLLGSGGRGEWQPPQAPFIAQVPRNKLSSKKKGDTVEGKLPPTQP

SEQ ID NO: 33369 - protein, 58 aa, Homo sapiens
MNTVLSRANSLFAFSLSVMAAPHLRLLHHHRLQRPGASPGGWHVSRIMLKNVEDFTGP

SEQ ID NO: 33370 - protein, 114 aa, Homo sapiens
MHKSTNSDTSAETLNSTRQGTGAVQMRIKNANSHHDRLSQSKSMILTDVGKVTEPISRHRRNHSQHILKDVIPPLEQLMGEKEGYLQKAKIADGGKKLRKNWSTSWIVLSSRRN

SEQ ID NO: 33371 - protein, 220 aa, Homo sapiens
  DOMAIN (41)..(112): PH domain identified by PFam, accession name PH, E-value= 0.0072, PFam score of 15.3
MDSLKWPVNLRFCKIDGVCQAKNWKKNVEAERNKCKGRQMVEKEGYLQKAKIADGGKKLRKLGTNQKVWICVEHTLNGPRKNRAERMSFRKNWSTSWIVLSSRRIEFYKESKQQALSNMQGLKNEASTLLATLEMLPCYQDTQHIDFGSKEATSNSQSWCLCLIHERTHQNLIQLSGSSGLGRVALELQKTQPRATPPSEHLGKRQVFIMLVEHTLWHLL

SEQ ID NO: 33372 - protein, 149 aa, Homo sapiens
MSDKLLSQHSSSSLIRIGNQMQAFPATVMRLAPSHLIGWQGVAGGVCGTRKTSSLETFPEGKEPPLAGPFPLQSKMLISEELEFLQMQGKILANIIGYTARGERMAKKSIWPQNILKTTSFENKLKALYKLQGVTHMPVRDPCSQGATW

SEQ ID NO: 33373 - protein, 146 aa, Homo sapiens
MLTLLRVPRLNKNSKNSNGQELEKTLEESKEMDIKRKENKGNDTPLALESTNTEKETSLEETKIGEILIQVLTEDMVTVLIRACVSMLGVPVDPDTLHATLRLCLRLTRDHKYAMMFAELKSTRMILNLTQSSGFQMGLLPWSPFS

SEQ ID NO: 33374 - protein, 151 aa, Homo sapiens
MRRRDVDGVLRWLLGDHFLTEEKMWSGLLPPGLNESDAESNSEDEATLENSGLNLQEDKEDESIRKTEIIDFSTDEPKTETESNVNAYEECPSGIPIDMWNSGLEKRIDQAVEEWNIEKAEELSNQLATRELGVKIAKAVACHNFVKAKKE

SEQ ID NO: 33375 - protein, 85 aa, Homo sapiens
MFFLLGLKQRRDGKPKATWDTCNLPECFKTFVDSHAQFTENVLLPMLICQKIDSTKTKISIKFGILIISSFQPFFKDFGLLKRIK

SEQ ID NO: 33376 - protein, 156 aa, Homo sapiens
MWSGLLPPGLNESDAESNSGRWKLRWRTLDLTYRKIKRMRASEKQKSYISYTDEPKTETESNVNAYEECPSGTPIDMWNKFQELHKKHSEQKSTSSRFRGKRRTRSRKDKLKNVKELHSEPSSNETQWKELTQYFGVHDRFDPPVKRKKVEKSGLE

SEQ ID NO: 33377 - protein, 38 aa, Homo sapiens
MSELVSACWVRSKWCSFEFFYQCSRMIFSGTGGICLFF

SEQ ID NO: 33378 - protein, 201 aa, Homo sapiens
MPDILKVSPSSAFVLLHQGFLQQFLPLVYSQTADNSGGDRPLIGVLMIVDTQSAPFSGHTKHGNDTRRWKISLNRLWKTLSKWQLHFTRALAAHKNTHLPPVLSDMSELVSACWGPSDQEQEQGAETSQPGSAPDRMPVLQPCFCIAASILGTHDSMTWSPKGAQRSLKALLTGKGAISAHGVGSDESLTQSETLPSVTRP

SEQ ID NO: 33379 - protein, 160 aa, Homo sapiens
MFAVYHGQGRLRRSTHCRTQYRHRMVPRRLRAKSFGVKWTTLKGHTGLVNIYKEFLLRVVDLEQYEQEARTTLDSPKPTCLCILRPVPCPTTITATTMPKRKAEGMLKEIKPSHWLPVCQAIWTFRDATEMAPVKRAVVPFLIVDLQINSAVFISLPDVS

SEQ ID NO: 33380 - protein, 84 aa, Homo sapiens
MLLAHRTLHCCFWGKGHMSLIECLQSWIDVEKTPFPSSFERLPLGSQEEGFPDFDTHGHLGTKALWYRKTNLFLCPLLPFHLSA

SEQ ID NO: 33381 - protein, 99 aa, Homo sapiens
MPSGAMRRGPPSSRSQNGRPTDSLYREPGKATDTQCQPVKATEREAVPCKATGVELPKTMGTHLLHQCDLDVRPGVKGDHSGALKFDCPAGFQTCMGPV

SEQ ID NO: 33382 - protein, 76 aa, Homo sapiens
MSKAEKIHISDTNLAKSARSNLKYGPGHIPVTRHLCKCGCDPASANLIGLYVYMSELVLWDFSLVQLKTGVLITWP

SEQ ID NO: 33383 - protein, 258 aa, Homo sapiens
MHGNDEHQFLDNINPSKMDFDDGDGEIGSKRDFLRLFGNLCQKQKQFADSVNAYSGLGELKPLHSLHLAPPSHKQEIEIKTQLQSKAPTPSTPFSQISVAKPLLSGNSGAALGLILTEGGKTISISISTHIYLNLQKHKATMEFSWCPAKHAGTLYRATDALGLGLEEAIGGDLVGAGGTVSLAAPCQQEEGAACFPSLSTYSAGIWQLDIQSKLQRAQRVVIFSLLMLGQEQEGLAAIGVYAGESWHREWRKDLADE

SEQ ID NO: 33384 - protein, 45 aa, Homo sapiens
VLTQATSQDTAVLKPAEEQLKQWETQPGFYSVLLNIFTNHTLDIN

SEQ ID NO: 33385 - protein, 210 aa, Homo sapiens
MGSQPASISHTPQLYAAEILYQANTARGLGLSSSIQAPLLRQKLYHRAAGKEYAGITDVSHHDQPPQTGPSGDNSEEVIAIIEDDSSMNVIAPEDLPVRQDVEVEDRDIDDPDLVAQTAKSAGRPCLATVIPHLLVAPLSSLASRDSGAQPTPFHSRALGGSRAGASPFGSVGNCPALPLPLPNTKWRRLVPLPTLPDPTPPPTDAESGF

SEQ ID NO: 33386 - protein, 136 aa, Homo sapiens
MLLHVGTTAHVAVEHLIGGVQDDEDLEMTIGCHGEEMIGDLDKNSFGAGGLCIGERVGGPGCCEVLIRMTPTEDVGEERSDMKGIQLSMQERTRCRQFPEGRRHQLGHLLQGGLGRGEAWKYHQIWEEGHWLLREQ

SEQ ID NO: 33387 - protein, 149 aa, Homo sapiens
MGRTSCTPGKENRGRPVINVLLCLSFQKQARLSASGRPRVASGEHGTRPLCSCRAYPRRGLLPAYLPRPCNASTSRKAYREMLQVTVIFEHEKLTQRTFWLRERTATGVSIYWYRGEEEKAGGPGDGPSKSVTPELLLSPQNVTSEQSL

SEQ ID NO: 33388 - protein, 557 aa, Homo sapiens
  DOMAIN (428)..(478): Sugar transport proteins domain identified by eMATRIX, accession number BL00216B, p-value=4.375e-11, raw score of 27.64
  DOMAIN (108)..(525): Sugar (and other) transporter domain identified by PFam, accession name sugar_tr, E-value=5.6e-08, PFam score of 32.9
MRDYDEVTAFLGEWGPFQRLIFFLLSASIIPNGFTGLSSVFLIATPEHRCRVPDAANLSSAWRNHTVPLRLRDGREVPHSCRRYRLATIANFSALGLEPGRDVDLGQLEQESCLDGWEFSQDVYLSTIVTEWNLVCEDDWKAPLTISLFFVGVLLGSFISGQLSDRFGRKNVLFVTMGMQTGFSFLQIFSKNFEMFVVLFVLVGMGQISNYVAAFVLGTEILGKSVRIIFSTLGVCIFYAFGYMVLPLFAYFIRDWRMLLVALTMPGVLCVALWWFIPESPRWLISQGRFEEAEVIIRKAAKANGIVVPSTIFDPSELQDLSSKKQQSHNILDLLRTWNIRMVTIMSIMLWMTISVGYFGLSLDTPNLHGDIFVNCFLSAMVEVPAYVLAWLLLQYLPRRYSMATALFLGGSVLLFMQLVPPDLYYLATVLVMVGKFGVTAAFSMVYVYTAELYPTVVRNMGVGVSSTASRLGSILSPYFVYLGAYDRFLPYILMGSLTILTAILTLFLPESFGTPLPDTIDQMLRVKGMKHRKTPSHTRMLKDGQERPTILKSTAF

SEQ ID NO: 33389 - protein, 103 aa, Homo sapiens
  DOMAIN (8)..(63): Histone H2A proteins domain identified by eMATRIX, accession number BL00046, p-value=1.000e-40, raw score of 12.95
  DOMAIN (1)..(95): Core histone H2A/H2B/H3/H4 domain identified by PFam, accession name histone, E-value=9.3e-37, PFam score of 135.5
FPVGRVHRLLRKGNYAERVGAGAPVYLAAVLEYLTAEILELAGNAARDNKKTRIIPRHLQLAIRNDEELNKLLGKVTIAQGGVLPNIQAVLLPKKTESHHKAK

SEQ ID NO: 33390 - protein, 130 aa, Homo sapiens
  DOMAIN (33)..(88): Histone H2A proteins domain identified by eMATRIX, accession number BL00046, p-value=1.000e-40, raw score of 12.95
  DOMAIN (2)..(120): Core histone H2A/H2B/H3/H4 domain identified by PFam, accession name histone, E-value=1.2e-52, PFam score of 188.3
MSGRGKQGGKARAKAKTRSSRAGLQFPVGRVHRLLRKGNYAERVGAGAPVYLAAVLEYLTAEILELAGNAARDNKKTRIIPRHLQLAIRNDEELNKLLGKVTIAQGGVLPNIQAVLLPKKTESHHKAKGK

SEQ ID NO: 33391 - protein, 32 aa, Homo sapiens
  DOMAIN (7)..(21): Transmembrane 4 family domain identified by PFam, accession name transmembrane4, E-value=0.0016, PFam score of 14.2
  misc_feature (1)...(32): Xaa = X or * as defined in Table 2
XSHIYRELGFMTLSIFLCRNLDHVYNRLARYR

SEQ ID NO: 33392 - protein, 444 aa, Homo sapiens
  DOMAIN (134)..(163): TRANSMEMBRANE FOUR FAMILY SIGNATURE domain identified by eMATRIX, accession number PR00259C, p-value=3.432e-21, raw score of 16.40
  DOMAIN (35)..(433): Transmembrane 4 family domain identified by PFam, accession name transmembrane4, E-value=8.4e-123, PFam score of 395.7
METWEGLPHESLVPTNSKAPQVKMSAQESCLSLIKYFLFVFNLFFFVLGSLIFCFGIWILIDKTSFVSFVGRFKEPSQCHRTSDRAETTGDEEELKEEGEGLAFVPLQIWSKVLAISGIFTMGIALLGCVGALKELRCLLGLYFGMLLLLFATQITLGILISTQRAQLERSLRDVVEKTIQKYGTNPEETAAEESWDYVQFQLRCCGWHYPQDWFQVLILRGNGSEAHRVPCSCYNLSATNDSTILDKVILPQLSRLGHLARSRHSADICAVPAESHIYREMTVMVLSVQLQRRALRRKCEPHVPGAGDSSPGPSLIADGGGGHSGSLWGGWGMAGACPNWGDKAPQGKLPMALGLWPLWVQDEDQPDTGTSTPTCSSYSRLISQPCGSSRRAPPFSTYPLLQPLPAQFTAPPLTFLARLGFMTLSIFLCRNLDHVYNRLARYR

SEQ ID NO: 33393 - protein, 144 aa, Homo sapiens
  DOMAIN (28)..(64): Peripherin / rom-1 proteins domain identified by eMATRIX, accession number BL00930C, p-value=9.910e-10, raw score of 9.93
  DOMAIN (31)..(67): Transmembrane 4 family domain identified by PFam, accession name transmembrane4, E-value=0.00079, PFam score of 15.2
  misc_feature (1)...(144): Xaa = X or * as defined in Table 2
XGPSWSEACGNVVGKTIHKVRHQPRRRPRQKKIWDYVQSNLRWCGWHYGRDWFKVFILRVRLEPSAFTFPLGTPRGCVPLLLSPPPTGPGAFVHSFLSPSVGLPPPTRLFFTQTSNKSPAFLVNDHKKGGRSKKALEGPNVTRA

SEQ ID NO: 33394 - protein, 520 aa, Homo sapiens
MKYIEHKSSKYDLVVNIPLIKQECCYENGLCHSAGTRESLGFRVVSVENGDWTTWERGLRQEGIQHQPVGSGPDPDQSRKPTGNQRGQQLAALSATTDEDMGTNAEKPQGVDKALAIITDLSPFLFKFKWANRMALLQASSENQGSFLSISDLGASRTHTQFLPCAGPCHQPREPWAKGKKQQGPHGPIQKEINPGYSGKSVLEIPEKTWKQHGCMGHSLIPDPGCEVSRVASAAHHRGRGLAERSAPQHLGDTLALLVVLLWGTGQMTVFPLISTPSSLTPSSTLASWLVLVGHYWVYGTQQAPVLMVSGFLDVCCWKLGGSSADPRRIERTPTEPDADTRFQPAETLAGPETRAAGAGGRPYVSANPTLRGGRLRQDPESETGVGDLPDPVTTLVLLHNRLPLAVTVGCLPSRCPTEKRALPWQGLLHCLAVDVEVGQESEEKTERREGSADYDPEAKPSPSAFVYKVLMEQSCEPAVCGLRLPLDTAAELIPAQTSGPAEGGAFPPSSPLSTSRRSR

SEQ ID NO: 33395 - protein, 300 aa, Homo sapiens
MSPPTQEWANRMALLQASSENQGPAISPESHDAILSLCLHTIIPLYVSVSSCPLRRMPDCIRANLVTSLYANHLPKGPVSKSSPIRGCMGHSLIPDPGCEVSRVASAAHHRGRGLAERSAPQHLGDTLALLVVLLWGTGQGSGTQVRVLIPVSLCSTVEKKLRGQRKPTIGNNFYQEPGVRGDMEDGGWLMPERELLEERRPMRKTFMEELEQSNALPKCQLGDEDDRAGEQAQKNRAWGSKGLAWESDILCYMTAMGKCIPTCEKLLEQAASRLVPAQALWASVEVWPCRFILCGTEGS

SEQ ID NO: 33396 - protein, 145 aa, Homo sapiens
MDLSKRRLIPGYSGKSVLEIPEKTWKQHGCMGHSLIPDPGCEVSRVASAAHHRGRGLAERSAPQHLGDTLALLVVLLWGTGQFTPTQQGPVSCKPRCHRILDVHEGLCLSQRSPDLLMWDDAARRPLPDAGPSTLDFLTSRTVKK

SEQ ID NO: 33397 - protein, 177 aa, Homo sapiens
MVEVQVSETEVSVQKDSLGRVDSVKSMNIIFNGRKHPRGQRMQEIVCHCDEKQMKGFTAEMLVSDHLTRPSQLADVLCRHQPTEHPKTDSSHSLVHHVLHWNSQRSVGSSRCCEKNNIPTIEDDTAYNVHNANIEKLCPEREDESQENRIGIMWPRCFLLPEDFPFNATSGGSGFSL

SEQ ID NO: 33398 - protein, 377 aa, Homo sapiens
  DOMAIN (72)..(250): "Phage" integrase family domain identified by PFam, accession name Phage_integrase, E-value=0.00022, PFam score of 0.7
MHQHRSGIEFALKETKGFLDKLHNEITRTLEKISSREKYINNQLENLVQEYRAAQAQLSEAKERYQQGNGGVTERTRLLSEVMEELEKVKQEMEEKGSSMTDGALEPGRGLTPIFFTGEETPTIAPALPGTSIFSGAVPVWPRVDTLVKVFIRDKLMERRNRRTGRTEKARIWEVTDRTVRTWIDEAGAAAAADGVTFSVSVTPDTFRHSYAMHMLDADIPLKGLHSLEGHKYISSTEGYTKDLALDEAAPHRLHTLSLQIPLETGVSASYPIPFTWERTVTKLSKEDFLTLGFQLMGVDTKQLRTLTAVALSKAVRGEVSQSAFYPPQPCSPRMPMPMGECTHLAVTVERRFSQCEDTWPKQGTLNPLRNKMESYK

SEQ ID NO: 33399 - protein, 415 aa, Homo sapiens
  DOMAIN (290)..(320): kw TRANSCRIPTASE REVERSE II ORF2 domain identified by eMATRIX, accession number DM01354R, p-value=3.953e-22, raw score of 8.50
MTAEHETKDRNLLRSGPLYPEVTGLEPGQSASLVSLATLTLQGGLLSPREVSVRIDGGGSPWHRMWEPEAWDQETKTLPAAAVSASNSVSPDEVVALWQFQTMPQGLQMPKKGPLLRHHHIMATSQQLKDVAAPHPEALESVTSVVHKARDIGKGERKYPPQHTAKEQLCTAAVFPGTLEAFGQLPRTLSQQLLAHCSLTRPPLLLPRKSAGLCFPSPPPSHSVPPQATGMPEWQMAAKRKVKKAGRTGGREPERKHSEEGVYVHYPNGCQVPVDKVFNCVWNHTIVSIDAEKPFTKFQHPFMREMLNKLGIKGTYLKIIRAVYDKSTASIILNRQKLEAFSLRTEHQRGQWCSEKTLALPPPMLGIVVKDSDAATVGGLAQITSSVKLPPILLSPSTYPAAIQGRVAPYLCCGP

SEQ ID NO: 33400 - protein, 492 aa, Homo sapiens
MISWPTPALFPARVRVIRESLLDLHQENLVESLEHRTVLNLIELPRRGRLPNATEFHFGAAPFCLKALALIALENNGYGNTMQGLKCPVWARCLHTEKSGVPRSQPGECTRPSAWASEESRAVGSSPFTGSEKGAHLNIKQRTSENWQRPEKRPSEGASTPAPASGRYEDPRKEIMLRKGDHTSVQPAPAPWHALKTQGLNQGQRHSPPGCEDSKGSQLHEEGYPECQIWSNSARTLQNSVWYVEEGHPHLADVGRKRSPLVLAARGDGHCQLRLIMKSGFLESSAEHWLFMDKDRKTVPKIPFWSQIVEFSLTPGKQFKAAANMVSTTAFLKRIPRVTSCNSTFFQMTEMRLLKLKGSAFPAFKVDASCETQRPEATHRPLRVSLHMLFSAIVEMRHPETFDLVQELGIHFCPPSSLEGKRWTGIISMSRQCCQLPACVLWAPAGYLTFCQSVLFQLVLSHITKIITEDYDDNTEILRSHCVITDKTVFSA

SEQ ID NO: 33401 - protein, 544 aa, Homo sapiens
MPQGLQMPKKGPLLRHHHIMATSQQLKDVAAPHPEALESVTSVVHKARDIGKGERKYPPQHTAKEQLCTAAVFPGTLEAFGQLPRTLSQQLLAHCSLTRPPLLLPRKSAGLCFPSPPPSHSVPPQATGMPEWQMAAKRKVKKEGRTGGREPERKHSEEGVYVHYPNGCQVPVDKDFNCVWPFLLITYGTGPNEADLVANLASAIEPAYLRKLLLNSTLLLLPGGNTAHPVHCRRLEKVSRDLCLAKTLEDDGVALRLVIQHRTVLNLIELPRRGRLPNATEFHFGAAPFCLKALALIALENNGYGNTTQGLKCPVWARCLHTEKSGVPRSQPGECTRPSAWASEESRAVGSSPFTGSEKGAHLNIKQRTSENWQRPRKADLQKEPAPPAPASGRYEDPRKEIMLRKGDHTSVQPAPAPWHALKTQGLNQGQRHSPPGCEDSKGSQLHEEGYPECQILEQFSENPSKFSVVCGRGSPSSSRCGQEEKSTCACCQRRWPLPIEADHEEWVPGVLSRALAIHGQGQKQKKKRPREGKKVIWRQRSDL

SEQ ID NO: 33402 - protein, 133 aa, Homo sapiens
  DOMAIN (80)..(132): ELEMENT TRANSPOSABLE INSERTION PROTEIN TRANSPOSITION DNA domain identified by eMATRIX, accession number PD02455C, p-value= 2.980e-09, raw score of 29.23
  DOMAIN (14)..(127): Integrase core domain identified by PFam, accession name rve, E-value=8.6e-20, PFam score of 72.5
QRPTLSPQYGTIPGGDQPATWWQVDYTRLLPSWKGQRFVLTGIDTYSGYGFAYPACNASAKTTICGLTECLIHCDDIPHSIASDQGTHFTAKEMWQWLHAHGIRWSYHVLHHPEAARLIEQWNGLLKPNYNTN

SEQ ID NO: 33403 - protein, 207 aa, Homo sapiens
MMNEGSGVSLSGYDDLKKQGTQHGRKGKIIHRLTIHFLVNRCLAMGPITGHSPSRERWHLDRILLFTVTQCRSKEESVLSSYRTWNIEMLIVILEDTSKHLLRSNFWENEGKSDYGFVFPWSGRPTGTRVSLRACCHVGITENCGCSPLGAIDDYPYCAQFEGEAKGWGSWCEVSGIMKTLKKKKENDERRDSWTFCYKVVQICVTG

SEQ ID NO: 33404 - protein, 101 aa, Homo sapiens
  misc_feature (1)...(101): Xaa = X or * as defined in Table 2
MSSEEKVXXXXXXXXXXXXXXXXXXXXXXXXXXXXXXXXXXXXXXXXXXXXXXXXXXXXXXXXXXXXXXXXXXXXXFKRELLWVSLLELRHWLTWLSCLRT

SEQ ID NO: 33405 - protein, 40 aa, Homo sapiens
MRGGVGGTFWAGGLLQETPVTQDFEFLTSRVKDSKLTTPR

SEQ ID NO: 33406 - protein, 335 aa, Homo sapiens
  DOMAIN (314)..(327): Ribosomal protein S8 proteins domain identified by eMATRIX, accession number BL00053A, p-value=7.480e-12, raw score of 8.83
  DOMAIN (314)..(330): Ribosomal protein S8 domain identified by PFam, accession name Ribosomal_S8, E-value=0.00093, PFam score of 15.7
MACLNANGKDREMDGVGKNQELEWTKGTEQPSRGTRRFLAEGSFRSATTSDSTLDSHMQNSPKPKGAHKMVYVLLVQQTLSTSKCDIHNQRAGSKGMAGGGHLARFVLDRHAAVYRRRQGLQGFAAAAAHSCHCDGSCSEGYVSSILHLSSSAHRPFLAAVGLGRGCCSSLLTRNSQDKHQEKKRKEITLLGNKETNPKPLTQIPELLRRQTQLTPERRVQLSIPKHSQVRALRQSAQDTELLNGNQSCNTCCGDAALGPASSGLLAGAGSSPGSAALRGQDSQDKVEKTEQERAASEQRAHLEEDRGLTVHTDVLADILKSINNAEKRQTLGAF

SEQ ID NO: 33407 - protein, 140 aa, Homo sapiens [sequence omitted]

SEQ ID NO: 33408 - protein, 47 aa, Homo sapiens
  misc_feature (1)...(47): Xaa = X or * as defined in Table 2
MTLPVKVLFLAHPGLENTATXAPCDPXFWPPENKPPLTVIFLYYPIL

SEQ ID NO: 33409 - protein, 84 aa, Homo sapiens
  misc_feature (1)...(84): Xaa = X or * as defined in Table 2
MKFGALTRIGGPPLGESIPCPXCSLLPEKDPPMTSGPQTDQPKEHLTNFKSAARRSSRTSSHRNLLHVLEIWQLDQGMPAARDF

SEQ ID NO: 33410 - protein, 225 aa, Homo sapiens
  DOMAIN (191)..(202): RNase H domain identified by eMATRIX, accession number PF00075B, p-value=2.385e-09, raw score of 12.56
MAEEDSGNLQPEGEGEAGTSSHGGAGERVKGKVLQTFKQPDLTKQTRFIRGPKTPAPVTDWEGSLPLVFNHCRDASLIIHPHFKGVRPRRDACLGPSPLAASPAFLGKGQHALKRLKPIITRLLQHGLLKPINSPYNSPILPVLKPDKPYKLVQDLCLINQIVLPIHPMVPNPYTLLSSIPASTTHYSVLDLKRAFFTIPLHPSSQPLFAFTWTDPDTHQAQQIT

SEQ ID NO: 33411 - protein, 1709 aa, Homo sapiens; identical to SEQ ID NO: 32700
  DOMAIN (797)..(842): kw TRANSCRIPTASE REVERSE II ORF2 domain identified by eMATRIX, accession number DM01354N, p-value=1.000e-40, raw score of 13.17
  DOMAIN (391)..(621): AP endonuclease family 1 domain identified by PFam, accession name AP_endonucleas1, E-value=7e-83, PFam score of 288.8

SEQ ID NO: 33412 - protein, 329 aa, Homo sapiens
  DOMAIN (3)..(39): kw TRANSCRIPTASE REVERSE II ORF2 domain identified by eMATRIX, accession number DM01354F, p-value=4.682e-33, raw score of 14.56
  misc_feature (1)...(329): Xaa = X or * as defined in Table 2
MGDFNTPLSILDRSTREKINKDIQDLNSALDQVDLIDIYRTLHLQSTEYTFFSARHHTFSKINHMIRRNQKRARIAKALLSKKNKAGGIMLPDFKLHYKAMVTKTACDMDEAGNHHSQQTNTETETQTPRVLTHKWELDNEITWTQGGEHHTPGPVPQLHGCALYHSWGLPSIWTAESEETLELYAVLASHRQALGYYCSETKETRFIRGPKTPAPVTDWEGSLPLVFNHCRDASLIIHPRFKGVRPRRDACLGPSPFAASPAFLGKGKHALKGLKPVITRLLQHGLLKPINSPYNSPILPVVKPDKPYKLVQNLRLINQIVLPIHPVX

SEQ ID NO: 33413 - protein, 556 aa, Homo sapiens; identical to SEQ ID NO: 30611
  DOMAIN (421)..(466): kw TRANSCRIPTASE REVERSE II ORF2 domain identified by eMATRIX, accession number DM01354N, p-value=1.000e-40, raw score of 13.17

SEQ ID NO: 33414 - protein, 138 aa, Homo sapiens; identical to SEQ ID NO: 32475
  misc_feature (1)...(138): Xaa = X or * as defined in Table 2

SEQ ID NO: 33415 - protein, 243 aa, Homo sapiens; identical to SEQ ID NO: 32903
  DOMAIN (181)..(221): kw TRANSCRIPTASE REVERSE II ORF2 domain identified by eMATRIX, accession number DM01354Y, p-value=1.191e-35, raw score of 10.69

SEQ ID NO: 33416 - protein, 205 aa, Homo sapiens
MRTIHLRPQVLRPTSPRNISPFLNQTIWDAKLRVTLTVEGSGNGNCATQQQSSRESEMQWGEAVEDLEEGCWGRLALSGVLDSAAPSPELRISFPDIKVMVAKEANKATKIAKMSKIKMVEGDSEGHSMEIHTGTSVSMSRSVDLWSSKWLTAVAVVGYGWHVQMHNSPVAGDSEVIASNPQPWQQQSAAVAAQAEDVNAAPVML

SEQ ID NO: 33417 - protein, 500 aa, Homo sapiens
  DOMAIN (442)..(465): POTASSIUM CHANNEL SIGNATURE domain identified by eMATRIX, accession number PR00169G, p-value=8.657e-11, raw score of 9.39
  DOMAIN (269)..(493): Ion transport protein domain identified by PFam, accession name ion_trans, E-value=7.6e-07, PFam score of -41.0
MRTREVSITGADFTALLVDIIGNSTSYLTEIFKSTSILSVNQSNESDCIFICVMTGKSGRNLSDFWEIEEKYPIINYTFTSGLSGVLALLLTQSLFGGLFTRTRMKFGAVTRIGGPPLGNQSPSSCSLLHEKDPPTTSGPQTDQPKKHLTNFKSGTEEAMNTTSLLAPAAEIMATPGSPSQASPTSGAFTHGTQTPSPTKATAPRYPQTGAQSRRPRRFRRPPAGAAPKAAAPRHPHPRGTAPPPRRISPESIRPHPPPPLDRGPRPPVTPFLIVLGCLILAVLTTFKEYETVSGDWLLLLETFAIFIFGAEFALRIWAAGCCCRYKGWRGRLKFARKPLCMLDIFVLIASVPVVAVGNQGNVLATSLRSLRFLQILRMLRMDRRGGTWKLLGSAICAHSKELITAWYIGFLTLILSSFLVYLVEKDVPEVDAQGEEMKEEFETYADALWWGLITLATIGYGDKTPKTWEGRLIAATFSLIGVSFFALPAGILGSGLALK

SEQ ID NO: 33418 - protein, 792 aa, Homo sapiens
  DOMAIN (483)..(528): kw TRANSCRIPTASE REVERSE II ORF2 domain identified by eMATRIX, accession number DM01354N, p-value=1.000e-40, raw score of 13.17
  DOMAIN (614)..(674): Immunoglobulin domain identified by PFam, accession name ig, E-value=6.6e-12, PFam score of 43.4
FRSVTSPPPPAQQFTLKKVAGAKGIVKRLKTDTARSPWKTPRPSRTPSFRKAERTKGLLKIHLTKLSHQLKKDWTILLPLSLLRIQACPRNATRLATGQLGYPFISQSYVLVNGFQTVEDLCEAADLRVSVADLRVSVTALKVARLELFVPPGGLVVSLASAVKLQTFAVLQLIKAKRWDWGTLEQGAALIGEARDAQEPTEGVGGSGMAGCRSRDLPRGKAAKARREIERSAGLTIKKERCIRNGYSKEKMKLIVVSHGLHVNDLQHKLTLFTKETYTYLARDSEKQKQGYLAGLEGAHANRVNQQISDNLVVKTGALPPPYRTKGEKLYFYMSRQNCLFSVSGQLLQGFFPNGGQAAPNPYALLSQIPEEAEWFTVLDLKDDFFCIPYILTLNSSLPLKILRTQRLNSPGLFYPKVSGHLFGQALAQDLSQFSYLDTLVLCGVLKSPIIIVWELNQIDTIKNDKGDITTDPTEIQTTIREYYKHLYTNKLENLEEMDKFLNTYTLPRLNQEEVESLNRPITGAEIEAIINSLPTKKSPGPDGFTAEFYQRVADVKLREEKDENMLLVPLSDLLYQVHAPIPQLPEVLAANSPTCHLDPPTITESKSNEATTGRQASLKCEASAVPAPDFEWYRDDTRINSANGLEIKSTEGQSSLTVTNVTEEHYGNYTCVAANKLGVTNASLVLFTGCSADQANPEKNRQLVSLCQPAAAAGRDPEPEPLKSWRLFIFIDKTKEKVLIVLTFTSKHWLLAMQAPPSPYPTYLEKALTSEEARYKLSLVNNFPYTVIAAS

SEQ ID NO: 33419 - protein, 406 aa, Homo sapiens
  DOMAIN (47)..(65): C-type lectin domain proteins domain identified by eMATRIX, accession number BL00615A, p-value=6.400e-15, raw score of 16.68
  DOMAIN (62)..(176): Lectin C-type domain identified by PFam, accession name lectin_c, E-value=0.00042, PFam score of 19.4
MAQTSSYFMLISCLMFLSQSQGQEAQTELPQARISCPEGTNAYRSYCYYFNEDRETWVDADLYCQNMNSGNLVSVLTQAEGAFVASLIKESGTDDFNVWIGLHDPKKDHNSSSARKQNWIDNEFDELTEVGFRRWVITNPSELKEHVLTQCKKAKNLDKRLQELFHVTQKERDSVCLGESKEKEQELLPGNTENSSRSCPRTSRQYLYEYARTTVLLGLETKETRFIRGPKTPAPVTDWEGSLPLVFNHCRDTSLIIHPGFRGARPHRDTCLGPSPLAASPAFLGKGQAAPCQAELGPNSSSASAPPPYNPFITSPPHTWSGLQFRSVTSPPPPAQQFTLKKVPGAKGIVKELATSARNLAARPRNACSPEFLLSCVPSGDPTGNQTVQLIWQPLQEPLELWPKAL

SEQ ID NO: 33420 - protein, 409 aa, Homo sapiens; identical to SEQ ID NO: 30813
  DOMAIN (263)..(281): RNase H domain identified by eMATRIX, accession number PF00075J, p-value=1.225e-16, raw score of 15.78
  DOMAIN (238)..(322): Integrase core domain identified by PFam, accession name rve, E-value=1.9e-18, PFam score of 67.8

SEQ ID NO: 33421 - protein, 310 aa, Homo sapiens; identical to SEQ ID NO: 31184

SEQ ID NO: 33422 - protein, 438 aa, Homo sapiens
  DOMAIN (7)..(54): kw TRANSCRIPTASE REVERSE II ORF2 domain identified by eMATRIX, accession number DM01354V, p-value=1.000e-40, raw score of 12.97
MSELPFTIASKRIKYLGIQLTRDVKDLFKENYKPLLKEIKEDTNKWKNIPCSWVGRTNIMKMAILPKVIYRFNGIPIKLPMPFFTELEKNTLKFIWNQKRARIAKSILSQKNKAGGITLPDFKLYYKATVTKTAWYWYQNRDIDQWNRTEPSEIMPRIYNYLIFDKPEKNKQWGKDSLFNKWCWENWLAICRKLKLDPFLKPYTKINSRWIKDLNVRPKTIKTLEENLGNTIQDIGMGKDFMSKTPKAKIDKWDLIKLKSFCTAKETTIRVNSLYCFTSERVQSTSAPREENDQEEENKEKEEKEEEEEEYHNPSDLSPPPQAAPRQAKLGSNSSSASAPPPYNPFITSAPHTWSGLQFRSVTSPPPPAQRFTLTKAAGAKGIVKPGIPPKPCPICAGPHWKSDSSTHLAATPRDAGTLAQGSLTDSFPDLLGLAAKD

SEQ ID NO: 33423 - protein, 256 aa, Homo sapiens; identical to SEQ ID NO: 30966

SEQ ID NO: 33424 - protein, 746 aa, Homo sapiens
  DOMAIN (678)..(733): kw TRANSCRIPTASE REVERSE II ORF2 domain identified by eMATRIX, accession number DM01354Q, p-value=1.000e-40, raw score of 9.23
  DOMAIN (4)..(360): AP endonuclease family 1 domain identified by PFam, accession name AP_endonucleas1, E-value=1e-32, PFam score of 122.1
MAEAMAKLGSERKKEQGLIQELKQNQSLELWYENRKGKIKTGESGDGEPDASEIWCHDSDRGTSLGRSIPCPPALCSMRKIHLQPQVLRPTSPRNISPISNPRQRRHILSMDPKLRRRSWTWVGSLPLVFNHCRDASLIIHPGFRGVRPRRDVCLGPSPLATITDAELYVTLTVEGKSIPFLIDTEATHSTLPSFKGPVALASIHVQNVQIKRDKEGHYIMVKGSIQQEELTILNMYAPNTGAPRFIKQVLNDLQRDLDSHTIIMGDFNTPLSTLDRSTRQKVNKDIQDLNSALHQADLIDIYRTLHTKSTECTFFSAPHRTYSKIDHIVGSKALLSKCKRTEIIINCLSDHSAIKLELRIKKLTQNHSTTWKLNNLLLNDYWVHKEMKAEIKMFFEINENKNTTYQNLWDTFKAVCRGKFIALNAYKRKQERSKIDTLTSQLEELEKQEQTRSKASRREEITKIRAELKEIETQKTLQKINESRSWFFEKINKIDILLARLIKKKREKNQIDAIKNDKGDIATDPTEIQTTIREYYKHLCPNKLENLEEMDKFLDTYTLPRLNQEEDESLNRPITGSEIVAIINSLPTKKSPGPDGFTAKFYQRYKEELVPFLQKYKEELVPFLLKLFQSIEKEGILPNSFSEASIILIPKPGRDTTKKENFRPISLMNIDAKILNKILANQIQQHIKKLIHHDQVGFIPGMQGWFNIRKSINVIQHINRTKDKNHMIISIDAEKAFDKIQQPSC

SEQ ID NO: 33425 - protein, 213 aa, Homo sapiens; identical to SEQ ID NO: 31763

SEQ ID NO: 33426 - protein, 887 aa, Homo sapiens
  DOMAIN (393)..(447): Natriuretic peptides receptors proteins domain identified by eMATRIX, accession number BL00458F, p-value=3.318e-24, raw score of 30.57
  DOMAIN (388)..(574): Adenylate and Guanylate cyclase catalyt domain identified by PFam, accession name guanylate_cyc, E-value=6.2e-93, PFam score of 322.1
MDPLSMSIHQVVLRPDEQGPGQEQQPPLYVMEPGEINSFIAHTKPVWWSLHTDAHEIWCHDSDRGTSLGRSIPCPPALCSVRNIRLRPQVLRPTSPRNISPISNPRQKRHVLSMNPKLWRRSRTGKAAFPWCLIIAGTASLIIQPHFKGVRPCRDACLGPSPLAASPAFLGKEQTITDTELRVTLTVEADNTLALGAASPITGPTWRKSKIKALADSVSGEGLLSSSETAAFCCSSSVSQTCYAPSQIWFFAQAVPLPGNNDKKKKVGTCSTQTKPSCFFQTFSIPIWLNPRMQNPWRQRADSISLCGTGSAQFAVSAYSALRLFHDQKNESYMDTLIRRLQLYSRNLEHLVEERTQLYKAERDRADRLNFMLLPRLVVKSLKEKGFVEPELYEEVTIYFSDIVGFTTICKYSTPMEVVDMLNDIYKSFDHIVDHHDVYKVETIGDAYMVASGLPKRNGNRHAIDIAKMALEILSFMGTFELEHLPGLPIWIRIGVHSGPCAAGVVGIKMPRYCLFGDTVNTASRMESTGLPLRIHVSGSTIAILKRTECQFLYEVRGETYLKYKVLLTYDTHVNKTYPVDMSPTFTWKNSKLPNDITGRGPQILMIAVFTLTGAVVLLLLVALLMLRKYRKDYELRQKKWSHIPPENIFPLETNETNHVSLKIDDDKRRDTIQRLRQCKYDKKRVILKDLKHNDGNFTEKQKIELNKVCSPYFKPLRNNFTSFPLITEVAGGLLQIDYYNLTKFYGTVKLDTMIFGVIEYCERGSLREVLNDTISYPDGTFMDWEFKISVLYDIAKRTALRLRFVQEDLWTAPEHLRQANISQKGDVYSYGIIAQEIILRKETFYTLSCRDRNEKIFRVENSNGMKPFRPDLFLETAEEKELEFFT

SEQ ID NO: 33427 - protein, 170 aa, Homo sapiens
  DOMAIN (149)..(160): RNase H domain identified by eMATRIX, accession number PF00075B, p-value=9.182e-13, raw score of 12.56
MNLNRNALVLTLFSDSARLHPGEINSHVAHTKPVWWSLHMDTHEIWCRDSDRGTSLGRSIPCTPVLCSHALKRLKPVITRLLHHGLLKPINSPYNYPILPVLKPDKPYKLVQELCLINQIVLPIHPVVPNPYPLLSSIPSSTTHYAVLDLKDAFFTIPLHPSSQPLFAFT

SEQ ID NO: 33428 - protein, 40 aa, Homo sapiens
MSLEFIRKGCKYDQWKASSTVFHSIFNIYVCISGYHGFQN

SEQ ID NO: 33429 - protein, 128 aa, Homo sapiens
  misc_feature (1)...(128): Xaa = X or * as defined in Table 2
MTSGPQTDQPKEHLTNFKSEGRXXXXXXXXXXXXXXXXXXXXXXXXXXXXXXXXXXXXXXXXXXXXXXXXXXXXXXXXXXXXXXXXXXXXXXXXXXXXXXXXXXXXXXXXXXXXXXXXXXXSRAEFVR

SEQ ID NO: 33430 - protein, 46 aa, Homo sapiens; identical to SEQ ID NO: 30810
  DOMAIN (17)..(34): Zinc finger, CCHC class domain identified by PFam, accession name zf-CCHC, E-value=0.078, PFam score of 15.4

SEQ ID NO: 33431 - protein, 191 aa, Homo sapiens; identical to SEQ ID NO: 32212
  DOMAIN (170)..(181): RNase H domain identified by eMATRIX, accession number PF00075B, p-value=9.182e-13, raw score of 12.56

SEQ ID NO: 33432 - protein, 287 aa, Homo sapiens; identical to SEQ ID NO: 31761
  DOMAIN (200)..(243): 1 kw MIND INHIBITOR DIVISION CONTROL domain identified by eMATRIX, accession number DM01756B, p-value=4.822e-15, raw score of 22.91
  DOMAIN (165)..(270): ParA family ATPase domain identified by PFam, accession name ParA, E-value=3.6e-23, PFam score of 90.4

SEQ ID NO: 33433 - protein, 266 aa, Homo sapiens; identical to SEQ ID NO: 30968
  DOMAIN (232)..(243): RNase H domain identified by eMATRIX, accession number PF00075B, p-value=1.346e-09, raw score of 12.56

SEQ ID NO: 33434 - protein, 61 aa, Homo sapiens
MRLGPNKKEHLYRSSNGLYPVAFRRQARILRRASGKSIIQSFLSWWLSLVRCVFKRPVVRS

SEQ ID NO: 33435 - protein, 73 aa, Homo sapiens
  misc_feature (1)...(73): Xaa = X or * as defined in Table 2
XASPAFLGKGQVPLNPFFTLSGKSRFSGEGAKAPETITDAELRVTLTVEAAVCSTIALSLGWEILPRHWGKEE

SEQ ID NO: 33436 - protein, 251 aa, Homo sapiens
MGATHPFELLTKMTSQGSDISGDLPWEINPLSSCSLLHEKDPPTTSGPQTDQPKKHLTNFKSETKETHFIRGPKTPVLVTDWEGRLPLVFNHSRDASLIIHPRFRGVRPRRDACLGPSPLAASPAFLEEGQVPQPLLSMSLTPSLLFWRRGKKPSTPSSPLAASPAFLEEGQVPQPHISVPRSLISTPQPLITLHPDPFPAFLEDSKEVLKQQPKGRIKHCADGGMSKEPKNQLKGLPVTKAGNIHGINDI

SEQ ID NO: 33437 - protein, 119 aa, Homo sapiens
  misc_feature (1)...(119): Xaa = X or * as defined in Table 2
MIGSEKKHKAAQRYYFSVWHPHLKQLQNKPQLGNVARFQQRGGERQELHGQILCKVLSKVADMPGLECIVSRGRAQRRKRGILRRSGSFSLQLLSQEGLGRSQRALGQSSRGSGSGCQX

SEQ ID NO: 33438 - protein, 380 aa, Homo sapiens
MDPLSMSIHQVVLRPDEQGPGQEQQPPLYVMEPGEINSFIAHTKPVWWSLHTDAHEIWCHDSDRGTSLGRSIPCPPALCSVRNIRLRPQVLRPTSPRNISPILNQERQRRCILFVDPKLRCQSRTGKAAFSWCLIIAGTASLIIQPHFKGVRPCRDACLGPSPLAASPAFLGKEQAAPCQAELGPNSSSASAPPPYNPFITSPPHTRSGLQFRSVTSPPPPAQQFTLKKVAGAKDIVKASLAPALAQGVPGTPQATASEGASLKSWECLCGVNLATAQSARVKEACQEACQSLPRFQRMYEKAWVPKQKTTAEVELSQRASTRVVLRGNVGLESPSRVFSIALSSGAVGGVHCPSDHRMIEPAAFNLSMKNPQRQSCLRA

SEQ ID NO: 33439 - protein, 751 aa, Homo sapiens
  DOMAIN (537)..(544): RNase H domain identified by eMATRIX, accession number PF00075I, p-value=3.700e-09, raw score of 16.21
  DOMAIN (529)..(612): Integrase core domain identified by PFam, accession name rve, E-value=7.7e-12, PFam score of 45.0
MWPQAKGHRQPPALREARTDSPLEPLKGGCPTEFQTSSPQNYSKKFFSLLSVTSYSSFAFHKFSVAVYNISNLKTVDPAKFPTRYCYCLNNRTNDLSDFTALLVDIIGNSTSYLTEIFKSTSILSDNQCGPVSTPVNAPIFKSSYFWDPQSWRKNPKLKSLRNVGRLKKTSGRNLSDFWEIEEKYPIINYTFTSGLSGVLALLLTQSLFGGLFTRTRMKFGAVTRIGGPPLGNQSPSSCSLLHEKDPPTTSGPQTDQPKKHLTNFKSEAKEICFIREPKTPAPVTDWEGSLPLVFNHCRDASLIIHSRFKGVRPRRDACLGPSPLAASPIFLGKRQHALKRLKPVITHLLQHGLLKPKNSPYNSPILPVLKPDKPYKFVQDLCLINQIVLPIHPMLYSLFVESPTITIVSGPDFNPASHIIPDTTPDPHDCISLIHLMLSPFPHISFFPISHPDHTWFIDGSSTRPNRHSPAKAGYAIVQATSPPLRTSHFLSIVEIYPQGNHFSVFHLLFYYPSEIVQAPSLPYTSNSGICPTQDWQIDITHMPQVRKLKYLLVLVDTGSKKATVVISSLLSDIIPRFGLPTSIQSDNGPAFISQITQAISLALGIQRTHGLLKTHLTNLSHQLKKDWTILLPLSLLRIQACPRNATGLHSDGEARSSFQAHHFNFITHGTVPDVFVPILQLLNEDFEDPCLGYLPSPEISICLEPTSWSKDRSCSSGEEGSAGQTVTGDLHKAQTPELDQPASLNCPDL

SEQ ID NO: 33440 - protein, 143 aa, Homo sapiens
  DOMAIN (9)..(68): Gag P30 core shell protein domain identified by PFam, accession name Gag_p30, E-value=5.4e-13, PFam score of 49.0
MTPLATTLRHFTALDPKRSKGRLILKIRFITQSAPDIRKKLQKLESGPQTPQQELINLAFKVYNNREEAARRQCISELQLLASTVRQTPATSPAHENFQTPEPQQPGVPPEPPPPGDCYKCQKSSHQAKECPQPGIPSKPRPI

SEQ ID NO: 33441 - protein, 462 aa, Homo sapiens
  DOMAIN (347)..(387): kw TRANSCRIPTASE REVERSE II ORF2 domain identified by eMATRIX, accession number DM01354Y, p-value=9.571e-24, raw score of 10.69
  DOMAIN (398)..(415): Zinc finger, CCHC class domain identified by PFam, accession name zf-CCHC, E-value=0.00037, PFam score of 27.3
MMKETNNSFLKFQPTSRREETKETCFIRGPKTPVPVTDWEGSLPLVFNHCRDASLIIHPHFKACILKNLKPLQLSPDLKSKRLFSSAMPLDPSTNSTVVTNCQKNGTFNFSILQDLNNSCRKTGKWSEHALKGLKPVITRLLQHGLLKPINSPYNSPILPVLKPDKPYKLAQDLCLINQIILPIHPMMLLGEISVTKALAGSLIKALAVFHTAESPGYALLDSYYLLQKGSVCISILQEEEAFSWPGKGECRDKSWASLGLIPAFPQGGQWKQALGLLDHSCLCFGELGTRLAAPASFSTFPITNRERERKTDKLIPKFMWKCKGPRITKTILEKNEVGEFTLLDFKTYHKFAVIKTMWYWHKDRYIDQQNDIESPEINSYVYGQLIFDKDSARLHPGACYKCQKSGHQAKECLQPGIPPKLRPICAGPHWKSDCPTHLAATPRAPGTLAQGSLTASQIFLA

SEQ ID NO: 33442 - protein, 1007 aa, Homo sapiens
  DOMAIN (939)..(950): RNase H domain identified by eMATRIX, accession number PF00075D, p-value=8.364e-11, raw score of 10.71
  DOMAIN (803)..(994): Reverse transcriptase domain identified by PFam, accession name rvt, E-value=1.1e-17, PFam score of 72.2
MTNAEHYKHSLHAYGAWAIMAQWEMENCKHEEGTFPVSSGRERQRGGEVTRTQCCNGPQHILRVSRFFTEPDGLNIIGDYSGPAQAATQLPMSWMLLHLGYPERKEMPLGKAAVYGKHTLKELTAGGKSFPPERAFGQCISCPTTFFICKMGIMIVPACRVKCSSTLTLGLAMCPVLVHVTSANITQAETCCPFSLNGGPAPGGTEYKGLWHVEFLKQPAGKHGLYDAPATRFALSNTCPVKSRTSVVYGLAEVKRSPFSCSLPTYLQRCITGSSVSPPLHAAREPSCLERLFPAGASRLGWLLLLYAPEVLSACLYQNRGHSAPWLNVQSLGPDCLDSQLWLRHLQPTCTQVKQPAMLLTQSLFGGLFTQTRMKFGGSGDLPWEINPLSSCSLLHEKAPPTTSGPQTDQPKKHLTNFKSEAFRLFFIKYKNPAQFTARLAATLRRFTALDPKREQPPLTVIFHYLPKSYKTAPPPSPFADSLFGLSPPAPNEINSHVAHTKPVWWSLHTDAYEIWCRDSDRGTSLGRSIPCPPVLCSVRKIHLRPQVLRPTSPRNISPILNQTKETCFIRGPKTPVPVTDWEGSLPLVFNNCRDTSLIIHPRFKGVRPRRDACLGPSPLAASPAFLGKGQAAPRQAELGPNSSSASAPPPYNLFITSPPHTWSGLQFRSVTSPPPPAQQFTLKKVAGAKGIVKTITDAELRVTLTVEGRDSLTKLSASLTIPGLQPHLIAVLLPNPKPPSRLPLISPYLNPQVWDISTPSLATDHMPITIPLKPNHPYPTQRQYPIPQHALKGLKPVITRLLQHGLLKPINSPYHSPILPVLKPDKAYKLVQNLRLINQIVLPIHPVVPNLYTLLSSIPSSTTHYSVLHLKDAFFTIPLHPSSQPLFAVTWTDPDTQQSQQLTWAVLPQGFRDSPHYFSQALSHDLLSFHPSASHLIQYIDDLLLCSPSFESSQQDTLLLLQHLFSKGYQSDDRPAFTSQITQAVSQALGIQWNLHIPYHPQSSGK

SEQ ID NO: 33443 - protein, 362 aa, Homo sapiens
  DOMAIN (234)..(282): Cadherins extracellular repeat proteins domain proteins domain identified by eMATRIX, accession number BL00232B, p-value= 2.269e-13, raw score of 32.79
  DOMAIN (142)..(242): Cadherin domain identified by PFam, accession name cadherin, E-value=0.0094, PFam score of 22.3
MQKRLWNWVTGRDWNSLQGSVEDRKMRESLELSRDLPNGFDQNADNDINDENQAEVVSDRDEELVGNWSKGTPEDYPRFFHMHPRTAELSLLEPVNRDFHQKFDLVIKAEQDNGHPLPAFAGLHIEILDENNQSPYFTMPSYQGYILESAPVGATISDSLNLTSPLRIVALDKDIEDTKDPELHLFLNDYTSVFTVTQTGITRYLTLLQPVDREEQQTYTFSITAFDGVQESEPVIVNIQVMDANDNTPTFPEISYDVYVYTDMRPGDSVIQLLMATKDTGDYYGGREGEETIEKLTIVYYTQYLGDRINHTPNLNIMQYTQGASEAIKQCQSSAAKPRRSGKESVREPWARFPGALGVAAS

SEQ ID NO: 33444 - protein, 401 aa, Homo sapiens
  DOMAIN (18)..(70): Gag P30 core shell protein domain identified by PFam, accession name Gag_p30, E-value=1.3e-06, PFam score of 26.5
WVRGLADFRNEAADPHDQGMDENPTDFLERLRGALVKHMSLSPDLVEGQLILKDKFITQAAPDIERKLQKQNGPSLRDIFFSPQNGYNWRMASFYLPVANKWKILKSLYQILHLGPDWEGPYTVFLSTPMAVEVTGIDSWIHYTQVKAWKADGATSVNPEEHPKYQVEAAHMHEIWCRDSDRGTDLPWEINPPSSCSLLCEKDPPTTSGPQTDQPKKQLTNFKSETKETRFICGPKTLAPVTDWEGSLPLVFNHCKDASLIIHPRFKGVRPCRDACLGPSPLANLINLTFKVYNNRKKLQFLAFTVRQTSAMSPAHKNFQTPEPQRPGIPPEPPPPGACYKCQKSGHQAKECLQPRIPPKPRPICAGPHWKLDCPTHLASTPRAPGTLAQGSLTASQIFLA

SEQ ID NO: 33445 - protein, 124 aa, Homo sapiens
MQKLHVQESLSRLEFTSGIKSCEYWKEEKNKFRYSQASIVTRALCLHKNKFPHQGQEGNRKSRQKCPVKAEDEGSQVASSEARGFKGGENDSFRYSMMYRCHLSNSLISSNNGVGAARVAKEDC

SEQ ID NO: 33446 - protein, 88 aa, Homo sapiens
MGLNYRDGVMQAMDEFDKSQFLFRNPHCDLGEKLPGTHWPSNHIYSSQGLIPFYMGFIPAMQDNYALTFGNSTRRAYWKEWAKRNHTL

SEQ ID NO: 33447 - protein, 181 aa, Homo sapiens
  misc_feature (1)...(181): Xaa = X or * as defined in Table 2
XLSCGLCALCALAGVPVHIHAVQTPPLKLQGKQILDTPEMPLEITRSFIQNRDGTYELFKCPKVEVESIAETYGRIEKQPVLRPLELKTFLKVGNTSPDQKEPTPFIIEWIPDILPQSKIGELRIKFEYGHHRNGHVAEYQDQRPPFGPALGTGPSDHYYFPFKAKQDNNLLLLNLHIPTP

SEQ ID NO: 33448 - protein, 97 aa, Homo sapiens
  misc_feature (1)...(97): Xaa = X or * as defined in Table 2
MKTENILRKMIGTRQNCQVAEARRTPSEGHREQEGRDAVPDCGSQRRGRDLGEPTRCSKCPKVHGTGSISLGTSPFHPSTLANSTTWTMVLKXXGPL

SEQ ID NO: 33449 - protein, 139 aa, Homo sapiens
MIGQSFSNRHYSSVIKRHSLAISRGHDRIVRLLRPGGHQAKVTVNRKAEMLFLTVALRGGAATWESPQDARNARKCTGQAPFLWAPPLSTLLLSRGCTGTPPNAAQKQKLTSDANGNALLRWRPLCACAHADTPRTRKG

SEQ ID NO: 33450 - protein, 299 aa, Homo sapiens
MMYFYRIIFSEGSKAPGMYPLNEEEKGKKKSKILQGDAVSRWHALLFQMACRSQIPWPTPEDTQPVILSKPNQITLPLRVKAHILTEGYEALQDLSSDLHAGSSSLLTPLKPRRPTSPQTHEACPSFDVCGALCLEDSSANVCLAYPLNPSSSSECKLHEFTNSCLLLLTAISPVPRVASDISLALNKHLLNERGTVKPCPRDKLIHFQGLNSKPCDDVFQTVLKSRMLNCPVPAGALPMKCPKALQTPYNSKLITPTLALTTYLPCCTTVSINGTAIHADEKSSSSPSSENPTEPSHL

SEQ ID NO: 33451 - protein, 89 aa, Homo sapiens [sequence omitted]

SEQ ID NO: 33452 - protein, 115 aa, Homo sapiens
MRRCLEELGAGTRRLAGFPTSWRCTALGVSPQLQSCAVTHPLSEPLYRDHLPGVEREKPNNGSLFAELATSKSWAWRRSVWDHSQCMPCLCLRATILGHPQSPLWRQPPEHNYSS

SEQ ID NO: 33453 - protein, 57 aa, Homo sapiens
MLLKFERSGESHGFLRSWLELREHSETTDPVDWSLLTSSPRCWPHQLLFKLMMQINS

SEQ ID NO: 33454 - protein, 273 aa, Homo sapiens
MDFGDSGSEGGKRIPDLSHEKWFPGLEEKDQAQLRIFHFQKKGLVNRAKGMGCHFHDWVAKDCDFRLASRLSLWPSQLAHFDEVLKTGRQTSNFQSSKHEAWESALHPNNKEKANQTKNQTVLLDSYGKRGHGANHYSPTWRDQQTNIRNHNLPGQKAPWEPVPGGGTFNFLQELFLCMHRLRLPLLRRGRKEEEEGDKKKMFVKQPPKVKRKNFMSKGQVVGGHTWVKGRANPSMGVPCSHDLSGFLTFWDLLQNSCGLPFTNLVASMPAAP

SEQ ID NO: 33455 - protein, 57 aa, Homo sapiens
MLLKFERSGESRGFLRSWLELREHSETTDPVDWSLLTSSPRCWPHQLLFKLMMQINS

SEQ ID NO: 33456 - protein, 54 aa, Homo sapiens
  misc_feature (1)...(54): Xaa = X or * as defined in Table 2
XKGYHLAVQQLLLARSARLMALNAEVIATEEPPSWECSRGRRRRRQQRAKAGPP

SEQ ID NO: 33457 - protein, 84 aa, Homo sapiens
MESVKLDPFQCLSHNFAKAASRCPGNRVIGSVRTKPISHGNPLATFDLIQGDEKQDIRGLLGKELYHFYERAVDMILSLPFSEN

SEQ ID NO: 33458 - protein, 54 aa, Homo sapiens; identical to SEQ ID NO: 33456
  misc_feature (1)...(54): Xaa = X or * as defined in Table 2

SEQ ID NO: 33459 - protein, 101 aa, Homo sapiens
MAVYITWVQGASEAIGQRQSSAANPRRSGKESVREPWARVPGALGMAARKAGLATKGEGEGVGVLNPLPEKRDLPLRKMKGIEIKRRERLKSGKEKVVDGQ

SEQ ID NO: 33460 - protein, 84 aa, Homo sapiens
MVYGASEAIRQRQSSATKLRRGQSEKLGPEFQGLWEQLPVHDRCQSFGSTDKTCLLCLYQKMKGIEIKRMERLKTGKEKVVEGQ

SEQ ID NO: 33461 - protein, 297 aa, Homo sapiens
MPTLGLPSIEHPYEHSTRHLPQACLSAAKKGPRHSHDEKLCFSTASSIHKLGLQVFGRQTESLDLCPVVSVDQLMWKRQDLQEESQSQEQHKAASSHQLEDSASRLQPWCWVVAQGLLPTAPVWSTSIPGNRKVSQGCRRTNSGSSTSPKAPLRPHQPQASALRGPDQISQDRVCYRVPVCGAVAAGAAVTTHFLHLDSRESVFGEIQMAAWKMHLAITFIKRAGVWTEGMSDLKPPWKAGQFSQEVFGLLLPALTDSTNPSQNSCIESQILASTGLQAATTDRSEMTLKVKLICNA

SEQ ID NO: 33462 - protein, 156 aa, Homo sapiens
MQGLVNYQISIKCSNQFKLEVCLLNAENKVVDNQAGTQGQLKVLGANLWWPYLMHEHPAYLYSWEVRLTAQKSLGPLTSTHSLWGSALCPSPRASGMVIAHTKALDPSQPVTFVTNVTYAADKGPLWEVAAPSSSQRASSGVTELTRVTPVDLQIE

SEQ ID NO: 33463 - protein, 82 aa, Homo sapiens
MYTYIHSEEFGKGRLAESSGLHLSPMLDAPCPQTLDSKFFGFWTLGFTPVVCQGLLSLWPQTKGCTVSFPTFDQWSEGILQQ

SEQ ID NO: 33464 - protein, 63 aa, Homo sapiens
  misc_feature (1)...(63): Xaa = X or * as defined in Table 2
MITRXXXXXXXXXXXXXXXXXXXXXLKSREADSAAFSLWPKAREPLANHWCKSKSPKAEKLGV

SEQ ID NO: 33465 - protein, 275 aa, Homo sapiens
MTTKESLHRFCADCNIIALRSGNKECLTCWKKLVSKRSPRPDPKFDALISKINPSRDEYEAHQERVLVRINKHNNQQALSHSIEEGLKIQAMNRLQRGKKQQIENGSGAEDNGDSSHCSNASTHSNQEAGPSNKRTKTSDDSGLELDNNNAAMAIDPVMDGASEIELVFTPHPTLMEKDDSAQTRYIKTSGNATVDHLSKYLAVRLALEELRSKGESYQMNLDTASEKQYTIYIATASGQFTVLNGSFSLELVSEKYWKVNKPMELYYAPTKEHK

SEQ ID NO: 33466 - protein, 110 aa, Homo sapiens
DNCKEEERRNPGGDHVTTRGTGQSHSKSYSRGIETHTPRHPLRLRGSALEENDPRITDGGKAFGETHPNQHRPCRPEAGIPCCFQVSAWGFIIMVGPLRVLASGDVAFDP

SEQ ID NO: 33467 - protein, 1272 aa, Homo sapiens
MMSFDSMSHIQVTQMQEMGYHGFEKLHSYGLAGLVLSACSFSCSTIQKCRDAAKWSGQPLMGPVHFGTNLGDTTGDEQRVSGLSKTARAGTTALAVAVGCHLPLGAPSQDNTEPLAIEMFSLGSSHPVVRLLLSSIAEIMNPESMDKLLGLPRLESRPRGMFLSWHGRQAAPDELFGSHWLDTVYWKSAHVSLPKASQKAKLRVSEGGAQCEEMIVNECWEYHTVVLFDRVGGSGTCIGLAACLYNGVWLQVYVHSALRKEPLLSTHTHKEQIPSSLPISCQASSITSAGDSSVASSWICDCYDGPESRDLSSTKPSGHSPSVALNPGSRDLSSAKPSGHSRSVVLNPGPKDLSSAKPSGHSRSVVLNPGAGSAQGYSMVQPSPWKQESWAQCNGQTLAVTSNSQSCLWGVSFPPASAPGLENIMKSPETQLDLVTMNSVRCSAVGLHCVAPADFRLVSFVPFLTKLMHGFPAGRIKNIVLNPVRMLLLSFNVSEAFSFSQSQCWLAWRVTTLQHLQSDYVVAFALSSLVCISFNHVREAVGRKNHRAHKKDFWACSGGLQRTCPKGLQSSLLGLHSKAYPMARARKAFVCENTCHPASGALSAFGMAVPTGPHGISYKSYNRGIETHTLWQPLRLRDSALGGERPSGERAAQGHAGRPVLEITDGGTTFATFSNAYQRNKEVSANFATPPILHRTRSPDATSAGTNPQRENDPRVREQPRGTQADPSSRSRTAARLLERLTPTNTVRAGLRLGSRAASPVSDWGFIIMVGPLRLLSSGEVPFDPVERGSGKPNALYRTTAKRNRGETQGETMRPRVALANPTAVGVNVCHRRHTGRRRNEGWGPGMCRWKGETGDISVSAKENQTTPGNREATPEDPGFCSGGERPSGERAAEGHAGRPVLEVTDGGTNFAVGVNVCHRRHTGRRQNEGWGPGMCRWKGETGDISVSAKENQTTPGNRERLGKKHTESERQREKREWETHTQTHTHTHAESYSRGIETHTPRQPLRIRGSALEENDPRVRERPRSTQADQSSRSLTAARLLARLTQTNTVRAGLRLGSRAASPVSTWGFIFIVGPLRLLASGEFPFEPVERAVACPACKSPGLPESRTRFTGQLQRGKEAKPRGRPCDHAWHWPIPQQLVLMCVTGGIRGDGETKGGVQAYAGGRGKRVTFPSKQRKIKQHLGTVGHPLRLRGSALEENDPRVSAWGFIIMVGPLRVLASGDVAFDPVGRHPLRLRGSALEENDPRVSAWGFIIMVGPLRVLASGDVAFDP

SEQ ID NO: 33468 - protein, 1568 aa, Homo sapiens
  DOMAIN (835)..(850): Zinc-containing alcohol dehydrogenases proteins domain identified by eMATRIX, accession number BL00059C, p-value=9.357e- 09, raw score of 11.82
MGDTQTDTNTHAESYNRGIETHTLWQPLRLRDSALEENDPRVREQPRGTQADPSSRSQTAVRLLVRLTPTNTVRAGLRLGSRAASPVSAWGFIIMVGPLRLLSSGEVPFDPVERQPLRIRGSALEENDPRVRERPRSTQADQSSRSLTAARLLARLTPTNTDRAGLRLGSRAASPVSTWGFIFIVGPLRLLASGEFPFEPVESRPFATAGIRRVSLRARGESHISEALNTENPEATPEDPGFCSGGERPSGERAAQEHAGRPVLEITDSGLRLGSRAASPVSAWGFIIMVGPLRLLSSGEVPFDPVERQPLRIRGSALEENDPRVREQPRSTQADPSSRSLTAARRLATLTPTNTVRAGLRLGSRAASPVSTWGFIFIVGPLRLLASGEFPFEPVERQPLRIRGSALEENDPRVREQPRSTQADPSSRSLTAARLLARLTPTNTVRAGLRLGSRAASPVSAWGFIFIVGPLRLLASGEFPFEPVKRGAKRFLPISQHPQSSTDLVALTQLRLSHTAEALNPENPEATPEDPGFCSGGERPSGERAAQEHAGRPVLEITDSGLRLGSRAASPVSAWGFIIMVDPLRLLSSGEVPFDPVERQPLRLRGSALEENDPRVREQPRGTQPDTSSRSRTAARLLARLTPTNTVRAGLRLGSRAASPVSAGGFIIMVDPLRLLSSGEVPFDPVEKSRTAARLLARLTRTNTVRAGLRLGSRAASPVSTWGFIFIVGPLRLLASGEFPFEPVERQPLRLRGSALEENDPRVREQPRGTQPDTSSRSRTAARLLARLTPTNTVRAGLRLGSRAASPVSAWGFIIMVDPLRLLSSGEVPFDPVERKFCRVNKSQLYTLCTTVQVGLETYGIILCCSEALPASPDVSLCVSFPLSVGLCQPKLRQGYEIGGGLRVLRNWQRPLCSSGSKATSPDASTRKGPDHDDETPGGDVEAARDPSLRPARTVLVGDPGHSRRRGGSRSIAAAARRWRYLKVTQPICQEWSSAQAGPEDRSPGGLGLGQDETPAVHSPMPPQTGPRTQPPPRRQQEHRGRRAAVAIFKGDAAYLSGVERESAQPMRMREAPAVSPVTVVPTVVLETSPRGFAEQEPSVAVLGYRGSEAPVSPLHGLEGKLSMGSQRESGEHSRRPEAPPPSVEVGSSRVEGNVSGCQHSQRADHDDETPGGDLEATRDPSLRPARTVLVGSRTPEPQGVPGVSVCFFPTLCGFVPAKLRQGYEAGGGLGVLRNWQKPLCFSAVGVNVCHRRHTGRRQNEGWGPGICRWKGETGDIFVNVKEKQTTPGNRGRSKEVSANFATPPILHRPGSPDATSAGTNPQRVGKKHTESERQREKREWETHTQTHTHTHAESYSRGIETHNTRQPLRIRGSALEENDPRVREQPRGTQADPSSRSRTPARLLVRLTPTNTVRAGLRLGSRAASPVSAWGFIIMVGPLRLLSSGEVHFYPVERAVAYPACKSPGVPESRPCLTGQLQRGREAKSRGRPRDHAWHWPIPQQLVLTCDTGGKRGDGETKGGVQGYAGGRGKRVTFPSTPRKNKQHLGTRSKEGFCPIMRNTPNPPPTW

SEQ ID NO: 33469 - protein, 94 aa, Homo sapiens
  misc_feature (1)...(94): Xaa = X or * as defined in Table 2
XSQKRRSGRQVKRRKSNEDLDFKVVDDDGETIAVLGAGRTFALSASTLAWQAEEPPEDDANIIEKILASKTVQEVPPGDPPFDLELFYVKYKNF

SEQ ID NO: 33470 - protein, 78 aa, Homo sapiens
  misc_feature (1)...(78): Xaa = X or * as defined in Table 2
MPLLLCINLPCLLLLPALPRVASKQVFSQNMAKWCVQLYPPAGPGLRTQNPGPTPRRTSDKRANEDDISDGSHCYNEX

SEQ ID NO: 33471 - protein, 564 aa, Homo sapiens
  DOMAIN (286)..(374): ParB-like nuclease domain identified by PFam, accession name ParBc, E-value=5.8e-14, PFam score of 59.8
MSDASVNFDYKSPSPFDCSTDQEEKIEDVASHCLPQKDLYTAEEEAATLFPRKMTSHNGMEDSGGGGTGVKKKRKKKEPGDQEGAAKGSKDREPKPKRKREPKEPKEPRKAKEPKKAKEHKEPKQKDGAKKARKPREASGTKEAKEKRSCTDSAARTKSRKASKEQGPTPVEKKKKGKRKSETTVESLELDQGLTNPSLRSPEESTESTDSQRASLTGVFALQKRRSGRQVKRRKYNEDLDFKVVDDDGETIAVLGAGRTSALSASTLAWQAEATFIEEVIPPNQVESDTFVDQHNNGRDQASLTPKSLKSIRSTIKHQQFYPAIGVRRATGKIEILDGSRRRASAILENVGLRVLVTDQEISVQEAQNLAKDVQTALQHSIREIGLRLMRMKNDGMSQKDIAAKERLSQAKVTRALQAASAPEELVALFPVQSELTFSDYKTLCAVGDEMGNKNLEFDQLIQNISPEINDILSIEEMAEDEVKNKILRLITKEASLLTDKGSKDKSVVTELWKFEDKDRFARKRVKGRAFSYEFNRLSKELQEELDRMIGHILRKSLDKKPKP

SEQ ID NO: 33472 - protein, 368 aa, Homo sapiens
MGKQLLFLELVEHLHSQPLHWPGRRSKEQGPTPVEKKKKGKRKSETTVESLELDQGLTNPSLRSPEESTESTDSQRASLTGVFALQKRRSGRQVKRRKYNEDLDFKVVDDDGETIAVLGAGRTSALSASTLAWQAEICAVSSQCAQRNSVTAGPCPSPRSQPQDWLPSGELRKHLYTGFALAQDWHVITALLCTPYHNPKHGIQGQEEPPEDDANIIEKILASKTVQEGGMPLLLCINLPCLLLLPALPRVASKQVFSQNMAKWCVQLYPPAGPGLRTQNPGPTPVSWNTCTAVPHATGAEGADTVRLPPGPWTPVTGLRHACLHSCVHSKQPTPKCTPAAHTCALSSPHLCPEQLTPVSPAATTRHF

SEQ ID NO: 33473 - protein, 74 aa, Homo sapiens
MLAFEGLIPCPGEADCEVPQGVQAVRRSLRRGVRANLSAAVSRCAAVEALFTSVHKDSVLRENSREWKGLSGSG

SEQ ID NO: 33474 - protein, 57 aa, Homo sapiens
VKATFPDNPTAKSPVSKGICITYGKHRILIHQMFLTAHPVIPPCTKVAIPADKQDNY

SEQ ID NO: 33475 - protein, 42 aa, Homo sapiens
MSKAPSCGPWPVPRREKRLLSKNSFKRLRDCVNMLSMSKICC

SEQ ID NO: 33476 - protein, 48 aa, Homo sapiens
MAEERVATRTQFPVSTESQKRAAEKSSGGSYFGEAELVDSSSLYPERL

SEQ ID NO: 33477 - protein, 71 aa, Homo sapiens
MCIGREYDKGGDRTGKEERTKILGKKETWASWNRETPERLEPREWGHRSESSGWGERRDQTTHTEPHQWAM

SEQ ID NO: 33478 - protein, 77 aa, Homo sapiens
MLSAFYLMEKDCFPLHIRNTARTSFLTSSIEHCTRGLSFTLDVLSSSFVWRSQDPEPVHQQQFFRSPSTTGPESRYE

SEQ ID NO: 33479 - protein, 448 aa, Homo sapiens
MSLPWSERACEGGAGVHQGSSYRKGSILCSTLGMLDSFEEVTEPGQCSNSGAECGACARLFNPLAAPTSPSTPHLACSHNCLGNFYKRQIFCYAAMMKKEIDVHVLMWNSFQDTYGYKEGQVEKDMEQPEVLYADGGSGNQCNHFGKLAISSLRFVSHRKAQGSWSSLEPENFKTQVLRDNPCISEHAGDFLTGQAVCGFGDKIRLLGALPALTASSAPGTVPGAQWVLTKYSEVLTCTSTFFQEEERKGKEAFSPLPKVFDICISLFSHCYKELPKASEELSGTEAPQTRQDVLSDLTSDLTSALCSEGPSPFAAGRKTLPICREELHRDPGENVVLQRVHIKSSLTVLRKVPGNFGLSVTHGFSRYFGAAVMDQVLIALTSLGTEENPVRNYDSHCVVGEAETWKAELSDVTQLGSGRAGNGAQVCLTLESVPLTDAEIQNIRAEA

SEQ ID NO: 33480 - protein, 154 aa, Homo sapiens
  misc_feature (1)...(154): Xaa = X or * as defined in Table 2
MVARDATSGSLSEESSALDLPSVRDIRDYVLQGPSQEANSEAFSSLEFHSFPYSSEADPDTSNLNIEQNNSWTAENFWLDPAVKGQSQKEEDDGLRNSLHRFYEKRHSRDTHFYPLEEGSTSLDDEKPNPGLSKDITHFPLAAECNERPVTGAX

SEQ ID NO: 33481 - protein, 101 aa, Homo sapiens
MREISRRIYKGRKMSGDLQTSLSEVFRLETIFPWQKICLNPSSVTTMVSLPRAYKGEQHWGWQGNQKEGAQPPITLAGRNAILADFKPNKMADIIVFDSKG

SEQ ID NO: 33482 - protein, 256 aa, Homo sapiens
MAYAAGRGCTKIGNVVSVIPTGFELTGNLFLAISKDAGKEQNDNCKLGYSSMDSSCFWSPHPPTLKRASRFGGCRKKMMDEMWWQFKSQVRSFCLHWYAWSKPAPVVQGPSRNLGVFIFSLFSSGLPEISALLSSDCGCPELCPLISEGSPHEAAICHSATHISALQGCTYNDDPKTAMFHVSHSSRGNRLRAAVPEGAYTSVFIARVAETWKRMLPALKHHTPGSSGFGLLDLHQRFAMALGPSATDWRLHCQLL

SEQ ID NO: 33483 - protein, 71 aa, Homo sapiens
  misc_feature (1)...(71): Xaa = X or * as defined in Table 2
XLRPGSALTDSRLAVNNRIPPEPGNSRSEISVKNERHSAAQPRLQACPAGYQTVNHQNKGAVPTELHPAEE

SEQ ID NO: 33484 - protein, 188 aa, Homo sapiens
MPRGHDVAPRASVCPSVLWGMLTSPQPRGGPAEADHVEAAILEEDEGLEIEEPSGLGLMVGGPDPDLLTCGQCQMNFPLGDILVFIEHKRKQCGGSLGACYDKALDKDSPPPSSRSELRKVSEPVEIGIQVTPDEDDHLLSPTKGICPKQENIAGCDTAAAYSIFILCVTKDILGLSVQQQDEWISSF

SEQ ID NO: 33485 - protein, 114 aa, Homo sapiens
MSGGAADAEVLGPFLGPLHWSSNLSPSCWEHRLVKALSCPLLQRTPLANSRAMGTEKTRRVPVKGLFPKDSFVSSVIGRPLLTCAVDACRDVRQKHGTLEKPNSEVPLVTPCFD

SEQ ID NO: 33486 - protein, 410 aa, Homo sapiens
MNTGKLQLSVHLEALGQPHHLGTSDVSFPGLTTHTANEGVSRLPLVSSNDPLYRPIVTATTPIHGYMWCTNMEMNTLKVMAFVAQNFLDNFPSSDTLSFIARIFLLFQMMTVYPLLGYLARVQLLGHIFGDIYPRRLQIGRLLKVFRVFFWTLSSGILGNWHTGRGECFAHGFALLVNALQVARNLANIRAARTRVRTIRTSASTVFLAPYTQGDIQKTKICIDAVSSKVASTSKVLTVSFTLLRSPAPLERHLANSQEPLFYVVHGQVFSLLFLEIVYNEYNIKLIWPFCIEPTNIVNVNHVIQRVSDHASAMNKRIHYYSRLTTPADKALYTYVARDAIGCRSRIALRNSPPRHVVVVCRSVWMARRFSYLCYDATNCVVARRPSCHINDDHKHEVHPRTTCMHRPYR

SEQ ID NO: 33487 - protein, 209 aa, Homo sapiens
MANMNSDSRHLGTSEVDHERDPGPMNIQFEPSDLRSKRPFCIEPTNIVNVNHVIQRVSDHASAMNKRIHYYSRLTTPADKALIRNFIFVSIGFSKLPQKEVLAIKLMPAVGRSRGSPWKKRQQQQTHIVPTELPPMVPIPRYIQQSSAETRNSGSDSVTPPFIPSVISLTLTHAWLDLPAAQYKKDASLHVDLAEGPSGPSHTVREVEQ

SEQ ID NO: 33488 - protein, 138 aa, Homo sapiens
  DOMAIN (11)..(53): PH domain identified by PFam, accession name PH, E-value= 0.00026, PFam score of 20.5
MRNLWMQLQLHCYCVFTGGDRVRMTANHESYLLMASTQNDMEDWVKSIRRVIWGPFGGGCGSSNCPVHLRCTHYPLPISSHLGDQIDCQSITVLVLKKALFYLIIAPKGKSSDAGNLDMPKRSHKMFHLREKVISEIL

SEQ ID NO: 33489 - protein, 146 aa, Homo sapiens
MSQPSQSDQAASEIEVTSSVLHASSQKGLSSQHLGFGAPQAGGGSFRHLAPQRKEVLEEYFKYDPEHKLIFRFVRTLFKAMRLTAEFAIEITHGGRDVERATGLVNKIHRQGCGDSFCNIGGNAKPYVCCGKEYVSSSKHQNGIAI

SEQ ID NO: 33490 - protein, 142 aa, Homo sapiens
MRVLLGAFTIPLARHRALIGAFLQSADWYIYNPLARHRALIGAFLQSADWCIYSPLATHRALIGAFLQSADWCICSPLARQKSSPSPHLTQKVQLASSLNPPSKQDTSTAAGNLAMTALATSCWIGVKKGPCSCSVLQRGTL

SEQ ID NO: 33491 - protein, 209 aa, Homo sapiens
MKLWTFAEHQLSKNSSTGRGDGPKQHFQADPMLIIYGETERKRRHSRKTCRWEYQVETKDTFLEELLFEPALRTGGDRTGEEEGVPYEQRLATTPSNTPTGPLWHPCPVPVTTQFFPLDPGIQSKQGGPLLQLTANNYNLEPKQHFGSWFGTMKRLGSQKGLSSQHLGFGPPQEGGGSFRHLAPQVSAIQVLFRPAQKSSLDPARTGQN

SEQ ID NO: 33492 - protein, 63 aa, Homo sapiens
MGSFLFRGNYQWKGPLLGAFLVFPAPEAPVAVCYSVLFQFCGLQVACANQLSYTLCLIARIEG

SEQ ID NO: 33493 - protein, 58 aa, Homo sapiens
  misc_feature (1)...(58): Xaa = X or * as defined in Table 2
VSKCHLVFLLSCGISDTADPGPGPRKQHGSASGSEAVSLSLKLPEAHSFQDTLGNRQX

SEQ ID NO: 33494 - protein, 69 aa, Homo sapiens
MLLTKGLSTGSSLFPPLLSCDPAKSPSGWYLWQVGTSSFGFGAPLLLSLYGGASSVFSLSFCLLNSLLR

SEQ ID NO: 33495 - protein, 112 aa, Homo sapiens
MLPQIARITPFHLLCSPPGAGAHPLFHKPQGWGEGLNLWPACLAVWLCACRYWSLSHLMVFPMSLPATYAAVFSSASLSPRGGTGRSGTTVSFPEKKEKGSSEYFSYYWRFV

SEQ ID NO: 33496 - protein, 70 aa, Homo sapiens
  misc_feature (1)...(70): Xaa = X or * as defined in Table 2
MAKKQEELKLQSSTEKLSATKVKTEALGYGRSWAPEVHVEICQLNIGLPRQXXXXXXXXXXXXXXXXXXX

SEQ ID NO: 33497 - protein, 96 aa, Homo sapiens
  misc_feature (1)...(96): Xaa = X or * as defined in Table 2
MRTWSRSRRLRGQMAAACPTVGTGCRRPSRSSYDPRLHEVECSVFYRDECIYQKSFAPGSAALSTYTPENLPQQVQAGRSGGVRVAGSVPALGRIX

SEQ ID NO: 33498 - protein, 271 aa, Homo sapiens
MDKVKNVGGHVRLITKESRPRDPFTKKLLEDGACVPFLNPYTVQADLTVKPSTSKGYLQAVDNEGNPLCLRCQQPTCQTKQACKANSWDSRFCSLKCQEEFWIRSNNSYLRAKVFETEHGVCQLCNVNAQELFLRLRDAPKSQRKNLLYATWTSKLPLEQEQGSKEKVERSILEKLLKNWLPQSNVTVSVNEDCLPMVPPGDHTQQPGYSMEKASGFFDPEVGSIQDWIFSTAYDAWTVGQGNLNYIYKNKDRSATQKINKDIQDLNTVQT

SEQ ID NO: 33499 - protein, 72 aa, Homo sapiens
MDASSPRTSDSKFFSFWTLELTPVVCQRLSGLRPQTEGYIVGFPTFEIWGLRLASLLLSLGIAYFGTSPCDR

SEQ ID NO: 33500 - protein, 115 aa, Homo sapiens
MNHLAKPDVKRNAKSGKAKKPLSDPASSGRDDERVYLLRGRTNKEKERFEDTGKKGLTSGQGTQEAGERWTNCKQDRDTCPLRQKEIVGLQVLQLLDSWTYTSDLPVALGPSATD

SEQ ID NO: 33501 - protein, 107 aa, Homo sapiens; identical to SEQ ID NO: 30653

SEQ ID NO: 33502 - protein, 63 aa, Homo sapiens
  DOMAIN (17)..(50): ESICULAR LUMEN DOMAIN domain identified by eMATRIX, accession number DM01292C, p-value=4.672e-09, raw score of 12.45
MPVLPGLLRDIVHSDSIASHYGVLLALYALMQFLCAPVLGALSDRFGRRPVLLASLLGANDHK

SEQ ID NO: 33503 - protein, 69 aa, Homo sapiens [sequence omitted]

SEQ ID NO: 33504 - protein, 458 aa, Homo sapiens
  DOMAIN (94)..(127): 3-hydroxyacyl-CoA dehydrogenase proteins domain identified by eMATRIX, accession number BL00067D, p-value=1.000e-31, raw score of 21.49
  DOMAIN (1)..(202): 3-hydroxyacyl-CoA dehydrogenase domain identified by PFam, accession name 3HCDH, E-value=1.2e-99, PFam score of 344.5
  misc_feature (1)...(458): Xaa = X or * as defined in Table 2
XTDLVVEAIVENLKVKNELFKRLDKFAAEHTIFASNTSSLQITSIANATTRQDRFAGLHFFNPVPVMKLVEVIKTPMTSQKTFESLVDFSKALGKHPVSCKDTPGFIVNRLLVPYLMEAIRLYERGDASKEDIDTAMKLGAGYPMGPFELLDYVGLDTTKFIVDGWHEMDAENPLHQPSPSLNKLVAENKFGKKTGEGFYKYKVPIGCRPLSWKWQGSFLTTEFQERCNSAMQLSDCRDEKNGHKDGTYAIGLLGTKRSRFQVLSTLPSIYRPIVKEAPVTYVHRVTDDSPEHVTAAGSRLKIQSRPESWKSFTGGLRLKLGQARRAPAQPNPPVKSAQSKPAITALRLRLGFKGMKIRSCSTSSGALRDVGDVCAEPGECRADALKQRNRTEICPLHPTMGLLQNERRQHMQKHLLKPPECGRWSIQVGTISAVPTSHDTFGAASKIHTITELLVEN

SEQ ID NO: 33505 - protein, 245 aa, Homo sapiens
MAKSSYGKKSGKQKKELHMEAEGSLWSSINGINLTLWGHAGELTARSWRCAFSGILQTARGQLGNVQASWESALSSRLVLSCQSVNDESDIQTSQAAGSAVGLQMLPPRIQCPTWDTKLLPDPVTNAQRLSSGRKGQGDKSMVKIRSCSTSSGALRDVGDVCAEPGECRADALKQRNRTEICPLHPTMGLLQNERRQHMQKHLLKPPECGRWSIQVGTISAVPTSHDTFGAASKIHTITELLVEN

SEQ ID NO: 33506 - protein, 107 aa, Homo sapiens
MVPIQTGDSLNQETAPDENSLHPPERPGKATAGQPEREGRIQMATAARTLLRIGPTFCRDVDKESPGPREGALDLNKRSHEAEMEIKVQRKEAASAPHTYGKSLKDV

SEQ ID NO: 33507 - protein, 236 aa, Homo sapiens
MCLDLNGILLLIVGLEQRLQHFLVSFSHNISKPFPTLTLRCFLPSNIRLQALVFLDSWTYTSGLPGAQLWPKNEGCIVSFPTFEVLGLGLNHYWLPFFSTYRQPIVGLYVVLIELFLVSGNHSIFAFTIVQSPEPRRDKWFCGPGPGHPAVCSLCLGACIQAAPAMAKRGQGTAQAIASEVKPKPWQLPRCVEPVGAQKSRIEVWELCLDFKECKETPDVQTEVCCRDNALMENLC

SEQ ID NO: 33508 - protein, 148 aa, Homo sapiens
MKHKARDLTEVMVSSKVMWQPLKTKLKDVHVRSLAVLIDDKRLAFSTSGIVSENSENLDTAWLQVLQVLDSWAYTSGLPRLSGLWPQTEGCTVGFPTFKVSGLGLIHHWLSAPQLSMSVWDCDLRNGKEEANVSEQQHTKREEETHDD

SEQ ID NO: 33509 - protein, 189 aa, Homo sapiens
MEVWVVHLVAQFVWKENGLRVEYAQTLTWAVANSHLLMVLGGGLEDRRPGVEACGSTWEWPCSVKVFPLLINAHKKASTMGDAYLSQVLSFRSYPLPGSAPEKRVLGRKLQSILAILLVAHIFTEETTRDGLAGATLCARCWAWVVHRQMDNGVIYRSVNTFLEMPEQFHFGTDNMGFVVTQNISPEWD

SEQ ID NO: 33510 - protein, 235 aa, Homo sapiens
  misc_feature (1)...(235): Xaa = X or * as defined in Table 2
MDALSSCVTPNASSYAHCNYFQNPSMQSSYPVEFLPSNWPCSTTDENTKTEVNLEAVFQIVDELHSSPKLEMVKVEPVENQCPTSPSYRGQHILANSNNSNPCSASQASQLEPLTPVGSDIMSFVVGTEQAVACSLPQSPEYIYTIHTAQPVENSTIQESAAIQQAHVKLKEHLNHNPSPSSVVFVQEGPPFSTHQVDANIKCQTSSRENILPSEQMGFLISEMGPASKPSEDTX

SEQ ID NO: 33511 - protein, 200 aa, Homo sapiens
MPHKEATYSLWPLLLVNGYNNIHAANPEKFQEDPLTYYLCQALYSSQQCWKIGITILKLQMRKLRSGDLSVSEIPNPRGMDRLPEGSSETCVRKEKLSGLSSLLHDHSFSPTYHCLAWNGSWKEDSRETIETDNRKFSQSRAQSSIECSGIISTSAKALMQYQDADLLLTVSTCYKRKGGKSVKEKWLDQWSEKEDKVVM

SEQ ID NO: 33512 - protein, 79 aa, Homo sapiens
MTSGPCRPGVACWACAAAVRRVGPSGSAEAGMLPAVGSADEEEDLRRRIVLNWFPWRRPKRGGGKVWPRRQDPSHNYHR

SEQ ID NO: 33513 - protein, 63 aa, Homo sapiens
  misc_feature (1)...(63): Xaa = X or * as defined in Table 2
MLPAVGSVDEEEDPAEEDCPELVPIETTQSEAGGKVWPRRQDPSHNYHRVFRCWEDNTSXTIF

SEQ ID NO: 33514 - protein, 49 aa, Homo sapiens
MLPAVGSADEEEDPAEEDCPELVPIETTQSEEEEKSGLGAKIPVTIITG

SEQ ID NO: 33515 - protein, 374 aa, Homo sapiens
  misc_feature (1)...(374): Xaa = X or * as defined in Table 2
MDTGGVGSSSHKEVSSCGWRADVRYGLNSLQPYPVSGVLLQWHILHEAHLEYDCFADASSEGALERAWREKTRPKSLSEASCWMLSFVLKASAHNEGESVCDWRVKGRPTYETDDAFPGYNYMCLGCHLCSPQPEMLRLSAALSGSENVHKRAENVDLFTGPASFTFRHLDGWMWNSYAVPLLEVYIPPKLQLEKRLTNVKQMETQMMALSKAVLAKTDSDAATECCMLQKQSNQCHYPKTNFPIDRTRTNCRPGAPVSKRSKCVLCASVPSSAKEQQEHLHHKAVKKNEEFSNGKHLEECLEHSQATVKISDTMQRMKRSNRMRKAQLQERWELIHLGKHEQEQEGSLWDCAHGTLRCSRKSSVRSKVTLPAX

SEQ ID NO: 33516 - protein, 120 aa, Homo sapiens
MCDRKEFVFSFNAMASSSMHSAGGGSYYHQQVTYQDIKPCVIKSVLPIPSNTESAHAGDFSTNSSEALQLFSNSVNQESRMLLNSEIKDVQNNGFQAQLAQEREPRQNLWCSRIEELELK

SEQ ID NO: 33517 - protein, 465 aa, Homo sapiens
  DOMAIN (48)..(90): Fork head domain proteins domain identified by eMATRIX, accession number BL00657A, p-value=1.000e-35, raw score of 19.39
  DOMAIN (48)..(143): Fork head domain identified by PFam, accession name Fork_head, E-value=7.1e-59, PFam score of 209.0
MSSAPEKQQPPHGGGGGGGGGGGAAMDPASSGPSKAKKTNAGIRRPEKPPYSYIALIVMAIQSSPTKRLTLSEIYQFLQSRFPFFRGSYQGWKNSVRHNLSLNECFIKLPKGLGRPGKGHYWTIDPASEFMFEEGSFRRRPRGFRRKCQALKPMYSMMNGLGFNHLPDTYGFQGSAGGLSCPPNSLALEGGLGMMNGHLPGNVDGMALPSHSVPHLPSNGGHSYMGGCGGAAAGEYPHHDSSVPASPLLPTGAGGVMEPHAVYSGSAAAWPPSASAALNSGASYIKQQPLSPCNPAANPLSGSLSTHSLEQPYLHQNSHNAPAELQGIPRYHSQSPSMCDRKEFVFSFNAMASSSMHSAGGGSYYHQQVTYQDIKPCVDVRLPPQALLVQARRVTGTLDRHKKLLSSRGITVGRRKGFHLSPTGVFGKESPMQRHSAAVGTSFLTPSKLLRNVSGGSDLTAAIGK

SEQ ID NO: 33518 - protein, 335 aa, Homo sapiens
MQWPSLCQKWTTKPPERVGERAIMRHSWRATGGDPPSSLNWQCMLQLGDVAGRFYHMSVDLACDRTSCELMVPVAGRPLCRSSSMELLLLLPLHIPREQMLLAEFVFSFNAMASSSMHSAAGAPTTTSRSPTKTSSLRDVRLPPQALLVQAGGHRDPGPAQETAFFSSSRYREKQTQNMHRPRSQPQQGQDRRPPRNRQHPGQTRRRTKRETRGAGNAAKNGPAVSGGGATEARHVDQTYTDNKAHNYTPHRSIKLPYDQRAKPACRRGTHHMRETHVNARRELSLHSSAVLRAAWIRHFTVTSVRGGCQRCSYLHSANEKQAQRRSVTPPASRS

SEQ ID NO: 33519 - protein, 62 aa, Homo sapiens
  misc_feature (1)...(62): Xaa = X or * as defined in Table 2
XPDNLSDSLFSGDEENAGTEEVKNEINGNWISASSINEARINAKAKRRLRKNSSRDSGRGDS

SEQ ID NO: 33520 - protein, 145 aa, Homo sapiens
EMLRDLNLGETKSGVPVLAVSLALEGKASHREMTSKLLSDLCGTVMSTTDVEKSFDKLLKDLPELALDTPRAPQLVGHFIAIAVGDGILCNTYIDRYKRTVDCVQAKAALDKATVLLSMSKGGKRKDSVWGSGCGQQSVNHLVKE

SEQ ID NO: 33521 - protein, 246 aa, Homo sapiens
ENCVYETVVLPLDERAFEKTLTPIIQEYFEHGDTNEVAEMLRDLNLGEMKSGVPVLAVSLALEGKASHREMTSKLLSDLCGTVMSTTDVEKSFDKLLKDLPELALDTPRAPQLLIARAVGDGILCNTYIDSYKGTVDCVQARAALDKATVLLSMSKGGKRKDSVWGSGGGQQSVNHLVKEGYERIYNEIPDINLDVPHSYSVLERFVEECFQAGIISKQLRDLCPSRGRKRFVSEGDGGRLKPESY

SEQ ID NO: 33522 - protein, 255 aa, Homo sapiens
MKKMLGHEEVKNEINGNWISASSINEARINGQGKKATKEKLIPGTSGRGDSVSDSGSDALRSGLTVPTSPKGRLLDRRSRSGKGRGLPKKGGAGGQRCLGYTWTVMSTTDVEKSFDKLLKDLPELALDTPRAPQLVGQFIARAVGDGILCNTYIDSYKGTVDCVQARAALDKATVLLSMSKGGKRKDSVWGSGGGQQSVNHLVKEIDMLLKEYLLSGDISEAEHCLKELEVPHFHHELVYEAIIMVLESTGRKYI

SEQ ID NO: 33523 - protein, 557 aa, Homo sapiens
  misc_feature (1)...(557): Xaa = X or * as defined in Table 2
MRVNGLAWSPGTHCAYMQNVCARKASRQADAHTLALCSQSPRVTTNVGEQEDLKQSWKLRLGHRSHAQRQPSMQQWKGFKFVIKQIRVQMPTLPSSSFRTLSDHLISLNLCLPNPLGKRSDFESMGLGGTTNPRARAEEGLGYPSFQGYRISPQAHICRPSYRTSFRDRSERVDLIPILASLGLLQADTAFQDRCKQGRCEAEVKTMRSRVALAYPTADGVNVRHRRQMGIVSWCGFIAQRRAVQGYNHLLGGGSAPLLPDNELLLGFVLGWSVVLLILEKRPLRMGMRLRLLRDRRVSSRDRGLQKPKAEKQKEAQQRLADMEKIAFWRTEHIRPKIHTHTGIHTQTRTHTDRQREGKKHTEGRDWNRLEGSEEHWKMWENLEPPRDLLNDFDKSADSVLNNKFQAEVFSDGDEELLVNWNKDIHPRDVSVTVEEAAPTVLRESCNDRTFTEVQEAVGIPMSQVEPPRCPVHPLETPLTEALGAVDISSPTEMTPTAGWGADVWLTSLALIHWFVICDAQLQHLECSDAIPTTRHLHDCASFVQQRKPAGEQFQGX

SEQ ID NO: 33524 - protein, 42 aa, Homo sapiens
MGHPKSPTPYFPYHSGTGRVLFPLLLAAAAPKRAGQMCLRQV

SEQ ID NO: 33525 - protein, 482 aa, Homo sapiens
MQIFAYRPVFVEPLSVSLPGSPGRLSVIFTAVPLWVCEVLDHERSRPTSKKMVVPLHGSSLSNEATPRYNSEEEAGNGRRQQSLSLECWPLWTSHTFHTPPLMPVAVARCTRIPYSLFPVSLRHWQRPLPTPVGRGGSKASLYGPLAKGSQSCGSQGDDPSAASLALSFPPPISRQGLQPRIPQTVCHGSRFLSIESSQKGCSLMTVGYLRMCISKRFSFHGCGVPGDTVHLYPTVTMPPLPPTACHPVSITPVWVLDTVLGKTVQQGTLAKAEEEEEGIQSQNEDAPATLLPEAPLFGEPGSPSLRSVCLPGALNSLGFAGGSKPQGLQLNLWLHIINLGSFKNPDAQALLQANQIGISGGTAVGSCISYPQSPCLWFQREEEGKKRMKRIVSVLGEEPTKHFEIRSLWEVAVLHKYSEVQHYLTGNEATIPPRAEFKDCLQEGLASVCLLQKPRANRGSPLPHKEGDKWVHWRATVTIKS

SEQ ID NO: 33526 - protein, 125 aa, Homo sapiens
MKKASRSVGSVPKVSAISKTQTAEKIKPENSSSASTGGKLVKPGTAASLSKTKSSDDLLAGMAGGVTVTNGVKGKKSTCPSAAPSASAPAMTTVENKSKISTGSWTLNILAALESLNSNFSPATQ

SEQ ID NO: 33527 - protein, 100 aa, Homo sapiens
  misc_feature (1)...(100): Xaa = X or * as defined in Table 2
XVKPKVEDLDKDLVNRYTQNGSLDFSNNLTANEMEDDEDDEEMSDSNSPPIPYSQKPAPEGSCTTDGFLPDCWPRGTPGPPPVTGCAFTEAATRGLSSSP

SEQ ID NO: 33528 - protein, 168 aa, Homo sapiens
  DOMAIN (43)..(69): Immunoglobulin domain identified by PFam, accession name ig, E-value=0.069, PFam score of 11.1
MERGPVTCTQAQTVRGRTGHRRRFGPGAHGLREEPEFVTARAGESVVLRCDVIHPVTGQPPPYVVEWFKFGVPIPIFIKFGYYPPHVDPEYAEQSCFQAPSFPSPSPAEELRVVSARHGLCQALDASWFCTGVQRQPWTQPPTGYHLAQRAGDLYPVGFPKETYFEKV

SEQ ID NO: 33529 - protein, 125 aa, Homo sapiens
  DOMAIN (2)..(57): Actins proteins domain identified by eMATRIX, accession number BL00406B, p-value=1.000e-40, raw score of 5.47
  DOMAIN (1)..(124): Actin domain identified by PFam, accession name actin, E- value=2.4e-91, PFam score of 301.0
  misc_feature (1)...(125): Xaa = X or * as defined in Table 2
MEKIWHHTFYNELRVAPEEHPTLLTEAPLNPKANREKMTQIMFETFNVPAMYVAIQAGLSLYASGRTTGIVLDSGDGVTHNVPIYEGYALPHAIMRLDLAGRDLTDYLMKILTERGYSFVTTAEX

SEQ ID NO: 33530 - protein, 23 aa, Homo sapiens
MNSPVDPGARQALRKKPPERTPE

SEQ ID NO: 33531 - protein, 490 aa, Homo sapiens
  DOMAIN (286)..(305): ACTIN SIGNATURE domain identified by eMATRIX, accession number PR00190D, p-value=5.680e-10, raw score of 19.23
  DOMAIN (280)..(295): Actin domain identified by PFam, accession name actin, E- value=0.00018, PFam score of 15.9
MCLLDCETHIKVNQPHLGVRSGGFFLNACLAPGSRQHKTDKTVPKVKIYVNSSAWMSGQGLEGKRQKDQGQGGTRKNIKGGSLSVSGRHALYLIVILVFVCKPGEGAPVIFDPLKRTAAVKSQPELGGQIKFVICLNASREVIGEAAECCDRVEMPAIPVPSLVVEAEILDPQAQLPLHGAELGTCSPPCPSPPPQWAPTRPEPPQWVPPPALRRLVPSTTQGLRSAGAQLGTDEQLCPQPGQPGTGEKWMGRRIQGTTRPRQERYHDPEVPHGAWHHPNWDDMEKIWHHTFYNDCMWLPRSTKEPGGVFQRHGLRPNRIAFLQILPLYPLVKFPGLGLRGPSPKVGKEIPVQLFAWLPPWGKGFRAAICFVDPCRGGGDVLLSPHPGSSTPADLLYKPPLTVFLSNGGVSNPKREKTRRGAEETHKTCSDKATRAGPPGENTITAKIRAPPVKRDTLKDAQKISGKGDTIKDIPVIVISTHRNALLFQE

SEQ ID NO: 33532 - protein, 128 aa, Homo sapiens
  misc_feature (1)...(128): Xaa = X or * as defined in Table 2
XPPHPNPRALRAPRAPGQEVPAVTANHSALSANSEESEGRAEEPAQREPGPVSLQDPLEATHGDEGSKDLLVNIGVAAGPEEKEKEELRAAAFGSAPGLGPVVLGEGLPLQDEVMGAGAMGSLCGCDP

SEQ ID NO: 33533 - protein, 424 aa, Homo sapiens; identical to SEQ ID NO: 32629
  DOMAIN (71)..(103): GTP-binding elongation factors proteins domain identified by eMATRIX, accession number BL00301B, p-value=3.647e-20, raw score of 20.09
  DOMAIN (5)..(129): Elongation factor Tu family domain identified by PFam, accession name GTP_EFTU, E-value=6.5e-39, PFam score of 133.8

SEQ ID NO: 33534 - protein, 196 aa, Homo sapiens
MAASVSGGVTLGLLRVNDTSPNWRAQSCLPTVAVIHETPPKEYKQAEKCEKRHWPSLLAYIFLPWWMLEHQTPSSSVLEPGLALLAPQPADGLLWDLVIILEGREAMSSSGKYEPNCQKQMGSKLRSQTPQLKTCGTSVGTLSRVSEPVSPGCPNQSAAAQRMGKLGWFPSTNGHLRLLEAGTLAGQLCSLRVWEL

SEQ ID NO: 33535 - protein, 96 aa, Homo sapiens
MESWWGLPCLAFLCFLMHARVQCSINYVRYATPHYKVDCVLDDLSIRWLMKSVLSTLKAGRLQAEEQGEPVQVPKLKNLESDVPASTMGERCRPED

SEQ ID NO: 33536 - protein, 247 aa, Homo sapiens
MHGDVSYDIDTVFSEDIIGYHGSKRHEQLSWYLGAGLVAGQIQQERQLLMYATQLPERLKYKQAETYEKRDWPSLPAYVFLPCSMLPALEHRTPSSSVLELGLALLAPQPVDGLLWDFVIIIIGENVLRSSSAQTSQPEAKFSLASARLEADSKKAKKSRELETSDVSSPSRAGAGAHMIPAVFRQSSEMPAAVEKGVMCVFHVPPSSSPSYLQIPVFCHCRFRGLNIMVLAVPQSFTSIDIYQFRN

SEQ ID NO: 33537 - protein, 62 aa, Homo sapiens
MESWWGLPCLAFLCFLMHARGQRDFDLADALDDPEPTKKPNSDIYPKPKPPYLPTARGIPTA

SEQ ID NO: 33538 - protein, 144 aa, Homo sapiens
MRLHSSALGWSMGLGAVEQGVALVEEARAAKEPTEGVGGSGMAACRSQALPRGKAAKARREIERSAAEGVGSGLGQPRKGLPQCSGGLKGSSSAAKVGAQAEEAPRGSGGCEDCQHAVTSHQEPAKLKDDEHKNLYDDLFPLNG

SEQ ID NO: 33539 - protein, 158 aa, Homo sapiens
MRPHSSALGWSMGVGAVEQGAALIEESWAAQEPMEGVGGSGMAGCRSRALPRGKAAKARHFQHEDHGSQGYDDHQRVENELTYYAHDDSEKLHDNFTIFANSSELGKQSLPQTLFVTVESVNDEAPLVTANNILQGLILVKKVAFPKALSASWGDPEI

SEQ ID NO: 33540 - protein, 980 aa, Homo sapiens
  DOMAIN (327)..(439): Domain in Myosin and Kinesin Tails domain identified by PFam, accession name MyTH4, E-value=2.3e-55, PFam score of 197.3
MVEGKEKQVTSYMDGSRQRDSEEDAKAETPDKTIRSHETHSLLREQHGETTLMIQSSPTSCVIFEHSIHQKRKLQPKRKPPMEIQIYPLVIVIAGCGEKVSVAVVFHMNFGPRAKLKLLERHVYGRKHCYRFYTKLAQRRPPGGPVPFKRYCYRSTNGHDDAMQFKTVDTCSSQTRAAFPWSKARDLQPAMPEPPTHSMGSCAAGASLTSTAPCSTAPSPIDHLRAKECERTAQDWQAAPPAALLKVCKHTNQHPVFSSRFVSAPIDTLYLAALVRTWRTFMSSSRIVNTPIGTLCLAQVLKDKGYTTLQDEAIKIFNSLQQLESMSDPIPIIQGILQTGHDLRPLRDELYCQLIKQTNKVPHPGSVGNLYSWQILTCLSCTFLPSRGILKYLKFHLKRIREQFPGSEMEKYALFTYESLKKTKCREFVPSRDEIEALIHRQEMTSTVYCHGGGSCKITINSHTTAGEFAVGVPTLFGTGPPDASALCHCRLETATGNHSVSVGLQKQGRVHSEQWTVLMRTRASALAQQLALPATTHYAERKFNVCLQYDDRRFSHTRSARTSLQSRSSMTVTVMPLHHRTSVKLPGDYLEDPPLISAEERKDEKKNIRSSGVVSLRGWSFVVALLSCPSDKGIFFCGQKRGMETTPLSCDDYLLMYRIRNVVVNLDRVPNSRERTSDSKFFSFGTQTGSPCSLACTQPIVGPSDHDPFWDIGCNRHAPSLIALTVLRNAGTVGIKEANSEKEGEWIIRNASWKAEVATDAFNNTDTVPEIQRKDYMYFLPRCAYLRVSVVVARRFVRVLRRTTNAVDLHSTVGRNGTELLLQGRPNPAISRGPTNPQGREGNVCTPQSPPGVANWAGKKAKASIRRMGKPLTAGPCHWKSPYSQRQPIVKTNKTRRLIICQIAEKYVLSPKRYRARFSAGVKKMERPPLFSQRLCELFFLYGIYFILTIADNVPNREHPKFREWMLKSTLAGATSKHP

SEQ ID NO: 33541 - protein, 572 aa, Homo sapiens
  DOMAIN (171)..(200): AMINOTRANSFERASES CLASS-V PYRIDOXAL-PHOSPHATE ATTACHMENT SI domain identified by eMATRIX, accession number DM00813A, p-value= 8.898e-17, raw score of 20.30
  DOMAIN (13)..(343): Aminotransferases class-V domain identified by PFam, accession name aminotran_5, E-value=0.032, PFam score of -97.7
MAGCRSRALPHGEAAKARREIQRSAAAGPGAKPLIARGRRGRLAGRSECGARRAHAHPELQLAQKRPAALVPARASPSTPRCKLREPAPALASPERGSHSAARSPLSRVQVSGQAEVDDILAAVRPTTRLVTIMLANNETGIVMPVPEISQRIKALNQERVAAGLPPILVHTDAAQALGKQRVDVEDLGVDFLTIVGHKVPYGAAPTNGRAGPADLLITVQGGLRETPGALAVCRGPGTSPRGFAGNKAARPRLSRSARSRAHAARGRHPQDCPAASAPQVQLGPRLLLRRLTGRGPMAALPQTAKRSAGRRLDARQQWGGDGGGRGAGEGCAGTRGESAQRLRETQLAGEEAGALGQVKGNQGFSQTAGPAAGNGMATAEKRGDPKHVVSLLVKSEKSRRQGKVYMDYNATTPLEPEVIQAMTKAMWEAWGNPSSPYSADPSPILGAHLVPALSGRVVLSQSEVSTSAADLVYGSRACSDIGKLTSAGLGRKAKDIINAARESLAKMIGGKPQDIIFTSGGTEPSEGAKPHFITSSVEHDSIRLPLEHLVEEQVAEASCHKGVGKCGQTFP

SEQ ID NO: 33542 - protein, 55 aa, Homo sapiens
MLKTASGPSALINNPGHGLTDSFHPESEDHGGAILNSAQRRLPGILMSPISIQPM

SEQ ID NO: 33543 - protein, 363 aa, Homo sapiens; identical to SEQ ID NO: 30438

SEQ ID NO: 33544 - protein, 489 aa, Homo sapiens
MRQTMVPTCIGWCWLQLLMEATNSDRSMQKLHSTGQALGWSMGLGAIEQGAALVGEAWAAQEPTEGVGGSGMAGCRSRALPRGKAAKARREIERSAGVFLAVPTNGQAVAAPVGQSCVIAQRLAKLQVMQVRNGGAPGVTFKADEEELWRPFEAWPLGMGSEGDGPRAEELQLLEYSAPPGRRAAAGLGERKDVRARCREARGLGGPLRSSEPVRAVPARAPAVDLLEEAADLLVVHLDFRAALETCERAWQSLANHAVAEEPAGTSLEVKCSLCVVGIQALAEMDRWQEVLSWVLQYYQVPEKLPPKVLELCKMQEPGAVLDVVGAWLQDPANQNLPEYGALAEFHVQRVLLPLGCLSEAEELVVGSAAFGEERRLDVLQAIHTARQQQKQEHSGSEEAQKPNLEGSVSHKFLSLPMLVRQLWDSAVSHFFSLPFKKSLLAALILCLLVVRFDPASPSSLHFLYKLAQLFRWIRKAAFSRLYQLRIRD

SEQ ID NO: 33545 - protein, 141 aa, Homo sapiens [sequence omitted]

SEQ ID NO: 33546 - protein, 248 aa, Homo sapiens
MHSGRIKVFPVPFGRSDGTGIFSSTCHIWLLNSLMMTKEPNLPGFSRQGNILMFFNSVNTWAAGGAACQSRAVRPHSSALGWSMGLGAVEQGAALIGEARDAQEPMEGVGGSGMAGCRSRALPRGKAAKARPDTVQELSGNTNTFKHKGRDEAAVRHIPLPDDERERENEKQDGGKIESQGEKEIKRASTNKWPTLSQTDHIPSEESDPKRQQELEMMSESHALESRQCPGRGWLSWCPHHSLPATWS

SEQ ID NO: 33547 - protein, 637 aa, Homo sapiens
  DOMAIN (295)..(306): RNase H domain identified by eMATRIX, accession number PF00075B, p-value=1.346e-09, raw score of 12.56
  DOMAIN (466)..(599): RNase H domain identified by PFam, accession name rnaseH, E- value=1.3e-10, PFam score of 48.6
MQENLYVLLCDEELDAVSLEAVHQQKMKNRQAHSSSGCCQKVANAPRNEESSGQFRVIGNEKFEKGPCGVRQQIFEKVLLPNRTCEFVTPRFNRNFEDLIKDLKAAETLIDFLVYEPKNQRRLVNRFRLPCKLLHNLGHPLKTDAAQSPRKPPGPSWMPSFGSKPPSHPPLVSPHLNPQVWDTSSPSLATEHASLTISLKPNHPYPAQSQYSIPQHALKGSKPVITRLLEHGLLKPINSPYNSPILPVQKLDKSYRLVQHLCLIYQIVLPIHPMVPNPYTLLSSIPFTTHYSVLDLKHAFFTIPLYPSSQPLFAFTWTDPDTHQAQQITLAVLPQCFIDSPHYFSQAQISSSSVTYLGIILMKTHIGLGAVEQGVVLVGEARAAQEPMEWVGGSGMVGCRSRALPRGKAAKARREIERSAVTIVPVLDFNPAFHIIPDTTPDHHDCISLIHLTFTPFPHISFFPVPHLEHTWFIDGSSTRPNCHSPAKAGYAIVSSTSIIEATALPRSTTSQQAKLIAYTDSKCAFHILHHHAVIWEERNFLTMQGASIINAFLIKTLLKDILLPKEAGVIHCKGHQKASDPITQDNAYADKVAKKQLAFQLLSLTAVFLLLIRPLSPTSPLKLPLINLFPHKANDS

SEQ ID NO: 33548 - protein, 1018 aa, Homo sapiens
  DOMAIN (7)..(54): kw TRANSCRIPTASE REVERSE II ORF2 domain identified by eMATRIX, accession number DM01354V, p-value=1.000e-40, raw score of 12.97
MSELPFTIASKRIKYLGIQLTRDVKDLFKENYKPLLKEIKEDTNKWKNIPCSWVGRINIVKMAILPKVIYRFNAIPIKLPMTFFKELEKTTLKFIWNQKRACIAKAILSQKNKAGGITLPDFKLYYKATVTETAWYWYQNRDIDQCNRTEPSEITPHIYNYLIFDKPEKNKQWGKDFLFNKWCWENWLAVCRKLKLDPFLTPYTKINSRWIKDLNVRPKTIKTLEENLGITIQDIGMGKDFMSKTPKAMATKDKIDKWDLIKLKSFCTAKETTIRVNRQPTKWEKIFTTYSSDKGLISRIYNELKQIYKKKTNNPIKKWAKDMNRHFSKEDIYAAKKHMKKCSSSLAIREMQIKTTMRYHLTPVRMAIIKKSGNNSPVSSFGLDVTSPIWLFLHDPPQNPLYPIQAITTLQFHHEFLHLLPSWTMGPSSCRKTSSGLPLIRHYDELYDYFIIYFNVTIIEIKCTINVMCLNHPKTIPRQPSMEKLSSVKPVPGAEKIRDHCCRALAMLRALGEKRNEHPTLRCAEPRYALMSLPGNTASLATRLRTIAFLKRHRAFRFECLLPLCYKPLQSCGLWSYGGDSVFSAWKEDISMSLPKHPGLGDLDASLRDSASGCFGLFRKFQIRQNNYNRHSCNMAPSLPPGYNVIDILWYSEKKSSMGCCNLLGVHFRHYSSGLLPSPEILLEEAGEQQRQVPAPFSGISDLEGHQPDASRIVPVQGILQPLLEGLVQLGGRGNRTCLTKYFDCPFAEGGGLPRSSFLSVDQASLLVRCDDGTWIPWLVGGVEGEARAGTRAVCRACGPARVPGGRGLGGPCTQSSRPALLAPGNEGLSTRANGCGECTGSPSSASPPALRWISRWALAAFPWGRARDLQPAMPEPPNPSVGSCAPEPPPRAPPLAPRHPVPSTTQGLRSAGAGRGTARQLHLQPPCEIHWVKPAGLLSLVGPWRTFMSSSGIVNTPMGTLYLAQARKSAASLLSQLDHEPTRRKKLRTHPNIRRNKLQTRSLKNCNTHHEGPRLHS

SEQ ID NO: 33549 - protein, 178 aa, Homo sapiens
MDRRWDNLEISEDERKIWESLELLRDLLNGFDQNADSDMDNEVQAEVFWNADANVSGIGGFLVSLTSRMKPRTLAAAGGVACQSRAVRPHSSALGWSMGLGAVEQGVALVEEARAAQEPTERVGGSRMAGCRSRALPHGKAAKARREIERSADEYGSNDDMIKEELTTSWNICKKKTA

SEQ ID NO: 33550 - protein, 831 aa, Homo sapiens; identical to SEQ ID NO: 31979
  DOMAIN (6)..(36): kw TRANSCRIPTASE REVERSE II ORF2 domain identified by eMATRIX, accession number DM01354R, p-value=4.000e-19, raw score of 8.50

SEQ ID NO: 33551 - protein, 59 aa, Homo sapiens
GVPPLAQHLADGPVILVGVTLVCPARAWCRLLKIMTATHGTPDVVLVPFVGAASILLRR

SEQ ID NO: 33552 - protein, 378 aa, Homo sapiens
  DOMAIN (214)..(236): FOS TRANSFORMING PROTEIN SIGNATURE domain identified by eMATRIX, accession number PR00042D, p-value=8.239e-09, raw score of 8.97
  misc_feature (1)...(378): Xaa = X or * as defined in Table 2
XPSLPQVGLEVGLEELQVSLPGPSSVLSVASPASCDSQAEAVVGQPGQRQESEPELSPLSVGHPLLELEISVSGAKAIISNDIITPYSSWMTPFCPTEAAPWYPSSGVFGLQLTGVQRTPQGQWQCQSLTCSTPTSLCYTPASPWLVGLASELNFFQSLLQVGHLHLEGQFMVFLPLIGPQGVPPLAQHLADGPVILVGVTLLQDKFEHLKMIQQEEIRKLEEEKKQLEGEIIDFYKMKAASEALQTQLSTDTKKDKHPVPGESWAVSLLRAPVHTMNCGTFRAFHFSENSSCWGYKMECEEGLGPQGGACGLGGVHAPLLSPEGLDSGTRVPGPKQERQEQERTGELDRGYRSLCTGLPLVNQGQSEHPKKAFSPWX

SEQ ID NO: 33553 - protein, 540 aa, Homo sapiens
MFVWRNVEGHSAAVFSWYSIPFLTPPCSHTRPSNLPVTQWPPTRENNLPSWQPLLMSVHQAQSLSALRKEQDSSSEKDGRSPNKSDKDHIRWPMSGAHDLQQAAPGPGGAHQGHPNQDNRTVSQMLSERWYTLGPNEMQKYHDLAFQVKVAHLQQGPKEVQLRGQAHKPGASRSVTRARGSGEYQRRALPLPLGCPLNSSQLQPKHFRARIPRSSLCGAEWLHTVQGTWLSLAQAFSHSGVHSLDGREIDRQALRELTQVVSGTASYSGPKPSTQHGAPGHFAAPGEGGDPWAALLPPTSLQSPGVWSTQQSGPPTAPTPGDGGPGTPSKVACFLPMDPATFWCKRPESVGDLELPGSSVIRVEKPRTGSGNRRPRRRCPLHCTYPGPVPALIMQLFQAHCFFLSTRPQPPSRPTMHTSSPPRAFHFSENSSCWGYKMECEEGLGPQGGACGLGGVHAPLLSPEGLDSASFDSSVTCPLWHHLLIEDFYDSRDSQEHGRNQGSLEKRLTPCMVQYIDPGTSVLPESKKAIKVQQDHVKKT

SEQ ID NO: 33554 - protein, 300 aa, Homo sapiens
MFVWRNVEGHSAAVFPWYSIPFLTPPCSHTRPSNLPVTQWPATRENNLPSCQLLLMSVHQVGQGVLTLGGPLEPPALKAQGPQPHTLWGWWNLVKAHLPPRRRRPPAPQESPGWTAQSLSALRKEQDSSSEKDGRSPNKWDKDHIWWPMSGAHDLQQAAPGPGGAHQGHPNQDNRTVSQMLSERWYTLGPSEMQKYHDLAFQVKVAHLQQGPKEVQLRGQAHKPGASRSVTRARGSGAYQRRALPLPLGCPLNSCQLQPKHSRARIPRSSFCGAERLHTHMASEDIASDEAHTIIHEEEG

SEQ ID NO: 33555 - protein, 465 aa, Homo sapiens
  DOMAIN (396)..(412): Calcium-binding EGF-like domain proteins pattern proteins domain identified by eMATRIX, accession number BL01187B, p-value= 7.300e-14, raw score of 12.04
  DOMAIN (384)..(420): EGF-like domain identified by PFam, accession name EGF, E- value=1.3e-08, PFam score of 42.0
MITCVNGLPGLNSPLKNWKVLSAVFSCYSIPVLTLRASNTRPSNLPVTQWPPTRENNLPSWQPLLMSVHQAQSLSALRKEQDSSSEKDGRSPNKSDKDHIRWPMSGAHDLQQAAPGPGGAHQGHPNQDNRTVSQMLSERWYTLGPNEMQKYNLAFQHMASEVIASDEEHTVIHEEEGVMNVIADDGFSTTDTDLKFKEWEPSKPRSLVNAAERAPYGPNPWGWGPRTPSKVACFLPMDPATFWCKRPESVGDLELPGSSVIRVEKPRTGSGNRRPRRRCPLHCTYTGPVPALIMQLFQAHCFFLSTRPQPPSRPTMHTSSPPRAFHFSENSSCWGYKMECEEGLGPQGGACGLGGVHAPLLSPEGLDSDQYCHMEGPALDVNECAENPGVCTNGVCVNTDGSFRCECPFGYSLDFTGINCVASGSFDVSLKVVDLFLQVDGLLSVLMCSPSQVYYPAEVVEEKSY

SEQ ID NO: 33556 - protein, 64 aa, Homo sapiens
  misc_feature (1)...(64): Xaa = X or * as defined in Table 2
XLMKVVERRRTPAEIREEFERLQREREERRLQQRTNPKGTISVGVDATDLFDRYDEEYEDVSGX

SEQ ID NO: 33557 - protein, 34 aa, Homo sapiens
VVERRRTPAEIREEFERLQREREERRLQQRTNPK

SEQ ID NO: 33558 - protein, 344 aa, Homo sapiens
  DOMAIN (29)..(46): Nt-dnaJ domain proteins domain identified by eMATRIX, accession number BL00636A, p-value=5.304e-15, raw score of 8.07
  DOMAIN (14)..(70): DnaJ domain identified by PFam, accession name DnaJ, E-value= 1.9e-06, PFam score of 34.8
MATALSEEELDNEDYYSLLNVRREASSEELKAAYRRLCMLYHPDKHRDPELKLMKCLVTPKPGPSMIYMGREDWKWKDGRLWKGGEPLLEIREEFERLLREREERRLQQRTNPKGTISVGVDATDLFDRYDEEYEDVSGSSFPQIEINKMHISQSIEAPLTATDTAILSGSLSTQNGNGGGSINFALRRVTSAKGWGELEFGAGDLQGPLFGLKLFRNLTPRCFVTTNCALQFSSRGIRPGLTTVLARNLDKNTVGYLQWHCSSPLLQVQRPHRNTRACAPEPSFRPFLHVPTWDAECSGARTPSTAWTSAAVKLREACLSGPGSGSHQLLLLTPRSKRRTGGG

SEQ ID NO: 33559 - protein, 253 aa, Homo sapiens
MSIRRRAVFTPSCQHINEYKYIISYLVRSFSLWEKGCNSGSEFLSDVSESGSSFPQIEINKMHISQSIEVKHTTTSPSTARARVNEAQHTKQGSINFALRRVTSAKGMGKALQAHTEARNLDKNTVGYLQWRWGIQSAMNTSIVRDTKTSHFTVALQTELWEDPSSQALSGERIPQVSPGLAKMEAHWYCMRVFTVEPVCSCQRWSSTGCFSQSQGGRWGSLSHTRRCQVIDVTVPLQCLVKDSKLILTEASK

SEQ ID NO: 33560 - protein, 106 aa, Homo sapiens
MMKEEKKNHEKSKQPSILTAESAREGRERANRVEEVSVATRREGAAWIRSNPRRGPIPLIRGLNRDDPFHLRGAGIRTEKGTEALSYFRGSEELPTGSWRGYFKFS

SEQ ID NO: 33561 - protein, 56 aa, Homo sapiens
  misc_feature (1)...(56): Xaa = X or * as defined in Table 2
XSGLDPLGIPEGARFPYPGAYPRLTPSTCEVLHQDRERTGALSYFGVQRSFRPRVX

SEQ ID NO: 33562 - protein, 74 aa, Homo sapiens
  misc_feature (1)...(74): Xaa = X or * as defined in Table 2
XPRDPPGQAKPRGAPVKRPRKEEILRQNRGRKACDRPVAKTKKKKAEGTVVHRGRLPEVPAGILRPARLPGGHX

SEQ ID NO: 33563 - protein, 139 aa, Homo sapiens
  DOMAIN (39)..(83): LBP / BPI / CETP family proteins domain identified by eMATRIX, accession number BL00400C, p-value=9.149e-15, raw score of 24.53
MAARPRRGPSEAVPAHAQRGVPARDTRWRQRRWGGRGGGGKTGGRAELRSSVDELVGIDYSLMKDPVASTSNLDMDFRPLVWVVGAAMELGSCFKTYEDFKECFSAYKRENRCSFILRDCVSVRFHNLNHGTSIREDIL

SEQ ID NO: 33564 - protein, 431 aa, Homo sapiens
  DOMAIN (39)..(83): LBP / BPI / CETP family proteins domain identified by eMATRIX, accession number BL00400C, p-value=3.155e-16, raw score of 24.53
  misc_feature (1)...(431): Xaa = X or * as defined in Table 2
SSELEDDDAEGLSSRLSGTLSFTSAEDDEDDEDEDDEEAGPDQLPLGDGTSVDELVGIDYSLMKDPVASTSNLDMDFRCLICGLTCSKYSITCGGLACVWDHTTILELPIGPKEVLVLLLPPAAHHGFTNRLLAGVQQSQNVSAWQVVPLLKGTAAATAIFANLRGRQAEEECAHREGPLPXKEFADFGPTIKQDFRLLGQTSVDRLLQLSQGQAVKGNQLLPVSLVGMLDTLHQSGSELAYKLCHNEWEVVQNSTHLVDMAGSSVDVQLLEDSHQVSKDGCSCSCSFQQWYHLPCRHILALLHTSQQPVGEAMVCRRWQKKYQYLLGPNGELQDRGMVPNTGQPEKQGRNDMIQDLSRELANLLMQTEGPELEERYSTLRKIVDIWAGPSQPSELFQQPGDFKDVGRLPFLWGKQEEGEGFPPATAVMHY

SEQ ID NO: 33565 - protein, 574 aa, Homo sapiens
MELGSCFKTYEDFKECFSAYKRENRYVQVKFVCIRTQSNRKRTREADMCPAYLLLRYNERLDRLFISELNTQHIHGDSKVASPGGDTTGKSQKTMCLQRLQPVQPTTKKDLDTAEKSLVEPSFCLDKVQVSSKPEQEGITPSDLAKIAKVMKNFLKVDEGSMASFSVGDSQHLDRLSFQSSKMTDLFIRFPENLLLHRVENTQGHILYAFLVENKERESRVVHFAVLKAETVTSVAKMLSIFTEFNSDWPKVKVVFVDPSFHYRAILQEIFPAARILLSIYHTTRLLEKKLHRSSANPSFKRLMKEALREAVFVTSEASLKNLCQMSQAVLDEDLFNFLQGPLGLLACNTYMDSLDIVTSKVSSLFREQQSLLDCILCFVDYIDFFNTKGLKNLPTPPPKLKRARPASIATEVQEGFWESVERALPASLQKRPKPDAQQRTLTRLAKMGCKLQAGSFQQWYHLPCRHILALLHTSQQPVGEAMVCRRWQKKYQYLLGPNGELQDRGMVPNTGQPEKQGRNDMIQDLSRELANLLMQTEGPELEERYSTLRKIVDIWAGPSQPSELFQQPGDFKD

SEQ ID NO: 33566 - protein, 382 aa, Homo sapiens
MRCFSHGLAAVCLATFLWTRALLQPWSEIGTPVSMRTVSEPIYGWTSSEVVEVYSGPRVSAPVVVSVVTASRAGASSRYRHIRRVRVRCGPAALLTILHPVTLDCASISSIVCLIEFWQRWSRGACVPHGADEKSDPGGAGKWKCRPRLLLPAHGALEADVGLLSEERRSVSGSGLHGLLAPCQARVSLSDDSSEGFPRADTFLETLDVSGNRGNNSSLYYPIPEAQVPRVLNVLREEAGPLSTCDCLNWSIMLALIEQQSCSKHHGRAGSTGRYFHLGMSQQHRKLISRAAQVAQKCEIRGERSLGFSCLGVLLEELDSELGLQHPHGCEVAPHGGFDVWILTADDLERFSPGLLAICKSSALDVCHRVFLKAGLCFLCGI

SEQ ID NO: 33567 - protein, 35 aa, Homo sapiens
MGCTFPVPKKGKEEALSFSQLIQLRVQGRVWTGAL

SEQ ID NO: 33568 - protein, 128 aa, Homo sapiens
MGDVSLSVFAQLLGSLGTIEDCSTNGGTPGVVTGCDQVPPPRSVVSLAVLNGGSREKDEGRNAYTLKMLLEHRRDWADGDSVNKGGCCSVGEGPDLVSGAPADIIPRVHKTMQPGGSEHPHFTDEELE

SEQ ID NO: 33569 - protein, 51 aa, Homo sapiens
MAATGAGSGARLSLPRGSSDSTRVAARPWQRPSSRGYSSSSTDPFISSFGN

SEQ ID NO: 33570 - protein, 71 aa, Homo sapiens
  misc_feature (1)...(71): Xaa = X or * as defined in Table 2
XVQSSGQVHAFGNCSDSDILEEDAEVYELRSRGKEKVRRSTSRDRLDDIIVLTKDIQEGDTLNAIALQYCX

SEQ ID NO: 33571 - protein, 113 aa, Homo sapiens
  misc_feature (1)...(113): Xaa = X or * as defined in Table 2
MRHPHRLQPGCRGMVPVPADPVPVQSAEDLSLFLSTRCVVVLLSAELVQHFHKPALLPLLQRAFHPPHRVVRLLCGVRDSEEFLDFFPDWAHWQELTCDDTYVAAVKKAISEX

SEQ ID NO: 33572 - protein, 295 aa, Homo sapiens
  DOMAIN (112)..(134): Chromo domain proteins domain identified by eMATRIX, accession number BL00598, p-value=1.500e-15, raw score of 14.45
  DOMAIN (97)..(133): 'chromo' (CHRromatin Organization MOdifier) domain identified by PFam, accession name chromo, E-value=2.4e-13, PFam score of 50.5
MRIRRWSLMFDSVWPMCAFYSWAKASRTFLKADGLPRRKQWVLVEALAGGGVLGVKQITIQVLFEVLLRRGKESETYTKMYRRLGPERCRRSKYAGVERIVDKRKNKKGKWEYLIRWKGYGSTEDTWEPEHHLLHCEEFIDEFNGLHMSKDKRIKSGKQSSTSKLLRDSRGPSVEKLSHRPSDPGKSKGTSHKRKRINPPLAKPKKGYSGKPSSGGDRATKTVSYRTTPSGLQIMPLKKSQNGMENGDAGSEKDERHFGNGSHQPGLDLNDHVGEQDMGECDVNHATLAENGLGL

SEQ ID NO: 33573 - protein, 90 aa, Homo sapiens
MLIRQNLAIEKSETTSEHTCQLCGGWFDTKIGLSNHVRGHLKRLGKTKWDAHKSPICVLNEMMQNEEKYEKILKALNSRRIIPRPFVAQK

SEQ ID NO: 33574 - protein, 48 aa, Homo sapiens
  misc_feature (1)...(48): Xaa = X or * as defined in Table 2
XPVPTAQARCFPASAGLRAAGVASEELPGSFALVERLGQLDKRGQRKH

SEQ ID NO: 33575 - protein, 865 aa, Homo sapiens
  DOMAIN (5)..(19): C2H2-TYPE ZINC FINGER SIGNATURE domain identified by eMATRIX, accession number PR00048A, p-value=7.632e-11, raw score of 10.52
  DOMAIN (6)..(830): Zinc finger, C2H2 type domain identified by PFam, accession name zf-C2H2, E-value=8.1e-18, PFam score of 72.6
MSQGPYACRECGRTFRDRNSLLKHMIIHQERRQKLMEEIRELKELQDEGRSARLQCPQCVFGTNCPKTFVQHAKTHEKDKRYYCCEECNFMAVTENELECHRGIAHGAVVKCPMVTSDIAQRKTQKKTFMKDSVVGSSKKSATYICKMCPFTTSAKSVLKKHTEYLHSSSCVDSFGSPLGLDKRKNDILEEPVDSDSTKTLTKQQSTTFPKNSALKQDVKRTFGSTSQSSSFSKIHKRPHRIQKARKSIAQSGVNMCNQNSSPHKNVTIKSSVDQKPKYFHQAAKEKSNAKANSHYLYRHKYENYRMIKKSGESYPVHFKKEEASSLNSLHLFSSSSNSHNNFISDPHKPDAKRPESFKDHRRVAVKRVIKESKKESSVGGEDLDSYPDFLHKMTVVVLQKLNSAEKKDSYETEDESSWDNVELGDYTTQAIEDENLYKVEGQEPGENATLSYDQNDGFYFEYYEDTGSNNFLHEMHDPQHLETADASLSKHSSVFHWTDLSLEKKSCPYCPATFETGVGLSNHVRGHLHRAGLSYEARHVVSPEQIATSDKMQHFKRTGTGTPVKRVRKAIEKSETTSEHTCQLCGGWFDTKIGLSNHVRGHLKRLGKTKWDAHKSPICVLNEMMQNEEKYEKILKALNSRRIIPRPFVAQKLASSDDFISQNVIPLEAYRNGLKTEALSVSASEEEGLNFLNEYDETKPELPSGKKNQSLTLIELLKNKRMGEERNSAISPQKIHNQTARKRFVQKCVLPLNEDSPLMYQPQKMDLTMHSALDCKQKKSRSRSGSKKKMLTLPHGADEVYILRCRFCGLVFRGPLSVQEDWIKHLQRHIVNANLPRTGAGMVEVTSLLKKTCPPLFVFFIFST

SEQ ID NO: 33576 - protein, 35 aa, Homo sapiens
AGPPVIQDPRAPNAALQVDTTRLRPWEWPQTKDGQ

SEQ ID NO: 33577 - protein, 120 aa, Homo sapiens
  misc_feature (1)...(120): Xaa = X or * as defined in Table 2
XSWARGDSSELFSDSGTNMCSSFCPGTLQALQIDRHLLVGLALRFAVSPGEGGGNEVDPNPEKGEEGAGPLAGGAFPKEEQEMLKTYLKTQDVAKDPRSPKAKQCFEKKNNNNKALRRKM

SEQ ID NO: 33578 - protein, 101 aa, Homo sapiens
MRAAVKEHPSTCEAYTCVRDSPPRRVMGSETTSVLNTGKRPPWHTGPYTSCHEAQRGEQGNRSPTVIPNLTWSSEQEGSEKSKATTYKRTLTPGDQPQTQT

SEQ ID NO: 33579 - protein, 227 aa, Homo sapiens
MATALCCRPEPLGAGERSLRAAPGATIRCGASRQPPRRLGGGCHASGASHSLPPTHRAGAPLSRLGKRAPAKQNPISDVTDEVVAEKYDNSCLDLSVIELRCPVAFDTHSFTLLTLHLSAYLILPGCGTKTQDPLNGGAERAVTQTGLKHTPCLPHGGQREGKRGKRRREELWPFKEPRPRSSLSQGYGSLFGALQSLASPSFQAPPHSLVPPMEAACSMPGPAAAL

SEQ ID NO: 33580 - protein, 182 aa, Homo sapiens
MTTRVRTWVLGTITDAALWLFPYDRNEDTHEHGNIHGSSTEVMKSTNASVLGAGDRIVSKAKQSLPRGCLHAIGRDRQETIVAPQHYPATSHTQGHTGGKGVNWLHPAKPPSSIGCRKKYIDGEKQAEPVVVLDPVSTHEPQTKDQVAEKDPTQHKEDEGEIQPENKEDSIENVRETDSSNC

SEQ ID NO: 33581 - protein, 260 aa, Homo sapiens
  DOMAIN (97)..(137): p53 tumor antigen proteins domain identified by eMATRIX, accession number BL00348B, p-value=1.000e-40, raw score of 12.18
  DOMAIN (7)..(255): P53 domain identified by PFam, accession name P53, E-value= 5.1e-140, PFam score of 478.6
MEEPQSDPSVEPPLSQETFSDLWKLLPENNVLSPLPSQAMDDLMLSPDDIEQWFTEDPGPDEAPRMPEAAPPVAPAPAAPTPAAPAPAPSWPLSSSVPSQKTYQGSYGFRLGFLHSGTAKSVTCTYSPALNKMFCQLAKTCPVQLWVDSTPPPGTRVRAMAIYKQSQHMTEVIAMVWPLLSHLIRVERKFALWSIWMTVNTFRLIVVVPYEPPEVGSDCTTIHYNYMCNSSCLGGMNRRPILTIITLEDSSGNLLVTEQL

SEQ ID NO: 33582 - protein, 98 aa, Homo sapiens
MILSAQHFSKKSNLSLSHTQWWSPVLRLADRQGGSCRGGERGGNASGPFLAGGALPATPTFPGGDNAAKSEGSNNVAPPSPAPGHSDCSAALTSRPLG

SEQ ID NO: 33583 - protein, 212 aa, Homo sapiens
  DOMAIN (118)..(133): ACUTE MYELOID LEUKEMIA 1 PROTEIN SIGNATURE domain identified by eMATRIX, accession number PR00967I, p-value=9.883e-09, raw score of 12.41
MLSGVSPMQTEARCARNHRKPGISAACVPASSPYALKFGREEVMVPSLCVQDRDTAHHGSENQPSGRDVKAAEQSECPGAGDGGATLFEPSDFAALSPPGNVGVAGSAPPAKNGPDAFPPRSPPRQLPPCLSASRNTRGASSEEGQNDPGPGFCLLSSQGDHHCVWERERLLFLEKCCALRIISQITFNFSSSSCSPSLYDSRISVPSERTE

SEQ ID NO: 33584 - protein, 78 aa, Homo sapiens
  misc_feature (1)...(78): Xaa = X or * as defined in Table 2
MLVLETLARRISGHTNMWIGYSCSEVSWGSLKRGKHWFSQMLHMAVFKRLKTFFCPLCYAWKXXXXXXXXXXFFKKTL

SEQ ID NO: 33585 - protein, 398 aa, Homo sapiens
MGIRRTKDLPVYRRQKTRILIRLVLEHHAIDMVHGCFGLCQRLEANEFLRPAGTLANRIFHIAIPVTELYTVQEEDKTVERKRSFIHFWLPESLMVDGNQKREDPPHQKLSEGYEHTLAQSEDIDAADKHMENMLIMSFGGTWMKLETIILSKVSQGQKTKHRMFSLIDKVLLCHPSRLYLKAHHECTDQKVYQAVTDDLPAAFVDGTTSGGDSDAKSLRIVERESGHYVEMHARYIGTTVFVRQVGRYLTLAIRMPEDLAMSYEESQDLQLCVNGCPLSERIDDGQGQVSAILGHSLPRTSLVQAWPGYTLETANTQCHEKMPVKDIYFQSCVFDLLTTGDANFTAAAHSALEDVEALHPMKERWHIFPSSGNGTPRGGSDLSVSLGLTCLILIVFL

SEQ ID NO: 33586 - protein, 262 aa, Homo sapiens
MALSSPSLGKVGFVFLLVMVCTVVFPPPPVPEMLDMLEVKITIIFKAHHECTDQKVYQAVTDDLPAAFVDGTTSGGDSDAKSLRIVERESGHYVEMHARYIGTTVFVRQVGRYLTLAIRMPEDLAMSYEESQDLQLCVNGCPLSERIDDGQGQVSAILGHSLPRTSLVQAWPGYTLETANTQCHEKMPVKDIYFQSCVFDLLTTGDANFTAAAHSALEDVEALHPRKERWHIFPSSGNGTPRGGSDLSVSLGLTCLILIVFL

SEQ ID NO: 33587 - protein, 202 aa, Homo sapiens
MQKVMYKGLVPEDKTLREIKVTSGAKIMVVGSTINDVLAVNTPKDAAQQDAKARNKKEPLCRQKLKEKLAFLKREYSKTLARLQSGRYIVEVGPSIRIGPFAIQIVARPVNEQNRPPCIAVISTPFTTVVVQASGNKVSRQSVLCGSQNIVLNGKTGIEKCKWMPGFGKGIRDKFRTKPRLFVSLFTEEIKTATCMMISPMC

SEQ ID NO: 33588 - protein, 49 aa, Homo sapiens
MSVGTMCSSFLLGLDNGDRVRSEYALLSLSQSPHGLAVFLYRSHNDSKF

SEQ ID NO: 33589 - protein, 186 aa, Homo sapiens
MRSILLEHQLNSTPFWGEFMSLKTTRLQAVASAFVLPTPTSLSGLDQNISSSKRPSPTPGLGEIPLAWAATDRRSSTLAFGYLSSVHEDMCGVCLSCILSAQKCDWHIVGAKYIQKNINHSIIKHHQLFPGESKEILSAPDYGKMGERHSKLVPHFASRAPKPLMEPLESTFWTSLINYTIYPPSG

SEQ ID NO: 33590 - protein, 191 aa, Homo sapiens
  DOMAIN (87)..(101): CYTOSINE-SPECIFIC DNA METHYLTRANSFERASE SIGNATURE domain identified by eMATRIX, accession number PR00105C, p-value=7.065e- 09, raw score of 10.86
TPELPCALCTPSHAHHKLQAAEGGAGFSRTVRNFAGRQLSNLAIKATTFFLEQFTENTEQHRTDVEPKRRRLTWTNNSYGLPGLDNGEHQQRRRCFLVGLDNGEHQQRRRCFLVGLDNGEHQQRRRCFLHHQLFPGESKEILSAPDYGKMGERHSKLVPHFASRAPKPLMEPLESTFWTSLINYTIYPPSG

SEQ ID NO: 33591 - protein, 97 aa, Homo sapiens
  misc_feature (1)...(97): Xaa = X or * as defined in Table 2
XKAFMLKKPSKYCSWKCAALSAIAAALLLAILLAYFIAMHLLGLNWQLQPADGHTFNNGIRTGLPGNDDVATMPSGGKVPWSLKNSSIDSGEAEVGR

SEQ ID NO: 33592 - protein, 67 aa, Homo sapiens
MVAEYWLMKEDFPEMSSLDIARPPDKFFHRSRPVGGCKSRMPALCKLDDPGLYELSRDAQFLPTQLG

SEQ ID NO: 33593 - protein, 865 aa, Homo sapiens
  DOMAIN (489)..(515): Integrins beta chain cysteine-rich domain proteins domain identified by eMATRIX, accession number BL00243H, p-value=4.000e- 16, raw score of 17.53
VGTNTPIEPGYRMLSVYATYTERATGNKAIVSADAKLTTTQTVGAGLTLDLYSIGGEIIIDNIPEKVTVVGDVYRNGEVVNDDRRFKLFAQDPTVSDTINSGYDKDGGLGWRKITKDSNGYSLTVDFDTVANSSIGISIKPEVVLNIQNYKLLVYTKSSTAPSPTPITTTRCPITTPSANSLNRNSLTNRGSQIHAPAPAPNDLATTPESVQLQDSWVLNSNVPLETRHFLFKTSSGSTPLFSSSSPGYPLTSGTVYTPPPRLLPRNTFSRKAFKLKKPSKYCSWKCAALSAIAAGLLLAILLAYFIAGPQMERKAASSQVKDRRLREILLFVGNSTVSPFPPDWRQTVQEMMGKSKSCFMFERHLMTLWWTAGIISCILQWQKQAWAGERTCPRHKASKQQDLRTIKKKIVDATYDFMERLDGKEKWSVVESPRERRSIQTLVQNEAVFVQYLDVGLWHLAFYNDGKDKEMVSFNTVVLDSVQDCPRNCHGNGECVSGVCHCFPGFLGADCAKGISSVTQYGESFDKLKKKASCARNSLALPVSVTAGSRQTQALLPGGEFATLARETPITSKQPDMCPRQPPDTGLCNPGQRHWLELEPAAGEMRRRLQLDSLLHPPSCFSSTLKCGKAAAAACDSSDQIQERLQTGHLPCEASHTICPPNHHSQSTLRPPLPPPHNHTLSHHHSSANSLNRNSLTNRRSQIHAPAPAPNDLATTPESVQLQDSWVLNSNVPLETRFWCCQRFLVFPGLQLQHLTLSLPVWSHGALPVSLCIFTWLSSHKDTSHFGLRVHLLSLPLEAKYSFYPGCPVLEPAPNPLKGPWCLWGVGTFRRYCTTFLFNESEPKDLVGEKFKSDRLCREAHLQE

SEQ ID NO: 33594 - protein, 196 aa, Homo sapiens
  DOMAIN (1)..(57): DENN (AEX-3) domain identified by PFam, accession name DENN, E-value=3.4e-17, PFam score of 65.8
  misc_feature (1)...(196): Xaa = X or * as defined in Table 2
MLYPMYWQHVYIPVLPPHLLDYCCAPMPYLIGIHLSLMEKVRNMALDDVVILNVDTNTLETPFDDLQSLPNDVISSLKNRLKKVSTTTGDGVARAFLKAQAAFFGSYRNALKIEPEEPITFCEEAFVSHYRSGAMRQFLQNATQLQLFKQFIDGRLDLLNSGEGFSDVFEEEINMGEYAGSDKLYHQWLSTVRKGX

SEQ ID NO: 33595 - protein, 479 aa, Homo sapiens
MVGVIWQPREDWSSSDGMAPQHLWTTIGMPAPALGVGIPRDVKVNARCNVSNQNQLFKGAKMLETITKEDRKQHGTSGKTILTDTLIKLLDLEDQVEQPAVLSWESRMAAQLCVSGPPVGPKPLSGQTRNALEKQCAFLFLRFPVMERPQGHSQYPTVPHAVKAACLCMCYFLPPAPGESYSSDAHIPYGTLEKSLDAYFIQISSLKNRLKKVSTTTGDGVARAFLKAQAAFFGSYRNALKIEPHQNPSRVSVFFFKHIGDGLMVTLSDSSQITQAKRDGTHQETPPQLDLARKSPLTDSLDSMTRVISNASISFSLFLRSCLPQMNLPVRCRQDISASSCLVIPLLDEKAVPFKDLAQKYRVMSYDCTARHGPSSAACPKVRNMALDDVVILNVDTNTLETPFDDLQSLPNDVVGLLEEFNAITDVKEMDQCSTVAAIFITYVTDRAFSPPQFQEFPLISFLLSECQCLPLPSPQAFI

SEQ ID NO: 33596 - protein, 154 aa, Homo sapiens
MSTKKLCIVGGILLVFQIIAFLVGGLIEPREPVTVNVPVLFWRLGERPQLPPQPPAVPLAALPKDPSETKSEMASLGTKRAHRLFLLLLLLLLYFAQLSKFVSAPGETGMLQRSRVGSVLSPQVTKLEKQNQHLMAIAAHHSEILDLRLNAVMG

SEQ ID NO: 33597 - protein, 267 aa, Homo sapiens
MAGAKQGLNCSLQADFKEGVDTFHVPMRTNPCAQIRFPETPVNLAHTPARSWCFSLWNCDDDLPPPLVGCAAQAGVADGPLCASWQTGRLARQSKVLIERRPHHPRLSVVSLEWLVLLTILSAKAVAHIGEPGTCKPPASLWQERPGICCNARRGSGSSYRPDGSERAPAAGMERRRNGCGVSQSPGEQGGQPKQTNSAAYVWFAERESPDQPSTPDRWAMVTASWPLVLAGHAQEKKHLCFPFGVLLVMVCNACWLNKHTDRMGHV

SEQ ID NO: 33598 - protein, 114 aa, Homo sapiens
MQSSTGFPVSGCRRGVLSGVVVSRFQFFLCDLLEKQEVAVYWRSRAREGNNPAEPYGEGRRCLDSGSIPFAGSPPQGNDGHGVHSHCRRRRGAGSADKIEDAPAPSTSADKVES

SEQ ID NO: 33599 - protein, 373 aa, Homo sapiens
  DOMAIN (265)..(298): TPR Domain domain identified by PFam, accession name TPR, E- value=0.0023, PFam score of 24.6
MATESTATAAIAAELVSANKIEDVPAPSTSADKVERIENGVLGNTLDGVHVEEEEGEKTEDESLVENNDSIDEEARKELREQVYDSMGEKEEAKKTEDKSFAKPETDKEQDCEMEKGGREDMDISESAEEPQEKVDLTLGWLTEISEGAKGGGAPEGPNEAEVTSGKPEQEVPDVEEEKSVSETDVQKECREKGGWEKHREVIVSIEEKPKEVSEEQPVVILEKQGTAVEVAAESLDPTVKPVDVGGDEPEEKEQYLEAYDHLLAETHYQLGLAYGYNFQYDEAVAQFSKSIEVIEKRMAVLNEQVKEAEGSSAEYKKEIEELKELLPEITEKTEDAKESQTTGNVAELALKATLVESSTSGFTPSGGGSSVS

SEQ ID NO: 33600 - protein, 255 aa, Homo sapiens
MGRNQSREAENSKNQSASSSPKERSSSPAMEQSWIENDFDEEGFSQSVIANFSELKEDVRTHHKEAKNLEKRLDEWLSRINSIEKTLNDLMELKTMARELRDACTSFSSQFNQVEERALFHSLVCHLKGTMATESTATAAIAAELVSANKIEDVPAPSTSADKVERIENGVLGNTLDGVHVEEEEGEKTEDESLVENNDSIDEEARKELREQVYDSMGEKEEAKKTEDKSFAKPETDKEQDCEMEKGGRDRYGYK

SEQ ID NO: 33601 - protein, 787 aa, Homo sapiens
  DOMAIN (43)..(617): TPR Domain domain identified by PFam, accession name TPR, E- value=2.5e-12, PFam score of 54.4
MAMESTATAAVAAELVSADKIEDVPAPSTSADKVESLDVDSEAKKLLGLGQKHLVMGDIPAAVNAFQEAASLLGKKYGETANECGEAFFFYGKSLLELARMENGVLGNALEGVHVEEEEGEKTEDESLVENNDNIDEEAREELREQVYDAMGEKEEAKKTEDKSLAKPETDKEQDSEMEKGGREDMDISKSAEEPQEKVDLTLDWLTETSEEAKGGAAPEGPNEAEVTSGKPEQEVPDAEEEKSVSGTDVQEECREKGGQEKQGEVIVSIEEKPKEVSEEQPVVTLEKQGTAVEVEAESLDPTVKPVDVGGDEPEEKVVTSENEAGKAVLEQLVGQEVPPAEESPEVQTEAAEASAVEAGSEVSEKPGQEAPVLPKDGAVNGPSVVGDQTPIEPQTSIERLTETKDGSGLEEKVRAKLVPSQEETKLSVEESEAAGDGVDTKVAQGATEKSPEDKVQIAANEETQEREEQMKEGEETEGSEEDDKENDKTEEMPNDSVLENKSLQENEEEEIGNLELAWDMLDLAKIIFKRQETKEAQLYAAQAHLKLGEVSVESENYVQAVEEFQSCLNLQEQYLEAHDRLLAETHYQLGLAYGYNSQYDEAVAQFSKSIEVIENRMAVLNEQVKEAEGSSEYKKEIEELKELLPEIREKIEDAKESQRSGNVAELALKATLVESSTSGFTPGGGGSSVSMIASRKPTDGASSSNCVTDISHLVRKKRKPEEESPRKDDAKKAKQEPEVNGGSGDAVPSGNEVSENMEEEAENQLKRGAAVEGTLEAGATVESTAC

SEQ ID NO: 33602 - protein, 419 aa, Homo sapiens
MVAARCLDRKPLCLTSLANPGSLALKPYLESAHFSQPLGQATGSSHLGDHSVLQSPAPTFPTVVRSQPNKSDPVKEAVQRTVRVWHTRAPARGPSAVAPGDPTPAAPSAGELLPDPTWLLTPVPPGYEDYFRRKESDLPKVTWRVPTRAEPRPKCPAHLSRSEQSHSSQKFLSNCVVGASLEEITEEEEEEDENKSAMLEASSTKVKEGTFQIVGTLSKPDSPRPDFAVETYSHSEFRIPSDEFNKEIEIIFKNQAETPELKNAIAILKNESESFNNKIDQRRKNELENPLLKNTVRGKKQSTSSSPKDRSSLPATEQSWTENDFDELTEVGFRRSVITNFSELKEDVRTHRKEAKNLEKRLDEWLTRINSVEKKTLNDLMELKTMARELHDACTSFSSQFDQVEERVSVIEDQINEMK

SEQ ID NO: 33603 - protein, 64 aa, Homo sapiens
MVMVRSLEPQEIADVSVQMCSPSRAGMYQGQWRMCTATGLYYGEPNNNNNSSSSSSSNNNSNVK

SEQ ID NO: 33604 - protein, 96 aa, Homo sapiens
MEGMDVDLDPELMQKFSCLGTTDKDVLISEFQRLLGFQLNPAGCAFFLDMTNWNLQAAIGAYYDFESPNISVPSMSFVEDVTIRGRGSQYLRILSL

SEQ ID NO: 33605 - protein, 127 aa, Homo sapiens
MTLKPPGTGISPSVPSSLLSLYLELPSWSHSTLPFTRMFRENPKGILPTPMAVVFLRLLEAWGQEKGSTTRKKGNGKAICFLKDGGKLFELYRSAITGGGRFLREPDKLHFGSFTGSPFLKDLTCAS

SEQ ID NO: 33606 - protein, 21 aa, Homo sapiens
MQLTDKILWQAISAIPRNSSH

SEQ ID NO: 33607 - protein, 144 aa, Homo sapiens
  misc_feature (1)...(144): Xaa = X or * as defined in Table 2
XPLHSLWDLLGAWRGDVHGTLGGRMLNRVECRDGVAAAWLCLHDAAAIRGAVGRCPTWTQPTHWTVPCKPLQSAISIFPTGFQFSKEKPRPGARATLPGVPAQQASRPQSCFQILAILDTWRTTSRDLQENVGIPINVIRFAEI

SEQ ID NO: 33608 - protein, 10 aa, Homo sapiens
MHEIVDPEIP

SEQ ID NO: 33609 - protein, 34 aa, Homo sapiens
VFTVLLMPPPSGIPLPSSGVEALAAGRLASKESS

SEQ ID NO: 33610 - protein, 306 aa, Homo sapiens
MLKVFKELQFSMLQLTKRERNGSHRESEEKEKGQQEEEERSSSSTYHPGSALQPPPAPPRRDESASLRCSVLPPARRAVAAVAAALGKWRPSSFSLPPFNLKRRENGASEQAGERRGHGEEGQQRLRRLRLRRRRAAPPRRAARGRPPRRPRGPPGGAAAAASVMAPRRGRCFCTSICGGRGARPQLPRTCGDGTQHCGRGKPALAAAEPRRFQGPRRRPLPGPRGPPPPSRAAPSSSSGQGHLLYLTITLAHSCPHPQGHQCQRQLPQPRTYLHGSTKPRSGGGESSALLWRPLALQGHIVSAIG

SEQ ID NO: 33611 - protein, 71 aa, Homo sapiens
MAPRCCRCFCTSICGGRGARPQLPRTCGDGTQHCDRWEASPRCGRGMAMRSSAEDATNIKGNRELVLGDSD

SEQ ID NO: 33612 - protein, 218 aa, Homo sapiens
  misc_feature (1)...(218): Xaa = X or * as defined in Table 2
XSGRGKPGPEIDCARWNILFSGGWKAMDNHLSPARGDLPWKKKPDQVLATFEDIREPEGLRGSLLRSPFRGHSEPSRPRGEAELSPGLMTRGFAPILPVEFHKMGSFRRPRPRFMSSPVLSDLPRFQATRQALQLSSSSASRAASEVREEDLLACKKAGAAFESFRLWSSFLSKDTAALLASCLIVFNLMWEESWDKQRDFATLGLSLCARQTDSIRX

SEQ ID NO: 33613 - protein, 158 aa, Homo sapiens
  misc_feature (1)...(158): Xaa = X or * as defined in Table 2
MRSXDRLRMYEPCGSRALFSLLRNRNNTCLTELLKSSTEIMTASVNCKAMRDVADRSRVAVTLSWSYTVEKEALTQTREIFPCKRCPHVVGTSYFKEDIPVEYKIICVTMERDQGSTLKFQGCLSPPKTGLLAAVEGRGTEDRRTWLARPALAVTTVM

SEQ ID NO: 33614 - protein, 290 aa, Homo sapiens
  DOMAIN (206)..(220): C-type lectin domain proteins domain identified by eMATRIX, accession number BL00615B, p-value=1.857e-10, raw score of 12.25
  DOMAIN (132)..(219): Lectin C-type domain identified by PFam, accession name lectin_c, E-value=0.01, PFam score of 3.4
MRFCGFPGLGKAAKWWLAAANWAALKGIPRQVDYLGKQLEQWSWAASPRSSRELKMRSGDRLRMYEPCGSRALFSLLRNTNITCLTELLKSSTEIMTASVNCKAMRDVADRSRVAVTLSWSYTVEKEALTQTRCAGRKPSGSFACKTRLRKHQHKNHKGEDEAVFPEESKDFYPKLRNWKAGQPDNWGHGHGPGEDCAGLIYAGQWNDFQCEDVNNFICEKDRETGLFGWGSFVPGVFTLGPWPQEQRRRPGELCTVMADMQEGKPSDPGAFQGFGCITSTNIGQSKARD

SEQ ID NO: 33615 - protein, 224 aa, Homo sapiens
MSSRAHHQCAQTQLLSKLMTHIEPTIAALTGLHQTTIAIKYLPKPRLSKPGHLLPDFCSIPYDIYFNLRPYAQIATLKCPQKTQRGQDHYKSFEDDGSFTPEDWFFPLVPGPAWGSPCIKLEGGHGESPKNWLSRITIWPTPTIGLFGHPSPLLELHCPDDLCASSFCNKTFRVETFAHAFLEVLGVRCAPDPVRHPLPLQIRLEILLSPGKGLYNCSVSLGRK

SEQ ID NO: 33616 - protein, 190 aa, Homo sapiens
  misc_feature (1)...(190): Xaa = X or * as defined in Table 2
MAIIKKSKNNILELLLVNMPQNCPYLKGSLSREEATVGEKHMSSRAHHQCAQTQLLSKLMTHIEPTIAALTGLHQTTIAIKYLPKPRLSKVEFSSFVYDRGLKDDFSAAEGTGMEALRRRPFLARSDSPRSSPAPSWVSGRVNPDDPTRRSWILCPLPPTKSLTGEGGATNVLQTFSKARAAGRSLLKAX

SEQ ID NO: 33617 - protein, 301 aa, Homo sapiens
  misc_feature (1)...(301): Xaa = X or * as defined in Table 2
MGLQFIAPDIFERLIWAHPAAQEGPLSECSHWPWATDRGQSENHLGNEDQGKGSPNPPSGVNCLPEHMENPPSGSCSTRAAARKEKASYPWNLKVIGQSSHSGRNLHIWVVDHRLSNREVGLSQKIVLWPDLEFPPQELLLVNMPQNCPYLKGSLSREEATVGEKHMSSRAHHQCAQTQLLSKLMTHIEPTIAALTGLHQTTIAIKYLPKPRLSKPREEDSGQRNCALRRRPFLARSDSPRSSPAPSWVSGRVNPDDPTRRSWILCPLPPTKSLTGEGGATNVLQTFSKARAAGRSLLKAX

SEQ ID NO: 33618 - protein, 113 aa, Homo sapiens
MLLTGNLDIKVRALMLKGPDQGLCHIPAPGETTQGSCPYGSGQKEGTERASGPEEYMAQVPENSRAPFTVLEFPEAEQEMSTGLELKCEVSWVSGSFPRGASYVLPTLALSGI

SEQ ID NO: 33619 - protein, 226 aa, Homo sapiens
MAHKYDTLNTARCMRAPPFSQASKPDMRLTGSLLCSQFCLCMAEAILLFSPEHSLFFFCSRKARIRLHWAGQTLAILCAALGLGFIISSRTRSELPHLVSWHSWVGALTLLATAVQALCGLCLLCPRAARVSRVARLKLYHLTCGLVVYLMATVTVLLGMYSVWFQAQIKGAAWYLCLALPVYPALVIMAPDFQILLAEEENGNNLEQVNNSKLFNCYVFQKNQDS

SEQ ID NO: 33620 - protein, 207 aa, Homo sapiens
MPVLLALKMEEGPQAKECRQSQEVGTSKERDSFLGPPEGFPSSSVAAPQMFQCQQVHPSSGPHRSDELSQPPDHSLAARNGAGGSRTRTRSQEDGRGSLDASEGRSGARKDVLLEATHKGAQGLGLLGVGGDTPRDLSTHPEKVPVQSAQTGARRRPVLGDLALPSMRPSGPDPPGQAPPPPRSRVQPWIPAGGGGGHATRYPGLLA

SEQ ID NO: 33621 - protein, 251 aa, Homo sapiens
  DOMAIN (147)..(161): CYTOSINE-SPECIFIC DNA METHYLTRANSFERASE SIGNATURE domain identified by eMATRIX, accession number PR00105C, p-value=7.065e- 09, raw score of 10.86
MPVLLALKMEEGPQAKECRQSQEVGTSKERDSFLGPPEGDNPKLRENSRRARLRSRSRPQTPEFPCALCTPSHTHHKLEAAEGGAGFSRTVRNFAGRQLSNLAIKATTFFLEQFTENTEQHRTDVEPKRRRLTWTNNSYGLPGLDNGEHQQRRRCFLVGLDNGEHQQRRRCFLVGLDNGEHQQRRRCFLHHQLFPGESKEILSAPDYGKMGERHSKLVPHFASRAPKPLMEPLESTFWTSLINYTIYPPSG

SEQ ID NO: 33622 - protein, 207 aa, Homo sapiens
MVDDGSSPPLACPMTLEEGDVKNCTFYGQQDYYNITETLYLLIRSANLISLAPETLATTFYSLLYEFDDFRSPNPSCSKDPRIPVRSLHPSHTHHKLEAAEGGAGFYALSATSRAAPPPPRSACSPGFQRAAAADTRPVPWSPGLKGTEGESWMRGNEPRTFTCARPRPGSPRLCQPHPSLALTTPGTLATLLFSDVQSPLLPPPGF

SEQ ID NO: 33623 - protein, 100 aa, Homo sapiens
  DOMAIN (16)..(46): Dihydroorotate dehydrogenase proteins domain identified by eMATRIX, accession number BL00911B, p-value=2.406e-24, raw score of 22.10
  DOMAIN (1)..(100): Dihydroorotate dehydrogenase domain identified by PFam, accession name DHOdehase, E-value=0.00029, PFam score of -98.0
MGFGFVEIGSVTPKPQEGNPRPRVFRLPEDQAVINRYGFNSHGLSVVEHRLPARQQKQAKLTEDGLPLGVNLGKNKTSVDAAEDYAEGVRVLGPLADYLV

SEQ ID NO: 33624 - protein, 79 aa, Homo sapiens
  DOMAIN (54)..(64): Dihydroorotate dehydrogenase proteins domain identified by eMATRIX, accession number BL00911C, p-value=9.769e-11, raw score of 7.34
MQQNILVAAQTLLDKANGLPLGVNLGKNKTSVDAAEDYAEGVRVLGPLADYLVVNVSSPNTAGLRSLQGKAELRRLLTK

SEQ ID NO: 33625 - protein, 81 aa, Homo sapiens
  DOMAIN (13)..(44): Dihydroorotate dehydrogenase proteins domain identified by eMATRIX, accession number BL00911G, p-value=1.000e-09, raw score of 19.64
  misc_feature (1)...(81): Xaa = X or * as defined in Table 2
XQDKEDIASVVKELGIDGLIVTNTTDALEKIRAGASLVQLYTALTFWGPPVVGKVKRELEALLKEQGFGGVTDAIGADHRS

SEQ ID NO: 33626 - protein, 124 aa, Homo sapiens
MAWRHLKKRAQDAVIILGGGGLLFASYLMATGDERFYAEHLMPTLQGLLDPESAHRLAVRFTSLGLLPRARFQDSDMLVVLPDTLYIKYKGEGCSPLNFSAGTDLFENQNPKKGEFWAINSEIQ

SEQ ID NO: 33627 - protein, 122 aa, Homo sapiens
RADALEKIRAGASLVQLYTPSPSGGHPLWAKSSGNGGPSEVVGQLGPGGLLVVVWEFPGKKCLNPVKDLLQMTLKSDSNANYKHNDTLNCRPTTLLVLYNKTHTLFATTTTTQKKPETVLVT

SEQ ID NO: 33628 - protein, 107 aa, Homo sapiens
MMLCCGLKTEQQESAPLAAPSPTRYLQSLNEHLECIGIEHLLLHTTGTERHYSSSIYYSCSVDQAEGVNEHVARESASKSPPSRGPPFLREGSTVRVVIDSTRPVHA

SEQ ID NO: 33629 - protein, 75 aa, Homo sapiens
MVFPWSQATFSGCPAACLLPPVCSSPHTEASVSALLGSWVFIGIGWRHGSQGWSWEMQHLGRKCLSYLVGGGVEP

SEQ ID NO: 33630 - protein, 403 aa, Homo sapiens
  DOMAIN (222)..(287): Gag P30 core shell protein domain identified by PFam, accession name Gag_p30, E-value=4.9e-06, PFam score of 24.6
MPVAAQIGEPPAHSDKNLHKPPAHSDHPGLPCPHLVPIKSPEALVCRDKSGWTSRETHQRKNTQVAGCQEDVEGSMLTEEHSDRCRQDGRPLAGRMMWSLAGENLKKIKGDLGKCSDDPHRYIEAFQNFTKIFEFSWRYVILLLNQNLMDTEKQATLQAAERFGNEFCITYSIREGGDYYPSGREGVPVSNSKRDPNDEMEDWKRRHFQVCIMEGLCRTKTKPLNYAKLSIIDQGFDDNSTAYLESLREDLVKRTSLSPDSVKGHLILKEKFITRAAPDIRKKLQKLALGPDSTLEDAPESEHRDPSRQRHKQLEVERNTSVEEDTVAGHQEDTCGRAHRQAIDRRNDMEFGWGRRRRDWTTEQPDSKRIAPSRSISLLAPPSAESYLHSIKPCTHSPSPLVL

SEQ ID NO: 33631 - protein, 88 aa, Homo sapiens
MCFSPCPATCVSACWGQLRHPLLPGAEPTVRWPQDPHLRASQEWPSGPVVQGTSFSTGRCFGGIALDTAPLPAPGQNLPGRRSGPRSL

SEQ ID NO: 33632 - protein, 86 aa, Homo sapiens
MEIIQPSPFFPVLKRSFEKESAQEGHPHCRVSQAGAPIRRDLPQPQISSSDVKTLPRYVVDPGDRKWTGAVAAGKYSPEQKKPQKP

SEQ ID NO: 33633 - protein, 174 aa, Homo sapiens
MLTRLVLSAHLSSTTSPPWTHAAISWELDNGLMPSPRIWPQVTPTAGQDVHAIVTRTCESVLSSAVYTHGCGCVRKGQVSGFSVAEVDRLQMCVCLPWSQVLVQKPGTEDRAIFQRRNTLAGERPNRSPVQLESRLPEPMLPAQYNGGYSFSLAFPSSPLVLLLLEWLSSGHWV

SEQ ID NO: 33634 - protein, 72 aa, Homo sapiens
MNSEEDTNIQTIAVNALALDVAINLRFGDQGRTETTSLPGLASEGCRRSPGCLLQDQERNPLSASRRGHSHP

SEQ ID NO: 33635 - protein, 229 aa, Homo sapiens
MGFRHVSQAGLELLTSGVSSAPAPPPVTASYLRLVWDAGSLRKARGLTCACALLSPSDSRRRERAAGEERIHLGQRLKRRYKRPPRHRGACGSNSSPDKVLMKIKYENQAKSLTWFLAHDGKGKSREAEQSLQYPGVCSKIMSCVHEQAVPWTDPQCMVAIPTPGLSHHFVLFQGLKSPLLLCYLQAFPRLQLLLASELQESEDTQISEAMDRPLSSKEGQWQRCGMEP

SEQ ID NO: 33636 - protein, 309 aa, Homo sapiens
MPFSPKAATCSLERLHSILQVVLREKVTQELISIRHFSRHSHSGYLGLSPESTKTQAQNKTEGCRTGTLTVSRLPGGPGVLAVDLPIPAEYFWRHEQDSKTKLCHFLATRTGLETRGNPKSRDGNSPISLSIPTGLNEGDECRNEDKDKRFVLKEGRQRRHVLSMDPTPAPVMDWEGSLPLVFNHCRDTSLIIHSRFKGVRPHRDTCLGPSPLAASPDFLRKGQRGMCQGHKTIVGRGSADKHVNKGLCIIDKELATRAGNLATGPRNARCPGFLLSCVPSVWDPTENRTVRLTWQPLPEPLELWPKAL

SEQ ID NO: 33637 - protein, 56 aa, Homo sapiens
VTGPQRLGLYEQRTQKREDETSNSGCSERQRPRHIPEAALSAPTACLIGQFPGQRL

SEQ ID NO: 33638 - protein, 73 aa, Homo sapiens
  misc_feature (1)...(73): Xaa = X or * as defined in Table 2
XNTRHLTINSSSSSHLGRGSSEGVSPPPSRKLVVQIPEIPSRHTTAALARRSRNLHREKLPRIILPLSTEDCC

SEQ ID NO: 33639 - protein, 258 aa, Homo sapiens
MVLKVAGPACAAVGLGAVILARSRAQLQLRAGLQRGQQMDPDRAFICGESRQFAQCLIFGFLFLTSGMLISVLGIWVPGCGSNWAQEPLNETDTGDSKPRMCGFLSLQIMGPLIVLVGLCFFVVAHVKKRNTLNAGQDASEREEGQIQIMEPVQVTVAAQSRKGLEVGQGGRSHVKAEDERETRPAVIQQDLVALMKPDKNVIQMTQASQARIQVQHVTGPCQWPPLPGNPEMINKIRKGPDDKIRLQRKVVHGSTWM

SEQ ID NO: 33640 - protein, 97 aa, Homo sapiens
MKETTNLGSDTPLPVHLACFRIRRVTDIFYVSAYGSTQWLAFYFRCYRVAASYTVSVLRLLSERDLSGPSKSIGKKQVQALPSNIGLVVVKNRNYES

SEQ ID NO: 33641 - protein, 28 aa, Homo sapiens
MRPLLCALTGLALLRAAGSLAALSTLLH

SEQ ID NO: 33642 - protein, 272 aa, Homo sapiens
MRSLIVKDGVKSAKKNVSKSVRHILTLKWVAAAHASVHRPEHFKKPKGAAGIKGRPGPTIGIVDGVSVRQRGDGDSVPEKNRVHLFEGKKKSWLSVKDGHLDSVLEWPFWTKLVVVAIGFTGGLVFMYVQCKVYVQLWRRLKAYNRVIFVQNCPDTAKKLEKNFSCNVNTDIKDAVVVPVPQTGSSGATIDFCLSFPVCGILLQQQPYQKEYAFPTPQYCQHSVALVLFPAISNKLSLFLMIAHASYIGDASIQQEPAGFATLLKLSRRTFE

SEQ ID NO: 33643 - protein, 70 aa, Homo sapiens
MYVQCKVYVQLWRRLKAYNRVIFVQNCPDTAKKLEKNFSCNVNTDIKDAVVVPVPQTGANSLPSADGWPP

SEQ ID NO: 33644 - protein, 105 aa, Homo sapiens
MDRGAIVRDLENLGERALPYRISAHSQQHNRGGTQVMGLPSALPQGPSKTVSADVLCDENAACSYVSRAVLCSPRGYDTYPKLRQGADLKPDSGVREPAFGWLME

SEQ ID NO: 33645 - protein, 72 aa, Homo sapiens
  misc_feature (1)...(72): Xaa = X or * as defined in Table 2
XPSIVRFKVAAVLWPLHGFLGLKPARSGACLEDRRVRLGSQAVPGTRRDSDGGDSGDLETAAPDGSQAAKAR

SEQ ID NO: 33646 - protein, 30 aa, Homo sapiens
MSECKPCLSFSQHSAFRNIIPALWNAGWIA

SEQ ID NO: 33647 - protein, 397 aa, Homo sapiens
MSRVQDLKPLVAFGTPSSVLKRGRLHHPHDLVLGLITPTPKLLPLNYADSYLQRVSSTGTKTQLAAEEPRSVRTQRSVLFALLFLPPCENTSRPTCPFWLCKDTATKYHLGSRENSPHQTPKCWCLNLGLPRFQNYCTTSMALASAQFLVRPQEAFTHGGRQTRSRQSHGLYHVDQAASAARGDPQAESCRKPSKHGTVSRAGHQDVGKVRQNLLEAQWGNADAERYTRRTLNKHNQQCQLRKAWRWPGGLMDEEIMEVMTVGVRGASGERKEYFFAPALDLIPTYSTLLSAGAKLRGLRYYMDNTVSEACIRRQKQLSIVTLKREGKKWSHPMSCNIIQLKLHQSCQGLWQIARRYPAKMPISVHAGEVAVREQQDLHQIPGVSVTAAGTLQVPVE

SEQ ID NO: 33648 - protein, 599 aa, Homo sapiens
MDDPGCYFEDQVALAVTSKGMEEMIIPGSSVHDSLKQCGKTRKGVKRSPTTAVANGSFCGFIRQEANISNDHWPSLVQEATTEALKLCFCPLAVLLQALLQFKRKMGARETRRLLERVVYQPGYPKSIASTARWYLLRHLYAKDDYELIDLTPSGSISLIKSMHLIKNPVKTCDKVYSLIQSLTSQIRHRMEDPKSSDIQLYHSETLELMLRRWSKLEKDFKTKNGRYDISKIPDIYDCIKYDVQHNGSLKLENTMELYRLSKALADIVIPQMRTPTGSLQSAGSLPAAYCLLLACAIRLQPQFRDGLSERAPQEGVVFVPDMVWLCPHQNLILNSHVLWEGPGGRKRLAEFYNCRICFQAPRGQAMLLKSNDESMKTPPDLSVALRPFGSDWGPLEWTCSMQAPHIRDVNKADRYRGSLESPESFYKYILANMRAFLKVKCYTNDVYCCKHFCYNHVNLKTNISGKICAYNTNNKEESPLSVSSPEGTGTWLHYTSGVGTGRRRRRSGEQITSSPVSPKSLAFTSSIFGSWQQVFKLYFIKHFSSLHSEQQTAVFEDIYLRSAADLTGGAAQVVVLACWLLTSCCVAQFLTGIHISRG

SEQ ID NO: 33649 - protein, 77 aa, Homo sapiens
MRFGWGHSQTISLLKMQIIGTPDLLNQKLGGSHMCFSKPSNHFQCLLKLKNHCFRPRWEGQGVSHCTQPYTLKSQVS

SEQ ID NO: 33650 - protein, 562 aa, Homo sapiens
MAIGRCGYVASIEMGLSSEERVPREIINIVLLSSSHSIGGKQDYIILQDYPAAQTARRAVSTQVSSETKDILMECSNKTISRLEQPPYCISLITGGPSQLLPNCLGKRPTEGSQPMQKTWGYEDVDRPSCMPRDSGMDDSPSNQRASHKLNPPAQNSCQMRTPTGSLQSAGSLPAAYCLLLACAIRLQPQFRDGLSERAPQEGVVFVPDMVWLCPHQNLILNSHVLWEGPGGSCHMETSPSGTRLEVDKPVRPSQERGALMGSVGEYDMCPLKLGGHTELVSDSFLGNIQGTELGSRDLAKKAHALMKLTFGKHRFSKHRRELRTETSAIKQQKQERAWAAAGKETKQKAFYLEQEENKLSGTAKPGWYPWCTDPTPTPMNRRRLQPLQQKKPTTVNVDYASSCQRPQEMDYLGESSLPTFLNGYVTTNGATTTTLATQPGLPLTKGRNLSLPMSDERSHAFLPIIPNTQRGQLEDRLNNQARTIAFLLEQAFRIKEDISACLQGTHGFRKEESLARKLLESHIQTITSIVKKLSQNIEILEDQIRARDQAATGTNFGSTRG

SEQ ID NO: 33651 - protein, 54 aa, Homo sapiens
MDQIFHPHVKQKQLLCLCTQQARGPECPLSTKVVLQSTRHGLHGSSFPGFYSLE

SEQ ID NO: 33652 - protein, 168 aa, Homo sapiens
MTIRFSNKEINNDLREGSISRRIVEVKDLKQTLAIKTGYQDSNAWLEWIKYSIHTLNKSNCYACVHSRPEAQTVPFPPGWSSSRSHVDFQDSTAWSNKLCQALSLLYPKVQHPVGQPLRVIQLLSPNTQFTLCLSQQGGNLAFLGDLKGCSELKNFQELINQSALVHP

SEQ ID NO: 33653 - protein, 44 aa, Homo sapiens
MGCRVAIFQVSTAWSNKSCQALSAISQSPCGSAPEGRPASVSQH

SEQ ID NO: 33654 - protein, 252 aa, Homo sapiens
  misc_feature (1)...(252): Xaa = X or * as defined in Table 2
XSSHSVALRQSLVTYLSNKFPDNKIPRNPTYKGCEGELQTTAQRNKRGHKQMEEHSMLMDRKNQYRENGHTAQGAQCMLSVNLPCWSVEDSGPLLTAPLGGAPVGTLCGGSHPIFPFHTALAKVLYESTVPTVNLCLDIQPSSKTSHNGTIAPPPSNDKTKIAIIEVKDLKQTLVIKTGYQYANAWLEWIKYSIHMLNQSNCYACAHSRPEAQIVLFPLGWFSSRLGLGCMMLTLLDYNTYIQLPKTLIPNI

SEQ ID NO: 33655 - protein, 216 aa, Homo sapiens
MKGMGSIEEMFVALDWWSRTSHGEGMSCQAMRTSGKGATGRGNSRYKHLGVSAVVAHFPLGHCAGDLYWEAWWKNRILAKPELGRRAGYYLKPSSSPPFLSQFPSSMGAEVSGTDPIRLFEMRFFDPPPPAPSSKPSSKTSHKGTIAPSPSNDTTEIAIVEVKDLKQTLAIKTGYQDANAWLEWIKYSIHTLNKSNCYACAHSRPEAQTVPFPLSS

SEQ ID NO: 33656 - protein, 54 aa, Homo sapiens; identical to SEQ ID NO: 33651

SEQ ID NO: 33657 - protein, 287 aa, Homo sapiens
MKGMGSIEEMFVALDWWSRTSHGEGMSCQAMRTSGKGATGRGNSRYKHLGVSAVVAHFPLGHCAGDLYWEAWWKNRILAKPELGRRAGYYLKPSSSPPFLSQFPSSMGAEVSGTDPIRLFEMRFFDPPPPAPSSKPSSKTSHKGTIAPSPSNDTTEIAIVEVKDLKQTLAIKTGYQDANAWLEWIKYSIHTLNKSNCYACAHSRPEAQTVPFPLGWSSSQPGMGCMVALSQDSTAWSNKSCHALSLLYPEVRHPAGQPPRAIQLPSPNTKFTTGRKLSVPWRPERMQ

SEQ ID NO: 33658 - protein, 160 aa, Homo sapiens
MTVTFAEGNSPGESITTKVETNHTRGSLSPEPTHLLSSLSSFQPKIFTQLQGLQLQPRYTSPDESPAVVSVNNQPSSSPSGLLDTIGSAVMNNNSLLLGQSHSLQRDTCLTQNNSTASTMGNLPEPDQNLVAMDELVEVGDVEDTGNLGRELFIGFCWEM

SEQ ID NO: 33659 - protein, 62 aa, Homo sapiens
MSCAEKSHKPRKTGSHYKLKKEENDHEGQMAVKQEELASGSEENAVPLPHGLRCPACSEKLL

SEQ ID NO: 33660 - protein, 37 aa, Homo sapiens
  misc_feature (1)...(37): Xaa = X or * as defined in Table 2
MIMTWAKAITEGCEKAMCLAAAAKVCRRKEAPAGPSX

SEQ ID NO: 33661 - protein, 111 aa, Homo sapiens
  DOMAIN (14)..(42): Enterobacterial virulence outer membrane protein domain identified by eMATRIX, accession number BL00694B, p-value=2.964e- 19, raw score of 16.19
  misc_feature (1)...(111): Xaa = X or * as defined in Table 2
XDTRWHEDSVRNRWFSVMVGPSVRVNEWFSAYAMAGMAYSRVSTFSGDYLRVTDNKGRYRMYPLDVPRAPTKRKRRTMKRKVQKYRTPTQIPNRIRQILREIVIPFTSSYI

SEQ ID NO: 33662 - protein, 198 aa, Homo sapiens
  DOMAIN (27)..(40): LUTEOVIRUS ORF6 PROTEIN SIGNATURE domain identified by eMATRIX, accession number PR00910A, p-value=6.889e-10, raw score of 2.51
MSKPNPDPHPNSKARPKTRFKSQTQNPNPDPLPIPTPTPVPEKRITPSTAAVLNMAATLPLTLTGMTVGIDSRNDIPEGITTLGAFMGYSHSHIGFDRGGHGSVGSYSLGGYASWEHESGFYLDGVVKLNRFKSNVAGKMSSGGAANGSYHSNGLGGHIETGMRFTDVSTKVPDTHPDPNRIRQILREIVIPFTSSYI

SEQ ID NO: 33663 - protein, 201 aa, Homo sapiens
  DOMAIN (79)..(99): w LOW TRANSPOSASE SAPA 12K domain identified by eMATRIX, accession number DM00475B, p-value=1.300e-15, raw score of 12.12
  DOMAIN (12)..(105): Transposase domain identified by PFam, accession name Transposase_8, E-value=3.2e-38, PFam score of 140.4
MIDVLGAEKRRRRTTQEKIAIVQQSFEPGMTVSLVARQHGVAASQLFLWRKQYQEGSLTAVAAGEQVVPASELAAAMKQIKELQRLLGKKTMENELLKEAVEYGRAKKWIAHAPLLPGDGERTDDWMDGRRSRHTDDTDVLLRIHHVIGELPTYGYRRVWALLRRQAELDVSTKVPDTHPDPNRIRQILREIVIPFTSSYI

SEQ ID NO: 33664 - protein, 141 aa, Homo sapiens
MGRILKVHTTVAVGRSDIFSHQCDEKTRLNETLFTYLVLECVGLGEAAFVSAMSFSPWPPSSITPPYSSTQRWHREEHITGGTRRWLDIERNAPTSTSRPKSRQSTGRVTLSTKVPDTHPDPNRIRQILREIVIPFTSSYI

SEQ ID NO: 33665 - protein, 232 aa, Homo sapiens
MLQSNRTAASHSPSIQPAIQPAIQPANQLSIHNLWTQFRHSTKIPVEWVNGEWLNGRMPGDQHEWQCNYQPAIQPAIQPANQLSIHNLWTQVRQSTKIPVEWVNGEWLNGRMPGARHEWQCNYQPAIQPAIQPANQLSIHNLWTQFRHSTKIPVEWVNGEWLNGRMPGDHHEWQCNYQPAIQPAIQPANQLSIHNLWTQVRHSTKIPVEWVNGEWLNGRMPGGSHEWQCNYQ

SEQ ID NO: 33666 - protein, 139 aa, Homo sapiens
  DOMAIN (7)..(35): Glycosyl hydrolases family 1 proteins domain identified by eMATRIX, accession number BL00572E, p-value=3.455e-22, raw score of 19.00
  DOMAIN (3)..(53): Glycosyl hydrolase family 1 domain identified by PFam, accession name Glyco_hydro_1, E-value=4.6e-14, PFam score of 51.7
MGEAIADGIPLMGYTTWGCIDLVSASTGEMSKRYGFVFVDRDDAGNGTLTRTPFQSLINGFYRIFNRLGHRVVKTDDIRLNAEENVSPKLVEQERASDTDILPEINHIWPNRIAGHIPVMVTNHRRTQRVENKQHRQRT

SEQ ID NO: 33667 - protein, 197 aa, Homo sapiens
MVKGWRPVRFLLSICGYLKFLLRLVPNRPSTILFSNWESPPPSISTKVPDTHPDPNRIRQILREMPLSEVWEDILACRLMPMQYQRECGGRLPCTSSPILTCVIISNFRIAAPRWLSEIQTHLFATFCLPPHGICAVFMTGIWPQRFLQYLSNPAGDESHLEMQFSCADLFPSLEEACLPSSWPPGWLPDHAGQSTL

SEQ ID NO: 33668 - protein, 76 aa, Homo sapiens
  DOMAIN (36)..(76): Chloramphenicol acetyltransferase proteins domain identified by eMATRIX, accession number BL00100B, p-value=4.333e-30, raw score of 25.01
  DOMAIN (31)..(76): Chloramphenicol acetyltransferase domain identified by PFam, accession name CAT, E-value=2.4e-21, PFam score of 84.3
MGPSLRSLLACKFLCAPERWEAVVALEKLANQTVQLDITAFLKTVKKNKHKFYPAFIHILARLMNAHPEFRMAMKD

SEQ ID NO: 33669 - protein, 292 aa, Homo sapiens
MRDEGMCRECFRAENEEGRGMSGYVGFFNQPLFFFAVRTRKEPICLKTVARWWLVARSEITLVVPLRAEDAFPGRGIPGEGRVQEADVGKQILNSSSPIAPLSMDLLPASSVRGRIDGSFQAHFFPYSSSESKGYLWCQLQTGLALAYVDPVWVSWANPTWGMMTGLVGPHPHPCKQMWGIPALRNKEAAESTELGSTESTPMWVFPCGTIQVAKDAMMMMMMKHGGSVSTSECSASPSERCVPWRNNINKSCNKMTFPKSRFGEKMLFTAVSLLSLQMPTTVELLQVLLEV

SEQ ID NO: 33670 - protein, 134 aa, Homo sapiens
MVPKFFDTSPVERAPVPDVTNLKSHECAYLLADIKKNTKVGISAWEVKRNDTFIHPASHNDECPQIQEKDSDTRSNHAMHLTKDTGWIKQCNAFYWLNATPQTTDHTKALQGQPRVQQLTELLYLQPGGTASKA

SEQ ID NO: 33671 - protein, 39 aa, Homo sapiens
MQHHSLPSSTPTVLFIDHSGCAWLNRQQKGSEGSSLRVC

SEQ ID NO: 33672 - protein, 68 aa, Homo sapiens
  misc_feature (1)...(68): Xaa = X or * as defined in Table 2
XPFLILLLSPVSTDQANTTTAEIHSQLTPRLNLTILSSQGASLQQRVTYHRNHKYGQTHPQKAEIVVG

SEQ ID NO: 33673 - protein, 418 aa, Homo sapiens
  DOMAIN (220)..(241): Myc-type 'helix-loop-helix' dimerization domain proteins. domain identified by eMATRIX, accession number BL00038B, p-value= 3.077e-13, raw score of 16.97
  DOMAIN (188)..(240): Helix-loop-helix DNA-binding domain identified by PFam, accession name HLH, E-value=4.8e-23, PFam score of 90.0
MTERPPSEAARSDPQLEGRDAAEASMAPPHLVLLNGVAKETSRAAAAEPPVIELGARGGPGGGPAGGGGAARDLKGRDAATAEARHRVPTTELCRPPGPAPAPAPASVTAELPGDGRMVQLSPPALAAPAAPGRALLYSLSQPLASLGSGFFGEPDAFPMFTTNNRVKRRPSPYEMEITDGPHTKVVRRIFTNSRERWRQQNVNGAFAELRKLIPTHPPDKKLSKNEILRLAMKYINFLAKLLNDQEEEGTQRAKTGKDPVVGAGGGGGGGGGGAPPDDLLQDVLSPNSSCGSSLDGAASPDSYTEEPAPKHTARSLHPAMLPAADGAGPRKNAETNAIHHIQYNVDGKYWARPQKQLHYVHGQGASLQQRVTYHRNHKYGQTHPQKARNSCRLTTDAVPLGFILEKNKGCTHLVICP

SEQ ID NO: 33674 - protein, 95 aa, Homo sapiens
MPKRGKRLKFWAHDACSGQVTEVDYANSDPAVVRLKSKCTGGLQPPVQYEDVHTNPHRDCCLLQATTLNLIFIPIVMRMIFTLFTINVSKDIRHH

SEQ ID NO: 33675 - protein, 442 aa, Homo sapiens
  DOMAIN (376)..(409): ESICULAR LUMEN DOMAIN domain identified by eMATRIX, accession number DM01292C, p-value=4.672e-09, raw score of 12.45
  misc_feature (1)...(442): Xaa = X or * as defined in Table 2
XDLDIQIQEAQRTPGKFITKRTPSRHIIIRLLKVKTKERILRVVRQKHQLNAVRQEVKSLCGLEASHVPAEEALSGAGEPYDIIDSSDEMDAQEENIHERTVSRKKKSKRHKEELDGAGGEEYPMDIWLLLASYIRPEDIVNFSLICKNAWTVTCTAAFWTRLYRRHYTLDASLPLRLRPESMEKLHCLRACVIRSLYHMYEPFAARISKNPAIPESTPSTLKNSKCLLFWLKSKCTGGLQPPVQYEDVHTNPDQDCCLLQVTTLNFIFIPIVMGMIFTLFTINVSTDMRHHRVRLVFQDSPVPWLVGNLRSEQGVQVILDPVHSVRLFDCQAPCMKSNNALIVILGTVTLDAVGIGLVMPVLPGLLRDIVHSDSIASHYGVLLALYALMQFLCAPVLGALSDRFGRRPVLLASLLGATIDYAIMATTPVLWIYPLVNSPSC

SEQ ID NO: 33676 - protein, 247 aa, Homo sapiens
MPKRGKRLKFRAHDACSGRVTVADYANSDPAVVRSGRVKKAVANAVQQEVKSLCGLEASQVPAEEALSGAGEPCDIIDSSDEMDAQEESIHERTVSRKKKSKRHKELDGAGGEEYPMDIWLLLASYIRPEDIVNFSLICKNAWTVTCTAAFWTRLYRRHYTLDASLPLRLRPESMEKLRCLRACVIRSLYHMYEPFAARISKNPAIPESTPSTLKNSKCLLFWCRKIVGNRQEPMWEFNFKFQKTVP

SEQ ID NO: 33677 - protein, 91 aa, Homo sapiens
MECPVMETGSLFTSGIKRHLKDKRISKTTKLNVSLASKIKTKILNNSSIFKISLKHNNRALAQALSREKENSRRITTEKMLLQKEVEKLKF

SEQ ID NO: 33678 - protein, 242 aa, Homo sapiens
MYLVCTFTLNNDKLKSDGLIESFRVASISGRIPNATPTAGCPHDLLRFLIIYSAGVVKAHRGTCCYFDQSMGSHYESQGSSGSWQLHCHWGSLPLARVHQHSASTKLWEHTRSWECGFDEGQEKSHIRPMLDFTCVGVSDGTVSGLSTQDPMRKKRDQEEALHRTLWRTPAALTGAQCSRTFLIQVGACVSPSLSEAHAMASLRISSGLRARGEGTTQMSSAKQRHGPSDITFSDFSEKPDT

SEQ ID NO: 33679 - protein, 41 aa, Homo sapiens
MQDQKIKFWFADRKKVSKTRIPNRAARKGQFYKPYQLNIMR

SEQ ID NO: 33680 - protein, 62 aa, Homo sapiens
MNEASHPDCPNNQPSTLGKFTQQMPYKFSEVLKPTVSQSSGLMRKGDNKQNQVFCFCCRSGR

SEQ ID NO: 33681 - protein, 365 aa, Homo sapiens
MPRVPGMGALGPGPGVLGGAVEEGWGWLGAHGIRLEAMETVLLRTQVHRQLLQSPPSLLLGISGLLILCLKVMGHCPFPMPLNLFHGTYQGQWVGGMRQGYGVRQSVPYGMAAVIRSPLRTSINSLRSEHTNGTALHPDASPAVAGSPAVSRGGFVLVAHSDSEILKSKKKGLFRRSLLSGLKLRKSESKSSLASQRSKQSSFRSEAGMSTVSSTASDIHSTISLGEAEAELAVIEDDIDATTTETYVGEWKNDKRSGFGVSQRSDGLKYEGEWASNRRHGYGCMTFPDGTKEEGKYKQNILVGGKRKNLIPLRASKIREKVDRAVEAAERAATIAKQKAEIAASRWGPQHLHADLVPRTQMLLA

SEQ ID NO: 33682 - protein, 494 aa, Homo sapiens
MAPVAGPLALVLEPSERWLTPKPERLSFFPRPRRSRWWWRRCRPRCRQLGLSLAQADGGVDVLAVELTVLMPASLRKEPACCVGWPGCSWTPTCALQPTQQRAPKQPLLLALRISESLWATSTKPPRARPGCRPPPERRRDAAPAVGVLAAQGVDGRPQGERMTAAMPYGTLCRTPCPGACHRPTGPGIIVFITCVHVLENHCIVYFVFLVLFQARRQGSDSSEKNACGKECIIIFAVWVTGHSSLGALVPEKLRQRGSRIEPQQLQQPYQIVASLLKEKQQPDKQQQKHKTPKDQELKYRRAKANTPARGATASSGNTYQGTWAQGKRHGIGLESKGKWVYKGEWTHGFKGRYGVRECAGNGAKYEGTWSNGCRTATGPRPTRTESRGRKPGSCLLLLLLLLLLLLLLLLLKMVSVQGTLAGSAAARLPGLSDIHSSVHLTRMEPVLSWKPDPKQTGFPDQSTPMWELILRGTGSSASLGRLACFRHGCLGRE

SEQ ID NO: 33683 - protein, 310 aa, Homo sapiens
MLVIDEQRKWFPEMESTPVEDAVNTVEMTTNDLEYYINLVDKMVAILIPILKEVLLIEARGRQRPRQIGKGPRRISNSPHKCLHQMFCADKGTCTGDLPEHARSELEAHKHWGNGVEPPGIRVLCRGGAWLRSLDKEQKNPASLLCGPSKLAQRGRGNQQPTSFFGDCTLTLDSWHPVVLFQVPSLLHTSCSWHIFEWLCQVQSPGPHRIFCDKAVAFKKGYTHQQFCHESTPNKGDKVIYNLTRPLYCCVQFPMAGTGPHILYLSRLASNLELFKRGKGRGEQSKEEVTCGMLRKVKTPSNKEEEQAMT

SEQ ID NO: 33684 - protein, 662 aa, Homo sapiens
MAQAAWPLLPWPSPQHSAPNHGGTPPEEAALQKWPPGAVEAEGFGGGAALRRHQGAVYHPIKEGGRKNASMACCCCLLERCKLNHTRSVLSISLGGKNTGKIIANLLLVGDTLFHLRYLLSAGDVPFHSGRLGGRDSAKKIGAGSLDLGENSAWEGRGALRLQRAGERSSVPYVRTAYRPPLGTTCWWEPSDSKISVTGLPYGVSLQESLNGHRQLSQEALDDGAALGKLVLHLNFQHRDIKGGNEKQVSFTRGCLVPFSQCHYLLLMEIKWTGHGAFCVKVLPGGERAGKKQMEHVNYSYFSLEPCNVCDFQFRVPRTQKEEKSYYSNFAFCTCFVDKLSSSVMLLICISWSTLVKLQEPISNQSKLKNDANRQVQGTLWQVNIKHRVGESMFHTSPAAIIVDLLQFGHTIAHCQSGQIQNVRSCASHWKLDTAIEWTCQVINDLVSFVRRTLVAKLLVTDKQKDSSNLCRLKCPCLTALKRAVVLPARSWRSENRQTASSKGKLTNRKDIHTENPSVHHHHQRPKVDKTTKIGKKQNRKTGNSKTQSISPPPKERSSSPATEQSWMENDFDELREEGFRRSNYSELWEDIQTKGKEVENFEKNLEECITRITNTEKCLKELMELKTKARELREECRSLRSRCDQLEERVSAMEDEMNEMK

SEQ ID NO: 33685 - protein, 199 aa, Homo sapiens
  misc_feature (1)...(199): Xaa = X or * as defined in Table 2
MGKGRRSLWLLPADGGSSGNGNELQGTSPHDYFSIAIKSTHIGLEYPTSRQSNRVSPQSKRIRQPLGLPSGSITERGPPNNRQKGYTRQQFCHESTPNKGDRVIYNLTCLLYCCVRFPLAGTGPHILYLSRLASNLELFKRDKGRGEQRKEEVTCFHKLLAEKENNPPFSFIYPNPIKRPHPYLPSLTLFSDSAHLHPX

SEQ ID NO: 33686 - protein, 165 aa, Homo sapiens
MQIHSPTPHQLNQKLREWGPTICVLTSTIDYDVLQSMRTSPSQTLMCKGYTRQQFCHESTPNKGDRVIYNLTCLLYCCVRFPLAGTGPHILYLSRLASNLELFKRDKGRGEQRKEEVTCFHKLLAEKEGCSGISGLKNSSSSRDSSSPEFGCGPNRVAIIAIWSI

SEQ ID NO: 33687 - protein, 51 aa, Homo sapiens
MNGYEVALVVSPSGPSGGLDVEDSDTERAAKAKGYTRQQFCHESTLNKGDQ

SEQ ID NO: 33688 - protein, 255 aa, Homo sapiens
MESTSVPIHCELDNENMVHIHHGTLCSHKKEHDHVIRSNMDGARSHFPKQNATVAEKQILRILTCLFGELSKINAFDTPDSPLLRGKEFSDSIHNTFNHLWRTKEYNEVGCLLLNSLDKVMKENDELKKGYTRQQFCHESTLNKGDRVIYNLTHPPCCCVRFPLAGMGSHILYLSQLASNLELFKRGKGRGDQRKEEVTCGMLRKMGRKAFKEEPLLYFSHPDKQKLRKFLITTLALQGILKGALNMEAKGCRLP

SEQ ID NO: 33689 - protein, 323 aa, Homo sapiens
MVGQQHVSTDESARPFTEQLKVQTRSTGGRAEHKSPLAAKAKGRDPREHVGRAQWQARSNATQRPGDNDHRSKGENSSFSTDLAGRPRAHERTSCLRHCRCPGWSSRELWSCGFGQKQMDVCRVCIVLARAACLHGGAFHLLAKLQQTLASEQAGQERSCGQTAIAKEGSGARRVPQIPTPGAFSTYTQTYAYGSYIPAPPPPFPVPVSPRELPTGIDNVELWSAFGKREEQEGLAVTRWLLSPPQKEYTRQQFCHESTPNKGDRVIYNLTRPPYCCVWFPLAGMGTHILYLSQLASNLELLKRGKGRGEQRKEEVTCGMLRK

SEQ ID NO: 33690 - protein, 48 aa, Homo sapiens
  misc_feature (1)...(48): Xaa = X or * as defined in Table 2
MVERLAQPRRLWHPHMRVAMCVRVSVRVPTRAPLLTCSSLTSSEAGFX

SEQ ID NO: 33691 - protein, 170 aa, Homo sapiens
MMTEDTGFCQQKGKPRLGGRERWCVPCSLFHLPWDFLLIIVPSEPQRSLLNWGQEIPREPFRNKSGNMVQGGKGLPLKEGGGVVTHPVGQKTWALQDPLSIFSLFFPSLLSTSLGSPLCFGSLTGVSHPWGPAPSDPSWAPDPPSKPCVFSIGQGQALHLFQGALKYTFQ

SEQ ID NO: 33692 - protein, 583 aa, Homo sapiens
MQVAQGFRLIEALLSGTVASANFLAGEDTDGAVRRQTCTYLFGQQTMTEHPGLRSCSRCQRDPREQDQVPTLMEGTFQKCTIGSKAMKKLQALGPWEAPGKQRSRQANLAISSDGEVMIVCTAVRSSSPLPGTSTWGGAPLIGFTEMPQAGKERPAGRTFCATTPSSLAAGILPFIQRLRPGSEAHLCTCPHSWAFVPQTLLNEEAQGILWVLAGPVGDGVVTALGHTLQDSKGLLQTHPRAQGAAAVVSAAERSGQAAEEELSSHVKDLYVFTRACDQTYTLSGADTVVASKEKHFGYGALGSRAGLYDQTWVRIRTLTPSRYVTFVSDSISATDSKAVVHNGDLQTPPPEPSPADSNSPSVGLWALEAVCNQANEVAVPDPGLDSALEAPAGSLPSHFAPTPVKCRMMQQEGPHQMQPPNLGFPSLQNTVLFLSHHPAVKGACSHKIINITAAATTAAIFHGASPILGADMSVSGFLIQGVTLYTVDKTQIASVRCIQKPRLAATLSMYHSPAVQSSLSCPGLGTKELRAYLNSSHLHHGRLRGRPVQSVLRRKGSITGLNYYSPSPATAILSDLSLEKAM

SEQ ID NO: 33693 - protein, 417 aa, Homo sapiens
  misc_feature (1)...(417): Xaa = X or * as defined in Table 2
XQASAFSRSLSVERIKSNPSIIVRISWHLSLMQISVHLCDDFIHVYLHQWTTAVLFLSHHPAVKGACSHKIINITAAATTAAIFHGASPILGADMSVSGFLIQGVTLYTVDKTQIASVRCIQKPRLVSGDSEKSSSFPKVTQLERCLLLKPSDVRDICLCPNPQRSKLEGPQYVDPGKERCPSSRGCPCQPLQVWMVLAKTPWFRLVWAGGRGNLAIDGIAKVALVIQCQSAFNETGNLMPRQGEDSIKGTNPAMGGTETWLAATLSMYHSPAVQSSLSCPAKAPQLQHQQISADLLRPSRASNATVQQLPFHTRKYQPGGKQRTKAGRGDRRWPDPEELRVRLGRLEERGLSVLWNNSDIVSLTQSPGDSTLRPRSEGPEARTRLFTPSPIYFSLDLSAGQTGAITFAQRFGAFGX

SEQ ID NO: 33694 - protein, 50 aa, Homo sapiens
  misc_feature (1)...(50): Xaa = X or * as defined in Table 2
MAQYGPQQTGPSMSPHPSPGGQMHAGISSFQHSNSSGTYGPQMSQYGPQX

SEQ ID NO: 33695 - protein, 106 aa, Homo sapiens
MNQSGLMASSSPYSQAMNNSCSVMNTQAPPYSMAPAMVNSSAASVGLADMMSPGESELPVPLKADGKEEGAPQPESKSKKPSSSASKGEKIKKVYELGNEPERKLW

SEQ ID NO: 33696 - protein, 82 aa, Homo sapiens
  misc_feature (1)...(82): Xaa = X or * as defined in Table 2
MDGMYWPPAKRHEGDMYNMQYSNQQQEMYNQYGGSYSGPDRRPIQGQYPYPYSRERMQGPGQIQTHGIPPQMMGGPLQSSSX

SEQ ID NO: 33697 - protein, 194 aa, Homo sapiens
MKCPVNALPVQGIPAPAGLYEEKGNHTTTKTENLLPLDFLQCLLKLPILGLPSEFLRWVQESASLTTSAGSFHACKLKFEKRQCGASVGLADMMSPGESKLPLPLKADGKEEGTPQPESKSKDSYSSQGISQPPTPGNLPVPSPMSPSSASISSFHGDESDSISSPGWPKTPSSPKNLRGSVIDLLPPKGGNDT

SEQ ID NO: 33698 - protein, 764 aa, Homo sapiens
  DOMAIN (73)..(88): HISTONE H3 SIGNATURE domain identified by eMATRIX, accession number PR00622A, p-value=1.000e-08, raw score of 6.52
  misc_feature (1)...(764): Xaa = X or * as defined in Table 2
MTECLDRFIDSIAAVPRSTKSTVQKCLPCLSDGEDKIPDLIAITWTPRQGELLEKNVISETGTLLPTPCLDTSTKETADKSTSGKTIHQSIKTVLKDLSGSIDDLPTGTEATLSSAVSASGSTSSQGDQSNPAQSPFSPHASPHLSSIPGGPSPSPVGSPVGSNQSRSGPISPASIPGQDPGYGNSASPWVMNILSAVSRGQIPHCCLVAKAFAFEELPQCSELLFSFRGHSTPQVREFRHLLAAQDLQGCSQDVGQPASSSGGSTREQSTSSFIRIVAASSPSSCWKLQVLLSGEEGITHRCYSLEVTRGCVCHSSQMPPQPPGSQSESSSHPALSQSPMPQERGTPMSAAGWGFTDAQQRLSQTTKAIQLSHPVKAQDNRTRKSLLFGIKKAYNFTNKYYSELMTQTRPQSTPSIPSPLPLDDAGLERSQGNVSASSFMVLGNRERGEDTTGAGFGRSRNKEEVPCTIYVGAESPGCADGWITLRGKKERVALWASHVSEGAFGGVAVPVTEVDKSQDPTGLKEKVRGSAGAQQNTAQACSCWQLTCFMAGTQRNPQMAQYGPQQTGPSMSPHPSPGGQMHAGISSFQQSNSSGTYGPQMSQYGPQDGGGDVSDVVMAIDDDGSCHLLGSAVPGAVLVTFNLLLIIVVTLQMTEPQFREYITGDPLESTCRHASLALAVVLHQETAMTMITDSLAVVPHSGNSYDHWPSFYKQETAMTTGRRFTPGNSCDLDYEFELGNSYDLLAVVLHQETAMPTGRRLTX

SEQ ID NO: 33699 - protein, 1149 aa, Homo sapiens
  DOMAIN (709)..(724): DOPAMINE D4 RECEPTOR SIGNATURE domain identified by eMATRIX, accession number PR00569D, p-value=7.411e-09, raw score of 8.94
  DOMAIN (293)..(402): ARID DNA binding domain identified by PFam, accession name ARID, E-value=4.8e-43, PFam score of 156.4
MHAGISSFQQSNSSGTYGPQMSQYGPQGNYSRPPAYSGVPSASYSGPGPGMGISANNQMHGQGPSQPCGAVPLGRMPSAGMQNRPFPGNMSSMTPSSPGMSQQGGPGMGPPMPTVNRKAQEAAAAVMQAAANSAQSRQGSFPGMNQSGLMASSSPYSQPMNNSSSLMNTQAPPYSMAPAMVNSSAASVGLADMMSPGESKLPLPLKADGKEEGTPQPESKSKDSYSSQGISQPPTPGNLPVPSPMSPSSASISSFHGDESDSISSPGWPKTPSSPKSSSSTTTGEKITKVYELGNEPERKLWVDRYLTFMEERGSPVSSLPAVGKKPLDLFRLYVCVKEIGGLAQVNKNKKWRELATNLNVGTSSSAASSLKKQYIQYLFAFECKIERGEEPPPEVFSTGDTKKQPKLQPPSPANSGSLQGPQTPQSTGSNSMAEVPGDLKPPTPASTPHGQMTPMQGGRSSTISVHDPFSDVSDSSFPKRNSMTPNAPYQQGMSMPDVMGRMPYEPNKDPFGGMRKVPGSSEPFMTQGQMPNSSMQDMYNQSPSGAMSNLGMGQRQQFPYGASYDRRHEPYGQQYPGQGPPSGQPPYGGHQPGLYPQQPNYKRHMDGMYGPPAKRHEGDMYNMQYSSQQQEMYNQYGGSYSGPDRRPIQGQYPYPYSRERMQGPGQIQTHGIPLQMMGGPLQSSSSEGPQQNMWAARNDMPYPYQNRQGPGGPTQAPPYPGMNRTDDMMVPDQRINHESQWPSHVSQRQPYMSSSASMQPITRPPQPSYQTPPSLPNHISRAPSPASFQRSLENRMSPSKSPFLPSMKMQKVMPTVPTSQEEDAECIDAAEEDEEDEEEDSEKTESDEKSSVALTAPDAAADPKEKPKQASKFDKLPIKIVKKNNLFVVDRSDKLGRVQEFNSGLLHWQLGGGDTTEHIQTHFESKMEIPPRRRPPPPLSSAGRKKEQEGKGDSEEQQEKSIIATIDDVLSARPGALPEDANPGPQTEKHLSFVPGNDAEMSKHPGLVLILGKLILLHHEHPERKRAPHTYEKEEDEDKGVACSKDEWWWDCLEVLRDNTLVTLANISGQLDLSAYTESICLPTFGWLAALDEAQDPFPTVGPNSVLSPQRLVLETLCKLSIQDNNVDLILATPPFSRQEKFYATLVS

SEQ ID NO: 33700 - protein, 60 aa, Homo sapiens [sequence omitted]

SEQ ID NO: 33701 - protein, 60 aa, Homo sapiens [sequence omitted]

SEQ ID NO: 33702 - protein, 80 aa, Homo sapiens
MIMGSGSSLSFTSILCLTRSSGAITCMELSSMAIMLSSGRSAEETFPHFRLELSLFWSCCFPPYKMSCASACWHPGVLLF

SEQ ID NO: 33703 - protein, 317 aa, Homo sapiens
MKNSFKSARRQASREEDGQTTSTDTLQKRYPGQGAALLLLLLLFTAASIKTANSIGSPLPSFLGEATNPPGAAYNQLKCKHKLPKDMYKNVPSSLFITARTGSTPDVTKRRMGACGSSSVPGPPLAHIRKAGPPSSPIHPSLKLDPWARGPPGAPREVETQMKEQLWNLPGLRARTSPLRGQMAERQLDAAENTASLAQVSMAARRGKRAAPPPALTYHGACKMSVVFLFTDEETEKLGALFNALEVEFSCQRQANRVPVAGSFSPAPCSAVRMEARCHLCRGPPRGEVVNQGDDDEDGNDPFGVHSPLLLTPPIPA

SEQ ID NO: 33704 - protein, 127 aa, Homo sapiens
MHSLNLSFALQLHDWKLLFIDIGVGDVIPDLHSVYSLLLLALSTVLTQLCQQPRGGSDFLLAEAQGCDVSGMFRVTETVKNLTALLTKAADPRFGSIALSLGWCVKLRICDLTRISVRKGISNAGQR

SEQ ID NO: 33705 - protein, 22 aa, Homo sapiens
  misc_feature (1)...(22): Xaa = X or * as defined in Table 2
XSDFLLAEAQGCDVSGMFRVTE

SEQ ID NO: 33706 - protein, 1098 aa, Homo sapiens
MPDATLSRLTCLQIVRTVGRIRRLRRSGNWCMMPDATLSRLICLQIVRTVGRIRRLRRTGNWCMMPDATLARLISLHWCRIGRPDKAFTPHRQVVKPAQTPSQYPDPADTHRRQTKLNVFAFHQFSSVKAPLFSRQFRGRNRAVTHNRWVQPTTAIERTRARGLRPIHGRGFHSSPAWQLRHRKCRRCARRYHTVYWIKAGRSVARASTVVSGRIIRQSLPEERSISLGPVKTDEPRARHKPPSMGRRTSGLLFGLVRASGLTIIDGSTEADMRWTDFQQMEVIFTHLLVVIVHKWLVALARPQLAAVGRSRGSPGRGIAAIKNAKTMFAATQTTALRRTPTLPALNTEQLLIERIQFLQPIKENARRAASDLSAISLPSARRYRRPVQANGQTADNQATHQLKQQTTQRDRRAAALAALLLSMPADRTEVSTNHQTERHGEGEMPAAVRVASRCEGYQILSDKEVTSMVVALLLCTSAQGSSEHRPPNPRPLPGISRRPLILKTEQLDQQLSTAAAPSASTEAAGPRRAPDSQAPQRPEPTRNDVPPSSSGRRLAEGLGTSRGDLYLLQGVGVERRPAGSLPPSPSQLRLLYSLSMFPYLQVGHTYPVTTFLACGRGRALPVSDHRGWERPVATIRRAIWPFTRGRTLAQAPLTSPRVFPLFSHAPSLQLGFPPINKAFCQSTMTPHKTENGSNARSIRAPQSRAFTICPRSEIKPSERSWLNLPDRAVPAPVKYAGWTEMTFDQVVRIFSIGTCKRFCKIASPAALSPVYRSHRSSHPVSPQSARGYPTSLIWPTRGIAANELHIVIIGRSNKLSLKDSSHASSTPVNASVSQAGSAPIVPDRLGSPPVLYKPDQQIDIREEMVTRHQRISAIARVCFSGILRSAQSSRCPVRHQDENFLHGQNKGNQGELATCHTLCLSRKKEKAGDHGTVFRESTAWISLFGESQVLLYRYAVDELMAVFCAERFRRSIASLMATLYGTSLRLTVRTAQCAVLLFLPVPFFQQAGQVWLHQSVEVSVLVATPASSSRKYRTSRLLHPVQPGTGIQHQRVVLGQLPGVERLDGTLRARRRAAGFTDFPLLISALMAFNTLIISSA

SEQ ID NO: 33707 - protein, 214 aa, Homo sapiens
MRWILCWSLTLCLMAQTALGALHTKRPQVVTKYGTLQGKQMHEAEDAEPVLQKHQHHFLAGGQVRALVRRSSAHDEGASREPDHHLDEEGRDLSGAEVEASIETLYPRILEDEVGIRPAPGYPACPEHTEKATIWELLEVEKHTGMKLTESFAIHPDSKYYAVAQIQRDQVEDYARPERRKKAARLLRGDRRYALVQSSNATTMLVTSFALRIW

SEQ ID NO: 33708 - protein, 503 aa, Homo sapiens
MKKSICPEVTILETSFGETTVHRSREAQLCLSPTDGVFSVSVTRHLTVKQPQAGPSGGIPEEEGIVIIGDDSSMHVIAPEDLPGGQEVEVEDSDIDDPDPIIQQIGPQEEAGKWYFQQLENCYNDPGKLDEGLNYCNGIKIGRKYTLLSHSLVLELIGLGDPLGLTLHGSGHPLAQGRSRNAIQESRPGIRDLRSHLVLTPLWPMLIPKITWVSLLLVQVPKALRLAGDKYCQHWALSFKAAGSLLAQVAELVSKRQDKALSTLSVPLLKQKKGIKRSLLEPLCNLVLEEGAQIYYLHHIAAAAVGEKNKSVDSAENKSECVINKQQLPKLCGNLKANGFISMYKPQRNFILENVPEQVTPKTVLEAKEKKKVKPYSNNIHVLDAAAAIPIAVSNSSIHQVLNLLGISTIKTSLTHPEVFGEGSVTVVAHILCYAILQFPYQDVKCFPCFLILNSGVIALANGMSENVMQQRLEDALQRLDLFFSAAAIAMKLQSQPSLLAPG

SEQ ID NO: 33709 - protein, 56 aa, Homo sapiens
MGLSSLRPVGFSGCRLTSPRAGLVQGCISSSVPGDVFLGLIPTSPPSVKEYLDVLL

SEQ ID NO: 33710 - protein, 106 aa, Homo sapiens
FQSKTSKYSFTEGGEVGIKPKKTSPGTELLMQPCTSPALGLVSRHPENPTGLRLLKPINEAQYTRVSALVAKSNLAKGIWDIRLVNVGEVSPLDEAPETMCSLVAS

SEQ ID NO: 33711 - protein, 320 aa, Homo sapiens
  misc_feature (1)...(320): Xaa = X or * as defined in Table 2
YAGNESHPPSLPRYLRRSRHCGCRPPPLPVPTPTQACNAPQRRRTTSTSLACLGRAGLWLPSVSSPYLVLSSCQEQPHHCCPPSTPRPSWSPLPGMPSASSPGQVPAQGDLSQEDSSDSPPAEQVLPPSSGSHNTLYLGCKRFSAFILNCEPPSKLLKARPQVSELSWNPDFVASSAARPRDGPCSTGRQSASKTPPPPSHPHTGHSLWSEEKXKDSDSRPNQSAFPGCSVDLQFSHKLRPYLIHPSESLGTVGNRPSQEGHELPPAPFSRMGPEQHLPVVVLPFTGAFAVVLPCPFLVSSSAWHFKVKHPSIPLLRGEK

SEQ ID NO: 33712 - protein, 320 aa, Homo sapiens
  misc_feature (1)...(320): Xaa = X or * as defined in Table 2
YAGNESHPPSLPRYLRRSRHCGCRPPPLPVPTPTQACNAPQRRRTTSTSLACLGRAGLWLPSVSSPYLVLSSCQEQPHHCCPPSTPRPSWSPLPGMPSASSPGQVPAQGDLSQEDSSDSPPAEQVLPPSSGSHNTLYLRCKRFSAFILNCEPPSKLLKARPQVSELSWNPDFVASSAARPRDGPCSTGRQSASKTPPPPSHPHTGHSLWSEEKXKDSDSRPNQSAFPGCSVDLQFSHKLRPYLIHPSESLGTVGNRPSQEGHELPPAPFSRMGPEQHLPVVVLPFTGAFAVVLPCPFLVSSSAWHFKVKHPSIPLLRGEK

SEQ ID NO: 33713 - protein, 207 aa, Homo sapiens
  DOMAIN (7)..(56): Eukaryotic RNA polymerase II heptapeptide repeat proteins domain identified by eMATRIX, accession number BL00115Z, p-value= 8.279e-09, raw score of 3.12
  misc_feature (1)...(207): Xaa = X or * as defined in Table 2
RAAFSPPAPVSSLPAPVSSPPASTSCPPAPVSSLPAHASSPPASTSSPPAPLSSAPAHTSSLPAPVSSPPASTSSPLVAGSGGSTTRSLPPGLGALLTHSVAPYPGGQPPPAAADDPXTMAPAGWGSHNPRGCSCSPVAAGAGPFPASFXGPLRXAGSQTFQILQVEVFLVVRHFSPSTPPSVMLYPPPPSTPPTLRAPRPPIPPSP

SEQ ID NO: 33714 - protein, 76 aa, Homo sapiens
  misc_feature (1)...(76): Xaa = X or * as defined in Table 2
PMLLEVSVADRDAVXTFWQAPIGESQQGALGFWSKALQSSADNNSPFQITMQPELPIMNWVLSVPSSHKMGHAQQH

SEQ ID NO: 33715 - protein, 117 aa, Homo sapiens
  misc_feature (1)...(117): Xaa = X or * as defined in Table 2
KIPGTSTSVKFLGVQXCGTCQDIPSKVKDKLLHLAPPTIKKEAQRLVGLFGFWSQHIPHLGELLRPIYRVTRKAASFEWGPEHEKALQQVQAALQAALPLGPYDPADQPLCNLNCLS

SEQ ID NO: 33716 - protein, 358 aa, Homo sapiens
LCQRLLLAEPNEKPGSLGNVMAVARIEIGICEYYHEKTTEKALDSHGVLAGSTIKGVRSFQRNLELKLPATERATANAIELLTVLDQAYENFAPQILPSTGSPTSQETAQFKANQNKPLVRGKGSPHEAIRYISAAHREWKPAILTSAIRSFCSTWLVFTSKNFPKLVTQHGSTIAGNGQSSDETQVQGAAWKSDSRGTKRQIPTWILAEGNNAGAQLDIPGPTIPAPNCSLKVPQSWSTTPSMPSSLGKAYWLLACYWALVETERLAMGHQVTMKPELPVMNWVLSDPSSHKVGGAQQHSINKWKWYIRNRARAGPEGTTLPLTKALTLWLKKYSNVLMLVEFTGLTMFPDILKQLE

SEQ ID NO: 33717 - protein, 389 aa, Homo sapiens
  DOMAIN (321)..(335): Phage integrase family domain identified by eMATRIX, accession number PF00589B, p-value=1.621e-11, raw score of 16.17
  DOMAIN (187)..(368): "Phage" integrase family domain identified by PFam, accession name Phage_integrase, E-value=1.8e-09, PFam score of 44.9
  misc_feature (1)...(389): Xaa = X or * as defined in Table 2
MAQYPILDFLKVGQLLGNCALGKGNDQTFRGLLDTGSELTLIPGDPKHHCDPPVKCAAIDLANAFFSIPVHKAHQKQFAFGWQGQQYTFTVLHQGCMNSLALCHNLIQRELDCFLTPEDITLDHYIDDIMLIGSSEKEVANTLDLLFWDYRHEPLRLANYSPFERQLLACYWALVETECLMMGHQVTMRPELPIMNWVLADPSRHKVGNAQQHWKCAVHTIIKWKWYIRDWAQAGLEGTSXLYWPRASRYQQGHQDLFILRSDLPSQVFIRDKLMERRNRRTGRTEKARIWEVTDRTVRTWIGEAVAAAAADGVTFSVPVTPHTFRHSYAMHMLYAGIPLKVLQSLMGHKSISSTEVYTKVFALDVAARHRVQFAMPESDAVAMLKQLS

SEQ ID NO: 33718 - protein, 20 aa, Homo sapiens
GGFRCLAFECPENYRRSAAT

SEQ ID NO: 33719 - protein, 142 aa, Homo sapiens
  DOMAIN (27)..(139): dUTPase domain identified by PFam, accession name dUTPase, E- value=0.00021, PFam score of 13.4
ARIQGSRNQGVEVEVAPLTVTPSDPLANVLLPVPATLPSAGLEILVPEEGRLPPGDTTMMPLNWNLRLPHGHFGLLLPLNQQAKKGVAVLGGVIALDCQDEISLLLYKGDLTVMVEDKEEQNHILHGSRQREREPSKTGSPL

SEQ ID NO: 33720 - protein, 134 aa, Homo sapiens
  misc_feature (1)...(134): Xaa = X or * as defined in Table 2
GRHAVGDIEAEDGGGVRGPHPGGVYGLQQSHPGGGDPVWEDGHPGLPGAQQRGQXRQQACAHHKSPSGAGXGXLPGPAQSAGNPDPKSPGPAPCLVGSSRNETPGAMGAPSRNGSPPTAGLGVGDGTGSPSEAV

SEQ ID NO: 33721 - protein, 59 aa, Homo sapiens
YSCSYSYFDEPVELRNSSFFRWNHSSDSYWKKKSSKDTEPVLKPPGYSARYECKTVGSS

SEQ ID NO: 33722 - protein, 154 aa, Homo sapiens
  misc_feature (1)...(154): Xaa = X or * as defined in Table 2
HLKGLGNDTPRVCSCLIGXTXLCDCHXLQEASPTSVEVREPRTSVNKDSPKSLLYSCSYSYFDEPVELRSSSFSSWDDSSDSYYETHLLHLKLVXPNLAVFNCRPTARRKPDYEPVENTDEAQKTFCKTAHNLWSLTFPFPCLLXYETRARLER

SEQ ID NO: 33723 - protein, 395 aa, Homo sapiens
HERHEAGASYGSAADRDRDPDPDRAGRRLRVLSGHLLGRPREALSTNECKARRAASAATAAPTATPAAQESGTIPKKRQEVMKWNGWGYNDSKFIFNKKGQIELTGKRYPLSGMGLPTFKEWIQNTLGVNVEHKTTSKASLNPSDTPPSVVNEDFLHDLKETNISYSQEADDRVFRAHACHDDVVKIVNLACKYNLCIIPIGESNNININKKDINTKTPSKGHQHQRSKVHKSMKMRKNQHKNAENSKNKNASSPPKDHNSLPAREQNWMEKEFDELTEVGFRRCIITNSSALKEHVLTQCKQAKNLDKRLQELLTRVTSLENINDLMELKNTARELCEAYTGINTRINQAEDRISETEDQLNEIKHEDKIREKRMKRNEQSLQEIWNYVERPNL

SEQ ID NO: 33724 - protein, 289 aa, Homo sapiens
  DOMAIN (44)..(250): FAD binding domain identified by PFam, accession name FAD_binding_4, E-value=2.5e-45, PFam score of 164.0
  misc_feature (1)...(289): Xaa = X or * as defined in Table 2
PGRPTLSEWIQNTLGVNVEHKTTSKASLNPRDTPPSVVNEDFLHDLKETNISYSQEADDRVFRAHGHCLHEIFLLTEGMFERIPDIVLWPTCHDDVVKIVNLACKYNLCIIPIGGGTSVSYGLMCPADETRTIISLDTSQMNRILWVDENNLTAHVXAGITGKELERQLKESGYCTGHEPRFPWSSSTVGGWVSTRASGMKKNIYGNIEDLEIVHFSDNDLSCIELDRLIEIVLPSSGIPLLDGYSTEIHMPVHLETSTTMCIVTPIHSSMKLETLRMSMSINCRKDKL

SEQ ID NO: 33725 - protein, 296 aa, Homo sapiens
  DOMAIN (16)..(35): Eukaryotic  RNA-binding region RNP-1 proteins domain identified by eMATRIX, accession number BL00030A, p-value=1.000e- 12, raw score of 14.39
  DOMAIN (16)..(153): RNA recognition motif. domain identified by PFam, accession name rrm, E-value=5.7e-33, PFam score of 123.0
MSKSESPKEPEQLRKLFIGGLSFETTDESLRSHFEQWGTLTDCVVMRDPNTKRSRGFGFVTYATVEEVDAAMNARPHKVDGRVVEPKRAVSREDSQRPDYFEQYGKIEVIEIMTDRGSGKKRGFAFVTFDDHDSVDKTVIQKYHTVNGHNCEVRKALSKQEMASASSSQRGRSGSGNFGGGRGGGFGGNDNFGRGGNFSGRGGFGGSHGGGGYGGSGDGYNGFGNDGSNFGGGGSYNDFGNYNNQSSNFGPMKGGNFGGRSSGPYGGGGQYFAKPRNQGGYGGSSSSSSYGSGRRF

SEQ ID NO: 33726 - protein, 147 aa, Homo sapiens
  misc_feature (1)...(147): Xaa = X or * as defined in Table 2
DGMEKVDTAMNARPHKVDGRFVEPKTAVSREDSQRPGAHLTVIKMFKEDTEEHKLRDYIEQYGGGNFSGCAGFGGRSGGGRXGGSGNGYNRFDNDGSNFGGGGSYNDFGNYNDRSSNFGPIKGGNFGGRSSGPYGGGSQYFAKPXNQ

SEQ ID NO: 33727 - protein, 133 aa, Homo sapiens
  DOMAIN (42)..(91): Eukaryotic RNA polymerase II heptapeptide repeat proteins domain identified by eMATRIX, accession number BL00115Z, p-value= 9.934e-09, raw score of 3.12
YHLLHLHPLHLHPLHLHPLHLHSLHLHLLHLPLAALTSSAPTSTASTPSAPTFTAPTPSAPTPSASTSTVPTPSAPTFTAPTPSAPTPSAGGNFGGRSSGPYGGGGQYFAKPRNQGGYGGSSSSSSYGSGRRF

SEQ ID NO: 33728 - protein, 250 aa, Homo sapiens
  DOMAIN (36)..(55): Eukaryotic  RNA-binding region RNP-1 proteins domain identified by eMATRIX, accession number BL00030A, p-value=1.500e- 10, raw score of 14.39
  DOMAIN (36)..(109): RNA recognition motif. domain identified by PFam, accession name rrm, E-value=1.6e-15, PFam score of 65.0
MNARPHKVDGRVVEPKRAVSREDSQRPGAHLTVKKIFVGGIKEDTEEHHLRDYFEQYGKIEVIEIMTDRGSGRKRGFVFVTFDDPDSVDKIVIQKYHTVNGHNCEVRKALSKQEEMASASSSQRGRSGSGNFGGGRGGGFGGNDNFGRGGNFSGRGGFGGSRGGGGYGGSGDGYNGFGNDGSNFGGGGSYNDFGNYNNQSSNFGPMKGGNFGGRSSGPYGGGGQYFAKPRNQGGYGGSSSSSSYGSGRRF

SEQ ID NO: 33729 - protein, 1245 aa, Homo sapiens
  DOMAIN (436)..(466): Flocculin repeat proteins domain identified by eMATRIX, accession number PF00624I, p-value=1.525e-10, raw score of 9.10
GRASAAAVAAAATLTPPTMDSFDLALLQEWDLESLCVYEPDRNALRRKERERRNQETQQDDGTFNSSYSLFSEPYKTNKGDELSNRIQNTLGNYDEMKDFLTDRTNQSHLVGVPKPGVPQTPVNKIDEHFVADSRAQNQPSSICSTTTSTPAAVPVQQSKRGTMGWQKAGHPPSDGQQRATQQGSLRTLLGDGVGRQQPRAKQVCNVEVGLQTQERPPAMAAKHSSSGHCVQNFPPSLASKPSLVQQKPTAYVRPMDGQDQAPDESPKLKSSSETSVHCTSYRGVPASKPEPARAKAKLSKFSIPKQGEESRSGETNSCVEEIIREMTWLPPLSAIQAPGKVEPTKFPFPNKDSQLVSSGHNNPKKGDAEPESPDNGTSNTSMLEDDLKLSSDEEENEQQAAQRTALRALSDSAVVQQPNCRTSVPSSKGSSSSSSSGTSSSSSDSESSSGSDSETESSSSESEGSKPPHFSSPEAEPASSNKWQLDKWLNKVNPHKPPILIQNESHGSESNQYYNPVKEDVQDCGKVPDVCQPSLREKEIKSTCKEEQRPRTANKAPGSKGVKQKSPPAAVAVAVSAAAPPPAVPCAPAENAPAPARRSAGKKPTRRTERTSAGDGANCHRPEEPAAADALGTSVVVPPEPTKTRPCGNNRASHRKELRSSVTCEKRRTRGLSRIVPKSKEFIETESSSSSSSSDSDLESEQEEYPLSKAQTVAASASSGNDQRLKEAAANGGSGPRAPVGSINARTTSDIAKELEEQFYTLVPFGRNELLSPLKDSDEIRSLWVKIDLTLLSRIPEHLPQEPGVLSAPATKDSESAPPSHTSDTPAEKALPKSKRKRKCDNEDDYREIKKSQGEKDSSSRLATSTSNTLSANHCNMNINSVAIPINKNEKMLRSPISPLSDASKHKYTSEDLTSSSRPNGNSLFTSASSSKKPKADSQLQPHGGDLTKAAHNNSENIPLHKSRPQTKPWSPGSNGHRDCKRQKLVFDDMPRSADYFMQEAKRMKHKADAMVEKFGKALNYAEAALSFIECGNAMEQGPMESKSPYYLMYSETVELIRYAMRLKTHSGPNATPEDKQLAALCYRCLALLYWRMFRLKRDHAVKYSKALIDYFKNSSKAAQAPSPWGASGKSTGTPSPISPNPFPGSSVGSQGSLSNASALSPSTIVSIPQRIHQMAANHVSITNSILHSYDYWEMADNLAKENREFFNDLDLLMGPVTLHSSMEHLVQYSQQGLHWLRNSAHLS

SEQ ID NO: 33730 - protein, 210 aa, Homo sapiens
  misc_feature (1)...(210): Xaa = X or * as defined in Table 2
DLREWSWARRTAWEPRGKRVRGKXAFKEIQCPXQQKESMSGLLLLKVVAKEMTWLPPLSAIQAPGKVEPTKFPFPNKLMFSWWYIETTTASAKVIGYKPSVLNCATLRVQIMSHYHSYRHLASLLVEGSATLPGHSHILGPLIRHPDKVSAGKPRVLGLQLLKEDCSSQPAAKPQGPHRLCSSLILHRARARLGPEQRETKVPFSKGTTH

SEQ ID NO: 33731 - protein, 270 aa, Homo sapiens
  misc_feature (1)...(270): Xaa = X or * as defined in Table 2
QVPTMVDWAGWSPGLWTTCSGTGGGGAEQGWANWSLVLPGVLAGTSLETFSPLSXGLTFSSLLLMQISAASLNFSSENGIFFSTTLPGCKFSKFLCSASLLKWNAFSSTQVTSXMLCCSEISSTRYPKSSLXSSKFHKSLEQGQNAASLFAKTXQESPLLQLPTSSSSPSETTSAWISLSISLSVFLSKLFDKSLESSKLSTFSSVLLSPPNCSNLCLLPSFKVACTFLGTFLRSTSLHWYQFTVLVCFHPADKDILKSEKKKRCKEKEL

SEQ ID NO: 33732 - protein, 160 aa, Homo sapiens
  DOMAIN (30)..(66): 072 RIBONUCLEASE INHIBITOR domain identified by eMATRIX, accession number DM00315G, p-value=7.660e-09, raw score of 15.85
  misc_feature (1)...(160): Xaa = X or * as defined in Table 2
LFKAVLHDPHLKLLSLYGTSLSHTDVSHLCETLKHTTCKIEELMLGTCDISDEGCEDIASVLACNSKLIHLSLVENPEKDKRMCCCALETLMLMYCCLICVSCEDISHVLFCSKSLSLLDLGSNFLEDNEVHLLCEALKHXDACKTWRSLNFDWVGYLGC

SEQ ID NO: 33733 - protein, 70 aa, Homo sapiens
MPEGECFPGHLILTVSSSIGVIGLAPNGVLEGVPVKRFWGDFFRVVGCLSLEPLSLKLGGLPFKALLMGV

SEQ ID NO: 33734 - protein, 517 aa, Homo sapiens
  DOMAIN (215)..(232): Zinc finger C2H2 type, domain proteins. domain identified by eMATRIX, accession number BL00028, p-value=1.563e-15, raw score of 16.07
  DOMAIN (129)..(516): Zinc finger, C2H2 type domain identified by PFam, accession name zf-C2H2, E-value=3.9e-105, PFam score of 362.7
  misc_feature (1)...(517): Xaa = X or * as defined in Table 2
IAVSKQDPITSLEQEKEPWNMKICEMVDESPAMCSSFTRDLWPEQDIKDSFQQVILRRHGKCEHENLQLRKGSASVDEYKVHKEGYNELNQCLTTTQSKIFPCDKYVKVFHKFLNANRHKTRHTGKKPFKCKKCGKSFCMLLHLSQHKRIHIRENSYQCEECGKAFKWFSTLTRHKRIHTGEKPFKCEECGKAFKQSSTLTTHKIIHTGEKPYRCEECGKAFNRSSHLTTHKIIHTGEKPYKCEECGKAFNQSSTLSTHKFIHAGEKPYKCEECDKAFNRFSYLTKHKIIHAGEKPYNCEECGKGFNWSSTLTKHKRIHTGEKPYKCEVCGKAFNESSNLTTHKMIHTGEKPYKCEECGKAFNRSPQLTAHKIIHTGEKPYKCEECGKAFSQSSILTTHKRIHTGEKPYKCEECGKAFNRSSNLTKHKIIHTGEKSYKCEECGKAFNQSSTLTKHRKIHTRQKPYNCEECDNTFNQSSNLNXHKIIHTGEKLYKCQECGKASKQSFTLTKHXILFNK

SEQ ID NO: 33735 - protein, 114 aa, Homo sapiens
HETCSVTHIVSFSLPFLNPSHPASTPGHTENEQPSLVWFDRGKFYLTFEGSSRGPSPLTMGAQDTLPVAAAFTETVNAYFKGADPSKCIVKITGEIGLSFPAGITRHFANNPSP

SEQ ID NO: 33736 - protein, 138 aa, Homo sapiens
  misc_feature (1)...(138): Xaa = X or * as defined in Table 2
XVRSIAEFLAKSKSEETQEEVQVLLDSLVHGNPKYQNQVYKGLIALLPCESPKAQQLSLQTLRTAQPIIGTTHPSIVDCVLKVLGTMHLEVQYEAIELIKDLVGYDVRQALLKGLVALLIPSVKEISKLQAKILSDPS

SEQ ID NO: 33737 - protein, 273 aa, Homo sapiens
  misc_feature (1)...(273): Xaa = X or * as defined in Table 2
VSETALADGRCWFRKCQSHLCLASTTGKCXTSTLQSGRDYTENGESAQEGETGLPERRLAHCTXLAEVHRRQPDXTQENRPSKMGIMTSSAAKDHLDNKCQRQDSIPGSSRGPSPLTMGAQDTLPVAAAFTETVNAYFKGADPSNTPSVLVEQLLSKRRSNPIMDHGGHKVPCSLPPLLTHPNRRQRELKMYGSHKAVAQPSPLQDRLQQCAVPTPVTGWTNSRAALGDIFSTWGSLLLRTSTPKKAAARARPMCPCPGAYNTSYPLAPYFWR

SEQ ID NO: 33738 - protein, 139 aa, Homo sapiens
FRHSMNGCEKDSSSTDSANEKPALIPREKKISILEEPSKALRGVTGPNIEKSVKDLQRCTVSLTRYRVMIKEEVDSSVKKIKAAFAELHTCIIDKEVSLMAEMDKVKEEAMEILTARQRKAEALKRLTDLASQMAEMQL

SEQ ID NO: 33739 - protein, 92 aa, Homo sapiens
  misc_feature (1)...(92): Xaa = X or * as defined in Table 2
MEILTARQKKAEELKRLTDLASQMAEMQLAELRAEIKXWFSENELGNSDLCSYSCYCLAAQKLSCQCYLGGTAHSAPGIAKRKTSQLIXPLP

SEQ ID NO: 33740 - protein, 252 aa, Homo sapiens
MLQEERLLFPILVNASWQAPTVCIVCAAPKSYSELQPLPGSWQHKTPLMVGFPPYLCSKFRSTAPISRLCSKFQVEILTARQKKAEELKRLTDLASQMAEMQLAELRAEIKDSLPSGYLPEDTPSPTFQVTFSCPLYSPAIIRMPYMCFISFDIHCHIYTSGNRGIKKAVKAFVSGPDWLMGQPPTAVAFKPKPQPLLLAELPELGAVRLGLRLVFRPLSSGIRDGGPSPATRGSLTESCFGFESLPLVSEI

SEQ ID NO: 33741 - protein, 613 aa, Homo sapiens
  DOMAIN (233)..(253): HISTONE H5 SIGNATURE domain identified by eMATRIX, accession number PR00624G, p-value=6.900e-09, raw score of 4.08
QRRRRNTPGWSGFQGLTRAPALFPRLIFQSSSETRLLSGTLLWIPRAYSTRSKMAELNTHVNVKEKIYAVRSVVPNKSNNEIVLVLQQFDFNVDKAVQAFVDGSAIQVLKEWNMTGKKKNNKRKRSKSKQHQGNKDAKDKVERPEAGPLQPQPPQIQNGPMNGCEKDSSSTDSANEKPALIPREKKISILEEPSKALRGVTEGNRLLQQKLSLDGNPKPIHGTTERSDGLQWSAEQPCNPSKPKAKTSPVKSNTPAAHLEIKPDELAKKRGPNIEKSVKDLQRCTVSLTRYRVMIKEEVDSSVKKIKAAFAELHNCIIDKEVSLMAEMDKVKEEAMEILTARQKKAEELKRLTNLASQMAEMQLAELRAEIKHFVSERKYDEELGKAARFSCDIEQLKAQIMLCGEITHPKNNYSSRTPLQAPCWPLLNAHAANLWGKQSNFSRKSSTHNKPSEGKAATPKMVSSLPSTADPSLRAMPANKQNGSSNQRRRFNPQYHNNRLNGPAKSQGSGNEAEPLGKGNSRHEHRRQPHNGFRPKNKGGAKNQEASLGMKTPEAPAHSEKPRRRQHAADTSEARPFRGSVGRVSQCNLCPTRIEVSTDAAVLSVPAVTLVA

SEQ ID NO: 33742 - protein, 163 aa, Homo sapiens
  DOMAIN (70)..(100): Ribosomal protein L13 proteins domain identified by eMATRIX, accession number BL00783C, p-value=3.500e-16, raw score of 22.43
  DOMAIN (6)..(105): Ribosomal protein L13 domain identified by PFam, accession name Ribosomal_L13, E-value=7.7e-28, PFam score of 105.9
  misc_feature (1)...(163): Xaa = X or * as defined in Table 2
MAEVQVPVLHGRGHLLGRLAAIVAKQVMLGWKVVVVRCEGINISGNFYRNKLNCSFRTPSCIFRWTVRGMLPHKTKRGQAVLDHLQVFDGISPLYDKKKRMVVPAALKVVRLKPTRKFAYLGRLAHEVGWKYQAVTATLEKRKEKAXIHYRKKKQLMRLRKQA

SEQ ID NO: 33743 - protein, 86 aa, Homo sapiens
AGIRHELKVVRLKPTRKFAYLGRLAHEVGWKYQAVTATLEEKRKEKAKIHYRKKKQLMRLRKQAEKNVEKKIDKYTEVLKTHGLLV

SEQ ID NO: 33744 - protein, 202 aa, Homo sapiens
  DOMAIN (86)..(116): Ribosomal protein L13 proteins domain identified by eMATRIX, accession number BL00783C, p-value=6.559e-24, raw score of 22.43
  DOMAIN (5)..(123): Ribosomal protein L13 domain identified by PFam, accession name Ribosomal_L13, E-value=2.7e-52, PFam score of 187.1
AEVQVLVLDGRGHFLCRLADIVAKQVLLGRKVVVVRCEGINISGNFYRNKLKYLAFLRKRMNTNPSRGPYHFRAPSRIFWRTVRGMLPHKTKRGQAALDRLKVFDGIPPPYDKKKRMVVPAALKVVRLKPTRKFAYLGRLAHEVGWKYQAVTATLEEKRKEKAKIHYRKKKQLMRLRKQAEKNVEKKIDKYTEVLKTHGLLV

SEQ ID NO: 33745 - protein, 252 aa, Homo sapiens
  misc_feature (1)...(252): Xaa = X or * as defined in Table 2
MTKDPWLKQSGSSDTSPAASPGHFRAVPRAPRARGTVVHHRHLCLSSWPSSSRVPPGCASYTPASTAAGALPYQAQRRQGVLRRYTTYLRVXHFLPRGLPEGFQRGPRVPPPPPCPMAAEPELGHALKLLDLREIVSFLYYFFFFFLRRSLTLSPGWRDLGSLQPLPHGFKAIFSCFSLLSGWDYRHTATHAQLIFVFLVEMGFTPMFARMASISXPCDPPDSASQDAGITGVSHQVWRERLFLDEGGGGCP

SEQ ID NO: 33746 - protein, 308 aa, Homo sapiens
  misc_feature (1)...(308): Xaa = X or * as defined in Table 2
WSQVVTIVTVVVTVSGSNHGNHTQASHEGYRHPMRAQVSHGECRPSHEGHRHPMRTQASHEGHRRPMRTQASHEGHRHPMRTQASHEGHRHPMRGTGVPXEHRHPMRAQASHGEHRRHHGEHSCPMRAQASHEGTGVPXEHRCHHENTGVPXGHRCPMRMQASHAGHRHPMRVQASHEGHRCPMRTQVSHEGHRRPMRVQASHENTGVPXGAQASHEGTGVPXEHSHPMRAQASHENTDVPXGVQASHEGYRRPMRTQASHEGHRCPMRAQTSHENTGVPXAAQYRPXEAGAPQGGQGWQETGADRST

SEQ ID NO: 33747 - protein, 141 aa, Homo sapiens
  DOMAIN (48)..(73): Ubiquitin carboxyl-terminal hydrolases family 2 proteins domain identified by eMATRIX, accession number BL00972D, p-value= 7.677e-16, raw score of 22.55
  DOMAIN (46)..(122): Ubiquitin carboxyl-terminal hydrolase family domain identified by PFam, accession name UCH-2, E-value=2.2e-26, PFam score of 101.1
NSKLPPVVTSQQMRFMYDPQTDQHMKIFPEQLPLDEFLQKTDPKDPANYILHAVLVHSGDNHGGHYVVYLNPKGDGKWCKFDDDVVSRCTKEEAIEHNYGGHDDDLSVRHCTNAYMLVYIRESKLSEVLQAVTDHDIPQQL

SEQ ID NO: 33748 - protein, 942 aa, Homo sapiens
  DOMAIN (14)..(32): Ubiquitin carboxyl-terminal hydrolases family 2 proteins domain identified by eMATRIX, accession number BL00972A, p-value= 3.483e-17, raw score of 11.93
  DOMAIN (516)..(854): Cadherin domain identified by PFam, accession name cadherin, E-value=1e-37, PFam score of 138.7
  misc_feature (1)...(942): Xaa = X or * as defined in Table 2
SFRWDSKKHTGYVGLKNQGATCYMNSLLQTLFFTNQLRKKLLMGALPWEGALAPWVXALDTDPSLPCSTCLTTARTCTSLQQCHADQCRWQTRWQGSSRWXWQQEEIGQEREEGVEYAKRVLLGPPYSISDCTHMESSLPPCSSXDPGSFQFHEERAEDEKSEGRGPSCSCTQPPPWXSLGEGLGECRXESSSSYCSLAGLSLHPXETRGERLQEASQGQPESPFGEVXHPALVSLDLAEXQGRAEKHGCTETHAXSPMRQYRQKSHKRSIDPTQRIKKPNDNEPNGPIVSSGPFLNKDHRQYTPQNKPTTAVKPHPAYEIFDNGCLESGASKRGKSNRQGQRGSLCPAGEVLQAFTDHDIPQQLVERLQEEKRIEAQKRKERQEAHLYMQVQNRTLRQQKANGPKTGPVRSNTKMSTLNTTPVFINKGQLLGACNGARAPDAGCTCWGIACTCAGPALCGLHDGPDAEPMLGLALTQETPYALAAAGFPCQAPQGLEAVMYQQMIELSDNENPWTIFLETVDPELAASGATLPKFDKDRHSPVSTLIEDGISNQCTGARFPRIVPRPDVAPYCERYTLSPNSHFSLHVKTLKDGKLFPELVLEQQLDRETQARHQLVLTAVDGGTPARSGTSLISVIVLDVNDNAPTFQSSVLRVGLPENTPPGTLLLRLNATDPDEGTNGQLDYSFGDHTSETVKNLFGLDPSSGAIHVLGPVDFEESNFYEIHARARDQGQPAMEGHCVIQVDVGDANDNPPEVLLASLVNPVLESTPVGTVVGLFNVRDRDSGRNGEVSLKTSPNLPFQIKPSETHYSLLTSQPLDREATSHYTIELLASDAGSPPLHTHLTLRLNISDVNDNAPHFTQQLYTAYIPENRPPGSLLCTVAASDPDEGDNARLTYSIVGSQIQGAPASSFVYVNPRGWTIFAQRTLTSPRPALGQVLFA

SEQ ID NO: 33749 - protein, 1168 aa, Homo sapiens
  DOMAIN (281)..(299): Ubiquitin carboxyl-terminal hydrolases family 2 proteins domain identified by eMATRIX, accession number BL00972A, p-value= 3.483e-17, raw score of 11.93
  DOMAIN (140)..(263): MATH domain identified by PFam, accession name MATH, E-value= 2.9e-28, PFam score of 107.1
YVRVSLPPPPPAAGRPGAAVADDAREEEEEAAPPPPPPPPPRLAAARPPGSQPRPPAAGEAQAAADMNHQQQQQQQKAGEQQLSEPEDMEMEAGDTDDPPRITQNPVINGNVALSDGHNTAEEDMEDDTSWRSEATFQFTVERFSRLSESVLSPPCFVRNLPWKIMVMPRFYPDRPHQKSVGFFLQCNAESDSTSWSCHAQAVLKIINYRDDEKSFSRRISHLFFHKENDWGFSNFMAWSEVTDPEKGFIDDDKVTFEVFVQADAPHGVAWDSKKHTGYVGLKNQGATCYMNSLLQTLFFTNQLRKAVYMMPTEGDDSSKSVPLALQRVFYELQHSDKPVGTKKLTKSFGWETLDSFMQHDVQELCRVLLDNVENKIKGTCVEGTIPKLFRGKMVSYIQCKEVDYRYDRRDDYYDIQLSIKGKKNIFESFVDYVAVEQLDGDNKYDAGEHGLQEAEKGVKFLTLPPVLHLQLMRFMYDPQTDQNIKINDRFEFPEQLPLDEFLQKTDPKDPANYILHAVLVHSGDNHGGHYVVYLNPKGDGKWCKFDDDVVSRCTKEEAIEHNYGGHDDDLSVRHCTNAYMLVYIRESKLSEVLQAVTDHDIPQQLVERLQEEKRIEAQKRKERQEAHLYMQVQIVAEDQFCGHQGNDMYDEEKVKYTVFKVLKNSSLAEFVQSLSQTMGFPQDQIRLWPMQARSNGTKRPAMLDNEADGNKTMIELSDNENPWTIFLETVDPELAASGATLPKFDKDHDVMLFLKMYDPKTRSLNYCGHIYTPISCKIRDLLPVMCDRAGFIQDTSLILYEEVKPNLTERIQDYDVSLDKALDELMDGDIIVFQKDDPENDNSELPTAKEYFRDLYHRVDVIFCDKTIPNDPGFVGTLSNRMNYFQVAKTVAQRLNTDPMLLQFFKSQGYRDGPGNPLRHNYEGTLRDLLQFFKPRQPKKLYYQQLKMKITDFENRRSFKCIWLNSQFREEEITLYPDKHGCVRDLLEECKKAVELGEKASGKLRLLEIVSYKIIGVHQEDELLECLSPATSRTFRIEEIPLDQVDIDKENEMLVTVAHFHKEVFGTFGIPFLLRIHQGEHFREVMKRIQSLLDIQEKEFEKFKFAIVMTGRHQYINEDEYEVNLKDFEPQPGNMSHPRPWLGLDHFNKAPKRSRYTYLEKAIKIHN

SEQ ID NO: 33750 - protein, 99 aa, Homo sapiens
MSASAATGVFVLSLSAIPVTYVFNHLAAQHDSWTIVGVAALILFLHCWLVSSSKENHPGTHCSMGEPYLNTAYGHMICYWDGSAHYLMYLVMVAAIAWD

SEQ ID NO: 33751 - protein, 535 aa, Homo sapiens
  DOMAIN (366)..(379): LUTEOVIRUS ORF6 PROTEIN SIGNATURE domain identified by eMATRIX, accession number PR00910A, p-value=1.000e-09, raw score of 2.51
  misc_feature (1)...(535): Xaa = X or * as defined in Table 2
CRLKTTAFSSPSSRHITACLPRFWQICSLPKHLIPPEAPPVGMSXRRRKPVWVKSMMLGXRIPXGKRDPPTTAKCRTCSPQEETGPAGTQGQAARQLERRKLPPYVQTPPRPDQLKGVCSLQTDAISLAPTAERHSRLLPPPSRQQPTSAGTEAGACPNTRRPSGLQLPAAVQTPSGQTPSVPKPGLEPTSLPVGSGPISASHSQPVSKINKKXXVCESPYMETFPXDAKRTRHKRADTARRGEPLRPRTSVPRRTVPAPSEKLRGSRRGEPTPAAPRRDPRRAGSLTHAGPPGGXRHRXPGWPRGTAAKTPVAAEALIAAAAPLALHRIPLGAPPQLPAAPAPRLALALRGASAARPRVAPSAASPQRCLLRGPPSPQPSPAPGPVAPSAQGRGAVPGGVLAVLLPGAPRLSGKRPAAPRGGDTPAQGQVPLAARAPREGPGHGREPVIEELERRGAELRSGKGGTRSEGVRGGRARGIVYGGAHGPEVGKDKMPLKPRNLSAPVAIGGLLHGAGIRFLNLALHSPAVDFGQIT

SEQ ID NO: 33752 - protein, 166 aa, Homo sapiens
  misc_feature (1)...(166): Xaa = X or * as defined in Table 2
IIDPTQYRPMVPNKVSSPCXWLPTITQVHPDNEAEPIPSPARSCAPICGVPAYGSPLSQSSVSXTRQXFPSCSQSLXXGSPTLVNPKTAYTXNSGSRGGVSFDEDTSQHCYPGTGXGQQPLQXSRNHAGPPGGXMTXVTGVAERDKPPKTPVGRRGTHSQPPRRSP

SEQ ID NO: 33753 - protein, 90 aa, Homo sapiens
  DOMAIN (19)..(32): NONHISTONE CHROMOSOMAL PROTEIN HMG17 FAMILY SIGNATURE domain identified by eMATRIX, accession number PR00925B, p-value=6.143e- 14, raw score of 3.73
  DOMAIN (2)..(86): HMG14 and HMG17 domain identified by PFam, accession name HMG14_17, E-value=3.3e-31, PFam score of 117.1
MPKRKVSSAEGAAKEEKPPAKVEAKPKKAAAKDKSSDKKVQTKGKRGAKGKQAEVANQETKEDLPAENGETKTEESPASDEAGEKEAKSD

SEQ ID NO: 33754 - protein, 633 aa, Homo sapiens
  DOMAIN (535)..(566): HMG14 and HMG17 proteins domain identified by eMATRIX, accession number BL00355, p-value=3.700e-22, raw score of 5.97
  DOMAIN (525)..(612): HMG14 and HMG17 domain identified by PFam, accession name HMG14_17, E-value=4.4e-29, PFam score of 110.1
  misc_feature (1)...(633): Xaa = X or * as defined in Table 2
MGFCHIGQAGLKLLTSKDLPASAFQSAGIAGFWLLDGISGPILGQREACCPAGNSNKELKQENSALAEQLQVVLIDKAGMQCDLEELKKKLELTELTLQQLSSWCEAPDANQQLQQPTDERAQLEAHLGQVMEWLKYLQMEREQYAEYLHGESAMWWQRMREMSEQIGHLIVPGICEMGGAQPEVVMGLGFVEVHTLREERVHSMSRVQELETILAELRNQVAEPLPPEPPAGPSEVEQKLQAEAEHLWKELENLAGQLQAQVEENEGLSHLNQEQEGLLRLLEQEEKLLEQEERLLEQEERLLEQEERLLELQESLLEQKRKAASFLSXTPTPGAPSRALRGKYVTSYQSQRSVREDVDRENEYISRLAQDKEEMKVKLLELVLQLVGDCNKWHGRFLAAAQNPADEPAPWDPAPQEIGAANKQGGLFPGCCLVTPGGFHGDCRGAYGAQSSPDSQQAQNPDLAVAGKAAFWEFKEHQESLTLLKSWGRRKSGSGQAAQLREGSRCAAARRHLARALPAARMPKRKVISTEGAAKEEPKRTSASLSAKPPAKVEAQPKKAAAKDKSSDKKTQTKGKRGAKGKQAEVANQETKEDLPAENELSSLYSFYARSLILAFIIHLRMEHKNYQYYLN

SEQ ID NO: 33755 - protein, 55 aa, Homo sapiens
  misc_feature (1)...(55): Xaa = X or * as defined in Table 2
FLIIXYEGINCSRIVNLTRTAWCFFSGXIFRQKKCKQKGKGEQRENRPEVANPRN

SEQ ID NO: 33756 - protein, 78 aa, Homo sapiens
  misc_feature (1)...(78): Xaa = X or * as defined in Table 2
GVCPPRGRSCSDFKADSLYSFPCPSRCGSXESSTQTCSGFWTGCTALHRWRGMPERCPPESRDSXTRFPQSSLPGHKT

SEQ ID NO: 33757 - protein, 226 aa, Homo sapiens
  DOMAIN (145)..(209): SAM domain (Sterile alpha motif) domain identified by PFam, accession name SAM, E-value=6.5e-05, PFam score of 29.8
HIRGPRYSGHHSAFGCPYSDMNLKKEATLHDRLREQTQANLESDSSHSKSKSLCSLNFNGKHEKVNSQPRLVQQAKCLKIKGKEDIDLDNLFREYSVEQAQQVLHQSVSMSTVSAHPFRDLPLGREQHCKLLPGVADIRASQVARWTVDEVAEFVQSLLGCEEHAKCFKKEQIDGKAFLLLTQTDIVKVMKIKLGPALKIYNSILMFRHSQELPEEDIASGQEVRG

SEQ ID NO: 33758 - protein, 317 aa, Homo sapiens
  misc_feature (1)...(317): Xaa = X or * as defined in Table 2
TQDPWPSLPVLWSRASSDPAAGHRAEHIXTYWPWKLEGTDIWLVLYMPLVQPDNFIKKHSHLPTYCLFKEDVKFPFRTCRLTYCWLNYTEEITYLHTKKVSVGQSAVREEFAAACTWSIRIGEKLAILLSLYLCRQQALLNMRMSVPIHESGVAQRSPVMDKLAQYSVEQAQQVLHQSVSMSTVSAHPFRDLPLGREQHCKLLPGVADIRARQVARWTVDENLHGLIQTKQTPHLDESISKGESPALVVTELRMCMTATEPLVPTKNPYQERGHIGDSFLHYTDQEPQPWDQSSVHPTPAPIYSVSSGFRVTRGSDI

SEQ ID NO: 33759 - protein, 288 aa, Homo sapiens
  misc_feature (1)...(288): Xaa = X or * as defined in Table 2
MVSALPEVGRAQILRLIAYIRSPAPPVVGVERAARRPAQAFGLVALPSTDATVFANQPLARACIGAARHREPDAPGQSAWVGEECLKDALRSPETPKLGSLSPPCQDTRPGRASNDFSLEMGYSSLSAARLKIHGQVFQCCGPGPLRTLHWTQSXTYLNILALETXGAQNQPXEWQAVDXGAPGLFSHTLGVFPRRLPQHPKQIICFQNYEYSVEQAQQVLHQSVSMSTVSAHPFRDLPLGREQHCKLLPGVADIRASQVARWTVDEPYSSAPRGPELSAGANSSRGA

SEQ ID NO: 33760 - protein, 44 aa, Homo sapiens
  misc_feature (1)...(44): Xaa = X or * as defined in Table 2
QQTPGKAVHAPFIADQSLTXELVSVFPQFQLFPYRRXDSHSGKS

SEQ ID NO: 33761 - protein, 227 aa, Homo sapiens
  DOMAIN (38)..(80): Elongation factor Tu family domain identified by PFam, accession name GTP_EFTU, E-value=0.0006, PFam score of 16.0
  misc_feature (1)...(227): Xaa = X or * as defined in Table 2
TDTSSYHGSGXPARNGXMHSFIRCLLLKXGIEPCALNGDSVLKSRTDVTFTPVNITTKVKSVEMHNEALSRALPGDNVGFKNVSKMFVMATLLFSDCIHNTFDQMWRTKEHNEARWSLQSSGDKVMKENDELRDSVSQLQKQTLSLKSPKIALGESLISCRERAEIEIVDKQTQALIMGVADLQGRVNAQLHQVSTVKVRDWKRMGPYNLECGTVGRTLIKLWTLSL

SEQ ID NO: 33762 - protein, 62 aa, Homo sapiens
  misc_feature (1)...(62): Xaa = X or * as defined in Table 2
EHQAEAEGGDGGPRSLPMKPGSPLMPDKAQRKQVRSRHGRGGRGGGXAGPGIPGKPGSPVSP

SEQ ID NO: 33763 - protein, 591 aa, Homo sapiens
MSAASPQAAPASCDQCYQAKPSQLPSESEILLWVFPVLSAISPETLGPRSWHRHSHDFSPAKWLWDFFQSSRSNKPHSAITALLKFRHQQKKSEQARLVGAEPTGLLGSLAETAGSRAAPERLEQHSTGVHICSILDITLVSNEPLPKKKDSTPDHHHRSDLHIDMCGLIQCRSGKNNFLREYIATEEEKLEPAIDPDCGCWHKLSRKLCKINAFDIPDSLLVRGKEFSDSIHNTFDHMWRTKEHNEDGWLLLSSVDKVTKENYELRDSVSWLQKQILSLKSAKIALSESLISCREKAGIVEKQIQALMALIRKEWDPATGMGTCGRIMMKLGTLSMSTLMSLFARRNSFPIPSSGNIPSLTHAAISLSNFQEINPVLPEATVMASPEVVARQNNVDSPQEPPPTPPFASRPITRLKSWWAPRDLTVETTVTQLHNLNTVGIIESRGGRGHVAALNSQRQGESQQRLLGFWSKALPFSADNYSSFERQLLACYWALVETEHLTMGHQVTMQSELPIMNWVISDPSSHKHTMLLPKLPSVDSQNALSTVMVFHTALPLTKALTLWLKKCGSGLMLMEFTGVTLFPIILKQLD

SEQ ID NO: 33764 - protein, 413 aa, Homo sapiens
  misc_feature (1)...(413): Xaa = X or * as defined in Table 2
LDPEVAWAKWQHSTVKGPQKQFAFSWQGQQYTFTGLPQGYINSLSLCYNLIPRDPDRLSLLQNITLVHYIDDIMLIGSSEQELAYTLDLLVRRLCAKGWEINLTEIQEASTSVKFLRVQWCGACQDIPSKMKDKLLHLFPPTTKKKASLFGFRRQCIPHLECGPEQEKALQQAQAAVQAAVPLERYDPADPMVLVELTWLWPLLSAQFASSGDQHXALHMAPFLGVVSQLPGGKLIILDIFHHGKGRVLFSLEXTLTPDMGLPILHIMLLPRLPSVNSQNALSTVMPGFTGPGIKGWKWHHSPSPLVIHXQNFCFLFPXHYVLLAXRSXFQRKEPCHQETXQXFHXTGSXGCQLDTLGSCYFXVNKLRRELQCWLGXLTQTIKMKSVYYSITENCWMKRSPVKRRKILELEEA

SEQ ID NO: 33765 - protein, 741 aa, Homo sapiens
  DOMAIN (247)..(264): RNase H domain identified by eMATRIX, accession number PF00075A, p-value=4.400e-13, raw score of 14.44
  DOMAIN (227)..(412): Reverse transcriptase domain identified by PFam, accession name rvt, E-value=3.9e-38, PFam score of 140.1
MVLFHDPQLLIELQQSPHGPRFHSLECVRPRTPGERTKGLPPPWEQPATILGALRTKTRRALELMTQYFNNWNWVYNNITDQDESELNGKRSPQGKNTPKMYSGEFSPVRVHVPFSLSDLKQIKIDLGKFSDDPDGYIDVLQGEDILAKAGAIRHLNIGEGTHVCCPLLEEGINPEVWATEGKYGRAKNAHPIQVKLKDSASFPYQRQYPLRPEAQQGLQKIVKDLKAQGLVKPCSSPCNTPILGVQKPNGQWRLVQDLRIINEAIVPLYPAVPNPYTPLSQILEEAEWFTVLDLRDAFFCIPVHPDSQFLFAFEDPLNPMSQLTWTVLPQGFRDSPYLFGQALAQDLSQFSYLDTHVLWYMDDLLLAARSETLCHQATQALLNFLATCGYKVSKPKAQLCLQQVKHLRLKLSKGTRALSEERIQPISAYPHPKTLKQLRMFLGITGFCQIWINRYGKIARPLYTLIKETQKANTHLVRRTSLQPVAYLSKETGTSLQPVAYLSKEIDVVAKRWPHCLRVVAAIAVLVSKAVKMIQGRALTVWTSHDVNSILTAKGDLWLSDNHNEEKIEHNWQQVIAQTYAAQGDLLEVPLTDPDLNLYTDGSSFVEKGLRKAAYAVFSDNGILESNPLTPGTSTQLAELIAVTQALELEGKREPENPADNASYSCEPLEDLRLLFRRQPIEAVKLQMVLQMEPQMQSMTKIYRGPLDWPASPCSNVDDIEGTPPKEISTARPLLCPNSA

SEQ ID NO: 33766 - protein, 358 aa, Homo sapiens
  DOMAIN (29)..(46): RNase H domain identified by eMATRIX, accession number PF00075A, p-value=8.020e-12, raw score of 14.44
  DOMAIN (22)..(194): Reverse transcriptase domain identified by PFam, accession name rvt, E-value=1.2e-25, PFam score of 98.6
  misc_feature (1)...(358): Xaa = X or * as defined in Table 2
MNKEMSGQTFVGKQNSVRMPKIISGLGVQKPNRQWRLVQDLRIINEAVVPLYQAVRNPYTLLSQIPEETGWFTVLDLKDALFCIAVHPDSQFLLAFEDPLNPTSQLTWTVLPQGFRDSPHLFGQALAQDLSQFSYLDTLVLRYVDDLLLAAPSETLCHQATQVLLNFLATCGYKVSKLKAQICSQQVKYLGLKLSKGTRALSEERIQPILAYPHPKTRKQLRGLLGITGFCQIWIPRYSEIARPLHTLIKKTQKANTHLVRWTPEAEAAFQVLKKALTQAPVLSLPTGQDFSLYVTEKTGIALGVLTQHYGEERNSXLPTEYLSNIRKPLGDYYWLYRNLKRWQSYTARVIRKERKGK

SEQ ID NO: 33767 - protein, 559 aa, Homo sapiens
MEIHLAVFSAGKDENRQGILSGGKDMNKDGEMHGESLLSAGTRVQSTPGGATQAFAKENNQKAYKETYGVSHITRHDMLQIPKQQQNEKYQVPQFDQSTIKNIESAKGLDVQLYIRRQPYAERPYYVEDKGHKYLVFEANTGTENGYQGEESLFNKAYYGGGTNFFRKESQKLQQGAKKRDAELANGALGIIELNNDYTLKKVMKPLITSNTVTDEIERANVFKMNGKWDFADFGTTIKQDFRLLGQTSVDRLLQLSQGQAVKGNQLLPVSLVKRKTTLAPNTQTASPRALADSLMQLARQVSRLESGHNFKDDEYPQRPCPLPMSEYRLGSTPPQNMIETEGNNKECGTILYSTCGIKLIPARRITNVLRILSSQHDFLPTRPFRSLQGHFQGGLRRQQMMVMEGVWVLSCAMDLLCRSAVCPLAPTKSNTCLPDVCTYRPAKLTAASPSEGRQSLLLEGPVLRLRTCATLNPDTFLPDNEEKIEHNCQQVIAQTIKAIKLQIVPQMEPQMHSMTKIYRRPLDQPASPCSDVNDIGATPPEDISIARPLLCPNSAGSS

SEQ ID NO: 33768 - protein, 684 aa, Homo sapiens
  DOMAIN (245)..(257): RNase H domain identified by eMATRIX, accession number PF00075C, p-value=5.622e-12, raw score of 11.58
  DOMAIN (115)..(331): Reverse transcriptase domain identified by PFam, accession name rvt, E-value=4.9e-16, PFam score of 66.7
MVLVVVAVVVVVLVVAVIVVVVVVVAAVVVGAVVVVVVVVMVVVVVVVVVEEDNQHKTGAINNNNTAKNPQQSPFHSPATSTGAEATQMRRNQKTNPHNMTKQVSLTPPKITLAHQQWIQTKKKYLIYLKKHSGVNKIPRNPTYEGCEGPFQGELQTTAQQNKGGHKQTEDHSMLMDRKNQYCENGHTAQAVPNPYTLLSQIPEDAEWFTVLDPKHAVFCIPVHPDSQFLFAFEDPSNPMSQLIWTVLPQGFRNSPHLFGQALAQDLSQFSYLDTLVLRYMDDLLLATHSETLCHQATQALLNFLATCGYKVSKPKAQLCSQQVKYLGLKLSKGTRTLSEERIQPILGYPHPKTLKQLTAFLGITGFCQIWIPRYSKIARPLNTRIKETQKANTHLVRWTPEAEVAFQALKKALTHAPVLSLPVGQNFSLYVTEKTGIALGVLTPGTSAQLAELIALTRAPELGEGKRVNIYANSIGREREFLTSKGTLVKHQEAIKRLLLAVQKPKEVAVLHCWGHQKGKEREIEENRQADIEARRAARQDPPLEMLTEGPLAFELAMATARAELSLAIHHCCLPPPPQTRCWLPSLRIRQGVCCIPDPARAITLTAWPKIPFLGIRKAKNPRSEKTRLATILEAACCHFGSGPPPSWELWEQGPPVTVQTHILRSHLKELGKPNQNPAEERK

SEQ ID NO: 33769 - protein, 682 aa, Homo sapiens
  DOMAIN (167)..(179): RNase H domain identified by eMATRIX, accession number PF00075C, p-value=5.622e-12, raw score of 11.58
  DOMAIN (69)..(250): Reverse transcriptase domain identified by PFam, accession name rvt, E-value=1.1e-21, PFam score of 85.5
EKCRHNCSSRVWQSLVSQSVWATEGQYGRTKNARPVQVKDSASFPYQRRYPLRLEAQQGLQKIVKDLKAQGLVKPFNSPCNTPILGVQKPNGQWKLVQDLRIINEAIVPLYPAVPNPYTLLSQIPEEAEWFTVLDLKDAFFCIPVHRESQFLFAFEDPSNPTSQLTWTVLPQGFRNSPHLFGQALAQDLSQFSYLNTLVLRYLDDLLLAAHLETLCHQATQKKTGIALGVLTQVQGTSFQPVAHLSKEIDVVAKGWPHCLWVVAAVAVLVSEAVKIIQGRELTVWTSHDVSGTLTAKGDLWLSDNLLLNQALLFKRPVLRLHTCATLNPATFLPNNKEKIEHNHQQVIVQTYTIQGDLLEVPLTDPDLNLYTNGSSFVEKGLRKAGIHPSRQWTPLWPKAGPEMLSKRQVLESGILKAFLVPYLLVAVLGSIDFNGKPPVAVFSLSQAHRFLCATWLLLGYGEVWIHSHTAIKTYQRRRSQDGRIGTAPVYSSQRERRRRRVISAFPSEGIPTDLQLRVLSVRRKTNKQKGHPHQKPICTSPSSRPKVDKTTKMGKKQNRKTGNSKTQSASPPPKERSSSPATEQSWMENDFDELREEGFRRSNYSELREDIQTKGKEVENFEKNLEECITRITNTEKCLKELMELKTKARELREECRSLRSQCDQLEERVSAMEDEMNEMK

SEQ ID NO: 33770 - protein, 116 aa, Homo sapiens
  misc_feature (1)...(116): Xaa = X or * as defined in Table 2
YKVSKPKAQLCSQQVKYLWLKLSKGTRALSEERIQPILAYPHPKTLKQLRGILGITGFCRIWIPRXSSPTGQEFSLYVTEETGIALGILTQVQGTSLQPMEYLNKEIDELDQGRTH

SEQ ID NO: 33771 - protein, 299 aa, Homo sapiens
  DOMAIN (117)..(134): RNase H domain identified by eMATRIX, accession number PF00075A, p-value=4.400e-13, raw score of 14.44
  DOMAIN (97)..(282): Reverse transcriptase domain identified by PFam, accession name rvt, E-value=2e-33, PFam score of 124.5
MTYGVGKGDMVDGTKERGERIESALGTSHIMRVAEPQGSQSWCPDEELRPVGSPATAAQKLPSTPGALGPTHSTECCSIPLDPKAQQGLQKIVKDLKAQGLVKPCNSPCNTPILGVQKPNGQWRLVQDLRIINEALVPLYPAVPNPYTLLSQIPEEAEWFTVLGLKDDFFCIPVHPDSQFLFAFEEPSNPTSQLTWTVLPKGFRDSPHLFGQVLAQNLSQFSYLDTLVLRYVDDLLLAARSETLCHQATQALLNFLTTCGYKVSKPKAQLCSQEVTYLGLKLSKGTRALSEERIQPILA

SEQ ID NO: 33772 - protein, 143 aa, Homo sapiens
LCRSAVCPLAPTKSNTCLPDVCTYRPAKLTAASPSEGRQSLLLEGPVLRLRTCATLNPDTFLPDNEEKIEHNCQQVIAQTIKAIKLQIVPQMEPQMHSMTKIYRRPLDQPASPCSDVNDIGATPPEDISIARPLLCPNSAGSS

SEQ ID NO: 33773 - protein, 318 aa, Homo sapiens
  DOMAIN (110)..(122): RNase H domain identified by eMATRIX, accession number PF00075C, p-value=5.622e-12, raw score of 11.58
  DOMAIN (27)..(196): Reverse transcriptase domain identified by PFam, accession name rvt, E-value=3e-15, PFam score of 64.1
NKIPRNPTYEGCEGPFQGELQTTAQQNKGGHKQTEDHSMLMDRKNQYCENGHTAQAVPNPYTLLSQIPEDAEWFTVLDPKHAVFCIPVHPDSQFLFAFEDPSNPMSQLIWTVLPQGFRNSPHLFGQALAQDLSQFSYLDTLVLRYMDDLLLATHSETLCHQATQALLNFLATCGYKVSKPKAQLCSQQVKYLGLKLSKGTRTLSEERIQPILGYPHPKTLKQLTAFLGITGFCQIWIPRYSKIARPLNTRIKETQKANTHLVRWTPEAEVAFQALKKALTHAPVLSLPVGQNFSLYVTEKTGIALGVLTQELVLSWQN

SEQ ID NO: 33774 - protein, 385 aa, Homo sapiens
  DOMAIN (167)..(179): RNase H domain identified by eMATRIX, accession number PF00075C, p-value=5.622e-12, raw score of 11.58
  DOMAIN (69)..(250): Reverse transcriptase domain identified by PFam, accession name rvt, E-value=1.1e-21, PFam score of 85.5
EKCRHNCSSRVWQSLVSQSVWATEGQYGRTKNARPVQVKDSASFPYQRRYPLRLEAQQGLQKIVKDLKAQGLVKPFNSPCNTPILGVQKPNGQWKLVQDLRIINEAIVPLYPAVPNPYTLLSQIPEEAEWFTVLDLKDAFFCIPVHRESQFLFAFEDPSNPTSQLTWTVLPQGFRNSPHLFGQALAQDLSQFSYLNTLVLRYLDDLLLAAHLETLCHQATQKKTGIALGVLTQVQGTSFQPVAHLSKEIDVVAKGWPHCLWVVAAVAVLVSEAVKIIQGRELTVWTSHDVSGTLTAKGDLWLSDNLLLNQALLFKRPVLRLHTCATLNPATFLPNNKEKIEHNHQQVIVQTYTIQGDLLEVPLTDPDLNLYTNGSSFVEKGLRKA

SEQ ID NO: 33775 - protein, 549 aa, Homo sapiens
  DOMAIN (228)..(239): RNase H domain identified by eMATRIX, accession number PF00075B, p-value=7.366e-10, raw score of 12.56
  DOMAIN (164)..(349): Reverse transcriptase domain identified by PFam, accession name rvt, E-value=5.5e-24, PFam score of 93.1
  misc_feature (1)...(549): Xaa = X or * as defined in Table 2
MNKEDYNDDDDNGDIKYLPDIKTGYNKTVQIPITSENSTVGLSNTEADEMDRLKCERDDALKEVNTLKRRTKGGKHLTLKVTYTLSETNLHKNYLWECILMGQLGCYEILRKPSPALGLTPEHKGNVGHTGEKTGAGPATSRPPDSFPNXXGPPFNPNGTKGDRQRGKQQTKECQYSPIMPTPSSGRRRIWSSQRHVPFSLSDLIDLAVPNPYTLLSQIPEEAEWFTVLDLKDVFFCIPVHPDSQFLFAFEDPLNPMSQLTCTVLPQGFRDSPHLFGQALAQDLSQLSYLDTLVLQYVDDLLLAACSETLCHQATQALLNFLATCGYKVSKEKAQLCSQQVKYLGLKLSKGTKALSEECIQPILAYPHLKTLKQLREFLGITGFCRIWNFQALLLERPVLQLCTCATLNPVTFLPDNEEEYNCQQIISQTYATRGDLLEVPLTDPDLNLYTDGSSFVEKGPQKAGERRAVLASQTSLTPLGRNGRSIPATLALESKELVKSVRALLDMDCAIPFLVGTSIVDPYLKYEPTTKNHLIMVQGEKNCITGRF

SEQ ID NO: 33776 - protein, 739 aa, Homo sapiens
  DOMAIN (442)..(453): RNase H domain identified by eMATRIX, accession number PF00075B, p-value=7.517e-12, raw score of 12.56
  DOMAIN (375)..(560): Reverse transcriptase domain identified by PFam, accession name rvt, E-value=2.4e-37, PFam score of 137.5
MNMNIKKIVKQATVLTFTTALLAGGATQAFAKENNQKAYKETYGVSHITRHDMLQIPKQQQNEKYQVPQFDQSTIKNIESAKGLDVWDSWPLQNADGTVAEYNGYHVVFALAGSPKDADDTSIYMFYQKVGDNSIDSWKNAGRVFKDSDKFDANDPILKDQTQEWSGSATFTSDGKIRLFYTDYSGKHYGKQSLTTAQVNVSKSDDTLKINGVEDHKTIFDGDGKTYQNVQQFIDEGNYTSGDNHTLRDPHYVEDKGHKYLVFEANTGTENGYQGEESLFNKAYYGGGTNFFRKESQKLQQSAKKRDAELANGALGIIELNNDYTLKKVMKPLITSNTVTDEIERANVFKMNGKWQYPLRPKAQQGLQKIVKDLKAQGLVKSCNSPCNTPILGVQKPSRQWRLVQELRIINEAVVPLDPAVPNPHTLLSQIPEEAVWFTVLDLKDAFFSIPVHPDSQFLFAFEDPSNPTSQLTWTVLPQGFRDSPHLFGQALAQDLSQFSYLDTLVLRYMDDLLLAASSETLCHQATQALLNFLATCGYKVSKPNAQHCSQQVKYLGLKLSKGTKALGEERIQPILAYPHPKTLKQLRGFLGITGFCQIWIFPVRWTPEAEAAFQALKKALTQAPVLSLPTEQDFSLYVIEKTGIALGVLTQIQGTSLQPMAYLSKEIDVVAKGWPHCLRVVAAVAVLVSEAVKIIQGRDFIVWTSYDVNGILTAKGDLWLSDNRLLKYQALLLEGPVL

SEQ ID NO: 33777 - protein, 249 aa, Homo sapiens
  DOMAIN (121)..(133): RNase H domain identified by eMATRIX, accession number PF00075C, p-value=1.000e-12, raw score of 11.58
  DOMAIN (28)..(207): Reverse transcriptase domain identified by PFam, accession name rvt, E-value=2.3e-16, PFam score of 67.8
  misc_feature (1)...(249): Xaa = X or * as defined in Table 2
MNQSDQEMTGAFVHMKSYTGLISGVAVKMERHIYQDRRIAIEKEFNSCRTGCMGDWSFTITQIRLLENTGIRVFKDNLVEEAEWFTVLDLMDAFFCIPVHPDSQFLFAFEDPSNPASQLTWTVLPQRFKNSPHLFGQALAQDLSQFSYLDTLVLRYMDDLLLAAYSETLCHQATEALLNFLATCGYKVSKPKAQLCSQQVKYLGLKLSKGTRDLTTFLPVNEEKIEPXLSTSNCSKLRCSRGTSRGSLG

SEQ ID NO: 33778 - protein, 457 aa, Homo sapiens
  DOMAIN (128)..(145): RNase H domain identified by eMATRIX, accession number PF00075A, p-value=4.400e-13, raw score of 14.44
  DOMAIN (108)..(293): Reverse transcriptase domain identified by PFam, accession name rvt, E-value=1.2e-41, PFam score of 151.8
  misc_feature (1)...(457): Xaa = X or * as defined in Table 2
MPLLQMIATPLQQSLISTEDEMDELTEVGFERWVITNFTEEPSPALGFTPEHKGNVGHAGKGPLESSSPDPFLCGQEKQEKGAGLLHRQYPLRLEAKQGLKKIVKDLKAQGLVTPCSSPCNTPTLAVQKPNGQWRLVQDLRIINEAVVPLYPAVPNPYILLSQIPEEAEWFTVLDLKDAFFCIPVHPDSQFLFAFEDPSNPMSQLTWTVLPQGFRDSLHLFGQALAQDLSQFSYLDTLVLQYMDDLLLVTHSETLCHQATQVLLNFLATCGYKVSKLKAQICSQQVKYLGLKLSKGTRALSEERIQPILAYPHPKTRKQLRGLLGITGFCQIWIPRYSEIARPLHTLIKKTQKANTHLVRWTPEAEAAFQVLKKALTQAPVLSLPTGQDFSLYVTEKTGIALGVLTQHYGEERNSXLPTEYLSNIRKPLGDYYWLYRNLKRWQSYTARVIRKERKGK

SEQ ID NO: 33779 - protein, 953 aa, Homo sapiens
  DOMAIN (593)..(605): RNase H domain identified by eMATRIX, accession number PF00075C, p-value=6.838e-12, raw score of 11.58
  DOMAIN (470)..(679): Reverse transcriptase domain identified by PFam, accession name rvt, E-value=3.9e-18, PFam score of 73.7
MTVDYHKLNQVVTPIAAAVPDVVSFIEQINTSPGIWYAAIDLANVFFSIPVHKAHQKQSVFCWQGQEYTFTVLPQVHINCPALCHNPILRDFDHFSLPQDITLVHYIDDIMLIGSSVEYVAAFGPSYNQERDTTPRGPIWILEATHSSFGHPVITQWTHEQSDHDGRNVGYAWDQKHGLPLTKANLVMAIGECSVYQQQRLTLSPQYGTIPQARIHKSRNQRVEMEVAPLTITPSDPLVKFLLPVPMTLHSAGLEVLVLEGEMLPLGDTTTISLNLKLRLLSGHFGILLPLSQQAKKGVKVLAGGIDMNYQDKISLLLHKGVSPSFPMGSHLTNYLAWLRQEPLALHDEKQIHCALSKNVCPVKQDALIHKFVSSRIEDVKLQIVLQMESQMQSMTKIYHGPLDWPTSPCSDVNDIKVTPPEEISTAPPHYAPIQHEAVKAVIGQPPQQHLGFPVESRVSAVLLIQRASNRAITLTTWPKIPFLGIRKAQNPMSENTRLATILEAARHHLGRGSPPSWKLCEQGPPVTFWRSQRDLQSAVPSPYTLLSQIPEEAEWFTVLDVKDAFFCIPVHPDSQFLFAFEDPSNPTSQLTWTVLPQGFKDSPHLFGQALAQDLSQFSYMDTLVLWYGDDLILATHSETLCHQATQVLLNFLTTCGYKVSKRKAQLCSQQVKYLGLKLSKGTTALSEECIQPKLAYPHPRTLKQLRAFLGITGFCQMWIPRYSKIARPLYTLIKETQKANTHLVRWTPEAEAAFHTLKKALTQAPVLSLPTGQDFSLYVTEEKGIALGVLIQVRGTSLQPVAYLNKENDVVAKGTSAQLAELIALTRALELGEGKSVNIYTDSKYAYLVLHAKEAIWREREFLTSKETPIKHQEAIRRLLLAVQKPKEVTVLHCPGHQKGKEKEIGRNHQADIEAKRATRQDSPLEMLIEGPLVWGNPLQETKPQYSEEEIE

SEQ ID NO: 33780 - protein, 386 aa, Homo sapiens
  DOMAIN (129)..(146): RNase H domain identified by eMATRIX, accession number PF00075A, p-value=4.400e-13, raw score of 14.44
  DOMAIN (109)..(294): Reverse transcriptase domain identified by PFam, accession name rvt, E-value=3.9e-38, PFam score of 140.1
  misc_feature (1)...(386): Xaa = X or * as defined in Table 2
XLKQIKIDLGKFSDDPDGYIDVLQGEDILAKAGAIRHLNIGEGTHVCCPLLEEGINPEVWATEGKYGRAKNAHPIQVKLKDSASFPYQRQYPLRPEAQQGLQKIVKDLKAQGLVKPCSSPCNTPILGVQKPNGQWRLVQDLRIINEAIVPLYPAVPNPYTPLSQILEEAEWFTVLDLRDAFFCIPVHPDSQFLFAFEDPLNPMSQLTWTVLPQGFRDSPYLFGQALAQDLSQFSYLDTHVLWYMDDLLLAARSETLCHQATQALLNFLATCGYKVSKPKAQLCLQQVKHLRLKLSKGTRALSEERIQPISAYPHPKTLKQLRMFLGITGFCQIWINRYGKIARPLYTLIKETQKANTHLVRRTSLQPVAYLSKETGTSLQPVAYLX

SEQ ID NO: 33781 - protein, 1267 aa, Homo sapiens
  DOMAIN (1066)..(1109): CTF/NF-I proteins domain identified by eMATRIX, accession number BL00349C, p-value=1.000e-09, raw score of 9.33
  DOMAIN (975)..(1120): RNase H domain identified by PFam, accession name rnaseH, E- value=3.6e-34, PFam score of 126.9
  misc_feature (1)...(1267): Xaa = X or * as defined in Table 2
MQWEEAEKDPSGSCVFQRPPVALVFPLHSKWTLVNSPPSSGDPYVPGRPAQSGQLSLSPAPPYVLPGPGKIKQAGNNPSLTSIYRSEVFCAHRHLHPPQLVCARGHIGSAHLSVDRGSLIWEVLESTVWARTNEWSPVTRTVLISALASTHIPQPCESRPPVPPEYEVTVLRSQGTAQLPPWSSSTSWRLTDPSCPKHAAWLTDLASSKGPAAGGTGSFSQPGTLTSTRTNPLKKEKSPEDLKQIKIDLGKFSDNPDGYIDVLQGLGQSFDLTWRDIMLLLNQTLTPNEKVPPLLQPESLAISGISVRDQEEQAEQDKQDKKKAITLVMALRQVDFGGSVKGKSWANRMPNRAYFQCGLQGHFKKDCPSRKPQVCLTIESQEVNCLLDAGAAFSVLLSCPGQLSSRSVTIRGVLGQPVTRYFFQPLSCDWGALPFSHAFLIMPESLTPLLEREILVKAGAIIHLNIGEGTPICRLLFEEGISPEVWATEGQYGQAKNAHFVQVKLKDSTSFPYQRQYPLRPEAQQRLQKIVKDLKAQGLVKPYSSPCNTPILGVQKPKRQWRLVQDLRIINEAVFPLYPAIPSPYTLLSQIPEEAEWFTVLDLKDAFFCIPVHPDSQFLFAFEDPSNPTSQLTWTVLPQGFRDSPHLFGQALAQDLSQFSYLDTPVLQCMDDLLLAARSETLCHQATQALLNFLTTCGYKVSKPKAQLCSQQVKCLGLKLSKVTRALSEERIQPILAYPYPKTLKQLRGFLGITGFCRIWIPRYGKIARPLYTLIKETQKANTHLVRWTPEAEAAFHALKKALMQAPVLSLLTGQDFSSYVTKNKQTKKKKTXIALRVLALVXGTSLQPVAYLSKKTDVVAKGWPHCLWVMAAIAVLISKAVKMIQXRDLTVWTSHDVNGILTAKGDLWLSDNCLLKCQALLLEGPVLRLCTCATLNPATFLPDNEEKIKHNCQQVISQTYATRGDLLEVPLTDPDLNLYTDGSSFVEKGLRKVGYAVVSDNGILESNPLTPGTSAQLAELIALTWALELGEGKRVNIYTDSKYAYLVLHAHAVIWREREFLTSEGTPIKHQEAIRELLLAVQKPKEVAVLHCRGHQKGKEREIERNRQADIEAKRAARQDPPLEMLIEGPLVWGNPLWETKPQYSEEEIEWGISRGHSFLPSGWQATEQGKIPLPAANQWKLLKTTHQNFHLCIDSTHQMAKLLFTGPGLFKTLKQIVGACEVCQRNNPLPYRQAPSGEQRTGHYPGEDWQLILPTSPNLRDFSIY

SEQ ID NO: 33782 - protein, 147 aa, Homo sapiens
  misc_feature (1)...(147): Xaa = X or * as defined in Table 2
YSLVEFHTLVLQKSDVEAVFSKYCFIVGCSVHKGFAFVXYVNERNARAAVGGDDSSSFDLDHDFQRDYYDRMYSYPAHVPPPPIARAVVPSKCQHVSGNRRGKSGFNSKRGQRGSSKSGKLKGDDLQAIKKELTQIKQKVDSLLENL

SEQ ID NO: 33783 - protein, 29 aa, Homo sapiens
DYYDRMYSYPARVPPPPPIARAVVPSKRQ

SEQ ID NO: 33784 - protein, 66 aa, Homo sapiens
  misc_feature (1)...(66): Xaa = X or * as defined in Table 2
SSATFSALXETLPSNTMASSSFDLDYDFQRDYYDRMYSYPARVPPPPPIARAVVPSKRQRVSGNTS

SEQ ID NO: 33785 - protein, 314 aa, Homo sapiens
  DOMAIN (25)..(91): RNA recognition motif. domain identified by PFam, accession name rrm, E-value=1.5e-06, PFam score of 35.2
  misc_feature (1)...(314): Xaa = X or * as defined in Table 2
ETLPSNTMASNVTNKTDPRSMNSRVFIGNLNTLVVKKSDVEAIFSKYGKIVGCSVHKGFAFVQYAYERNARAAVAGEDGRMIAGQVLDINLAAEPKVNRGKAGVKRSAAEMYGSVTEHPSPSPLLSSSFDLDYDFQRDYYDRMYSYPARVPPPPPIARAVVPSKRQRVSGNTSRRGKSGFNSKSGQRGSSKSGKLKGDDLQAIKKELTPDKTKKWDSLLENLEKIEKEQSKQAVEMKNDKSEEEQSSSSRVKKDETNVKMESEGGADDSAEEGDLLGXMNDNEDRGDDQLELIKDDEKEAEEGEDDRDSANGGG

SEQ ID NO: 33786 - protein, 70 aa, Homo sapiens
GLLFPRETHDSTPRCISFWICLAISVPDIIMASCLTPLLRKPRNALPGSPGALTEGAVLLPNAGARPRRP

SEQ ID NO: 33787 - protein, 29 aa, Homo sapiens
MTVPVRGFSLLRGRLGRAAAVGAEAQHPP

SEQ ID NO: 33788 - protein, 205 aa, Homo sapiens
  misc_feature (1)...(205): Xaa = X or * as defined in Table 2
GNCDSPARPARPPHRQGCPRPSPPPRGRPRALGPTRASAARAPADLPPPAAPHPAPAALVPHTAAPKARNALPGSPGALTEGAVLLPNAGARPRRPRSSEKPGPAPSWPRIPGFRTGAPPPATPVLAAGGLAPPSPGLAGQQVALPSQVPADTQSGVKSGSQDRGRNXQSAGSAGGGARTQVPGPLRMWKRAVWPGDWAPHPANI

SEQ ID NO: 33789 - protein, 128 aa, Homo sapiens
  misc_feature (1)...(128): Xaa = X or * as defined in Table 2
PHRKQAEPPRHHERLGRRVRHHARHGRGSRPDTAAEAAGGCGDPRAFQQLERRLRHPPLRWQGLLRRQRLLREEPRRSLLQTSXSXCSPVTRPSSGCSSPRSWMETRRGAPAPPAPRSRNKPTTWWPH

SEQ ID NO: 33790 - protein, 82 aa, Homo sapiens
  misc_feature (1)...(82): Xaa = X or * as defined in Table 2
FFFFFLNRVLLCHPGWSXSGNHQWQSWLNSXPQTPGLKXSSFLCFRKWWDYKHEPLYPAKPHFEFLFGSSLQVREFFGKIKV

SEQ ID NO: 33791 - protein, 203 aa, Homo sapiens
MTVMSLADSVVGWGTRESEVHSQLTNRTALSIHHYETHPEDPGSGQRHHSQHTLQGLTLTAYRPQVSEFTSHGAHPTTALSHPQVSEFTSHGAHPTTALSHPQVSEFTSHGAHRTTALSHPQVSEFMSHGAHPTMALSHPQVSEFMSHGAHPTTALSHPQVSEFTSHGAHPTTALSHPPGLRVHVPRRPPTTALSHPPGRQYL

SEQ ID NO: 33792 - protein, 291 aa, Homo sapiens
  misc_feature (1)...(291): Xaa = X or * as defined in Table 2
SRAAPTCFSWLPCGASTCPWLMWAMSGRMVAPLQRVLRAAPGLEGTLGGRQHPGTPPSVLHFSLTMNSMFGLQDFNVTPLAAQATLPPGSPGRPTLVPSTAAPNSLQMFTGGHGAXFPRWQPQPPSGVSSHGAPPGVPHYCRQGRSPGKRQRKWLESEVQAQGPXEPDPTQLQTSTRTACGXGPPSQADPDPDPTRPRTPDLDPNCMRLRTPKPGRRQSRPHGPRTPTQTDPDPPVQPPAPEVKPQRPPWAARAPSDTAASXGGLTCNSRPIREGQMGSPSPAGSLLLGAL

SEQ ID NO: 33793 - protein, 688 aa, Homo sapiens
  misc_feature (1)...(688): Xaa = X or * as defined in Table 2
MDGQCSHYCVKTDLRVHSPFTTGAVHADQSCCKTTSARWEDTCDLTGSKKTLVISNIVIRTRSDDKLENEWETQSQNRNRVKPTAADPCRNENEHSSXEKHPEVLQESANDRLRDNERVSQRQSQPTTVSQRQSQPTTESEPTTESRQRQSQRQRQSQPMTESETMTELQKMTESANDRVSQRQSQSQRQSQQRQSQRQRQSQSQXQSQSQRQSQSQRQSQQRQSQSQRQSQQRQSQRQRQSQRQXQSQSQXQSQPTTESEPTTEVSQRQNQRQRQSQPDDRIRDNDRVSQRQNQRQRQSQQXQSQRRQSQSQRQSQPTTESEPTTESANDRVSQRQSQSQRQSQQRQSQSQXQSQPTTESANDRVSQRQSQSQGQSQSQRQSQSDDRVSQRQIQSQHQEDRPPKYQNKNVQVHADDKPRSDPQRRRNLTPPVKTAERRPHQEHVVKGEKATSPSRHSTSTAPTRPPSAETAHVNVMCGGDMAHINQGHVEAPQGSHEKHVGAARDQYERRDAQSEKSQQVQTTGLRVHVSRRPPHDGSLTSTGLRVHVSRRPPHDGSLTSTGLRVHVSRRPPHNGTVTSTGLRVHVSRRPPHDGSLTSTGLRVHVPRRPPHDGSLTSTGLRVHVPRRPPTTALSHPLDVSICRTLNAYPEMLTGERSTFPCVNVKNEKAVESKKDTPFKCESKESWI

SEQ ID NO: 33794 - protein, 141 aa, Homo sapiens
GKAEKPGFSSARRKIPATWMRLYRSPRLTTTFLIWFQPWMLLPGVSIRDFRDSSELLPSNARFCLTTQKSLPRCLVVLGKAQQVVEVDNQVPRRHFSLPPGGAVGQTHPGIIHKWSIKAWGGPGFLGLLNGVGVCGYTRSL

SEQ ID NO: 33795 - protein, 164 aa, Homo sapiens
  misc_feature (1)...(164): Xaa = X or * as defined in Table 2
MDESSFRGSITQSGSAKTAGLTGFCKLCKTSSWHTGAAQILEGGMEKANSPQYADPQTHLSWHTLPPGSQATSANESNVNFLSLPDTNSPEIRPDHSPPVPDRSVSPLEHIPRTFPKPGTGPPHINTVTNPSAGAPRXEXPSXSGFNPGCFQLVRPSRISGTPV

SEQ ID NO: 33796 - protein, 146 aa, Homo sapiens
  misc_feature (1)...(146): Xaa = X or * as defined in Table 2
KREGWKEESDFWDGSHLPPLNSRCSTRKGRKTGRCGAATAAASSPREGRRPPPSWAGHPCLGSCQWLRSCRRGLAMAPGALPALGEEEGPGASGLSAELRASERGLGQGLGPAALHSXASPTPWAPVRPEPPRRAPPPAPWRPVPL

SEQ ID NO: 33797 - protein, 332 aa, Homo sapiens
  misc_feature (1)...(332): Xaa = X or * as defined in Table 2
STQTWPVSEETGSPPQRNRCXSSHQPDTASWVLQREYSHRKGTAPRGMQGTLPLCPSLSGCRSPSCPAAARPPRPRAVRFPPPATAAASSPREGRRPPPSWRRPSLPRGLPVASELPEGLAMAPGVLPALFGSTLPLXAVTPHXECLPASLLKPARPXTHREKXTTPDVQPXELXHSPXRSAASLQEGPQLHSXSQXDQEPTNSGHTYTLGTGRXFYTVCQFLWLGXTYRSSHRPGFACRCLEPGSAAPCPSHCLSAGPEGTLXAACLGKVPGRSAPRSDQWSPGGRAPRGVPPPPLSRGHCKALASCAPSADAREPPHRALLGSPKVHTPG

SEQ ID NO: 33798 - protein, 206 aa, Homo sapiens
  misc_feature (1)...(206): Xaa = X or * as defined in Table 2
GSDRLQPQPLLFGRDVLLLLPSGPAIPASGLASVFGAAGRAGHGSGGSAXTWGRGRTRRERPLGGAGASEPGSVGPRGAGWVSGPVRAPPRAAPGTLAPSSGRCRAPPPRRAQACVALTCPGPGGRCPLPMDRPALAMPSHLHPRPGQVAPRWSPCSRRREEKGRHERVDIGHSHLVFALTLFLPXFGGGGKTEAAQNSWRIPPAG

SEQ ID NO: 33799 - protein, 362 aa, Homo sapiens
  DOMAIN (118)..(171): Granulins proteins domain identified by eMATRIX, accession number BL00799F, p-value=1.078e-09, raw score of 13.26
  misc_feature (1)...(362): Xaa = X or * as defined in Table 2
LLKMFRAKAACLTSMAWVLPPLSLIVLVILSPGSFILQITFTLLEPVLRRPSSAEKPLEPGPSSSPSSGRARGARPALPAAPKPLASPEAGMAVPGWGRRSPSRREEAGAVACLSLTVFSGKWICQQAPSAWGCCCXDXGKLVHRSTXRCARXKYPGLKPDQEGYCQPGAPVEVHPRCRDFPSVLRRNLGFSALAQSEYLWXDHSCVLVVGPVLFCXTLFASFPIRLYPEELLAHKVTQCPSLVSPCNWLSAGGGRKFEPALRRPSSAERPLAPYPSSSPGAGRAPQPWPALPAAPKPLASPEAGMAGPGGRRTTSLPKRRGCGCSRPASSCFSSLSGWAARVERRQMASIPEIALLFPSPL

SEQ ID NO: 33800 - protein, 444 aa, Homo sapiens
  misc_feature (1)...(444): Xaa = X or * as defined in Table 2
FRPAPIPSSAPRGPTEPVLRRPSSAEKPLEPGPSSSPSSGRARGAMASPSSSSEATGKPRGRDGSPRMGVGGRPSRKEEAGAVAGGGKRTARGLRGRGGPAATGQEGDRHPYRWRRQRSGILHEFXAASGFPPPPNHGRHTVQAEPPEPWPALPAAPKPLASPEAGMAGPGGRRTTSLPKRRGCGSCCRGEAHSPTTARTGEDAPRPGREETGTQTGGDRRGAARGSPRSPWACIRAPLPSLGVAPGVPSGRLAHGDILISPCTLPHSELGSPGHXTQANFLXDPGRRRTVLWKVFQGRSRKGXEGRGPGRGHNYDGSVTPGNFIAXSPSPLPLPPSFTWTLPKTRIPECSGVTKCSGTLGTRVWRPGSWGLHPGSAPPXLRRPSSAEKPLEPGPSSSPSSGRARGAMASPSSSSEATGKPRGRDGSPRMGEEDVPPEKKRLGL

SEQ ID NO: 33801 - protein, 74 aa, Homo sapiens
MDLGLLCSFHRPHPKSRKAPGTPMAPKMATFKSLEVLSTDWTLTKPVFSLHPEPPREIRSTNTEQSTVSLNKWL

SEQ ID NO: 33802 - protein, 155 aa, Homo sapiens
  DOMAIN (35)..(54): Zinc finger domain identified by PFam, accession name zf-NF- X1, E-value=3.7e-05, PFam score of 30.6
  misc_feature (1)...(155): Xaa = X or * as defined in Table 2
MVTTTCYCKKAKPIPRRCSAKEWSCQLPCGQKLLCGQHKCENPCHAGSCQPCPRVSRQKCVCGKKVAERSCASPLWHCDQIKECRSQSCSXRRKTKTTGELEAFENRLKGRRKKNRKRDEVAVELSLWQKHKYYLISVCGVVVVVFAWYITHDVN

SEQ ID NO: 33803 - protein, 147 aa, Homo sapiens
  misc_feature (1)...(147): Xaa = X or * as defined in Table 2
YSLVEFHTLVLQKSDVEAVFSKYCFIVGCSVHKGFAFVXYVNERNARAAVGGMYSSSFDLDHDFQRDYYDRMYSYPAHVPPPPIARAVVPSKCQHVSGNRRGKSGFNSKRGQRGSSKSGKLKGDDLQAIKKELTQIKQKVDSLLENL

SEQ ID NO: 33804 - protein, 25 aa, Homo sapiens
  misc_feature (1)...(25): Xaa = X or * as defined in Table 2
MKNDKSEEEQSSSXGKKDETNVKME

SEQ ID NO: 33805 - protein, 57 aa, Homo sapiens
ETLPSNTMASSSFDLDYDFQRDYYDRMYSYPARVPPPPPIARAVVPSKRQRVSGNTS

SEQ ID NO: 33806 - protein, 113 aa, Homo sapiens
GSRRLRIESLLPSPSCEIFLIFSYIFGFVRNPYHQTRWPARVPPPPPIARAVVPSKRQRVSGNTSRRGKSGFNSKSGQRGSSKSGKLKGDDLQAIKKELTQIKQKVDSLLENL

SEQ ID NO: 33807 - protein, 241 aa, Homo sapiens
MASNVTNKTDPRSMNSRVFIGNLNTLVVKKSDVEAIFSKYGKIVGCSVHKGFAFVHSSFDLDYDFQRDYYDRMYSYPARVPPPPPIARAGSPLETSACIRKHFTKGQKVASILRVDSGDLPSLEKLKGDDLQAIKKELTQIKQKVDSLLENLEKMEKEQSKQAVEMKNDKSEEEQSSSSVKKDETNVKMESEGGADDSAEEGDLLDDDDNEDRGDDQLELIKDDEKEAEEGEDDRDSANGG

SEQ ID NO: 33808 - protein, 313 aa, Homo sapiens
  DOMAIN (57)..(67): Eukaryotic  RNA-binding region RNP-1 proteins domain identified by eMATRIX, accession number BL00030B, p-value=8.105e- 09, raw score of 7.03
  DOMAIN (25)..(91): RNA recognition motif. domain identified by PFam, accession name rrm, E-value=1.7e-07, PFam score of 38.3
  misc_feature (1)...(313): Xaa = X or * as defined in Table 2
ETLPSNTMASNVTNKTDPRSMNSRVFIGNLNTLVVKKSDVEAIFSKYGKIVGCSVHKGFAFVQYVNERNARGAVAGEDGRMIAGQVLDINPGLQSPKVNRGKARCETDLQAEMYGLLFXPWTYDFQRDYYDRMYSYPARVPPPPPIARAVVPSKRQRVSGNTSRRGKSGFNSKSGQRGSSKSGKLKGDDLQAIKKELTQIKQKVDSLLENLEKIEKEQSKQAVEMKKXXSQKEEQSSQLRXKKDETXCXRLEVLKGGADDSAXGRGDLLDDDDNXRSGGIDQLELIKDDEKEAEEGEDDRGQRPMGGDDSLST

SEQ ID NO: 33809 - protein, 44 aa, Homo sapiens
MCLGFLEDTVQVEGKTIKNLKLYFKTFLPTPLLLYIFFTILYTF

SEQ ID NO: 33810 - protein, 1016 aa, Homo sapiens
  misc_feature (1)...(1016): Xaa = X or * as defined in Table 2
MGLMVLNVENCSSFGWIGRAPPRNTTVDLNSGNIDVPPNMTSWASFHNGVAAGLKIAPASQIDSAWIVYNKPKHAELANEYAGFLVALGLNGYLTKLATFNIHDYLTKGHEMTSIGLLLGVSAAKLGTMDMSITRLLSIRIPALLPPTSTELDVPHNVQVAAVVGIGLVYQGTAHRHTAEGPVGLRXDGLLFLKCNTALTGSHTPXAAGLALGMVCLGEQGPCCGVWEELGERETFKDLIFNRKAPEGSNATSCAFISLILYRSIRGTVPHSWLLPLGSLSQQQPQPGMRTPPGLEGGGNSVRMQATLRDQDSKGYGSSRRAAVPTGCSILKLPRGSPECKLTALCGAGRLWLAGAICPDFAAKTGPGPSRQDAQPIGLQLSCCTASPFWSSLLSTPNRETMSPSQPPSPLSAPDVVEDHRALVGSHSEYQRKKIHASGRRKEKVILKYARAFNDKEKILGRARGEKYLTYRRTKVKPIWAESRKEEPTAEKEGEDLDRGERQPAGPNGCLGKGEGTPGPLGRPPGPEMEYCTDRESYSLAAGLALGMVCLGHGSNLIGMSDLNVPEQLYQYMVGGRRRFQTGMHREKHKSPSYQIKEGDTINVDVTCPGATLALAMIYLKTNNRDLKLGPYVDHYYRDYPTLVRTTGQVCTIDPGQTGFMHHPSFFTSEPPSIYQWVSSCLKGEGMPPYPYLPGICERSRLVVLSIALYILGDESSVSDECLTVFNQNNCRIHFKRFGNSSLWNCSSHQRCNLSLSXAACLRLARSCLSLDWTSGSFQAGLRRKHYPKGSLLSLPSGTHLFRSTKSKVDQKAHSTDNRYHLQALRHLYVLAAEPRLLVPVDVDTNTPCYALLEVTYKIKVKGPRYWELLIDLSKGTQHLKTVASCRPEIYTCNNNAQPSPPSISRTVASCRPEIYTCNNNAQPSPPSISRTVASCRPEIYTCNNNAQPSPPSISRTVASCRPEIYTCNNNAQPSPPSISRTVASCRPEIYTCNNNAQPSPPSIFPYLFSNNSSFW

SEQ ID NO: 33811 - protein, 83 aa, Homo sapiens
  misc_feature (1)...(83): Xaa = X or * as defined in Table 2
AAAERGAEEASGGAPPGILEDAGRERRGSGGGRXAGPVGDSKDGVGAVXPPQPHSHRDHHQXPGPLGGPGCSGXPHLREGLET

SEQ ID NO: 33812 - protein, 61 aa, Homo sapiens
MCMNHLPKCLLLSRCAYRMLPLLFLLGRLTPVPSPLSSDKVIYNLHLQFIVFTSIKFSATP

SEQ ID NO: 33813 - protein, 275 aa, Homo sapiens
  DOMAIN (137)..(181): Synapsins proteins domain identified by eMATRIX, accession number BL00415N, p-value=4.286e-11, raw score of 4.29
  misc_feature (1)...(275): Xaa = X or * as defined in Table 2
RGEEAVSGKAGPDSPRAVLRGQGQVWGAAAERGAEEASGGGTQGEGGREVFDSXGTCSLGFPSXPGEQLMGLVYTLGGXPHSHRDHHQXPGPLGGHGCSGXPHLRWVPVSALGGRGVGADQLVRVAQGSPETPCSLSGESWPAGLPGPTPPGWQXXPGPXRAPGLQKAPKGPSYQQGPAPPSHRQSTAQRGVRPRTKRCPSLGCGDLSLLSLAVPVAQPAPRCAYRMLPLLFLLGRLTPVPSPLSSDKVIYNLHLQFIVFTSIKFSATPFKKKKK

SEQ ID NO: 33814 - protein, 86 aa, Homo sapiens
  misc_feature (1)...(86): Xaa = X or * as defined in Table 2
LCWLQIHRQGRKPCSPPSLKGXXATCMPPRRRKGGFLSSVSMDIITHSPGNEKIKMPPPTMSKQPGVLQQDCREKLSHCLVCSSLG

SEQ ID NO: 33815 - protein, 535 aa, Homo sapiens
  misc_feature (1)...(535): Xaa = X or * as defined in Table 2
RAPETPRKILGEAGGCRGDGDRPAFQPVRNSRPFLSKLLGQCGRSTLCRLCFRSLNHLFWLFPGPGWRGPGGHSTEDGSLQGKAGQDFSCXNLEISFFPXPSPTCSPTLHCGQKPRAGQGHLHSVPGAPCWAEVPALLPRRVGDPGPDILPPSTRVXRCPLDRNSPILLXVHFLKDRATTQNTARPPMGWRPLQQSRQISPAVGGKLCSLPVMIXASPHPSASVVGETPAXIGGWGWPXGFQLIGLPHVRGTQPGLLESRVPSVRGTQPGLPGLPESRVPSVRRTQPGLLESRVPSVRGTQPGLPGLPESRVPSVRRTQPGLPDARVPYVRGTQPGLPGLPESRVPYVRRTQPGLPDARVPYVRGTQPGLPGFRPSRVPRSFCEGDAAGPPRRPRSYVRGTQPGLPAFPSPAFLVRVPSLRGTQPGLPGLPESRVPSVRRTQPGLPDARVPSVRGTQPGLPGLPESRVPSVRGTQPGLPDARVPYVRGTQPGLPGLPESRVPYVRGTQSSLPGLPGVPRSFREGDVAGPPRVPRS

SEQ ID NO: 33816 - protein, 50 aa, Homo sapiens; identical to SEQ ID NO: 33694
  misc_feature (1)...(50): Xaa = X or * as defined in Table 2

SEQ ID NO: 33817 - protein, 1485 aa, Homo sapiens
  DOMAIN (715)..(730): DOPAMINE D4 RECEPTOR SIGNATURE domain identified by eMATRIX, accession number PR00569D, p-value=7.411e-09, raw score of 8.94
  DOMAIN (299)..(408): ARID DNA binding domain identified by PFam, accession name ARID, E-value=4.8e-43, PFam score of 156.4
PSPGGQMHAGISSFQQSNSSGTYGPQMSQYGPQGNYSRPPAYSGVPSASYSGPGPGMGISANNQMHGQGPSQPCGAVPLGRMPSAGMQNRPFPGNMSSMTPSSPGMSQQGGPGMGPPMPTVNRKAQEAAAAVMQAAANSAQSRQGSFPGMNQSGLMASSSPYSQPMNNSSSLMNTQAPPYSMAPAMVNSSAASVGLADMMSPGESKLPLPLKADGKEEGTPQPESKSKDSYSSQGISQPPTPGNLPVPSPMSPSSASISSFHGDESDSISSPGWPKTPSSPKSSSSTTTGEKITKVYELGNEPERKLWVDRYLTFMEERGSPVSSLPAVGKKPLDLFRLYVCVKEIGGLAQVNKNKKWRELATNLNVGTSSSAASSLKKQYIQYLFAFECKIERGEEPPPEVFSTGDTKKQPKLQPPSPANSGSLQGPQTPQSTGSNSMAEVPGDLKPPTPASTPHGQMTPMQGGRSSTISVHDPFSDVSDSSFPKRNSMTPNAPYQQGMSMPDVMGRMPYEPNKDPFGGMRKVPGSSEPFMTQGQMPNSSMQDMYNQSPSGAMSNLGMGQRQQFPYGASYDRRHEPYGQQYPGQGPPSGQPPYGGHQPGLYPQQPNYKRHMDGMYGPPAKRHEGDMYNMQYSSQQQEMYNQYGGSYSGPDRRPIQGQYPYPYSRERMQGPGQIQTHGIPLQMMGGPLQSSSSEGPQQNMWAARNDMPYPYQNRQGPGGPTQAPPYPGMNRTDDMMVPDQRINHESQWPSHVSQRQPYMSSSASMQPITRPPQPSYQTPPSLPNHISRAPSPASFQRSLENRMSPSKSPFLPSMKMQKVMPTVPTSQVTGPPPQPPPIRREITFPPGSVEASQPVLKQRRKITSKDIVTPEAWRVMMSLKSGLLAESTWALDTINILLYDDSTVATFNLSQLSGFLELLVEYFRKCLIDIFGILMEYEVGDPSQKALDHNAARKDDSQSLADDSGKEEEDAECIDDDEEDEEDEEEDSEKTESDEKSSIALTAPDAAADPKEKPKQASKFDKLPIKIVKKNNLFVVDRSDKLGRVQEFNSGLLHWQLGGGDTTEHIQTHFESKMEIPPRRRPPPPLSSAGRKKEQEGKGDSEEQQEKSIIATIDDVLSARPGALPEDANPGPQTESSKFPFGIQQAKSHRNIKLLEDEPRSRDETPLCTIAHWQDSLAKRCICVSNIVRSLSFVPGNDAEMSKHPGLVLILGKLILLHHEHPERKRAPQTYEKEEDEDKGVACSKDEWWWDCLEVLRDNTLVTLANISGQLDLSAYTESICLPILDGLLHWMVCPSAEAQDPFPTVGPNSVLSPQRLVLETLCKLSIQDNNVDLILATPPFSRQEKFYATLVRYVGDRKNPVCREMSMALLSNLAQGDALAARAIAVQKGSIGNLISFLEDGVTMAQYQQSQHNLMHMQPPPLEPPSVDMMCRAAKALLAMARVDENRSEFLLHEGRLLDISISAVLNSLVASVICDVLFQIGQL

SEQ ID NO: 33818 - protein, 770 aa, Homo sapiens
  DOMAIN (73)..(88): HISTONE H3 SIGNATURE domain identified by eMATRIX, accession number PR00622A, p-value=1.000e-08, raw score of 6.52
  misc_feature (1)...(770): Xaa = X or * as defined in Table 2
MTECLDRFIDSIAAVPRSTKSTVQKCLPCLSDGEDKIPDLIAITWTPRQGELLEKNVISETGTLLPTPCLDTSTKETADKSTSGKTIHQSIKTVLKDLSGSIDDLPTGTEATLSSAVSASGSTSSQGDQSNPAQSPFSPHASPHLSSIPGGPSPSPVGSPVGSNQSRSGPISPASIPGQDPGYGNSDKSMGHEYSQRSFLEDRFPIAVWWPRPLRLKNCLSVLSYSSPSEVTPHPKSESSGTSSAAQDLQGCSQDVGQPASSSGGSTREQSTSSFIRIVAASSPSSCWKLQVLLSGAGGDYSPVLLIGGYSRVCLPQXSDASAATREPGQNPVPIPPXASHQCHRKEGPPCRQQAGASQMLSRDXAKQLKPSSSHTLSKHKTTGTRKSLLFGIKKAYNFTNKYYSELMTQTRPQSTPSIPSPLPLDDAGLERSQGNVSASSFMVLGNRERGEDTTGAGFGRSRNKEEVPCTIYVGAESPEMCXWMDHTXRKEGKGGLVGVPCVSREHLEEWQYQLQRXISLKTQQVXRRKSEVLLGRSSNTAQACSCWQLTCFMAGTQRNPQMAQYGPQQTGPSMSPHPSPGGQMHAGISSFQQSNSSGTYGPQMSQYGPQDGGGDVSDVVMAIDDDGSCHLLGSAVPGAVLVTFNLLLIIVVTLQMTEPQFREYITGDPLESTCRHASLALAVVLHQETAMTMITDSLAVVPHSGNSYDHWPSFYKQETAMTTGRRFTPGNSCDLDYEFELGNSYDLLAVVLHQETAMPTGRRLTGQET

SEQ ID NO: 33819 - protein, 476 aa, Homo sapiens
  DOMAIN (331)..(375): Synapsins proteins domain identified by eMATRIX, accession number BL00415N, p-value=3.365e-09, raw score of 4.29
  misc_feature (1)...(476): Xaa = X or * as defined in Table 2
EEPSRREPRPPGHAPGAVAGGAGPMARAGARGLLGGRRPPGLRLCARASARVAAGCGRRRAAREPPRRRVPRRPARQPRRGATAAAATTTXWASGTRPSTAAPEPTASAAARRLPLLLPRRAAAPRPEPLFQLRHAGLGPDRPAARPRPRHRSAPGPRPRAQPYGRLRCVRRRSAAGDGGEPGLAFDEVGDRGPPLTAVPAGADRASEAAGPPGATASHPGPTERXQRGRSEPGHRTEPRLTPRSRQEAPQQRAPGVGRPGAPARPAAAGRRDPLSSPELGCSARRHSSLPCPRRGRPAGLRQRFPALEPSPRQPPARAPRHPRTCLRRWTPAPGPRRSTRPLPRRAPMPPGPPVARPGPPPLSHPTARAFHGTPATRARGPAPVQCEDAXDLQPAAPRPLRQRGPRVPVPKDQXQDRGHRVKRGRGARRGMGWGPVCPSEPQATGRGAPAVRPALLSASTAVVSWSLQAAGSSCK

SEQ ID NO: 33820 - protein, 87 aa, Homo sapiens
  DOMAIN (23)..(77): Kinesin light chain repeat proteins domain identified by eMATRIX, accession number BL01160B, p-value=8.398e-09, raw score of 19.54
ELEAHLEAEEGARQKLQLEKVTTEAKMKKFEEDLLLLEDQNSKLSKERKLLEDRLAEFSSQAAEEEEKVKSLNKLRLKYEATIADME

SEQ ID NO: 33821 - protein, 502 aa, Homo sapiens
  DOMAIN (251)..(286): Troponin domain identified by eMATRIX, accession number PF00992A, p-value=2.539e-09, raw score of 16.67
  misc_feature (1)...(502): Xaa = X or * as defined in Table 2
RSYGVRWRRHAPPGRRSSPRIGKVKSASRAWRLRCCGCRRPSRTGMRWQMRWPMVTLARQPFWRRSVSWRGAWGSWRKSWRRSRATRSCSMTATASCSCRLSRIDDISNYEVNLEPGGHDDITSCQGRGRSLPQRAPIGLCCSLGGGAVLADTPLFLPRPKPRDGPGSRAFQKRQQQQSALRVMQRNCAAYLKLRHWQWWRLFTKVKPLLQVTRQDEVLQARAQELQKVQELQQQSAREVGELQGRVAQLEEERARLAEQLRAEAELCAEAEETRGRLAARKQELELVVSELEARVGEEEECSRQMQTEKKRLQQHIQELEAHLEAEEGARQKLQLEKVTTEAKMKKFEEDLLLLEDQNSKLARLGAXGQLGKWGWGALVGXXMVNFTPWGLPHCGSQERKLLEDRLAEFSSQAAEEEEKVKSLNKLRLKYEATIADMEDRLRKEEKGRQELEKLKRRLDGESSELQEQMVEQQQRAEELRAQLGRKEEELQAALARRQRFQ

SEQ ID NO: 33822 - protein, 86 aa, Homo sapiens
  misc_feature (1)...(86): Xaa = X or * as defined in Table 2
KMRRLIKSKKDINRERQKSLSLTPTRSDSGEGFLQLPHQDSQDSTSVGTNSXEDGQTQHPRPIXDAQSSVCCAGSQHGMXANHSQE

SEQ ID NO: 33823 - protein, 81 aa, Homo sapiens
  DOMAIN (15)..(23): RECEPTOR CHAIN PRECURSOR TRANSME domain identified by eMATRIX, accession number PD02382C, p-value=3.647e-09, raw score of 6.00
  misc_feature (1)...(81): Xaa = X or * as defined in Table 2
MAAHRKHVFVEKVLQRLFPPVPSGQGKREPQTLAVQNPPKKVTSEKVSQKHAEPLTDTGSETPTARRLYTASGPPEGYVPX

SEQ ID NO: 33824 - protein, 496 aa, Homo sapiens
  misc_feature (1)...(496): Xaa = X or * as defined in Table 2
SRLHKLCNKPRRSGTTNAKRVGPDCHPMGREGARXHHALRGRRGEAGTRGGRQRRREQDWREAGPGPRAEVGRTAASARRARGSAPGPRGPSRGRSRWNTGQPRRNRGRGAERPRMQRSRPENGARGTGAGLRGFQPRRHPGFPSRVXGSKDIPAARRRVETCPGPEPRPQPQLPPRPWKGGGDARGDPKFPQAPNAVPGFCVIPAGGVLGAPTAAGLRPTGDVALRRPAGSVEPSGSAGSQSQCLLCGPVPYRQQTSTGPXPGGWGSPSDVPCSALISGTGCPKAQHVSGSLSQRSLSLVDFGRPASRGSLFPWPLGTGGKSPAAPSPQTLWQSSPGFLYFPGERKGKGXSGPGAGCEPPIAVGCQEQPRGAEGNLPPKPADPCAGTKQPRAQRGVQQGTSQXPSTVVMTSGRGAHSRGGPVRRGAHSREVPAAVHGGDGLLVEGHTAGRVQQPSTGGXPLVEGPPAGEGPFAEGHTAGRSSQLSTVLTTFLPHR

SEQ ID NO: 33825 - protein, 130 aa, Homo sapiens
  DOMAIN (97)..(105): FLAVOPROTEIN PYRIDINE NUCLEOTIDE CYTOCHROME REDUCTASE SIGNATURE domain identified by eMATRIX, accession number PR00371B, p-value=6.500e-09, raw score of 5.99
  DOMAIN (1)..(130): FAD binding domain identified by PFam, accession name FAD_binding, E-value=8e-64, PFam score of 225.4
GSYWVSDKRLPPCSLSQALTYFLDITTPPTQLLLQKLAQVATEEPERQRLEALCQPSEYSKWKFTNSPTFLEVLEEFPSLRVSAGFLLSQLPILKPRFYSISSSRDHTPTEIHLTVAVVTYHTRDGQGPL

SEQ ID NO: 33826 - protein, 315 aa, Homo sapiens
  DOMAIN (177)..(197): FLAVOPROTEIN PYRIDINE NUCLEOTIDE CYTOCHROME REDUCTASE SIGNATURE domain identified by eMATRIX, accession number PR00371D, p-value=8.500e-15, raw score of 14.55
  DOMAIN (68)..(134): FAD binding domain identified by PFam, accession name FAD_binding, E-value=1.1e-28, PFam score of 108.7
  misc_feature (1)...(315): Xaa = X or * as defined in Table 2
VYRTEFLQDRNYFFLSLVVSAPRTVPGTWTCLLSEXRNEXILGCDSLFPKAGQAPXVAHITLGFQSSEYSKWKFTNSPTFLELLEEFPSLQVSAGFLLSLLPILKPRFYSISSSQDHTPTAIHLTVAVLMYHTRGLQPARATLMSTHSSSHPEGPLPAAVSGAQCASGFRLPEDPSHPRVLIGPGTGIPPFLSFWQQRLHDSQQKGVAGGFPGVQGGRMTPVFECRSPNEDHIYQEEMLEMARKGVLPAVPTAYSCLPGKPKVCVQDILQQQLASEVLRVLHKEPGHLYVCRAVCMAWDVAHTLKQLVAAXLNLN

SEQ ID NO: 33827 - protein, 62 aa, Homo sapiens
GSEPFVHSEIGLVSPLGPGLQTIKENSKRSPANIYRWPWTSATFRETCHVLGGLRHRVRPMG

SEQ ID NO: 33828 - protein, 302 aa, Homo sapiens
  misc_feature (1)...(302): Xaa = X or * as defined in Table 2
TACGFIACIGXQRLEYCYXDHKGKQQEVLSKHLQMAMDISHIRRNVSCSGRNKASSKAYGTGGSQGRACDLGHNFTTPSSWERHCTLTSQGVDDFLNAKATFKIFDFSDAFVLSKVGFSGILIQKDENKEELSDKDIYMEAGIFVSANRGPGVDYCGNRGLSIQGHGGWTLRPSILVSPGVEVRGNEDSVDTAACIPAAPAPAPTLAERCTGTAWVTASEGASYRPWLLLHSVKPVSPHSTSLETWEPPYIFQKMYENAWCPDRRLPKKQSLMGNLYLGSAEGKYGVGAPTLETTIMQTPDS

SEQ ID NO: 33829 - protein, 126 aa, Homo sapiens
  misc_feature (1)...(126): Xaa = X or * as defined in Table 2
TADCAKPVPLAVVSLDSRYGQWESRSSIHARHXLNSSSSSSSSSSSSPPAVYPRFIEFIHFDIQSTGQKSHRVNTRRGPRDALFXLNSLIPLVRTSSKSAARRRPGEAPRGTAVPGADPAGGTRPR

SEQ ID NO: 33830 - protein, 46 aa, Homo sapiens
FILLISLLIWSSLLPASPPLMSLHRARLASSSTGSSFPADSAKPSC

SEQ ID NO: 33831 - protein, 97 aa, Homo sapiens
  misc_feature (1)...(97): Xaa = X or * as defined in Table 2
WYFPAGRAGPADPGPGPLAGTPGAGAGGLPTYSTPLRVSSPVPRLESSSTGSSFPADSAKPVPLAVVSLDSTRRDSGNSRSFHSWGVINXMTRHLVH

SEQ ID NO: 33832 - protein, 115 aa, Homo sapiens
  misc_feature (1)...(115): Xaa = X or * as defined in Table 2
TGRGCCLPCTWRIRAQTCLTXTQCCSCPTTYPGGGERRERERKRRGEKEKQKVLRKYKEAMSNKVCKYFDEGCGSCPFGENCFYKHVYPDGRREKPQRQKVGTSSRYWAQRSNHF

SEQ ID NO: 33833 - protein, 164 aa, Homo sapiens
  misc_feature (1)...(164): Xaa = X or * as defined in Table 2
HSSTCECTXDSRCGCKWRSAKQFESKIIKSCPECRITSNFVIPSEYWVEEKEEKQKLILKYKEAMSNKACRYFDEGRGSCPFGGNCFYKHAYPDGRREEPQRQKVGTSSRYRAQRRNHFWELIEERENSNPFDNDEEEALSPFELGEMLLMLLAAGGDDELTDS

SEQ ID NO: 33834 - protein, 95 aa, Homo sapiens
  DOMAIN (64)..(88): HMW KININOGEN SIGNATURE domain identified by eMATRIX, accession number PR00334B, p-value=3.829e-09, raw score of 8.69
  misc_feature (1)...(95): Xaa = X or * as defined in Table 2
RRVGCRCFHPSQTGTCTXRPPWNVHHXPATCHLAYNRHSWSPHRAHWHIATAIQLSAHVFACHYQQLHHYHQHHHHHHHYRHHHHHHHHHYCHHH

SEQ ID NO: 33835 - protein, 446 aa, Homo sapiens
  DOMAIN (227)..(266): Integrase Zinc binding domain identified by PFam, accession name Integrase_Zn, E-value=2.8e-07, PFam score of 28.8
  misc_feature (1)...(446): Xaa = X or * as defined in Table 2
MQLQILTIFLDLHHNTNICNELESSNVDDPCDIWEKVHISLIFTAKGSKIPKSSDFQADRELNMFDIISQYDGCPGSIGLTSGAGSTHHRAPWTQTYPQGPTHLSGSPGCILASITGRVTKMPESSESPAWELPRFTELFLSIKDEWTCIFLQLCCPTMLLSGFPPIRIEPWSPLSDQLNPIPLEAAIATHSRIHHCPLVFTASLPGPLTAGNQMADRLVATAVSNARHFHNLTHVNASGLKCRYSNTWKAAKAIIQRRPTCQKRKIKPDQEQPVQPVXAEGVRFWREDHXPSHIRSRHSRMTSVSRRQSTWWLPSVTWTCPTTEALEYGSGACLGCPISGVSKGNKTRSGAAGFHSPAFKSALCIWRFKQQHANRPYVCWGMEHRSPYSLLPRSSSSSHPQIHGNLDSDDLQVQRGECFICRPCFHRLRSVPDTDTQCPQPRVRG

SEQ ID NO: 33836 - protein, 385 aa, Homo sapiens
MTKSLGLGLRTAHKHATLKSLQVQRTLSQNPAGESGDAALGFCGERDKMPGRPDARSNGVLEKPPNPTWRLRLSAPGLWGEEGAEGDICMFSVQLLDMRCTIFELKDQTAPAAYLTLPQNSLSSLGDQQPQSFSASPAAAQVTSQTGGRGEVCKQRGRVEPPSKFPPWASDESQTEVQDVASGLLSVCEMGAGTRAELETQTGSEQDWEDYRLPSSGHRSWLLRPMILGNRFVPVTSVLFDLHFHRNSQFYHIITVIMFAQYCDYYKGSRTLESCSSRSISSSICLPRPLPPASVAPCSVSSCRECLQGHSSLTHPRPQQAPLATAVLGTVSSKPGKAASGDRCQPSWLSDLHQPGLQNSIEKQWMCSISGAYQGLLLNCYRARV

SEQ ID NO: 33837 - protein, 111 aa, Homo sapiens
SSGPCSKQSLGLGLRTAHKHATLKSLQVQRTLSQNPAGESGDAALGFCGERDKMPGRPGEWSSTSLWVETSENMLGILIPGDSRHLLWQYREQAKGSIHGGDIFCQRLFLV

SEQ ID NO: 33838 - protein, 73 aa, Homo sapiens
  misc_feature (1)...(73): Xaa = X or * as defined in Table 2
PCASRTPVSSPWPVXPQPTSARRSPRCLPMVQXAARASHDSQLCSCRFCVVVTPCAPQGQTCTRQVCARVTHG

SEQ ID NO: 33839 - protein, 170 aa, Homo sapiens
  misc_feature (1)...(170): Xaa = X or * as defined in Table 2
SFSSKIVQRMSSSCTENMHMSPSAPSSPQRPGALSLSRPSGVGGLLKDPIAPCSRRLPGILSLSPQNPRAASPDSPAGFWDSVLCTCRLLRVACLCAVRSPRPRLCTRSCKGRGSSMVRXGGGLPIFSSSFSATSLQLSSETVARVTPADECPAESPLPSHGPVSCQGIT

SEQ ID NO: 33840 - protein, 80 aa, Homo sapiens
  misc_feature (1)...(80): Xaa = X or * as defined in Table 2
KSNMSLLMVFSISSGITVTMCSSWGHLQCRQIFLSLEGLMKTSRSGPWAVLRGWFSHTXALDEDAALGHPWASTRKQAPS

SEQ ID NO: 33841 - protein, 336 aa, Homo sapiens
  misc_feature (1)...(336): Xaa = X or * as defined in Table 2
SPSGPSSSHQPPALKGQVLQCLLSPXISLRLNLHLWDVYLVEGEQVLMPMACTAFKVXWSKSTCAQWHWAFLLCLFFLLFLLDSKKDNRPPVLRAGAQCMCTAHVEVLPDPSVFLSAKPRQGSSAARAVLASRGRKALCSGIHVPTPSGLGCGGPLVPXXFQTELLSSCPFXMCPGQPSCPAIPDTLENAVQEEAGPVKAMREKGEHGIPAAQPASSSPGSLVPTCGTVSPSQGTIRRPRGAWPRPQPRLTPLLSAPPWMRHLHRSLWVGTISQEDQLATCWQANHTVEGAEIGFHCTKPQCGRGFAGPQGLGSATSTWNVLSSLQASRSIWDTAH

SEQ ID NO: 33842 - protein, 519 aa, Homo sapiens
  misc_feature (1)...(519): Xaa = X or * as defined in Table 2
MSRISDDCSELCPLKAIKKERRKEKKQEKWETYREREKRQRGQRRRNGERKKRKNTKKRXNAGREGEKKRQKGKTEERKRRGGRRRRETKEEGGSXRNKKQAXSEEKKGRTGKNRKERRKEEGREKERKREKDRRGGRQKNKTRERDWGGEQQKTEREEEWARKRWKVPGGWEREAPHRELEKNEQLDKHSSSRAKLYDAGQLDLCSNLIQSCDPECPMQATSLTRYPTTTQIFLRGAQGWVCVELFRSYGVEDTSAWERDMRNFGCMTREKQGKPGQLLAHRHLCAHQKMSLLCADNSQKGCLSPANAAPCYGVQVAILTSAPTCPYHLEPLCRSFSLSDQQEAISDPRTAVRIARSGASSNPRLCVTLTFPRVLQPFPHPPQRWGEATKGGRLPAKGSPARTAAGRCGRSAGMPPDARAIFTSAAALPKSRLVPSNIAFKGKRKDLSTKAAAPNLLALRYPRPSAPVGGSHAPSPGQQLQPEEEGNEEEEEEEEGDRAPVFTTGRKDRDSLAEFSHT

SEQ ID NO: 33843 - protein, 175 aa, Homo sapiens
  DOMAIN (32)..(86): TRANSMEMBRANE COTRANSPORTER SYMP domain identified by eMATRIX, accession number PD01941A, p-value=8.102e-09, raw score of 14.81
MPRPASARARCAHTLACAHCLALPSEMNPVPQMEMQKSPSSASLTLGAVDRSCSYSAILAPPQDFLGDSIGSVYSFGNLVESSMVNGGLTSQTKENGLSTSQQVPAQRKKLLRAPTLAELDSSESEARSGCTDWVLEWTLDLAGHQRILPLMRGADSVISRSLPVPKRGSFAPEA
